United States Patent Application Publication US 2012/0017338 A1 - sequence listing, part 12

SEQ ID NO: 45156 - protein, 242 aa, Zea mays
  Coding DNA Sequence Number=SeqID_3377
  Gene Ontology: Mol. function=protein serine/threonine kinase activity; Cellular component=nucleus; Biological process=protein amino acid phosphorylation
  Homolog annotation: Hit_ID=Q69L76; Match level="QueryCoverage=93%, HitCoverage=34%, E-value=1e-120, Identity=89%"; Hit description =Cyclin G-associated kinase-like protein
  Pfam annotation: Domain name=Pkinase; Domain location=27-237; Score =1.4; E_value=1.2e-08; Accession=PF00069.15; Description=Protein kinase domain
  Pfam annotation: Domain name=Pkinase_Tyr; Domain location=27-224; Score=-106.2; E_value=5.9e-06; Accession=PF07714.7; Description =Protein tyrosine kinase
  Pfam module annotation: Pfam domain module=Pkinase::Pkinase_Tyr; Domain location=27-237::27-224
MWKLNPFGGKAQSGLDGRTIDVGNLKITVQNAIAQGGFSCVYLACDTVHPSKMYALKHIICNDSESLDLVMKEIQVMNLLKGHPNVVTLVAHDVFDMGRTKEALLVMEFCEKSLVSAMESRGSGYYEEKKVLLIFRDVCNAVFAMHGQSPPIAHRDLKAENVLLGCDGVWKICDFGSTSTNHKCFNKPEEMGIEEDVIRKHTTPAYRPPEMWDLYRREVISEKVDIWCHIIFNINYWAIGEE

SEQ ID NO: 45157 - protein, 414 aa, Zea mays
  Coding DNA Sequence Number=SeqID_3378
  Homolog annotation: Hit_ID=Q7XDI4; Match level="QueryCoverage=69%, HitCoverage=25%, E-value=8e-54, Identity=42%"; Hit description =Expressed protein
  Pfam annotation: Domain name=DUF810; Domain location=2-412; Score= -471.8; E_value=5.5e-05; Accession=PF05664.2; Description=Protein of unknown function (DUF810)
  Pfam annotation: Domain name=MORN; Domain location=363-385; Score =26.3; E_value=0.00011; Accession=PF02493.10; Description=MORN repeat
  Pfam annotation: Domain name=MORN; Domain location=386-408; Score =19.0; E_value=0.017; Accession=PF02493.10; Description=MORN repeat
  Pfam module annotation: Pfam domain module=DUF810::MORN::MORN; Domain location=2-412::363-385::386-408
  Subcellular localization annotation: CTP_CleavageSite=36; ConfidenceScore=5.03e-01
MALPNGTLQVHVKSELSDSSKRRGEQSTVQKRKRVRARFVAGEAGEELTRRRGRDGGEAWTGTAAEPQYVATGQIEPDLAGAALTVLGDVAADAKQEHRDPVYAQVLSSVLGAIHDWSEKRLLDYHEWYGKGMAATGAGAMVIPLSLALSTSKIIAESVPGMGIDLADSELDGIGSFAGNRSGPSSVSSSSYKSPILKKARIESSKIVVCYAKEYFCEALENELGQGNSMVIQRDDDPSETMARLAKDTEQLAQFELENFSPVLKRWHPFPGASAVATLHSCYGVLLKQYVAKATCLTNELVHVLHAAGRLEKALVPMMVEDVADSDDGGRSLVREVVPYDVDSLVARFLRTWIKERLSGDGYAGEWAGGQSHGIGAQTCSDGSTYAGEFKGGVKHGLGCYHFRKRRGEKNDGC

SEQ ID NO: 45158 - protein, 52 aa, Zea mays
  Coding DNA Sequence Number=SeqID_3379
MDLGAEVSDSTFATVSLTHPRASSLGCRSSRAPAADAVHSAAAPELGLGISY

SEQ ID NO: 45159 - protein, 243 aa, Zea mays
  Coding DNA Sequence Number=SeqID_3380
  Gene Ontology: Mol. function=nucleic acid binding; Cellular component= nucleus; Biological process=selenocysteine incorporation
  Homolog annotation: Hit_ID=Q9LEB4; Match level="QueryCoverage=60%, HitCoverage=36%, E-value=6e-54, Identity=68%"; Hit description=RNA Binding Protein 45
  Pfam annotation: Domain name=RRM_1; Domain location=141-213; Score =59.4; E_value=1.2e-14; Accession=PF00076.12; Description=RNA recognition motif. (a.k.a. RRM, RBD, or
  Pfam annotation: Domain name=RRM_1; Domain location=71-122; Score =11.5; E_value=0.012; Accession=PF00076.12; Description=RNA recognition motif. (a.k.a. RRM, RBD, or
  Pfam module annotation: Pfam domain module=RRM_1::RRM_1; Domain location=141-213::71-122
MMQQPPQPQPGMALPPPPQTGGGQPPQWGAIPPPMTQQYGAPPPQQPPAMWGQPPSQAHYGQAPPPQPYYAAPPVQNVKLIRDKNSGQLQGYGFVEFTSRAAAERVLQTYNGQMMPNVDLTFRLNWASAGEKRDDTPDYTIFVGDLAADVTDYLLQETFRVHYPSVKGAKVVTDKLTMRTKGYGFVKFGDPTEQARAMTEMNGMPCSSRPMRIGPAASRKNAGGVVQERGIVVDHFTSRSHYS

SEQ ID NO: 45160 - protein, 149 aa, Zea mays
  Coding DNA Sequence Number=SeqID_3381
MPFSPSFFDCKLPKAAGSASVDPSRQPDAVDPPLWQPDAADPPLLAVSGLSGVGSTRQRPQLPHPHDPPYSRCLPFLVSAVSQSQAGLGTPPTPVPVPVPSDPRAAFSGNLPSTTSSFQTRSRLRPHHPRRRRTRQRGRPMRRWHQPSP

SEQ ID NO: 45161 - protein, 93 aa, Zea mays
  Coding DNA Sequence Number=SeqID_3382
  Homolog annotation: Hit_ID=Q8S918; Match level="QueryCoverage=76%, HitCoverage=9%, E-value=5e-15, Identity=65%"; Hit description=Roc1
PNLLLDNQQLQLLQQQHLLDQIPATTAESGDNMGRGGGGVSDPLLGDEFESKSGSENVDGGVSVDELQDPNQRPSKKKRYHRHTQHQIQELEA

SEQ ID NO: 45162 - protein, 708 aa, Zea mays
  Coding DNA Sequence Number=SeqID_3383
  Gene Ontology: Mol. function=sequence-specific DNA binding; Cellular component=nucleus; Biological process=regulation of transcription, DNA-dependent
  Homolog annotation: Hit_ID=Q9LEE6; Match level="QueryCoverage=99%, HitCoverage=85%, E-value=0.0, Identity=72%"; Hit description=OCL5 protein
  Pfam annotation: Domain name=Homeobox; Domain location=1-43; Score =36.1; E_value=1.2e-07; Accession=PF00046.19; Description=Homeobox domain
  Pfam annotation: Domain name=START; Domain location=192-416; Score =282.7; E_value=6.9e-82; Accession=PF01852.10; Description=START domain
  Pfam module annotation: Pfam domain module=Homeobox::START; Domain location=1-43::192-416
MASFFKECPHPDDKQRKELSRELGLEPLQVKFWFQNKRTQMKNHHERQENSQLRSENEKLRAENMRYKEALSSASCPSCGGPAALGEMSFDEHHLRVENARLREEVDRISSIAAKYVGRPMVPFPVLSSPLAGAGARAPALPPLDMAPPYGAAADMFGGGGVVAAAGAAGAGDLLLRGAAVQSDADKPMIVELAVAAMEELVRMAQLDEPLWNAPAGLDGSAEEETLNEEEYARLFPGGLGPKPYGLNSEASRDSAVVIMTHANLVEILMDVNQYAAVFSSIVSRAATLEVLSTGVAGNYNGALQVMSVEFQVPSPLVPTRESYFVRYCKQNADGTWAVVDVSLDGLRPGAVLKCRRRPSGCLIQEMPNGYSKVTWVEHVEVDDRSVHSIYKLLVSSGLAFGARRWVGTLDRQCERLASVMASNIPTSDIGVITSAEGRKSMLKLAERMVMSFCGGVTASAAHQWTTLSGSGAEDVRVMTRKSVDDPGRPPGIVLNAATSFWLPVPPKRVFDFLRDESSRSEARAHSIPNNFYLFNHERTRSRMHPWDILSNGGVVQEMAHIANGRDHGNCVSLLRVNSTNSNQSSMLILQESCTDMSGSYVIYAPVDVVAMNVVLNGGDPDYVALLPSGFAILPDGPSSGSSSMLQGDGGVGSGGSLLTVAFQILVDSVPTAKISLGSVATVNSLIACTVERIKAAVISGQSNPQQQ

SEQ ID NO: 45163 - protein, 160 aa, Zea mays
  Coding DNA Sequence Number=SeqID_3384
MNRATHELGSGRQAARGSGSEGAREQPGMEEPVPADPQDFLEAKEIRFSCRMDEREESAHIRSTGRFGGTGAFQLFMFARSRTSDRRVWQWACDYLGLMNEPAICLSVLGPSTAQDVIPGDEISDIELALLRNEAILYYSASQQACLSCRDEWHSMAISL

SEQ ID NO: 45164 - protein, 59 aa, Zea mays
  Coding DNA Sequence Number=SeqID_3385
MEITGIFLLHSKEVLQSLAQPLRKTLNPFVGEGDLLEVNQSSQMTNEVNPFVGEDDLCG

SEQ ID NO: 45165 - protein, 886 aa, Zea mays
  Coding DNA Sequence Number=SeqID_3386
  Gene Ontology: Mol. function=binding; Cellular component =intracellular; Biological process=metabolic process
  Homolog annotation: Hit_ID=Q1T265; Match level="QueryCoverage=90%, HitCoverage=98%, E-value=1e-152, Identity=32%"; Hit description =Tetratricopeptide-like helical
  Pfam annotation: Domain name=PPR; Domain location=115-149; Score =19.1; E_value=0.016; Accession=PF01535.11; Description=PPR repeat
  Pfam annotation: Domain name=PPR; Domain location=185-218; Score =11.4; E_value=0.34; Accession=PF01535.11; Description=PPR repeat
  Pfam annotation: Domain name=PPR; Domain location=219-253; Score =13.9; E_value=0.17; Accession=PF01535.11; Description=PPR repeat
  Pfam annotation: Domain name=PPR; Domain location=326-360; Score =42.8; E_value=1.2e-09; Accession=PF01535.11; Description=PPR repeat
  Pfam annotation: Domain name=PPR; Domain location=361-395; Score =38.7; E_value=2e-08; Accession=PF01535.11; Description=PPR repeat
  Pfam annotation: Domain name=PPR; Domain location=476-510; Score =31.5; E_value=2.9e-06; Accession=PF01535.11; Description=PPR repeat
  Pfam annotation: Domain name=PPR; Domain location=581-615; Score =54.5; E_value=3.5e-13; Accession=PF01535.11; Description=PPR repeat
  Pfam annotation: Domain name=PPR; Domain location=616-650; Score =11.6; E_value=0.31; Accession=PF01535.11; Description=PPR repeat
  Pfam annotation: Domain name=PPR; Domain location=652-686; Score =12.4; E_value=0.25; Accession=PF01535.11; Description=PPR repeat
  Pfam annotation: Domain name=PPR; Domain location=718-752; Score =11.2; E_value=0.35; Accession=PF01535.11; Description=PPR repeat
  Pfam module annotation: Pfam domain module=PPR::PPR::PPR::PPR::PPR::PP R::PPR::PPR::PPR::PPR; Domain location=115-149::185-218::219-253::326- 360::361-395::476-510::581-615::616-650::652-686::718-752
MLFNSPKSAKRIGVQFLSVASADCFGRDVSPTHFASLLKECRSVNTVRQIHQKIIACGLLSYPSSLLSVPLAPLPSHSYVSPKSLGTGVVASYLACGATKDALSVLERVTPSPAVWWNLLVREHIKEGHLDRAIGVSCRMLRAGTKPDHFTLPYALKACGELPSYCCGRALHGLICCNGFESNVFVCNALVAMYSRCGSLEDASLVFDEITRKGIDDVISWNSIVAAHVKGSNPRTALELFSEMSMIVHEKATNERSDIISIVNILPACASLKALPQIKEIHSYAIRNGTFADAFVCNALIDTYAKCGSMNDAVKVFNVMEFKDVVSWNAMVTGYTQSGNFGAAFELFENMRKENIPLDVITWSAVIAGYAQRGCSQEALDAFQQMILDGSEPNSVTIISLLSACASLGALSQGMEIHAYSLKKCLLSLDNDFGGDGDGEDLMVYNALIDMYSKCRSFKAARSIFDSIPRRERNVVTWTVMIGGYAQYGDSNDALKIFSEMISKPYAVAPNAYTISCILMACAHLAALRMGKQIHAYVTRHHEYEPSVYFVANCLIDMYSKCGDVDTARNVFDSMPKRNEVSWTSMMSGYGMHGRGKEALDIFDKMQKAGFVPDDISFLVLLYACSHSGMVDQGLNYFDIMRRDYDVVASAEHYACVIDLLARCGRLDKAWKTIQEMPMEPSAVIWVALLSACRVHSNVELAEYALNKLVNMKAENDGSYTLISNIYANARRWKDVARIRQLMKKSGIKKRPGCSWVQGKKGTASFFVGDRSHPLSPEIYSLLERLIGRIKVMGYVPETNFALHDVDDEEKNNLLSEHSEKLALAYGLLTTSPGCPIRITKNLRVCGDCHSAFTYISKIVDHEIIVRDSSRFHHFKNGSCSCGGYW

SEQ ID NO: 45166 - protein, 72 aa, Zea mays
  Coding DNA Sequence Number=SeqID_3387
KVRFGLETSPIANPGETKEKRHLQYSVWCASDNLSNGYFDFGQCSNVGLTEKSGAPADRKVLELPNGEANGS

SEQ ID NO: 45167 - protein, 150 aa, Zea mays
  Coding DNA Sequence Number=SeqID_3388
MGKSNKRKREPTPPSEDFSDSEYSEEEFSSESEGSPAPVSPPASSDDSDDSQRIAAKVWTYIRAVERSGLEGSDESEYSSDEEDSSNSSEEGGAGDGGDDDDDGGNSDDNDDGGDGDSRGGNGGSEGGNGGSSRGSNSGGSSKGSSKASG

SEQ ID NO: 45168 - protein, 92 aa, Zea mays
  Coding DNA Sequence Number=SeqID_3389
MKRDLNHVMSFVVLSRAQEAKGTSTVIKVEVNVQEPSKTLKRRDLPFKAGAPHDFVKVTPPARTVPSCNLSEDRRPGASKRRVPCMGEDYTV

SEQ ID NO: 45169 - protein, 352 aa, Zea mays
  Coding DNA Sequence Number=SeqID_3390
  Gene Ontology: Mol. function=hydrolase activity; Cellular component =integral to membrane; Biological process=metabolic process
  Homolog annotation: Hit_ID=Q84MH2; Match level="QueryCoverage=98%, HitCoverage=99%, E-value=1e-155, Identity=80%"; Hit description =Putative inosine-uridine preferring nucleoside hydrolase
  Pfam annotation: Domain name=IU_nuc_hydro; Domain location=8-352; Score=238.2; E_value=1.8e-68; Accession=PF01156.9; Description =Inosine-uridine preferring nucleoside hydrolase
MAAVEGTKKKVIIDTDPGIGRSMVLLLVVAFGSQSTNRTEPLFDGADDAMAIFLALRSPELEVLGLTTTFGNVHTALATRNALHLLEAVGRTDIPVAEGSHVTIKKATKLRIASFVHGSDGLGNQDFPPPATKPVDQSAAAFLVEQANLYPGQVSVVALGPLTNLALAVELDPAFPEKIGQIIILGGAYSVNGNVNPAAEANIFGDPDAADIVFTCGADILAVGLNVTHQVVLTDADREKLEQCDSKYARYLCKLMGVYFDYHRDGYFIKGAYLHDPTTVIAAVNPSLLTYTEGVVRVQTVGITKGLTVFDNTKKRYGEITAWSGMPTVKVAVTVDAPAVVELIVQRLMTDD

SEQ ID NO: 45170 - protein, 470 aa, Zea mays
  Coding DNA Sequence Number=SeqID_3391
  Gene Ontology: Mol. function=hydrolase activity, acting on ester bonds; Biological process=lipid metabolic process
  Homolog annotation: Hit_ID=Q2QU40; Match level="QueryCoverage=92%, HitCoverage=95%, E-value=7e-76, Identity=65%"; Hit description=GDSL -motif lipase/hydrolase, putative
  Pfam annotation: Domain name=GRP; Domain location=220-322; Score= -29.2; E_value=0.075; Accession=PF07172.2; Description=Glycine rich protein family
  Pfam annotation: Domain name=Lipase_GDSL; Domain location=38-450; Score=184.3; E_value=3.1e-52; Accession=PF00657.12; Description=GDSL- like LipaseAcylhydrolase
  Pfam module annotation: Pfam domain module=GRP::Lipase_GDSL; Domain location=220-322::38-450
MDEYGRLALTVAVVAAVTTSGAAAWGWQQQPQPLAPCMYVFGDSLVDNGNNNNILSLARANYRPYGIDFYEGPPGRFTNGRTMVDFISDMLRLRPPLLPPYATARPEDLPRGVNFASGASGILPDTGNNLGGHYPFSEQVDHFRAAVSDMGNRSEFRGNATKLADHLGRCIFYVGMGSNDYLNNYFMPDYYDTARRYSPRDYAALLLQGYSTQLTQLHGLGARKFVIAGVGLIGCIPYELARMNDDDSRPSGPNNNQSAASQEDIAISIGIGGGGGGGGVGVGGGGGGGDDWRSPSMPPPYADGGSGNGSGNGNADGGNGNGNSSGSRTGTGTTNPAPAGGGSCNETINSAIDIYNRGLLAMVKRLNNRGGLRGAKLVFLDTVQSGKDLMANAAAHGFAVLDRGCCGVGRNNGQITCLPLQRPCDDRGKYMFWDAFHPTEAAHRIYAAKAFGSNSTAEVYPINISQLAAI

SEQ ID NO: 45171 - protein, 332 aa, Zea mays
  Coding DNA Sequence Number=SeqID_3392
  Homolog annotation: Hit_ID=Q208N4; Match level="QueryCoverage=17%, HitCoverage=10%, E-value=4e-25, Identity=98%"; Hit description =Putative calcium/calmodulin dependent protein kinase
  Pfam annotation: Domain name=Pkinase; Domain location=59-288; Score= -88.3; E_value=0.0027; Accession=PF00069.15; Description=Protein kinase domain
MAPRTLCDDGGSQPPYGSKGTCAIGEQRGYATEILHDHMPCHKIWGSLTINSGSKLSTIRKGQVLFEPRGTESSSHLGRRQAAAGSAASDPDPAAPVFPVWARTPSECLAELGVSADRGLSSEEAAARLQRHYSEFDAAGVVRQIARGLQALHGAGVVHRDLKPENCLFADRGEASTLRIMDFGLSSVCLVWLALALSSTAAYFFPCVVVLLLFPLPSLPLYPTTRALPAKPWIRTMRSAKTSQCSSSATRVADDRVRCLRVDVISGVLSRDNIAMDALAVSQQHPLRFQEAAPPFLHPLRSAEEERKSGHGREELSLCGTKEMDDDGVDEG

SEQ ID NO: 45172 - protein, 439 aa, Zea mays
  Coding DNA Sequence Number=SeqID_3393
  Gene Ontology: Mol. function=sugar porter activity; Cellular component=integral to membrane; Biological process=carbohydrate transport
  Homolog annotation: Hit_ID=Q3ECP7; Match level="QueryCoverage=91%, HitCoverage=88%, E-value=1e-117, Identity=54%"; Hit description =Sugar transporter ERD6-like 5
  Pfam annotation: Domain name=MFS_1; Domain location=43-430; Score =43.4; E_value=7.8e-10; Accession=PF07690.6; Description=Major Facilitator Superfamily
  Pfam annotation: Domain name=Sugar_tr; Domain location=38-436; Score =73.6; E_value=6.1e-19; Accession=PF00083.14; Description=Sugar (and other) transporter
  Pfam module annotation: Pfam domain module=MFS_1::Sugar_tr; Domain location=43-430::38-436
  Subcellular localization annotation: CTP_CleavageSite=40; ConfidenceScore=5.07e-01
MEREGRDAAEKPLLVRVGGSGGSQGGSASSSSVAVVVGCTAIAVAGSFEFGMSIGYSSPTQLGIMRDLRLSLAEYSVFGSILTIGAMLGAIVSGSVADRAGRRGSYWWLDIGRVLIGCGIGILSYVVPVYISEITPKDLRGGFATVNQFMICCGGSLAFVLGTFIAWRTLAIVGVVPCLVQLVGLLLIPESPRWLARFGHPGAFTGALQTLRGHGTDISEEASEIKVWTGQEFKTVVLQLYASCSLANSTVYFVQVFTEKLQRLPKSKMLDLFQKEYIRAVIAGVGLMALQQLGGVNGVLFYASEVFVSAGFSSGNTGTVAMAVVQVPMVGLGVLLMDKAGRRPLLMISAAGTCVGCLLVGLSFLSKEQHWERDLNVLALAGLLVFIGSFSLGMGGIPWVIMSEIFPINMKGSAGSLVTLAPSSSSRPFADSRSCLCIG

SEQ ID NO: 45173 - protein, 216 aa, Zea mays
  Coding DNA Sequence Number=SeqID_3394
  Gene Ontology: Mol. function=DNA binding; Cellular component=nucleus; Biological process=translation
  Homolog annotation: Hit_ID=Q5N738; Match level="QueryCoverage=70%, HitCoverage=43%, E-value=4e-16, Identity=32%"; Hit description =Ribosomal protein-like
MSEQCNAPENSHFVGRTSHCIEVDEACDNPVDIEENDADEVKTEARLIWKPNEDGRVLMNVWYMVRNEAKWMSYNDHSQGKRKEMEKGNPEGGGLEDVDLDRPIGQKAAKRSVLEGKIKSKLRSTNVEELDRFEKIQNNVALNHMKALEMQGKIHRDKIEANKIALQAAKEEKEAKMLETYSNLLKQDTSEMPEDIRTEHVADLKCLRNKLFAEFS

SEQ ID NO: 45174 - protein, 117 aa, Zea mays
  Coding DNA Sequence Number=SeqID_3395
MPPALRRTILLAAAAATTAVLLLWPAACVADDDGTTFPPSAFPFCPTRPAGVSTGPFPWSPPPPSSVAVFPQDPGFLTSDACAVPRLPLLAVFSVLLALAWIIVKLVSLALKVLKSQ

SEQ ID NO: 45175 - protein, 178 aa, Zea mays
  Coding DNA Sequence Number=SeqID_3396
MAGAVPALRRRRVAEPKTDKGWRVAECPNSLSGGRRRTAAHFACTALRLGGCRSWEQSCSCTPPQRRHWPPAPSDLVQASSSAQPPIAAAASSHQWSSAVLRSGPPFSHPAASSSAHRGTKRRQERRSPLPRSQESRSRDQEAGSQEQVWRLQLQPTGYRFALLCLVERDSKIAKYAW

SEQ ID NO: 45176 - protein, 118 aa, Zea mays
  Coding DNA Sequence Number=SeqID_3397
MSKAPSDHAHQTHPTPAPSPRRAPWLVECRLHPWLLGAGRAHHSAPRPALCDSAQVEFLVPRLEQHLNFGVSSAIDPCACATRFGAPRVLVRSNQKPFSRSSVQKDNKEQYSCCDGDA

SEQ ID NO: 45177 - protein, 154 aa, Zea mays
  Coding DNA Sequence Number=SeqID_3398
MDGALLGFRQDPSRTWTNSDTGNKEQQLSRARTTHDLGAEEWSKGRRLWTAGAARRSWGIAMSRELRPSVGERKRSRGAAACDGEQSARARAVGDAVQGRTHGSSARRTRAWAEGAARELRPTAARGKSSRSWSRCAGNRLENEEEQRDSERRD

SEQ ID NO: 45178 - protein, 299 aa, Zea mays
  Coding DNA Sequence Number=SeqID_3399
  Gene Ontology: Mol. function=transporter activity; Cellular component= integral to membrane; Biological process=transport
  Homolog annotation: Hit_ID=Q9ASI1; Match level="QueryCoverage=84%, HitCoverage=90%, E-value=6e-76, Identity=59%"; Hit description =Putative nodulin-26
  Pfam annotation: Domain name=MIP; Domain location=47-257; Score=60.1; E_value=7.4e-15; Accession=PF00230.10; Description=Major intrinsic protein
MAAMMMDSTAEKDLAGDGAAVSGHGQDLERSCHDQEPAAADGASSRGLAIGRFVRELMVEGVASFLLVFWSAVAALMQEMHGTLTFPMVCLVVALTVVFVLCWLGPAHFNPAVTVTFTVFGYLSWTKLPFYVAAQLAGSLLACLSANGVMEPRAEHFYGTVPMAGGDTRLPFLLELVASALLMVVIATAARGSNQTAGGLAIGAAVGALGLVIGPVSGGSMNPIRTLGPAIVLGRYTSVWIYLVAPVAGMLIGALCNRLVRRSDAIIAFLCGAKPRVVAPGQNRAARRWSTCVSALLAG

SEQ ID NO: 45179 - protein, 105 aa, Zea mays
  Coding DNA Sequence Number=SeqID_3400
  Subcellular localization annotation: CTP_CleavageSite=33; ConfidenceScore=5.03e-01
MDMDMGIKTYPWVLSGRPPTPRGPWCIAPSSPMVHAGGSEVDVAPPVELRTFRGRTAPGRRLGRKIAASAPPKICARLDVALRRQLHSQAPATRQLYAQSGSHMN

SEQ ID NO: 45180 - protein, 227 aa, Zea mays
  Coding DNA Sequence Number=SeqID_3401
  Homolog annotation: Hit_ID=Q5WMW4; Match level="QueryCoverage=43%, HitCoverage=13%, E-value=5e-30, Identity=74%"; Hit description =Uknown protein
  Pfam annotation: Domain name=SEC-C; Domain location=115-135; Score =11.1; E_value=0.07; Accession=PF02810.6; Description=SEC-C motif
MAFVRRSLYPWGDNASMDEGVPINKLQATCASEGRGLGKTIQTIAFLSSVIGKGNGHGQLTNKGKMTGPVLILCPTSVIRNWENEFSEWAEFSVAVYHGPIRDLVFGKIETQGLEDVHCSCGSPLPQVECCKRTEPDGVICFLPCSYGVVEVELVLPDSPFASPTKEEASCADAVTAAAARNGSSSSPRHVPCGFTVPFRTRVFHHPRPAPLQLLLLLSGAQVFSWA

SEQ ID NO: 45181 - protein, 388 aa, Zea mays
  Coding DNA Sequence Number=SeqID_3402
  Homolog annotation: Hit_ID=Q9FMU8; Match level="QueryCoverage=54%, HitCoverage=23%, E-value=4e-30, Identity=40%"; Hit description =Arabidopsis thaliana genomic DNA, chromosome 5, P1 clone:MLE2
  Pfam annotation: Domain name=DUF1767; Domain location=175-294; Score =57.9; E_value=3.3e-14; Accession=PF08585.2; Description=Domain of unknown function (DUF1767)
  Subcellular localization annotation: CTP_CleavageSite=39; ConfidenceScore=5.14e-01
MRRRNLIVHSDSDEDDGEGMTTATTPASVSASVASGGVSGSGSVGRPSPQNLSPLPVPFPSLSLSSAPFVISDDDEDVDEIVDPDGDSPIVDAPEVFSPPAPPALHAPAPAPPSPPPPITTPSQTPIPTPPSARTPTPTPPSARTPTPTPPSARTPASIAPPHPSPLSGRLRPVDEFLRRLGLLLRPDWLESCAAGIPGFDGLGGVEAQARRCFEQFLFADMNSCGAGVLPEGVGGMHAEFLDGPFVLQNVLIEKTRCYSNIQVLAMKLLLIGDQNGNVDEVVNISVPLKERYREAPAGPKRCLKLSMTDGIRHIFGMEYRPIKDLTVLAPAGLKIIVRNVHTRRGLLMLVPEAVEILGGVVDELEAARARLVSEVNKPPRGKRYILS

SEQ ID NO: 45182 - protein, 305 aa, Zea mays
  Coding DNA Sequence Number=SeqID_3403
  Homolog annotation: Hit_ID=Q9FMU8; Match level="QueryCoverage=57%, HitCoverage=29%, E-value=8e-34, Identity=42%"; Hit description =Arabidopsis thaliana genomic DNA, chromosome 5, P1 clone:MLE2
MGDVSSTVGDGTTAHNDSHDDAEITDGNAFQVGGATETVVEELVSPLVANRVQEINMQGSYASLTRETTETSMHTTHEYDPTHITEKSTGTVMEERPDPPILANSVHEQMQRVQPANGAQSSNVGKINQMEQSFILSGENEKPFTYIYSMLIDWGRQQDTKAYIQGKIKGLITSVKKFQYKQRTKYELYVYIDDGSFISEAFIDSDIVNNMLGLSPGEVTAALAGELEFASPSEVKETLKGFQKFLVKFEGMMLIELNKNSPVPVVRELNEGCSSSTAWLLLGRLKTISSQKKTIQTQDIMDTTP

SEQ ID NO: 45183 - protein, 225 aa, Zea mays
  Coding DNA Sequence Number=SeqID_3404
  Gene Ontology: Mol. function=carboxyl- and carbamoyltransferase activity; Cellular component=ornithine carbamoyltransferase complex; Biological process=amino acid metabolic process
  Homolog annotation: Hit_ID=Q6QP54; Match level="QueryCoverage=41%, HitCoverage=35%, E-value=2e-19, Identity=77%"; Hit description =Putative kinase
MGWHETEREGGKKPEGDRHTKGKPAAFVFVPRPGRGNDGASCDVVGPSPGLGEVEAPPRSRSSLSSKAEVESEPLGRARRRPSAEAWAESEPWGRAKRTEPESEPWGRAKRSSSSSGAEPESEPWGRAMRSSSSSGAEPESEPWGQAKRSSSSSRAEPESEPWGRAMRSFLWHVWPDLVAVSLTLSSGTAVGAAQAALSSCQAGQWSDEVTTVTSALSTGGRASG

SEQ ID NO: 45184 - protein, 89 aa, Zea mays
  Coding DNA Sequence Number=SeqID_3405
MCQGQSELTFSDSSDKVSNRNIAGKVSNGNIVVTVYGGLPGLRVRTVRLCAEIKIVYSPPLVGVLDPTSIKAEDSIVYGSNHFRVRQNG

SEQ ID NO: 45185 - protein, 691 aa, Zea mays
  Coding DNA Sequence Number=SeqID_3406
  Gene Ontology: Mol. function=nucleotidyltransferase activity; Cellular component=integral to membrane; Biological process=aromatic amino acid family biosynthetic process
  Homolog annotation: Hit_ID=Q6R3K6; Match level="QueryCoverage=94%, HitCoverage=94%, E-value=0.0, Identity=56%"; Hit description=Metal -nicotianamine transporter YSL6
  Pfam annotation: Domain name=OPT; Domain location=39-672; Score =455.3; E_value=7.6e-134; Accession=PF03169.6; Description=OPT oligopeptide transporter protein
  Subcellular localization annotation: CTP_CleavageSite=43; ConfidenceScore=5.25e-01
MTPAETSPPAPPPRASHPVSSPLLLQDPTTQATCPWREQLTVRGVAVAAALGALLCVVIHRLNLTVGVIPALNVASGLLAFFLAAAWRAAAGWLGFGRGPPFTRQENTVIQTCAIACAGLAFSASHDADTSISRRGCSASYIFAMDRKTYELVGPDYPGNRAEDVKDPSLGWMISFLFLIALVGPFSIVLLRKVMVIDYKLAFPGGTATALMINSLHGKTDGDLAGKKLHCLVKYMGISFVWSFFKWFFSGVGDSCGFDNFPTFGLEAFKSTFYFDFSPSYVGFGFISPHIVNCSVFLGSVISWGFLWPFISAQAGHWYPDNLGNSDFRGLYGYKVFIAISIILGDGLYNLVKIFIVIARELCSMQSKQHELPVQALEDDGSCEQLADEKLQTEIFLKDSISPWFAASGYIVLAAISTASVPAIFPQLKWYLVLLCYFFAPVVAFCNSYGMGLTNLNLAPTYGKIALFALASLVGSDGGGVIAGLAACGIVMSVACSTADLMQDLKSGYLTLSSPRSMFTAQLIGIALGCVIAPLTLWLFWTAFDIGDPDGEYKAPFAIMFREMAILGMEGFSALPLHCLDICYAAFFLALATSLLKDVAPANVSRFIPIPIAMAAPFYVGAYFGVDMFIGTAILYAWQKLNREQADGYAVAVASGLICGDGIWSIPSALLSILGAVPPICMSFEASSAPR

SEQ ID NO: 45186 - protein, 105 aa, Zea mays
  Coding DNA Sequence Number=SeqID_3407
  Pfam annotation: Domain name=zf-CCHC; Domain location=85-102; Score =27.5; E_value=2.9e-05; Accession=PF00098.13; Description=Zinc knuckle
MDHEIWSILEKFHEGNDHVKTGYFETRVWKVKVLVIIESPNYETLTVDELFSKLKSIEIDYQTRARLRTLFHNNCQDQWCSRSKDGCFNCGDPDHFVASCPKKGK

SEQ ID NO: 45187 - protein, 56 aa, Zea mays
  Coding DNA Sequence Number=SeqID_3408
MTAAVIRATAVAIHAADDPIRLPEPKILTPYSLNFTVDSGNPKFSEFREGKLYSRL

SEQ ID NO: 45188 - protein, 125 aa, Zea mays
  Coding DNA Sequence Number=SeqID_3409
MAGTRASALVATWAQASRRPEKDKEFVGGVKIRKPGAAIGFESSQGSGLGKNLGAEREDIRPRQPNHQGSSQIRIRACGAEVTQLGAIGYCAENGARRQDLWRRARYHVGATTSVYANAARTTAP

SEQ ID NO: 45189 - protein, 173 aa, Zea mays
  Coding DNA Sequence Number=SeqID_3410
  Subcellular localization annotation: CTP_CleavageSite=71; ConfidenceScore=5.21e-01
MALLPEGITQLLHHKTLPLPLEIKVHFASASSVFDPSSSSTSSPTLRKITPTTFLAMGPSPPRTLPAPGSRCETTFALYDAPATVWSTMVRGHPGPSGVGSSHFGGLLYAACPACEFGARPFSVADQLATAITGQQSPESRGEQQSRAAFHHFFTAPCLCRHSSIAMASSTGV

SEQ ID NO: 45190 - protein, 200 aa, Zea mays
  Coding DNA Sequence Number=SeqID_3411
  Subcellular localization annotation: CTP_CleavageSite=30; ConfidenceScore=5.07e-01
MASGRLPPALAVASPHPTALSRAGLAARVFAALVKHVFNPLPPALVKKEEEGDADANRRTTLLVRLLRMRGATDATRRTNTQAVPDRRGMALLAGHSDSEPITHHDSEPDQRHARPWPVAVLSEEAAAARRGQQEGDEHQGGDGDEGQRHEDALVDGEQAHLPHGRTRSLGNGGAEGPSAASGQAQERCLDARPCPCYSC

SEQ ID NO: 45191 - protein, 122 aa, Zea mays
  Coding DNA Sequence Number=SeqID_3412
  Subcellular localization annotation: CTP_CleavageSite=61; ConfidenceScore=5.50e-01
MAMRVVKIFGTPQGDAPHVRLSRSYPNPLNPILSLRTTPNSSPCMLQREVKGSQSRSRELKDSSVVGTCALGEGELDGGAERGSCRRSRWSKTAARVSSEADAFISISGAGGGIRAEEEAGA

SEQ ID NO: 45192 - protein, 481 aa, Zea mays
  Coding DNA Sequence Number=SeqID_3413
  Gene Ontology: Mol. function=protein serine/threonine kinase activity; Cellular component=membrane; Biological process=protein amino acid phosphorylation
  Homolog annotation: Hit_ID=Q6I5Q6; Match level="QueryCoverage=82%, HitCoverage=85%, E-value=1e-122, Identity=55%"; Hit description =Putative serine/threonine protein kinase
  Pfam annotation: Domain name=Pkinase; Domain location=100-373; Score =160.9; E_value=3.4e-45; Accession=PF00069.15; Description=Protein kinase domain
  Pfam annotation: Domain name=Pkinase_Tyr; Domain location=100-373; Score=151.6; E_value=2.1e-42; Accession=PF07714.7; Description =Protein tyrosine kinase
  Pfam module annotation: Pfam domain module=Pkinase::Pkinase_Tyr; Domain location=100-373::100-373
MPCQVHTRVECTQDRHDQESSSCMQPLVSFLVIAVFLFINTQLYLLVFNGPLTVDYPKSSESSPLKAERVVHMDGAQLIGRHDEATIFTLRQLAEATNNFRQDSLLGRGGFGCVYKATLSNGQVVAVKQLDLNGLQGNREFLVEVLMLNLLHHPNLVNLHGYCVDGDQRLLVYEYMPLGSLEDHLHDLAPNQQPLDWKTRMKIAAGAAAGLEYLHDKANPPVIYRDIKPSNILLGEGYHAKLSDFGLAKLGPVGDKTHVTTRVMGTHGYCAPEYALTGQLTVKSDIYSFGVVFLELITGRRPQDSDRPPEEQDLVAWARPLFKDQKKFRKMADPSLCGRFPKRGLFQALAIAAMCLQEKAKSRPPMREVAAALSYLASQAYDRNNNAAAHRNRAGPSTPRVLDDQIGQDTCTLANQQGAQMSMHVGTDHAMPEVKEASCSGSHRGGRGRVTPNGADRERALADANVWAEAWRRQEKASKMR

SEQ ID NO: 45193 - protein, 35 aa, Zea mays
  Coding DNA Sequence Number=SeqID_3414
MAVLFAPCTRTTVAPEVAFTVRPRTWVSSGCSSAE

SEQ ID NO: 45194 - protein, 83 aa, Zea mays
  Coding DNA Sequence Number=SeqID_3415
MEVFSDVQAAAIPRASGSGALRRATSGGAPPGSSDGDAPEADERQRCTLGPVATAVARGTVGFNSVDGGLEGARRQWILYRNA

SEQ ID NO: 45195 - protein, 132 aa, Zea mays
  Coding DNA Sequence Number=SeqID_3416
  Subcellular localization annotation: CTP_CleavageSite=23; ConfidenceScore=5.02e-01
MTVGGSCLSYGAPDSPVYTGHVRGAAARFSRSWRVPEAPFLGAPDSSVNYSGAPLEIPEGGKFELEFSGAPDTVRTRERRRLPLQAPQVKKRKKKKVMMMKVEDLLFNIDIKEREDASHVGRRTTSGTTVQI

SEQ ID NO: 45196 - protein, 297 aa, Zea mays
  Coding DNA Sequence Number=SeqID_3417
  Homolog annotation: Hit_ID=Q9LWU9; Match level="QueryCoverage=48%, HitCoverage=23%, E-value=2e-44, Identity=68%"; Hit description =Putative gibberellin response modulator
  Subcellular localization annotation: CTP_CleavageSite=54; ConfidenceScore=5.36e-01
MRSAPRWPTSSSSCAARVPPSSSWASMRTLSTPDDWRRGSRALRYYVAAFDVVEAAGLADASPARAKAEEMFAREIRNAVAFEAADRFERHETFAGWRWRMQEGRFQNTGIGDREALQGCMIARMFAPGNYSMQALLSYGTNAGAGVLILYCSFSVQCFKLSSSLTLWRFLDNSLLSDFQSRSPAASLLPECATAPSAARPPQHPDTAVGSHSPSHSSRRAPLTQGDGFTTDSGVQILSCPSPWGSATRRHDQAPSGGAAGVIGQLHRSIFLNDQQINADQQINAAPQTLRYSVVST

SEQ ID NO: 45197 - protein, 54 aa, Zea mays
  Coding DNA Sequence Number=SeqID_3418
MARSSFSSHGATAGEELRRGHNSGKRRISDERHGSDLAYPLDSLNSGGLIGIVR

SEQ ID NO: 45198 - protein, 209 aa, Zea mays
  Coding DNA Sequence Number=SeqID_3419
  Gene Ontology: Mol. function=carboxyl- and carbamoyltransferase activity; Cellular component=ornithine carbamoyltransferase complex; Biological process=amino acid metabolic process
  Homolog annotation: Hit_ID=Q8SA97; Match level="QueryCoverage=56%, HitCoverage=18%, E-value=4e-13, Identity=45%"; Hit description =Ornithine carbamoyltransferase
MTASKKAPSLPTDQGFEGWPLGGVHSRLKARGLHTHYWSKVGPRRVHSRLRHRARDDHGYVRYITKARATLPRARTRAQPRKTANSAPPDPGLGLGLSPGRRRTPLRPTQGSDSGSVLEDGELRSAPPQGSNSGSVPEDDELRSAQPRVRTRAQPRKTTNSASPDPRARTQPWPQPTVSASPDPGARTRPRPRKTDSTLTSEEPPYRPT

SEQ ID NO: 45199 - protein, 197 aa, Zea mays
  Coding DNA Sequence Number=SeqID_3420
MAGAGDLTRAKEGTRRWRLAGGPRHDGAVPMLMITGTTSEPCRGKFGCRRPGNGEALVSLETAAHSSGECAEDMNEAGGKWARAGDSRGRGDGFAWRGDVGTTVSACMHTVRSGRRLKEGRRWQPGHAGRWHSRAGAQRAKALMGGATGKRLCPVKQSELASQYMSGPLELRDPRLAVAFLILLNHSDILFGFEQNI

SEQ ID NO: 45200 - protein, 131 aa, Zea mays
  Coding DNA Sequence Number=SeqID_3421
MARRSAAGHDEGRWACVRATATGASERGEAGRDGARRGTSAAAVGRECGGGATGFRAGGARAKRFRAESGMDDLRDTIFVGLTEADENNGRLMTYFRRPLEADENNGRIFVGLAETDENTPHFRRSRGRRK

SEQ ID NO: 45201 - protein, 156 aa, Zea mays
  Coding DNA Sequence Number=SeqID_3422
  Homolog annotation: Hit_ID=Q0EDB0; Match level="QueryCoverage=49%, HitCoverage=8%, E-value=3e-24, Identity=62%"; Hit description=Beta-D- galactosidase
MGEPPPREAPWPGRRAGSGWPRPRRCAAGGSARRDVAPPRGRARTTEAWGRTRRRGHRLLREGGTGMGEHWYHNLHVAGDENYGAFLEKDGAGFRGQVKLTGLSNGDIDLTNSLWTYQIGLKGEFSRIYSPEYQGSAEWSSMQNDDTVSPFTWFKS

SEQ ID NO: 45202 - protein, 74 aa, Zea mays
  Coding DNA Sequence Number=SeqID_3423
MREVVGAGKMKQSKAETTPRCSLSSIYDEAQFTTAQAAVLAADAMPKPSAQPAASSPEPRRFIIKSRQFTAIGA

SEQ ID NO: 45203 - protein, 148 aa, Zea mays
  Coding DNA Sequence Number=SeqID_3424
  Gene Ontology: Mol. function=beta-galactosidase activity; Cellular component=beta-galactosidase complex; Biological process =carbohydrate metabolic process
  Homolog annotation: Hit_ID=Q6X0N7; Match level="QueryCoverage=79%, HitCoverage=14%, E-value=6e-50, Identity=66%"; Hit description =Putative beta-galactosidase
  Pfam annotation: Domain name=Glyco_hydro_35; Domain location=1-148; Score=-65.5; E_value=4.9e-11; Accession=PF01301.10; Description =Glycosyl hydrolases family 35
MTARGLGEGLHRHARESGFPVWLRDVPGIEFRTDNEPYKAEMQIFVTKIVDIMKEEKLYSWQGGPIILQQIENEYGNIQGHYGQAGKRYMLWAAQMALALDTGVPWLNTCNAFYCDGFKPNSYNKPTIWTEDWDGCNGFKYLEDFKQG

SEQ ID NO: 45204 - protein, 138 aa, Zea mays
  Coding DNA Sequence Number=SeqID_3425
MGGRVAARQRGGQKQGASAPASRGGWGAAGAIHQRGAELKGRPEQGARPALRKTEVGATDAIHQRGAELEGRPEQGARPALRKTAGAERGADDGGRGRQQPGSTGRGPCGSWGGGGQGRAPGGAWREQRGGGRQGRKS

SEQ ID NO: 45205 - protein, 239 aa, Zea mays
  Coding DNA Sequence Number=SeqID_3426
  Homolog annotation: Hit_ID=Q2QSG7; Match level="QueryCoverage=30%, HitCoverage=23%, E-value=2e-28, Identity=73%"; Hit description =Galactose binding lectin domain containing protein, expressed
MADSTNHTNVLLARNSITLIHIGNQTGSRPKTIQDQSNTVQIFFNGFNKKDHIVSINGKPVSDSCSFQAMKQSPTFSSSKETTKNIHDQHKQHRGNLCITYRARPNWFLTLPTSLCPHDCKCLASLLSFWDSLSKGQDARIVCPKFDQVCIEKVLSSTTPKSTVSDKKTMFDAPEGNGPVTIDLGSMGKGQAWVNGHLIGRYWSLVAPESGCPSSCNYAGTYSDSKCRSNCGIATQSWY

SEQ ID NO: 45206 - protein, 288 aa, Zea mays
  Coding DNA Sequence Number=SeqID_3427
MGKGERGWGREERGRGELTGEGRDGEGRSAAGAAEGGGWAGGGGGLGQGPRPRAGRAVGPRARQVGHRAVASVPRRATTPGSRAGAAHWGHGAGAAGSGSSPGPRRAAEAARPRRNRTGPGQHAHAGAAPVPNVGRQSRAGPNRDRHAARGGEGRACRAGRRAWGKGRGRLGQRGAEPGGRARRAAVPRPHHVEAGTGEEEGAAGKRRERERCVVGEREMNRGDRGTDRWATRQWAGGGKALRQLGRAKADQGAEGGCLRPTDAILVDLFDLWDANRTGAKGKSIDRK

SEQ ID NO: 45207 - protein, 343 aa, Zea mays
  Coding DNA Sequence Number=SeqID_3428
  Gene Ontology: Mol. function=mRNA (guanine-N7-)-methyltransferase activity; Cellular component=nucleus; Biological process=mRNA processing
  Homolog annotation: Hit_ID=Q6K833; Match level="QueryCoverage=98%, HitCoverage=92%, E-value=1e-121, Identity=66%"; Hit description=mRNA cap guanine-N7 methyltransferase 2 (EC 2.1.1.56) (mRNA (guanine- N(7)- )-methyltransferase 2)
  Pfam annotation: Domain name=Methyltransf_11; Domain location=5-116; Score=1.9; E_value=0.036; Accession=PF08241.2; Description =Methyltransferase domain
  Pfam annotation: Domain name=Pox_MCEL; Domain location=3-282; Score= -104.0; E_value=1.3e-07; Accession=PF03291.7; Description=mRNA capping enzyme
  Pfam module annotation: Pfam domain module=Methyltransf_11::Pox_MCEL; Domain location=5-116::3-282
MPKVCDLYCDGGMDTDKWCDAQVGHYIGIDASASGVNYARELWENRRKPFTAEFIELDPSDVDSPSMPSNTNKCAKALAQQSFELTIGLCFENEEQAKKLLNNVSSLLKPGGYFFGITPDSSTIWTKYQKNVEASHNKGLKTVPNSIRSENYTITFEVEEEKFPFFGKKYQLKFASDAVFENQCLVHFPTLMRLSREAGLEYVEIQNLTEFYDDNRTQFAPMLGGYGASFLDARGKLVARSYDILGGVEFFFFLEGQAWCNDESCLTESLGLYSAFVFQKPDPEAIPPIVTPDLPDPDKGHEEQEWLQPQQASVEDGRRSHADVLPIDPEKGILGPGPADMRL

SEQ ID NO: 45208 - protein, 94 aa, Zea mays
  Coding DNA Sequence Number=SeqID_3429
MARPRRDGAAGLLPGAVARAEPLHAVPVCLSGSAPLPASRRQPVPAIFFDLGELPASLLARMLCTSAPWNLSKCERQVHAGMQSKCERLSTFDG

SEQ ID NO: 45209 - protein, 57 aa, Zea mays
  Coding DNA Sequence Number=SeqID_3430
MSVWRVAKVFPGAWDPLGGKDVSPVQQRALLEGATVGLRPHCHASLGWWPRSVTGAR

SEQ ID NO: 45210 - protein, 56 aa, Zea mays
  Coding DNA Sequence Number=SeqID_3431
MTPQANPYGSARSNPPAPEPGPREGGDESGHDEGYLNGGGSSDADGLGLGRIDRES

SEQ ID NO: 45211 - protein, 86 aa, Zea mays
  Coding DNA Sequence Number=SeqID_3432
MSLLRLLLLKSSRLCNSCSLLISEGIRPDRASIIKWYFNPDTLLTNVYYNRFTPPRALMRAEYTSLSTNGLARLAFHYRKLVKERG

SEQ ID NO: 45212 - protein, 170 aa, Zea mays
  Coding DNA Sequence Number=SeqID_3433
  Subcellular localization annotation: CTP_CleavageSite=51; ConfidenceScore=5.52e-01
MATPTPDPKRPSTDLRTYFNVAKRPPPGSFLPGMNAKSSVDNPQDPRTRLRGRGRWAYKLTPPRITVGSDSDQGRDPVSNSHGSEASPANWGHTEARDGQAKLPDHRLWREIRLVATNSEPRAEKNGLSSAAPFLPDDHGEGKQIVLTGGSHPKATARAAQSEPSEGEHG

SEQ ID NO: 45213 - protein, 203 aa, Zea mays
  Coding DNA Sequence Number=SeqID_3434
  Gene Ontology: Mol. function=sugar porter activity
  Homolog annotation: Hit_ID=Q6ZD70; Match level="QueryCoverage=32%, HitCoverage=19%, E-value=2e-22, Identity=74%"; Hit description =Putative GDP-Mannose transporter
MASPYHWRGQGCGPRHVRHLWLLQSSQALIQFGYVLLKMYNEIANEHQHLFYLDLDLKICAIDDSNTSILLVHNDTIFHVVSALAVDHTGSRVLSDSYDYMHMYDFQGMNSKAIRIIMDVRGYYIFMDVYDFKKKQNVANVLTASGETYFFKKQHGTQVWVALMLMIISAVPGGITDLSFHAMGYIWQTLNCVLTVAYSVFLS

SEQ ID NO: 45214 - protein, 53 aa, Zea mays
  Coding DNA Sequence Number=SeqID_3435
MVDEEHLERIEEASEVDHDSTLDELGDGEGTQVSHAKAVNVGDAMREEATSTG

SEQ ID NO: 45215 - protein, 87 aa, Zea mays
  Coding DNA Sequence Number=SeqID_3436
MARPRRDGAADLLPGAAARAEPLRAVPVCLSGSAPLPASRRQPVPAIFFDLGELPASLLARGVLDWFDKLSFEQSVYFGLGCFGLLV

SEQ ID NO: 45216 - protein, 119 aa, Zea mays
  Coding DNA Sequence Number=SeqID_3437
MCWRQFIDHHKRRKNSKDSGVLTEDLRRRGWGCAKIANNRHYVEHSVHSEKEQGEGLSWEEDRGAVLGRGARPPWGRRSPALAVWGEREEAGWFSMGGVGARWRGAREEASRCAAEGGT

SEQ ID NO: 45217 - protein, 179 aa, Zea mays
  Coding DNA Sequence Number=SeqID_3438
MARRGSVAAGTGNGRGGQESKKYVGTKVAKTSMPSGGRGSTGKGGATQDDGGGARKRMEYIGARTVISGTTRVEWYGAKRRSQPPSRWKEWVVMTWGWGRRAIRGTPIEPPGGVLEPAVASMLTEVVWCQAPESATQSVGGVGGDDMGMGKESHQRHPHRATGRGAGAGSGEHADGDHK

SEQ ID NO: 45218 - protein, 1855 aa, Zea mays
  Coding DNA Sequence Number=SeqID_3439
  Gene Ontology: Mol. function=hydrolase activity; Cellular component =nucleus; Biological process=chromosome segregation
  Homolog annotation: Hit_ID=Q6ZHH8; Match level="QueryCoverage=37%, HitCoverage=72%, E-value=0.0, Identity=64%"; Hit description=Cell division-associated protein BIMB-like
  Pfam annotation: Domain name=Peptidase_C50; Domain location=1514 -1855; Score=190.7; E_value=3.6e-54; Accession=PF03568.7; Description= Peptidase family C50
  Subcellular localization annotation: CTP_CleavageSite=88; ConfidenceScore=5.11e-01
MEAAAADLIAALSSPSSFAGLYSRFAAYLQPFTPYLHSSNPNTKPPQKRATKQNKQPPPPDAATLRPLAKRFLPFLGRALHLLPPLVRACPVSGDKGGEAADELLEIYGLLLDCLEAISPCLAGKPYSVLLQRGRFICCLESRGHFARASAEAAATLDALRSALSPPTTSTKSRRGAAGVDPVLLPDPGSAGEAGTDPEVTLLAVELTVCLANCSSKGKVKEPTPYERLISLFKQLKPWLRILTNEVSRKYLPLLMNAMSRCTLFLVSESSLFNTDLVHGFCRYTMQECVGEGMIELLPAIARKICSSVDLTWGGSTQLLLHVLKTVTDSVVRLKDDLPKSVNELLVFVAYFCRFILSANRDLSVGASELLYKQGGYFSEVSSPTASMLLLYATGLYLSAQQAESEIPPYLSVGIPKDQKYLHALEKGLGTLARCPHDNTSLVTYLDSLEFISKILSQQVNTLWKDFSEGKPTHYSGNMDYVLTALHQFIDSSFTSFSCRQMSQGDNERQHEQHGTLLTVLVSAIKFSFLTKKDIQKSLGFIVCAISSKWFTLEELKFLIPSLGNIGVTLHNTGHVKEAPKALELCCQTIWAHISLFYYRLSSRTKGNDIMTDLSMDTLKDMDIILDAFSRIAKMVDALCRCGTEIETPLVIVAKSLSIMLPDGDNSEYNKCSFILIKAWVKAVHKDFRDTKVDDAPLLYPFLLKYRSPWPIKLIGLIVEQELLAYGLTEARSIEFCSKMQIRIIDVLLHKIYCTKEHFLERSRVLIRKAGALRASGVENIKNCLESLRDAISLLLAIAYCLYAQCAQEDKLGGEVIFDSAEKALNLWLDMEAFDHSSSDMVLQQPSKTIVPLICFLVDLLSMKGCFELQFKLCKVMIMIWKQEKLPIEKLLSLLFTSGRLSHACCYLPLDERFLSIAKEHLGRTLPSALFIPQSCKHPFGRQFSFVTSVDEVSKVASSLVSGDTSNEQSTFLAGCLYYDLSEKVFSRGQLFQAFSYGNKALHLRKKLLKKKFKINSGISGNMERQHCGQDISLEVCGPTIVEIWPNSSSSVNTKDFFLTPWNVLRCYLESTLQVAMMHELIGNGAEAEVLLQTGKEISNFHGLSVFCIVFTSFLGQLYCKRQLWDEAESELNYARDLVKNDATISFRRKNSGNAEAGPPLDAKARRSSRNSSRLAKGQNVETLAKTRTRSSKRNACMKSEKVLTELNSKNNVTGSKELAADASVCGEAECFPDGIDHSKDDLCNMFGCWSCLFIKSLNSGCIQNILQLRLDYVHRHYLVSLLLKKARALGSHSNGDCEVHSVYWKCISLLFFRSLPQDCCRTYGPYLIGLIMDRSIGDFLPLECAEILFNMSFFLLKSPLSEQSRDICCIFSSVTMADVVPWLLKAFVLSRESPSLVQEVCKLLACIFLLSTTDSSIQLPLGSHKESLSLNHWATYFHQVSVGTNLNCHYFASLQASSEEKVPKDTYKDFRNETDDNVSKFLRLSSRDIKYIEKHMTEFFQKLPDVPVLCISMLGGDYVNALLKFHCHPPFFPAWMLLSRFDSTNEPTTLLLPVDSISEMQFEDSCTKDLGNPTRVLDKWQCPWGYGITDYVAPVFRNILEENFMSLSSATLTIDDVNADRVRWWSHRMKLNNYLANTLKDIEDSWFGPWKCLLLGHQLSDEHIETASSMIITGLDTEFEFEVNPMLIKAILGGAVSVDEVQECFLQLILYKGYFGRGGCCGKDRLKAFSSCQMDDGSMETLKRIITDASYELPQPADRDPVILVLDVNVQMLPWENLPVLRNQEIYRMPSMGSIFLALSRTNNDYKDHSSPFPVIDPFNTYYLLNPSGDLSSTQEEFVQLFRNYEWKTINCQI

SEQ ID NO: 45219 - protein, 129 aa, Zea mays
  Coding DNA Sequence Number=SeqID_3440
  Subcellular localization annotation: CTP_CleavageSite=40; ConfidenceScore=5.03e-01
MLYAARHALSQYCSLFSGVADDLNLKYYPHRSTGNTRSVLVSLVGEGNPRLNNAVNLVVVLNTELDHSLDELSRARAKIIELRAERAEHRHQEYGSPAPAGTQHPYCSPPRGYHAYGTPDYRTKLDLDQ

SEQ ID NO: 45220 - protein, 65 aa, Zea mays
  Coding DNA Sequence Number=SeqID_3441
  Subcellular localization annotation: CTP_CleavageSite=48; ConfidenceScore=5.28e-01
MVGLQMVIRMMILTMVMVAFGAIYAQVKKKASRQISRSSRTSTSSRIRLATSPSQLPMNWLSHYI

SEQ ID NO: 45221 - protein, 538 aa, Zea mays
  Coding DNA Sequence Number=SeqID_3442
  Gene Ontology: Mol. function=nucleic acid binding; Cellular component= proton-transporting two-sector ATPase complex; Biological process=DNA integration
  Homolog annotation: Hit_ID=Q7XBC6; Match level="QueryCoverage=99%, HitCoverage=31%, E-value=0.0, Identity=70%"; Hit description =Putative copia-type pol polyprotein
  Pfam annotation: Domain name=rve; Domain location=235-382; Score =72.2; E_value=1.6e-18; Accession=PF00665.16; Description=Integrase core domain
MLYSGRRPGIKDGIDFQKGDNVKLNAPKKLSNFVKGKAPMVQDNEGYILYTVSYPEHKIRRIHSRKSHSGSHHAFMYKSEASSSRQSTHAKLPKKKTPIASNEPNISFKTFDASYVLTNKSGKVVAKYVGGKHKGSKTCVWVPKVYASGGSSWIIDSGCTNHMTGEKRMFSSYEKNHDPQRAITFGDGNQGVTVFRRSDDSVAFTGVLEGQLYLVNFNRAELDTCLIAKTNMGWLWHRRLAHVGMKNLHKLLKGEHILELTNVHFEKDREKSQTQETLKGFLRRAQNEFSLRIKKIRSDNGTEFKNSQIEGFLEEEGIKHEFSSPYTPQQNGVVERKNRTLLDMARTMLDEYKTSDRVFGSKCFILVKRGRKSKFAPKAVEGFLLGYDSNTRAYRVFNKSTGLVEVSCDIVFDETNDSQVEQVDLDELDDEEAPCVTLRNMSIGDVCPKESEEPPHAQDQPSSSMQASPPTQDEDQAQDDENEDQEEPSQEEDNDQGGDANDQDKEDDEGPRPPHPRVHHVIQRDHPVNTILGDIQKG

SEQ ID NO: 45222 - protein, 84 aa, Zea mays
  Coding DNA Sequence Number=SeqID_3443
MAVGALQKGAWVAVVRCKGGVGRWLCAAKGKWGGGGAHGGGHACGGTAGLGPSGANSMLPGKAFWDLIDKGTFLFRWLKMRMEA

SEQ ID NO: 45223 - protein, 329 aa, Zea mays
  Coding DNA Sequence Number=SeqID_3444
  Gene Ontology: Cellular component=nucleus; Biological process =ribosome biogenesis and assembly
  Homolog annotation: Hit_ID=Q9SH88; Match level="QueryCoverage=84%, HitCoverage=87%, E-value=2e-69, Identity=49%"; Hit description =Ribosome biogenesis regulatory protein homolog
  Pfam annotation: Domain name=RRS1; Domain location=5-193; Score =223.9; E_value=3.7e-64; Accession=PF04939.3; Description=Ribosome biogenesis regulatory protein (RRS1)
MAEEPAIVVAASSSCEVDLGNLMAYDPCHHVAAAASASRMRGLAGAKKLREELRQECLRKGTELAQAVADALFALPPTEDRDGPIVHLPPHTVRLPREKHLPKPKPPTKWELFAKAKGITKRKKNKREWDEQTQSWKRTYGYDRVNDDKDVPILEAKLTDEPGVDPFAQRRDEKKKRVEKQEKSRLENLKKAAKLAAKALPITGTKADLPKKSRKEDLESVVGMASSATASGGKFDEKLPGEKPPKHPGKHRKFLPVAEGKGMGSLEKQQNDKILSSLLARNSDEPLDAITMYKVKKEKQRRKEKNMPSKSDKLKPQKKPHKKSSKKRA

SEQ ID NO: 45224 - protein, 1123 aa, Zea mays
  Coding DNA Sequence Number=SeqID_3445
  Homolog annotation: Hit_ID=Q016Y8; Match level="QueryCoverage=46%, HitCoverage=24%, E-value=3e-48, Identity=27%"; Hit description =Homology to unknown gene
  Subcellular localization annotation: CTP_CleavageSite=60; ConfidenceScore=5.67e-01
MSHCPRASLSLAPPSPFLFPHCPSPRRRRRPRGRSLHLTSRPLLTLARFDPPRLFRLKVSDSSASPGEAAHAHAHHSNHRAHAHHSPAPSLLPWPRALIGSLAPVWREGLFLVRCSVFAAVVSVAGALSWFAQLRARSFVEARLLPAACSALSEYLQREVRLGKVRSISPIGITLQTCSIGPHEEEFSCAEVPVMKIRVRPFASLRRGRVVVDAVLSEPSALVAQKKDFSWLGIPAPSEGTVKRHSGEEGIDYRTKTRRLAREKAAEQWNEERDKAAREAAEKGYTIPSGQSVPLSSNEILEADGPTEIGKSSPPLCADQMHKNDHHLATGIDSGSKHADLEKSFGFKSPIPGINLWSRVISSPSRLRYMRKAPSKVIPDVDNSSQQRILRRSADAAVSYFQNTGHINIDDSSPGPGKGSSDGGHANVGGSGINSNDETVSNSKTASTSLAESPSHSQLSSQCSSSNLDNLLLWHNLEDLQIGQAKNPSGNKPVPHQENIFGNFGSCTHAHNWVPFWPFQLKSCPVSFNSPWASLDLQIEKLKSQFAIGPGDFSAELTEGVSEIHPGGVQNALPITLDSVYFNGGNLMLLGYGDQEPREMKHASGHVKFKNNYNRVHVHVTGNCMEWRQDRSSQGGGYLSTDVFVDIAEETWHANLNIVDAFAPLFERILEIPVVWHKGRATGEVHICMSKGDSFPSIHGQLDVKGLAFQILDAPSSFSDIVAKLSFRGQRVFLHNASGWFGDAPVEASGDLGLNPEDGEFHLMCQVPSVEVNALMRTMKMKPLMFPLAGSVTAVFNCQGPLDAPVFVGSGIVSRKSFSVSGMPPSAASEAVMQNKEAGAVAAFDHIPFSHVSANFTFNLDNSVADLYGIRACLLDGGEIRGAGNAWICPEGEGDDSAMDINLSGTILLDKVLHRYIPGGIQLIPLKIGELNGETRLSGSLIRPKFDIKWAAPNAEDSFSDARGNIVIAHDYIMVNSSSVSFDLNSRVQTSYINDYLLNKETYQMKKIMPLIVEGVDLDLRMRGFEFAHIASSIPFDSPRPLHLKASGRVKFQGKIMKSSNIADGNINGVLQSNIDQNKLETNASKLVGDISLSGIKLNQLMLAPQSTGFLSISRDSMMLLLI

SEQ ID NO: 45225 - protein, 384 aa, Zea mays
  Coding DNA Sequence Number=SeqID_3446
  Gene Ontology: Mol. function=protein transporter activity; Cellular component=membrane; Biological process=intracellular protein transport
  Homolog annotation: Hit_ID=Q9LGF8; Match level="QueryCoverage=99%, HitCoverage=100%, E-value=1e-137, Identity=71%"; Hit description =Putative syntaxin of plants 31
  Pfam annotation: Domain name=SNARE; Domain location=256-359; Score =27.5; E_value=4.8e-05; Accession=PF05739.9; Description=SNARE domain
  Pfam annotation: Domain name=Syntaxin; Domain location=57-163; Score =94.9; E_value=2.4e-25; Accession=PF00804.15; Description=Syntaxin
  Pfam module annotation: Pfam domain module=SNARE::Syntaxin; Domain location=256-359::57-163
  Subcellular localization annotation: CTP_CleavageSite=19; ConfidenceScore=5.35e-01
MIPTRSAQASFRDRTNEFRAAVERARRHAVPSSSSAPAAPSSSSTGPLDGLIAATSARSEFNNRASKIGLGIHQTSQKLSRLAKLAKRTSVFDDPTVEIQELTAVIKKDITALNSAVVDLQALCNSQNESGSLSKDTSNHSTTVVDNLKNRLMSATKEFKEVLTMRTENLKVHENRRQMFSSSAAKDASNPFIRQRPLVARDPSESSVPPAPWASDSASTPLFQRKKTNGDHGASSSQPFAQQQQLAVQQDSYMQSRAEALQNVESTIHELSNIFTQLATMVSQQGELAIRSIYLHGPYPPNSSCIISPRCPYCIALTCPIGYQLTGCPYDRIDENMEETVANVEGAQGQLLKYLNSISSNRWLMMKIFFVLMVFLMIFIFFVA

SEQ ID NO: 45226 - protein, 783 aa, Zea mays
  Coding DNA Sequence Number=SeqID_3447
  Homolog annotation: Hit_ID=Q016Y8; Match level="QueryCoverage=86%, HitCoverage=30%, E-value=8e-73, Identity=35%"; Hit description =Homology to unknown gene
  Pfam annotation: Domain name=DUF490; Domain location=407-770; Score= -107.7; E_value=0.046; Accession=PF04357.3; Description=Family of unknown function (DUF490)
  Subcellular localization annotation: CTP_CleavageSite=41; ConfidenceScore=5.09e-01
MDALTNSIVVKASLKRRLSGFGFGQLGWYNVQDCSVQCPVSSRAVLSRAVLFGLGRWDVGVRLISRLYQPNCPKPDFSVDAYITRAQVQDDADFDFNGEDWEWGTYKTQRVLASGSFSNNDGLRLDKLFIQKDNATLHADGSILGPLTNLHFAVLNFPVGLIPALVQAIESSTTDSIHFLRQWLTPIKGILHMEGDLRGTLAKPECDVQIRLLDGTIGGIDLGRAEVLASVTPTSRFVFDANFEPTIQSGHVNIQGSIPVTYVDNSSIEESPEEADGKQGIIRIPVWARDRGSSNEISEARMVRDKTEEGWEFQLAEKLKGLSYNMLEPGEVRIDADIKDGGMMLITALSPYANWLQGYADVFLQVKGTVDQPVVDGSATFNRAIVNSPFLRTPLTNFAGTIQVISNRLCISSMESRVGRKGRLSMKGSLPLKNSEPSANDKIDLKCEVLDIRAKNILSGQVDSQLQVTGSILRPDLSGMIRLSHGEAYLPHDKGNGAAVTRLTSNKSSYLLSGFDQSTTSQDVSRILGSLSTSAERDQSDTEKTLEHGSFNPNIDARLNDLKLTLGPELRIVYPLILNFAVSGDLELNGMVHPKYLRPKGILTFENGEVNLVATQVRLKNDHLNAAKFEPDLGLDPVLDLVLVGSEWQFKIQSRASMWQDNLVVTSTRSVDQDVLSPSEAAKVFESQLAESLLEGDGQLAFKKLATATLETLMPRIEGKGEFGQARWRLVYAPQIPSLLSVDPTVDPLKSLANNISFATEVEVQLGKRLQQELVVAAASYKD

SEQ ID NO: 45227 - protein, 163 aa, Zea mays
  Coding DNA Sequence Number=SeqID_3448
MPLSRKFSAPRLYSSDCPVCIGLFGEPAAHTPMVGSAISGRRVDFANGHQAAPDCPVCHRTVRCSTSVVAATVGFAIKGRKSRLFTVRCAHGQKATMAFQMELQMAPSYLRAIKGTPRRMEQYTKHLLNILRRRDSTFTHLDHLFTPSRFSQLVSGPYSSFRD

SEQ ID NO: 45228 - protein, 112 aa, Zea mays
  Coding DNA Sequence Number=SeqID_3449
MSLRYHHLCTSMAARCQSAAHGACELGVARDPELVLPQLGLRGGVSMLMGGSDTKIPFRLGGGSEVGGGAEAEGEAARTTASGWMGAQHGEAARAERKWMDGSAACTARMGA

SEQ ID NO: 45229 - protein, 332 aa, Zea mays
  Coding DNA Sequence Number=SeqID_3450
  Homolog annotation: Hit_ID=Q5EMQ0; Match level="QueryCoverage=82%, HitCoverage=96%, E-value=1e-126, Identity=82%"; Hit description =Senescence-inducible chloroplast stay-green protein 1
  Subcellular localization annotation: CTP_CleavageSite=56; ConfidenceScore=5.50e-01
MAAAASTMSLLPISQPRKQQQQGAGAVVVFQRRPWDARRRRYVVPTARLFGPAIFEASKLKVLFLGVDEGEGSSKHLHAHHPAPAPALLPRTYTLTHSDVTASLTLAVSHTINRAQLQGWYNRLQRDEVVAEWKKVRGRMSLHVHCHISGGHLLLDLIAGLRYYIFRKELPVVLEAFVHGDGDLFSRHPELEEATVWVYFHSNLARFNRVECWGPLRDAAAPAPAEDDSTAPAAASIAMEGQMPVGEWPHRCPQQCDCCFPPHSLIPWPNEQDMATAAGQLSSAQLSSTSTPSYLEVAWLRLGDEHCGLVMDAKPAKNLQFFLIISPISTVY

SEQ ID NO: 45230 - protein, 136 aa, Zea mays
  Coding DNA Sequence Number=SeqID_3451
MATKLDHDPPTRKRFLLLLVYLCSFFLRENTISAVNFSVPGFYLSGKGDSGRTRTTKYEAESNRTVITLHWPLPARHRPINSEMWWPAGGSHIKAPAERHGTARLDGDRSSPYRRYESVDGGAKGKKIDRKPAGGG

SEQ ID NO: 45231 - protein, 213 aa, Zea mays
  Coding DNA Sequence Number=SeqID_3452
MGQRSLECRGSAGLPVALLVLRQSLAGWEDWDKQVRPRWAAASQGRESSPRLEIGSQWITGGGGFSTPSPSAAVLAAAAAWCTGKLTLNLHVTSRTLNTAYASIQLENLSPRMGGLSVAAWPSHLAVSYSLWWVTRAAWGQSAIIRAIPTPSLRSLGLGVVRRVVPYQRSTHSDLVLVGHECDVGWGVRAINVQQSERFLGHECSMIRGARRL

SEQ ID NO: 45232 - protein, 368 aa, Zea mays
  Coding DNA Sequence Number=SeqID_3453
  Gene Ontology: Mol. function=phospholipid binding; Cellular component= coated pit; Biological process=endocytosis
  Homolog annotation: Hit_ID=Q53M05; Match level="QueryCoverage=96%, HitCoverage=95%, E-value=3e-67, Identity=55%"; Hit description =Clathrin assembly protein at1g33340., putative
  Pfam annotation: Domain name=ANTH; Domain location=22-309; Score= -3.5; E_value=6.1e-08; Accession=PF07651.6; Description=ANTH domain
MKVFKGKIWAAIGSLMDHAGAASTTAKSSSSAAAVPDRALLTDIEAAIERCTGSSGGGGNDDDRHAARAPAAALRSLLLVHRLLRAGDRYFEQDFRSLWASRELRVDAPRCSCSPLAAGVGYASGACAFVHGYSAYLEGRMQWVINQAGNLEPARKPPPPPPDHDAGKPMPSSSSDDAGAETLLFKLAMCQRLLDLAIQLLPDNNTSASTAARSAFGIVLRESFKVYDAFAEGIDVMLLLSKSLAGQSKPSRATAHEILKKACVQTLELKEFYHKCKRSSANSKSIEYPLVRVVTPAQAVVMEMELELVPIPEEDGCQEEVEAKPQAEAIDGGGSPFAHKMETTISTVWVGFDDEDQKLITAPDAGDP

SEQ ID NO: 45233 - protein, 200 aa, Zea mays
  Coding DNA Sequence Number=SeqID_3454
  Homolog annotation: Hit_ID=O24587; Match level="QueryCoverage=41%, HitCoverage=8%, E-value=2e-23, Identity=67%"; Hit description=Pol
MGELNYFLGFQVKQLKEGTFISQIKYTQDLLKRFEMKDAKPAKTPMGMDGHLDLNKGVSRRTPVSLEAKLGDCLTLYPDTRASVGKVEERQHYSSCSDYCANHQGKTESRSPTSSASGATGSSASPNLSLGLGRRSPPRPTPGLGLSLGLGRSHILAQPQASGGVTSSLDLGLGLRRSLRLARPQPRTDYATGDTSLSYS

SEQ ID NO: 45234 - protein, 569 aa, Zea mays
  Coding DNA Sequence Number=SeqID_3455
  Gene Ontology: Mol. function=protein serine/threonine kinase activity; Cellular component=nucleus; Biological process=protein amino acid phosphorylation
  Homolog annotation: Hit_ID=Q9ZRJ1; Match level="QueryCoverage=92%, HitCoverage=88%, E-value=0.0, Identity=84%"; Hit description=OSK1
  Pfam annotation: Domain name=KA1; Domain location=527-568; Score =62.2; E_value=1.7e-15; Accession=PF02149.10; Description=Kinase associated domain 1
  Pfam annotation: Domain name=Pkinase; Domain location=20-248; Score =292.0; E_value=1.1e-84; Accession=PF00069.15; Description=Protein kinase domain
  Pfam annotation: Domain name=Pkinase_Tyr; Domain location=17-246; Score=3.4; E_value=1.1e-12; Accession=PF07714.7; Description=Protein tyrosine kinase
  Pfam annotation: Domain name=UBA; Domain location=270-309; Score =19.2; E_value=0.015; Accession=PF00627.21; Description=UBATS-N domain
  Pfam module annotation: Pfam domain module=KA1::Pkinase::Pkinase _Tyr::UBA; Domain location=527-568::20-248::17-246::270-309
MTTLAILYGMTLYVHNCNRYKQVGHCFLAVHLEGQDCTFLFKREIKILRLFMHPHIIRLYEVIDTPADIYVVMEYVKCGELFDYIVEKGRLQEEEARRFFQQIISGVEYCHRNMVVHRDLKPENLLLDSKCNVKIADFGLSNVMRDGHFLKTSCGSPNYAAPEVISGKLYAGPEVDVWSCGVILYALLCGTLPFDDENIPNLFKKIKGGIYTLPSHLSGAARDLIPRMLVVDPMKRITIREIREHDWFKILLPRYLTVPPPDSAQQVKKVDEETLREVLGMGYDKNLLVESIQKRLQNEATVAYYLLLDNRLRTTSGYLGAECQEAMDSSFSNIASYETPSSARGNRQQIFMESPVGLRPHLPAERKWALGLQSRAHPKEIMSEVLKALQELNVYWKKIGHYNMKCRWSPGFPAQIHNNHNFSAGSIETDSLSERLSLIKFEIQARPCAPRGQGGTTEAVRWGLVDTAIDGGPEDVVAVDVAEAERLAAKGWDGEAVAEIRNSKRVEEGAQLPLPSWSLTLSRCIADVLGPELYKTRDEKYLLDLQRVSGPQLLFLDLCAAFLTQLRVL

SEQ ID NO: 45235 - protein, 364 aa, Zea mays
  Coding DNA Sequence Number=SeqID_3456
  Gene Ontology: Mol. function=hydrolase activity; Cellular component =centrosome; Biological process=microtubule cytoskeleton organization and biogenesis
  Homolog annotation: Hit_ID=P48529; Match level="QueryCoverage=90%, HitCoverage=85%, E-value=5e-84, Identity=53%"; Hit description =Serine/threonine-protein phosphatase PP-X isozyme 1
  Pfam annotation: Domain name=Metallophos; Domain location=71-312; Score=63.3; E_value=7.9e-16; Accession=PF00149.18; Description =Calcineurin-like phosphoesterase
MGASDLDRQIEQLKRCEPLTEAEVKALCLKAMEILIEESNVQRVDAPVTRLCISLKENDCMSACVFAAGNDICLICGDIHGQFYDMKELFKVGGDCPKTNYLFLGDFVDRGFYSVETFLLLLALKGVFSKEHIQSMVVLELLSWRSQSSLSGGKRLLILNFHYITVDHTNRELIFLNGICITLEHRSDKIVRRSNATSKVSRRRLMRVGDAQNAKADALIVQAKVRYPDRITLIRGNHESRQITQIRVIDRKQEVPHDGAMCDLLWSDPEDTVDGWGLSPRGAGFLFGGNVVSSFNHSNNIDYICRAHQLVMEGYKWMFNSKIVTVWSAPNYCYSWKILLLDSVGGAGTVRRCIYCIRLADISC

SEQ ID NO: 45236 - protein, 140 aa, Zea mays
  Coding DNA Sequence Number=SeqID_3457
  Subcellular localization annotation: CTP_CleavageSite=30; ConfidenceScore=5.39e-01
MAAGYLPLAAAAAAAAVTLLVVATSAIPVAAAKFSGRNRMVIIRAPGARVVSPGGALNNKWQQQRRLVEDDVAPEFGGGGGQLVGGADGNSLGLVNDRPVCLHNGCAQPGQRYTPGHCTYKNGCPHTPTTAERAGPMQHA

SEQ ID NO: 45237 - protein, 218 aa, Zea mays
  Coding DNA Sequence Number=SeqID_3458
MTPSAQLSRSDRRHSAAPLTGLTEGQRRLRHSDCSATRQSESDRQSGLAKGAIGNSAPPDPRARTRAKTRKTANSAPPDPRARTRAKTRKTANSAPPDPRARTRAKTWKTANSAPPDPRARTRAKTRKTANSAPPDPRARTRAKTRKTRTPLRPTPGLGLGLRPGRRRTPLRPTLGLGLRPSLCRTTSASPDPGARARPRPRKTDSTSASEEPPRRPT

SEQ ID NO: 45238 - protein, 116 aa, Zea mays
  Coding DNA Sequence Number=SeqID_3459
MRTHPIGLFLAEKEDDPVWKDWVDHATNHEAMSHLIGLARTAKVTIGDKEDLVQQLKEANQHLDMHQQEMHKDMEANEDVDIEDEDPEGLEPASSLDTASIAALEDPLRLSPVLPH

SEQ ID NO: 45239 - protein, 128 aa, Zea mays
  Coding DNA Sequence Number=SeqID_3460
MAWGRKSRGRRAPWELSGDEGWSGKKRRSAMGALLLRALDQRRGNTPGRRFCAKEQREEVLKELLRAGKGSRAGWWSCCFKGVLAVAIGGHGRLLQSTSLHRDRKEHALDGRFWHFLFGFRSRFYNFY

SEQ ID NO: 45240 - protein, 540 aa, Zea mays
  Coding DNA Sequence Number=SeqID_3461
  Gene Ontology: Mol. function=RNA-directed DNA polymerase activity; Cellular component=mitochondrion; Biological process=RNA-dependent DNA replication
  Homolog annotation: Hit_ID=UPI00004C1731; Match level="QueryCoverage =99%, HitCoverage=34%, E-value=0.0, Identity=79%"; Hit description =UPI00004C1731 related cluster
MGPIEDLKGVQRVMGCLVALSRFISRLGERGLPLYHILRKAECFTWTPEAEEALGNLKALLTNAPILVPPTAGEALLIYVAATTQVVSAAIVVERREEGHALPVQRPVYFISEVLSETKIHYPQIQKLLYAVILTRRKLRHYFESHPMTVLSSFPLGEIIQCREASGRIAKWAVEIMGETISFAPRKAIKSQVLANFVAEWVDSQLPAAPIQPELWTMFFDGSLMKTGAGAGLLFISPLGKHLHYVLRLHFPASNNVAQYEALVNGLRITIELGVRRLDARGDSQLVIDQVMKNSHCRDPKMEAYCDEPEAPSAPEGEALRVEEERNGVPPNRNWQTPYLQYLHRGELPLDRAEARRLARRAKLFVLLGDGKELYHRSPFGILQRCIPIAEGQELLQKIHSGACGHHAAPRALVGNAFRQGFYWLTAVADATRIVRTCQGCQFYARQTHLPAQALQTIPITWSFAVWGLDLVGPLQKAPGGYTHLLVAIDKFSKWIEAVAFFTNIIHRFGVPNSIITDNGTQFTGRKFLDFCEDHHIRVD

SEQ ID NO: 45241 - protein, 106 aa, Zea mays
  Coding DNA Sequence Number=SeqID_3462
MTRTFSGGGGGHKVGVAEGQPANIAHGHGQGSKPRNAKLIMPNAPGHLQPPVAWSNASVHGMMMSSCAIMASCILCCQRKHMSRETARTKAPLQILLHDVYTTESI

SEQ ID NO: 45242 - protein, 136 aa, Zea mays
  Coding DNA Sequence Number=SeqID_3463
MPQRSEAGTAGKGDEEQRLRAALRHLQAEAGVLDRLPWGEGKGDDGGGEGMAHGVSCRGERGRGAWGVESGAVRRLLRLAMCGAGRGGNATLDGGVDGGEMGSTRLGRIAERGVRAGCGFGRTVQRPGVWTPTLGA

SEQ ID NO: 45243 - protein, 73 aa, Zea mays
  Coding DNA Sequence Number=SeqID_3464
  Gene Ontology: Mol. function=nucleic acid binding
  Homolog annotation: Hit_ID=O24586; Match level="QueryCoverage=97%, HitCoverage=11%, E-value=1e-21, Identity=70%"; Hit description=Gag
MSPEEILGKFVSGRMMVKETRYIDDIADGPLPHRKPQPIALKATTNKEALPNKVVQVEAASFNEDEMALPIKL

SEQ ID NO: 45244 - protein, 49 aa, Zea mays
  Coding DNA Sequence Number=SeqID_3465
MGSRHSACSAEAGCRGSFVLLFSRPPAGRGKEGVEADLQEFQVFDESED

SEQ ID NO: 45245 - protein, 199 aa, Zea mays
  Coding DNA Sequence Number=SeqID_3466
MAIGARTARTIRHKEYETTRRPWGPQGTCAFHDEALQASYGHPRRESISWDDYPFGSLDFSFNGEGEAVRAPEARPPLVQKPRFCHRPRGIYGQGDAHPPARPTPPESPDTVLKAVNGFSLAPCWWCEERRSASPSEADEIRRQNEIHMGPNPSYDDLSTFFVFYVELSVSYDVEASSYYDGFNRGSGAFSPRLATPRW

SEQ ID NO: 45246 - protein, 359 aa, Zea mays
  Coding DNA Sequence Number=SeqID_3467
  Gene Ontology: Mol. function=nucleoside-triphosphatase activity; Cellular component=intracellular; Biological process=DNA metabolic process
  Homolog annotation: Hit_ID=Q8RV34; Match level="QueryCoverage=92%, HitCoverage=93%, E-value=1e-162, Identity=90%"; Hit description=Rad51
  Pfam annotation: Domain name=HHH; Domain location=56-85; Score=17.4; E_value=0.017; Accession=PF00633.13; Description=Helix-hairpin-helix motif
  Pfam annotation: Domain name=Rad51; Domain location=86-358; Score =675.1; E_value=5.2e-200; Accession=PF08423.2; Description=Rad51
  Pfam annotation: Domain name=RecA; Domain location=81-355; Score= -149.5; E_value=0.0055; Accession=PF00154.11; Description=recA bacterial DNA recombination protei
  Pfam module annotation: Pfam domain module=HHH::Rad51::RecA; Domain location=56-85::86-358::81-355
MGIYAGLTVDHNVPLNNELNAEISWNWGIFMLEKKRQASGIAALDVKKLKDAGLCTVESVAYSPRKDLLQIKGISEAKVDKIIEAASKLVPLGFTSASQLHAQRLEIIQLTTGSRELDQILDGGIETGSITEMYGEFRSGKTQLCHTLCVTCQLPLDQGGGEGKALYIDAEGTFRPQRILQIADRFGLNGADVLENVAYARAYNTDHQSRLLLEAASMMVETRFALMVVDSATALYRTDFSGRGELSARQMHLAKFLRSLQKLADEFGVAVVITNQVVAQVDGAAMFAGPQIKPIGGNIMAHASTTSPSLSQVCRLCIRLFLRKGRGEERICKVISSPCLAEAEARFQISSEGVTDVKD

SEQ ID NO: 45247 - protein, 288 aa, Zea mays
  Coding DNA Sequence Number=SeqID_3468
  Subcellular localization annotation: CTP_CleavageSite=47; ConfidenceScore=5.14e-01
MPSSRPRLRPHSRPTPPRTLAYARTRAHTCGFRLPQLPRSRLPPGPRDAAAHRACDCARCAHRPPPIPAQSPLVLKYGEEGKVVERVNLATQQLRLLPKPVVRICGLLALDVSRDQLKVRYSIPRRQHRQDPRTTVPVASAPSPTRKTPPKGEEAEGSPRNKAPRLDDAARTTVPVASAPSPTQKTTLKGGRRRREACRRNLHGPRRLCLWLRDPERGYCFKCNTEVLMLGKCGEDNNEGGLELICDIVSQLPDQPSVESVSLCVEAESLNEEDSSLHRPRAQPVPLS

SEQ ID NO: 45248 - protein, 73 aa, Zea mays
  Coding DNA Sequence Number=SeqID_3469
MRYIRQDNEQGHKPQQRELREEIPSHDDIWAQAPTLPNEIVIEVTIKDIVQDQQHNISPESHTNPGEASLDDG

SEQ ID NO: 45249 - protein, 162 aa, Zea mays
  Coding DNA Sequence Number=SeqID_3470
MSEQVAHEVDDRRHRRAGLAGSDFKASTRTKAGSERSQAYARGKDQRSKQLVARSPRSMAAQPGQAEEEQGWRGPNTEPWLEGTRHGRAERDAVRAEERGKPEGEQAGADAPGTREQVPGTRQQGGAGRLGGREGEVPAPWEAWELWPARRKKTREAVASEH

SEQ ID NO: 45250 - protein, 178 aa, Zea mays
  Coding DNA Sequence Number=SeqID_3471
MELVADESGLGACIESHKSVCANALKTRRASSIPCCFGDSQRRSSRPLQPQSLWHNRQSGGTPDSPMWPASSAIPESSEIVDVPAWSPDSVRCTRNWCKVPIEKRAFSMFPLGAPAICRGAAGALVFVEFRLDFKLGTSDLSEDATAGTLEDFEDDFGMPAEAMVDILSVEDVINRSP

SEQ ID NO: 45251 - protein, 164 aa, Zea mays
  Coding DNA Sequence Number=SeqID_3472
MYTAGSSRLKKKQNRGEAVVELTGKKGGGRGRWSGGLGTTRRRLYWWPRRGAREEDDCARAGGHGSGGRLGLEGELGVHGEEEYQEKALMLAYVRRSSEVELLFLKAVLAAAIGGHGQHAAEHESAQRQKKARIGRTFLAFSVWIWTRITAKDLFLDVYSTNRV

SEQ ID NO: 45252 - protein, 124 aa, Zea mays
  Coding DNA Sequence Number=SeqID_3473
  Subcellular localization annotation: CTP_CleavageSite=46; ConfidenceScore=5.03e-01
MTGPTHTEVDDTSDAPAPYAPTRRSHGRITCACSRGATAPRQRQTQCQAVPRWLCLRLHTAPTPYRTGTTILWLDPHEAAINLAHRATKQQDGKYEQSPHPTGVSPLSLVHSSYEYATSTLLLF

SEQ ID NO: 45253 - protein, 780 aa, Zea mays
  Coding DNA Sequence Number=SeqID_3474
  Gene Ontology: Mol. function=actin binding; Biological process=actin cytoskeleton organization and biogenesis
  Homolog annotation: Hit_ID=Q1SZ88; Match level="QueryCoverage=54%, HitCoverage=21%, E-value=1e-105, Identity=48%"; Hit description=IMP dehydrogenase/GMP reductase
MALFRRLFYRKPPDRLLEIADRVYGTVPHNVDYHSVETAAVVLWHLAYYFLPPIVFDCCFSTETMDQYRYKNYLDNIILQLREQFADSSLMVLNFRDEGKSLISGIFSKYNITAKDYPCKYLGCPLLPLDIILHFLRLSERWLMLEGQQNILLMHCEKDGWPVLAFMLAGLLLYRKQYNGEQRTLDMVYKQAPKELLQMLTTLNPQPSHLRYLGYICRMDDGIGWPTQPIPFTLDCVILREIPNFDGVGGCRPIVRVYGQDIPTTDRSHSVISPPSKAKKHIRRYRQADNAPVKLNVGSCVQGDVVLECLHVDDGQGNERLMFRVMFNTFFIQSHILPLNFEDIDVPWDADHQFTKNFKAEVLFSEFDAESDASTEVAPDYDYDYDYDNDMDVASADEFFEAEEIFSNAESQDGNKDADTLSMVSTDYIRTPSAECWKNSPFSNFDLNIDIDGSQDNKADNLGLLLETVNDGKTCTSTEANILLNNETAVVKSTFTATIACTSTEANILLNDETAVVKSTFTATIDGDTDSGISSSTYKEDGCMFEKGSSKQDIRMGSNQDLSQIDNVLVKEVIILETNSTDDIQMIKEVIISEVTTPKQVVEGNMMETELDEAVHSSESTALGEDEDTKRPNTFFKKDEGQSARDEYAAYDNGIVIEREESRNKEKFTITGTDSLVAEPKDLPHLDSSNTSLELSSANENIDQLRACSSNVTAERRAGIDTSFSSSRTLHIPGIIIQNVSSTSYSATNKNDFISTIIIIWHIHRDVNGFFKITQTPRAC

SEQ ID NO: 45254 - protein, 131 aa, Zea mays
  Coding DNA Sequence Number=SeqID_3475
MTGGHENLSPKPELRRAWNKYEERDWVHEFTGSMPQTKPKIALTTALGGREELPTTAEWEALAMKSFVRRQNPHADEQLPSRLYEFPHEDTTDTRRERRRSPSATHWGSIETGSRQCQRRRSFPQPRSLSL

SEQ ID NO: 45255 - protein, 139 aa, Zea mays
  Coding DNA Sequence Number=SeqID_3476
MGKNNKRKREPTPPSEEFGDSEYSEEEFSSESEGSPAPIPLRESSDDSDDSQGLAAEVWTYIRAVERSGLEGSDESEFSDEEDSDGGEDEGDDDDGGDGDGDGGNGGGGSGGKGGTKGGSSVGSTGGGGGKGSGGRASG

SEQ ID NO: 45256 - protein, 358 aa, Zea mays
  Coding DNA Sequence Number=SeqID_3477
MELMKLLQLYVSWKVYILLGQWWNLLSAKALRYYSPDCPVYTGQCPVLQGTAPQELASFGNSQRLVRYNSSDMSGVHRTVRCDIEATDISTPTATCSALNARQRAQKSGTPILAYRTLYSTCPVRHRTSRRAQKTELQRSEPNGFGDVAGTPDMSGDSTPTAAGAPCYGRAAVGFLRPPPMDPSNAAATVATPLDVVAAATDARTTGHTAPSTTAVAAAAASARAAGLLPSSLYGDLDLPATPPSWVTSVPLRPSPRPASLGSLPPGFTAPRLPIADTTWTSPRVVAPSTDSALVAAIATIQAALAASQERVRAASHAVEQECAMGAALTAQMATAQLLIRGPPPSSLSRLRPLPRLP

SEQ ID NO: 45257 - protein, 583 aa, Zea mays
  Coding DNA Sequence Number=SeqID_3478
  Gene Ontology: Mol. function=protein serine/threonine kinase activity; Cellular component=nucleus; Biological process=protein amino acid phosphorylation
  Homolog annotation: Hit_ID=Q2QMH1; Match level="QueryCoverage=99%, HitCoverage=100%, E-value=0.0, Identity=83%"; Hit description=LSTK-1- like kinase, putative, expressed
  Pfam annotation: Domain name=Pkinase; Domain location=4-251; Score =146.9; E_value=5.4e-41; Accession=PF00069.15; Description=Protein kinase domain
  Pfam annotation: Domain name=Pkinase_Tyr; Domain location=4-271; Score=-41.3; E_value=6.2e-10; Accession=PF07714.7; Description =Protein tyrosine kinase
  Pfam module annotation: Pfam domain module=Pkinase::Pkinase_Tyr; Domain location=4-251::4-271
MDQYEVLEQIGKGAFGSALLVRHKVEKKKYVLKKIRLARQTDRTRRSAHQEMQLIATVRNPFIVEYKDSWVEKGCYVCIVIGYCEGGDMAEVIKRANGNHFSEEKLCKWLVQLLMALDYLHANHILHRDVKCSNIFIARDQSIRLGDFGLAKILTSDDLASSVVGTPSYMCPELLADIPYGCCIYEMTALRPAFKAFDMQALISKITKSIVSPLPTRYSGSLLFYSNKNISHNWHMQAAELLKHVHLQPYVLQVQLKSSPSRNMSPIYQALTDKVKKMTFPSDITDSARRVARRNSLGNERTVTFCKPSPERNSISSTRSIKEYTTTQSVKELSVDSSQIDDEVTSKAIRTKTTGILRTPKSTPAKTLTTRNRLDPPKTSYSRTNHSELTSRTPLNKSAVTARRASLPLPTYRAPNSRAASVLDQLDSPDVSVNAPRIDRIAEFPLASSEDPLAPMKKNLSSAPGHDGSCSTPPFINRSITKDKYTVQVLHRGDGDNASDSSGRNATAASSGGSNDSRQQRFDTSSYQQRAEALEGLLEFSAQLLQQERYEELGILLKPFGPEKASPRETAIWLTKSFKETAS

SEQ ID NO: 45258 - protein, 85 aa, Zea mays
  Coding DNA Sequence Number=SeqID_3479
MEALDCADGARDTPISHGKPSWLSGAVVRQAVPHGKCLPGKGSAPDGENQTGKGSAPNEATTGSVVWIRQPSARANQTYLQYNIV

SEQ ID NO: 45259 - protein, 107 aa, Zea mays
  Coding DNA Sequence Number=SeqID_3480
MGAVITDGDLFFSLSLTAMGATIDFDDDAYEGLEEGEEYPRPGLIDGRNRFWETREPRGSHTADLAQLVIVTHEGDDRWSPIHSETSAHMPWLRVTQVAHAAETRGI

SEQ ID NO: 45260 - protein, 100 aa, Zea mays
  Coding DNA Sequence Number=SeqID_3481
MAWASKECEKERQSSKRKRARLWEEEERNSAIFIEREGKRRDGRLVSRRSLMAFMELEWRKETVAAASWRWVSRSDWARLGMCHKSTPLKKNLVLEIREG

SEQ ID NO: 45261 - protein, 119 aa, Zea mays
  Coding DNA Sequence Number=SeqID_3482
  Homolog annotation: Hit_ID=Q9MAQ7; Match level="QueryCoverage=54%, HitCoverage=5%, E-value=4e-17, Identity=56%"; Hit description =Location of EST 206I21T7, gb|N37185
  Pfam annotation: Domain name=PHD; Domain location=27-73; Score=20.2; E_value=0.00054; Accession=PF00628.19; Description=PHD-finger
MAAAAAAPPIPAPNPTDDWVDGSWTVDCSCGVTFDDGEEMVSCDECSVWVHTRCARYVRSVHTSFSCHKYRRSKHVPSSTDEVEVAELLAELPTHCPPPLYFSATELGKVMQCDLFILV

SEQ ID NO: 45262 - protein, 345 aa, Zea mays
  Coding DNA Sequence Number=SeqID_3483
  Pfam annotation: Domain name=zf-CCHC; Domain location=302-319; Score =12.9; E_value=0.0074; Accession=PF00098.13; Description=Zinc knuckle
MKIETIYGMANRIYGFRPKPFWCLASTHPHGSASACPASVNHASRPTAPSAALPPPSAQIWIPSPSSAPPPPRVRDPVPPLPRQALQSLLTFLPPLPARSVWRLDGESDLPRPPLSAPLWSPWSSPPGPPATAPPVADRQAPHWALLPNTAVRGSPYTTMDLPPGHRPQISLHILALKQSRREFAACVEVVAAVAQIVLCFMPSSPLPSAPFRSQILASPRLTSVLLSSRADASRRRRTGSGGSPGPSAARRPHERMQRPTGCLAHRYFLPSPSLFGPYGGLTANRIFLGLLSLHPSGRHGARCRTCGRRGHVAVVCLLLHCGAWEGEEVLQSKRQLCRFHHDPI

SEQ ID NO: 45263 - protein, 234 aa, Zea mays
  Coding DNA Sequence Number=SeqID_3484
  Gene Ontology: Mol. function=zinc ion binding
  Homolog annotation: Hit_ID=Q5JLV4; Match level="QueryCoverage=77%, HitCoverage=86%, E-value=7e-73, Identity=68%"; Hit description =Putative PIT1
  Pfam annotation: Domain name=zf-C3HC4; Domain location=35-80; Score =62.2; E_value=1.7e-15; Accession=PF00097.15; Description=Zinc finger, C3HC4 type (RING finger)
MARTEKLTSDGCSGGEVQVEVELGMGVDGKGIIECRICQEEGEEAAMDSPCACAGTLKFAHRKCIQRWCNKKGNITCEICNQVYSPNYVIPPPKCCSDEMDMNLRQNWVGRIDPHDSHFLAIAIAEQQLLQAEFDDCVSANSSGATCCRSIALIVMFLLLVRHVIVIVRDVSMLQDATVLFSHRRRRQWGILAPSILSITLPPKQALKNTKTHQLKRRLGGTTEDRRTTWKLAK

SEQ ID NO: 45264 - protein, 256 aa, Zea mays
  Coding DNA Sequence Number=SeqID_3485
  Subcellular localization annotation: CTP_CleavageSite=68; ConfidenceScore=5.85e-01
MASAATATLPKVQLRPRCNSYFQVRPVLALPLPSRKFSSSVALLIRSNMPSTLRLLVSAGGRRTFLPVSAVGSGQGSSVTEADRKSDLSLENVKTSVVSRDGEKINVRVQLPGKATQKVFDEALTFLARDAPPVPGFRKSKGGKTSNNQLSRDCAVSVLQIPSSILLQMLGKSRVTKFVLQEILSITIEEFVKKENLKVKPEIQTTQSEGEMESAFAPGSAFGFNVVLQLETPDSDDPEEKPGSDDDLQEESGSSE

SEQ ID NO: 45265 - protein, 336 aa, Zea mays
  Coding DNA Sequence Number=SeqID_3486
  Gene Ontology: Mol. function=transferase activity, transferring glycosyl groups; Cellular component=integral to Golgi membrane; Biological process=protein amino acid glycosylation
  Homolog annotation: Hit_ID=Q2WBH7; Match level="QueryCoverage=57%, HitCoverage=44%, E-value=4e-77, Identity=77%"; Hit description =Sialyltransferase like protein
  Pfam annotation: Domain name=PWI; Domain location=1-46; Score=13.5; E_ value=0.00037; Accession=PF01480.8; Description=PWI domain
MVAYGNEEADGKKIQIQLTGFMEKNTVKFMKELWSLLLSAQQNASGVPQQFLDEKEAEIHQKKDGDVGNSRSYGDPVASALNSTNFNIEEEKDNDFKRTSRPKNRFVITFLHNLVGFYYNLDACFALDAVTRCPYLGCKDATKMMLDVKEIFTCQIQVELPKTNPVYLMLRTSFGFSAKGTGLKALEFALSICDSFDMYGFTVDPGYKECSVLTAEVIFQDKVLLRENHVQLVKIHSPMQGDPGRTVRWLPTKATIEAARVASEKLLKRPGAGSDDPLGTCTMIKKRRKGKAPNRSGLRDAAMKHLEDMKGATRYPLERNAGGGYLCMINDRYDRG

SEQ ID NO: 45266 - protein, 284 aa, Zea mays
  Coding DNA Sequence Number=SeqID_3487
  Gene Ontology: Mol. function=fructokinase activity; Cellular component=cytoplasm; Biological process=carbohydrate metabolic process
  Homolog annotation: Hit_ID=Q6XZ79; Match level="QueryCoverage=99%, HitCoverage=100%, E-value=1e-143, Identity=84%"; Hit description =Fructokinase-1
  Pfam annotation: Domain name=PfkB; Domain location=5-274; Score =108.5; E_value=1.9e-29; Accession=PF00294.14; Description=pfkB family carbohydrate kinase
MAAGRELVVSFGEMLIDFVPTVAGVSLAEAPAFLKAPGGAPANVAIAVSRLGGGAAFVGKLGDDEFGRMLAAILRDNGVDDGGVVFDSGARTALAFVTLRADGEREFMFYRNPSADMLLTADELNVELIKRAAVFHYGSISLIAEPCRTAHLRAMEIAKEAGALLSYDPNLREALWPSREEARTQILSIWDQADIVKVSEVELEFLTGIDSVEDDVVMKLWRPTMKLLLVTLGDQGCKYYARDEKKLVESIKFANACGAITTTKKGAIPSLPTEAEVLQLIEKA

SEQ ID NO: 45267 - protein, 210 aa, Zea mays
  Coding DNA Sequence Number=SeqID_3488
MALAWLAARPSIRSPLRVLLPHGELTHPLLVPMAVVCSRELQSSSLPRNPWRPVEAPSCSARARLPAPLELILPKSGCLLLLCSTPRQMMLQSGWTSRSSGTSWWRRWRVRSKILFGDCQRSRKLEVGLALDEKSLMFERGEACTLNNRAMRKTSQVDPKRGQIRRIMLMDEPTRSSARTRMIAKWTSSNNTNLVLLRQAPVYATPSLCF

SEQ ID NO: 45268 - protein, 201 aa, Zea mays
  Coding DNA Sequence Number=SeqID_3489
MHSSRGNDVFARAPGNLDANAEGYRGSLSRNVSIPRMDGEYFFMSRLARDLKIFPYGRNIGVIVSAVMKVARPSVKSAASCAGAEFGQLVVVPVMSSAGPVAVATETKGDTGALEDPWTRFCVGGEIASTTAATGAVASVAQQLKYTFISYLQKTPCGGAPCTSGDSTTETHDLASIPQMITQVVQRVVGNKADQNREGTP

SEQ ID NO: 45269 - protein, 164 aa, Zea mays
  Coding DNA Sequence Number=SeqID_3490
MGKGNRGRGSPHRAGDKQKRDPSPPSEDFDDSEHSEEEVSSGSKGSLALASPLMSSDDSDDSQGLAVEVWTYIRSVECSRLEGSDESEVSSDEEDSSGSSEERSGDDNDNEGGGSGNDNGDGDGGEDDDDGGKGSGEGDDGGDNDGGGEGGSGSGRASGKAPLV

SEQ ID NO: 45270 - protein, 103 aa, Zea mays
  Coding DNA Sequence Number=SeqID_3491
MAWRARQRACEGVEGATAANRTARGAARGATAARGAGAAGGSGAVRVRARGAAPEQRARGGAARPGGTRRGRGARWRSTGRGGHRGGVGVNEREILRRERVSV

SEQ ID NO: 45271 - protein, 160 aa, Zea mays
  Coding DNA Sequence Number=SeqID_3492
MTVGVSDALDAKAASLPTIFWAEALKTTTHLLNRIPSKAKYFPLLAPPHPLISILSLSQIQFPLTSGGSPCAVARCTRGSNASGSVSTLATRGLDAFTHVSTRATHDLYAFVRASSYTTCGPVDPASATCDSLTPLVPCAAPSTSAARFADPALVYHRCG

SEQ ID NO: 45272 - protein, 331 aa, Zea mays
  Coding DNA Sequence Number=SeqID_3493
MTIHQTMPEDFLLLLPNEDAASKDPLPLRVSGDDRDDKTAEGHEALPLRVSGKDGDEETAEGHETQSLRWMGNEEGMAADRREMPIPDVVDQRSVEKLKSPSNVRPEGNRFELASGLDLARPCLVQWFCRLQFLLSPQLRGAPHPPSSIMAQVSAPLKVYFRKSSKHQQQHDQEADQFFEEENCEEDGDVTGVPALLAPSRLAQNVEDEGLAGRSRREDFVNNICRRPLGILPVPDNITQRHQPPPSPFVSAPRRSRRVAGIGVEFQMQDLGGRSTKRAMRTLQIITESKGISQEAIEGYKKLFTHPLSQCHIEALSALFGWSTPPDLVFC

SEQ ID NO: 45273 - protein, 224 aa, Zea mays
  Coding DNA Sequence Number=SeqID_3494
  Homolog annotation: Hit_ID=Q8S474; Match level="QueryCoverage=18%, HitCoverage=6%, E-value=6e-07, Identity=70%"; Hit description =Putative pol protein
MVGVVGLRTKAQTLHVYSKGHQGDVDARQCSSERGELSAVVGQQMPRKEGGAMNHGARQGARVYGVENEASSGVSTCNGELKASSTIVVGRPGRGVKWLGPDDATVAMAKVHEGASTCVVTTNYFTKWSEAIALENMTHREIWHSLDFDYRLGDFDYRLGDFFYVKIGAKGSHLANKKTKNWVQQKSKGITEVCPGLAHRTVSGAPGDFTLNSLHSGKSRGAPL

SEQ ID NO: 45274 - protein, 83 aa, Zea mays
  Coding DNA Sequence Number=SeqID_3495
MALLKISIKSTLVVFTVTWLLMTLLATAVPSAGNQEAENQAVCAQVKGTCTQKECYIIVKMPHNCMQYNFQGTFVKIQHDLKF

SEQ ID NO: 45275 - protein, 241 aa, Zea mays
  Coding DNA Sequence Number=SeqID_3496
  Gene Ontology: Mol. function=structural constituent of cell wall
  Homolog annotation: Hit_ID=Q8S9Z9; Match level="QueryCoverage=93%, HitCoverage=65%, E-value=8e-99, Identity=73%"; Hit description =Putative root cap protein 1
  Pfam annotation: Domain name=Root_cap; Domain location=169-225; Score= 137.3; E_value=4.2e-38; Accession=PF06830.2; Description=Root cap
MPGTSCGDPRFTGADGNTFYFHGKKDESFCVVSDDRLHINARFMGNHNADSGRDFTWVQALGVTFGGAHSHRLYVGARRAAEWDEDEDHVVIALDGEPVDVEAAKDARWVSTAVPGLSVTRSHAVNAVVVELNGEFSISANAVPITDEDSRVHGYGKTGKDSLVHLDVSYKFHGLTKDVDGVLGQTYRPDYVNKLDISAKMPVMGGADKYRSSGLFATDCAVSRFHRVGGGADAGFSSFAS

SEQ ID NO: 45276 - protein, 126 aa, Zea mays
  Coding DNA Sequence Number=SeqID_3497
  Homolog annotation: Hit_ID=Q53L24; Match level="QueryCoverage=28%, HitCoverage=24%, E-value=2e-08, Identity=75%"; Hit description =Expressed protein
MPPSSRLRSHDPKAYLRHLRDTACRHPPGYVAMNTRHVSAISMTSFIPPVYAIPKVVTEQIQRKLEEVNATVQQHLAGVQDHINFTMQIAEPPQQVPGTREGEWREKNSSIRVHNSRPLSLSGHAV

SEQ ID NO: 45277 - protein, 153 aa, Zea mays
  Coding DNA Sequence Number=SeqID_3498
  Gene Ontology: Mol. function=lactoylglutathione lyase activity; Biological process=carbohydrate metabolic process
  Homolog annotation: Hit_ID=Q6XC06; Match level="QueryCoverage=51%, HitCoverage=72%, E-value=7e-39, Identity=78%"; Hit description =Glyoxalase I
  Pfam annotation: Domain name=Glyoxalase; Domain location=24-152; Score=34.8; E_value=3e-07; Accession=PF00903.15; Description =GlyoxalaseBleomycin resistance proteinDioxygenase superfamily
MATDSEASKAAEVVVDWHKQDKKRMLHAVYRVGDLDRTIKYYTECFGMKLLRKRDVPDEKYTNAFLGFGPENTNFAVELTNFAEVSRPTKLSGFFCRCRPLSKNEVSSSLNANGGTTKKTFKFDRVFTPKDDQGYSDLIILEKEAGDELIKFL

SEQ ID NO: 45278 - protein, 277 aa, Zea mays
  Coding DNA Sequence Number=SeqID_3499
MEEGAPDLRELVRLPDVLVVCSSTGWTDEKHMLYLRLLEETFVHQLHGSGCIFKGLFNCSPRYCRQMKSSKQIVKYTTPGQQGCAIVEGGKVKSCIKAEHVESPSCCGNQQDEKVRSLEDNASTTKPMEKATSHARAASPGQASTCYVGKHRHSPSRSADYEHQIFIGIKFIYLSDVARFLKENYSCIYSEGSDQNFDEETQGTGESKHEYNPKRLKSADGTRDHQVVNAEAHQVGCLDVSDKNSENFSASSKVLAASLDVEAGSPSGDCKDHGPKG

SEQ ID NO: 45279 - protein, 673 aa, Zea mays
  Coding DNA Sequence Number=SeqID_3500
  Homolog annotation: Hit_ID=Q8L414; Match level="QueryCoverage=87%, HitCoverage=84%, E-value=3e-56, Identity=41%"; Hit description =Transcription factor R18-like protein
  Pfam annotation: Domain name=SAP; Domain location=137-171; Score =13.8; E_value=0.033; Accession=PF02037.17; Description=SAP domain
MPVTRRRAAVAAVAQEEGRDAAIYISSDSDAGSDPEDSESEEEEDTSDEDFIDVSDSEADDGESSDEEGEEDSESEAEAEAEQLGADRSEVACNKIAGLLSSNILEPLYLSPCNFRTDPQSFKHSQNKEFPVGGRSLEGLKLAEYKVYLKKNGLSQTGGMDTCVDRIVLHWRFKDADPRRIYPRSSFCINCKGDVCRGDAVLFKQKVYEKSGKRHAKCIGNRIVAGKVIKESYGKQKQQHTFTIQVFWSKGPGKLPPLHLLLVKGRNLYRMMTFRQVHKKSCLSTKARTPYNLEWMEYIIRNTHISLQEFKPCDDTIVRCNRIMELSGIRTGHIFDVHITILFLPACVLCPWANEAERLKILEEKHNRGDDARRVRALNRPNSAGNSSYLIMFIKCDRFMEQFMHGIVSAKHLLFLWTYGVVSRTSLKGKKKLHKEKHKSRSERPHRQSNITELDKGKKRPAQSSKSDLPNKRSKKEGSQVPSRKKDTGGRMAKKNGPCQDKSICTGQNSSLCKDNREKHSHATFQKKCHAEPLNNGPSGSGWNRTAGGHSQFEGRHITPASHVEANHGNFVSVQHPCVERLQRPTQSREVALAHPGGGHPYVLSSAAMGLRHQNGATAGVHAPAYFRGLPLSQQRAAFPSASTPQTGYHPHPEELFVAPHFRYPRGSAGFRR

SEQ ID NO: 45280 - protein, 598 aa, Zea mays
  Coding DNA Sequence Number=SeqID_3501
  Gene Ontology: Mol. function=protein serine/threonine kinase activity; Cellular component=flagellin-based flagellum; Biological process=protein amino acid phosphorylation
  Homolog annotation: Hit_ID=Q5GAP1; Match level="QueryCoverage=99%, HitCoverage=100%, E-value=0.0, Identity=85%"; Hit description =Putative CDPK-related protein kinase
  Pfam annotation: Domain name=Pkinase; Domain location=144-406; Score =312.1; E_value=9.7e-91; Accession=PF00069.15; Description=Protein kinase domain
  Pfam annotation: Domain name=Pkinase_Tyr; Domain location=144-404; Score=11.6; E_value=3.5e-13; Accession=PF07714.7; Description =Protein tyrosine kinase
  Pfam module annotation: Pfam domain module=Pkinase::Pkinase_Tyr; Domain location=144-406::144-404
  Subcellular localization annotation: CTP_CleavageSite=63; ConfidenceScore=5.18e-01
MGGCHAKPLTQDADGSPPHAAPATPPPGNATPGPGKKHWAVSPFFAFSTPSPSPAHHLFGGSAASPRKSPAPPGSAPTTPARRILRLPFPPPSPAKHIRAALARRHGPPRPSIPEEGGGEGEGGGGARGLDKGFGFNKGFAAKYDLGDEVGRGHFGYTCAATVKKGARKGESVAVKVIPKAKMTTSIAIEDVRREVKILKALSGNKNLVQFYDAYEDNDNVYIVMELCEGGELLDRILSRGGKYSEDDAKAVLVQILNVVAFCHIQGVVHRDLKPENFLFTSKDENSHLKAIDFGLSDFVKPDERLNDIVGSAYYVAPEVLHRCYSTEADVWSIGVIAYILLCGSRPFWARTESGIFRSVLKADPSYNEAPWPSLTPEAMDFVKRLLCKDPRRRMTAAQALSHPWIRNYNAIRLPLDILIFRLIKAYIRSSSLRKAALRALSKTLTVDELFYLKAQFSLLEPDRNGCITLDNIRMALTREATDAMKESRVQDILVSLSALQYRRMDFQEFCAAAVSVHQLEALDRWEQHARSAYEYFEKEGNRAIVIDELASELGLSPSVPLHVVLQDWIRHTDGKLSFLGFVKLLHGMSSRSLSKMR

SEQ ID NO: 45281 - protein, 172 aa, Zea mays
  Coding DNA Sequence Number=SeqID_3502
MAPLAGPDCLSVSLCQVALQSEWRRRRCPSVRPLYADGGYQLRIRRLEGTPNYGPRQYCKAFHKGNWSEPSASSSDQSKATGELVLGLRWGGGEVVEERRRLVLDTEVDEAPRSRRRTTAAMGKERWGVATSEDGTSRKWFTPKSNRIIDFGHIDKFFGHDLNQIEFYKVEY

SEQ ID NO: 45282 - protein, 284 aa, Zea mays
  Coding DNA Sequence Number=SeqID_3503
  Gene Ontology: Mol. function=delta14-sterol reductase activity; Cellular component=integral to membrane; Biological process=steroid biosynthetic process
  Homolog annotation: Hit_ID=Q9LDR4; Match level="QueryCoverage=73%, HitCoverage=58%, E-value=1e-82, Identity=66%"; Hit description =Delta(14)-sterol reductase
  Pfam annotation: Domain name=DUF1295; Domain location=59-275; Score= -101.8; E_value=0.018; Accession=PF06966.3; Description=Protein of unknown function (DUF1295)
  Pfam annotation: Domain name=ERG4_ERG24; Domain location=4-284; Score= -13.2; E_value=9.1e-13; Accession=PF01222.8; Description=Ergosterol biosynthesis ERG4ERG24 family
  Pfam module annotation: Pfam domain module=DUF1295::ERG4_ERG24; Domain location=59-275::4-284
MEAAAAVLPTLVPSGSAVVVVLLAYLGYLAAAGAILPGKLVDGALLPDSSRLHYRCNGLLSLLLLLGLSAFGVYMGWMSPTVVADMGLELLSVTFIFSVIWYIIDYFVHEEFMTSTWDIIAERLGFMLVFGDLVFIPFTFTIQGWWLLKNKVELSLLSGLANLCIFLIGYLVFRGANKQKHVFKKDPKAPIWGKPPKVVGGKLLASGYWGIARHCNYLGDLLLALSFSLPCGVSSVVPYFYPTYLLILLVLRERRDEARCSQKYREIWAEYCKLVPWRILPYVY

SEQ ID NO: 45283 - protein, 69 aa, Zea mays
  Coding DNA Sequence Number=SeqID_3504
MVRKKWEKVSRELKLMLETHYRLTVLVLRVLSTPKGEIILPRCSHISVDRSTCGYGLPLPLLTNDAVSA

SEQ ID NO: 45284 - protein, 713 aa, Zea mays
  Coding DNA Sequence Number=SeqID_3505
  Gene Ontology: Mol. function=protein-tyrosine kinase activity; Cellular component=integral to membrane; Biological process=protein amino acid phosphorylation
  Homolog annotation: Hit_ID=Q9AUC2; Match level="QueryCoverage=96%, HitCoverage=96%, E-value=0.0, Identity=76%"; Hit description =Receptor-like protein kinase 1
  Pfam annotation: Domain name=LRRNT_2; Domain location=36-80; Score =43.2; E_value=8.7e-10; Accession=PF08263.3; Description=Leucine rich repeat N-terminal domain
  Pfam annotation: Domain name=LRR_1; Domain location=110-131; Score =6.7; E_value=16; Accession=PF00560.23; Description=Leucine Rich Repeat
  Pfam annotation: Domain name=LRR_1; Domain location=133-156; Score =10.7; E_value=2.8; Accession=PF00560.23; Description=Leucine Rich Repeat
  Pfam annotation: Domain name=LRR_1; Domain location=158-180; Score =12.1; E_value=1.6; Accession=PF00560.23; Description=Leucine Rich Repeat
  Pfam annotation: Domain name=LRR_1; Domain location=182-203; Score =9.4; E_value=4.9; Accession=PF00560.23; Description=Leucine Rich Repeat
  Pfam annotation: Domain name=LRR_1; Domain location=204-226; Score =14.7; E_value=0.33; Accession=PF00560.23; Description=Leucine Rich Repeat
  Pfam annotation: Domain name=LRR_1; Domain location=83-106; Score =1.3; E_value=1.6e+02; Accession=PF00560.23; Description=Leucine Rich Repeat
  Pfam annotation: Domain name=Pkinase; Domain location=395-683; Score=- 4.3; E_value=2.6e-08; Accession=PF00069.15; Description=Protein kinase domain
  Pfam annotation: Domain name=Pkinase_Tyr; Domain location=394-686; Score=-49.3; E_value=1.9e-09; Accession=PF07714.7; Description =Protein tyrosine kinase
  Pfam module annotation: Pfam domain module=LRRNT_2::LRR_1::LRR_1::LRR_ 1::LRR_1::LRR_1::LRR_1::Pkinase::Pkinase_Tyr; Domain location=36 -80::110-131::133-156::158-180::182-203::204-226::83-106::395
MAGAPSSLARLLLLLLLAAGCLLPLVADAARLTLSLAPAADALLRLKAGIKDDGGALGSWSPDTSPCADGGPSWKGVLCNKDGVHGLQLEGMGLSGTLDLRALTSLPGPGLRTLSFMNNEFAGPLPNVKELSGLRAVFLSENKFSGVIPADAFAGMGSLKKVVLSNNDFTGPIPASLADAPRLLELRLNDNKFQGKIPDLKQEELTEVNLANNELEGEIPASLKSMTSDMQQEALRPAARCQMRGPPRRRHQRRIRRPPSKKAPRRHKQQQTPVASTGASSADDPKQDEGQEPVEGSISFGVSAALLGTLLIAGVAFIALRRRRGYKTKNFGPTASSSRPSGPPRVEPHPPAAKAPAAAGGVAHGGGAARKAEQGRLTFVRDDRGRFFELQDLLKATAEVLGAANLGVCYRATLTTGQSVVVKRFKEMNRVGREDFEEHMRRLGRLSHPNLLPLVAYYYRKEEKLLIHDYVPNRSLANLLHGGGESGGMKKAAVHWAARLKIVKGVARALSYLYDELCMLTVPHGHLKSSNILLDAHHGPLLTDYALVPVMNQSHAAQLMVAFKSPERKQFGRSSKKSDVWCLGLLILEILTGRPPTYDPPKAAAPSGELSSSQQKPGPAAGNTDLVTVVGSTPEGEWLNTVVDRDLRGEEEEDKEEMVKLIRVGMACCESNVDNRWELKTAIERIEELKAKERPDEEQATVIDEDYSDVALN

SEQ ID NO: 45285 - protein, 347 aa, Zea mays
  Coding DNA Sequence Number=SeqID_3506
MVECLLVMNIEAVWDKSTTESKSRCLLEKVDSLEKENEDLGRQVVGLKDMMAKTWVKAQGTQERATMLESELLAVKAYHEKLEVDTRAGVDRVHSLFVEAYHDLGAVTMPNDMSGGEMDTRFLALRDEDVEDLDSLGTLGTRTADVESRDARTSHWLIAEEQTLTLGLVPAQVPMTVPMQGNFDSSGKGKDILDVAACVTLLSCWSPSFSNDGGGFSDFDSLCSEKGLEFFEGMDNESSKEDLNFFVALYIASMSKAATGEGSSGGAPPAKGKQKKTRARIPKRRVPSSGVFACDRGGGCRRRCMGMQGPTSRILLSEVLGMVPSHINEGESVELSMGPCHAVLTRS

SEQ ID NO: 45286 - protein, 356 aa, Zea mays
  Coding DNA Sequence Number=SeqID_3507
  Homolog annotation: Hit_ID=Q75HH1; Match level="QueryCoverage=17%, HitCoverage=28%, E-value=5e-11, Identity=57%"; Hit description =Putative calcium-binding protein
  Pfam annotation: Domain name=efhand; Domain location=286-314; Score =39.6; E_value=1e-08; Accession=PF00036.22; Description=EF hand
  Pfam annotation: Domain name=efhand; Domain location=327-355; Score =36.0; E_value=1.3e-07; Accession=PF00036.22; Description=EF hand
  Pfam module annotation: Pfam domain module=efhand::efhand; Domain location=286-314::327-355
MKWQKRNAEGRCICVEFLRSVPTPRLGEISGDGRAWVNKSPPVDGDVPSHFPRHREPARKTPAPPAPPRPTLRPRALLLLHHNGLVSFREAASASRTVSLSPGPRPLSRFRQSAHDKAAYIYTRRAHGSSSSHQTPKPSGRRQSEGRSSPSPNCNCNCYRTRFPETDTAAIATAAAMEMASSSAPTASYNVSVAQAVLTLSINAILLWLTTVIKSYSSSSSSARRRDAAPATAPAPPSPSPAKPAAAAAAAVDLDAVLGLMGAGAESVGFEEAAALFEEEEATVEEARQAFAVFDRDGDGFIDAAELRAVLTSLGFESGVSAAAEAECQRMIDAYDEDKDGRIDFREFVKLMETSH

SEQ ID NO: 45287 - protein, 421 aa, Zea mays
  Coding DNA Sequence Number=SeqID_3508
  Gene Ontology: Mol. function=DNA-3-methyladenine glycosylase I activity; Biological process=base-excision repair
  Homolog annotation: Hit_ID=Q6ERQ1; Match level="QueryCoverage=61%, HitCoverage=64%, E-value=1e-100, Identity=67%"; Hit description =Putative chain A, solution structure of 3-methyladenine DNA glycosylase I
  Pfam annotation: Domain name=Adenine_glyco; Domain location=185-365; Score=286.3; E_value=5.9e-83; Accession=PF03352.4; Description =Methyladenine glycosylase
  Subcellular localization annotation: CTP_CleavageSite=34; ConfidenceScore=5.59e-01
MSSAAAAPRVPGAARRLSQSPKPPGARDKEPPPPASARRKNLLPSPASARGAAASMLLRRAAVAGGGRGSSYVHPSSSLSVSCASEASTESFCSRASTGRIGRRPAGPPAGAPRRRAAGSAGPPSARPAAAASASRKVASSGVVPGGGAAATTVHHQAVPPVVAGGLLNGEPTAAASAGPPRCPWITPNSDPCYAAFHDQEWGAPVHDDMKLFEMLTLSGALAEMAWPAILSKRDTFREVFMNFDPQLVAKLNEKKFLAPSSPASSLLSQHRLRIIIENARELLKVIDEFGSFDSYCWSFLSNKPTVGRYRHTREVPLRTAKADAISQDLMRRGFLGVGPTVVYAFMQAVGMANDHLVTCYRFEECCDLESCAAPEGYGGDNCKKPPAAASDQELSMLCGLVQCVALEPSRAATATVISIS

SEQ ID NO: 45288 - protein, 44 aa, Zea mays
  Coding DNA Sequence Number=SeqID_3509
MSLDSWIHIYAIFRVEDILPALLETALDDTKGRMEIENGHQEQH

SEQ ID NO: 45289 - protein, 123 aa, Zea mays
  Coding DNA Sequence Number=SeqID_3510
  Subcellular localization annotation: CTP_CleavageSite=35; ConfidenceScore=5.06e-01
MAVAGGRKRQAGGSGSRVVSKLTPPPGIAKGPSPMAEDDTSAFRSSTPRVGKGDTPKGILLREGSGPRAPLLIRGSKAGPSKGFQQPPQSTRAPRPLLVRGSKADPSKGFNGRLRPLGLRAHY

SEQ ID NO: 45290 - protein, 101 aa, Zea mays
  Coding DNA Sequence Number=SeqID_3511
MEHRRGWVHLRRDFSVSSTSLEWWWMHVVRDAKGGVHPGRPGHLFTVRGTEDGQLFHNFRVVADFSAMAVAEVRGPDIGAHVTMSNESNVASVATLPPRAH

SEQ ID NO: 45291 - protein, 49 aa, Zea mays
  Coding DNA Sequence Number=SeqID_3512
MESHTKKLVGDVFLKIRLLEGQTSCSHSLVHELLEDVNEVWLRWFISIQ

SEQ ID NO: 45292 - protein, 108 aa, Zea mays
  Coding DNA Sequence Number=SeqID_3513
MAHWPSDTPARLALGIRAAMQAYSSAACTTPVITVCIGILSYVIDSPRRLPTRHASSSAVVARLRYILELRGVDGDSSCFPEYLSVRTYSLSDHTRKQCNHVGEMRRP

SEQ ID NO: 45293 - protein, 251 aa, Zea mays
  Coding DNA Sequence Number=SeqID_3514
  Gene Ontology: Mol. function=RNA-directed DNA polymerase activity; Cellular component=mitochondrion; Biological process=RNA-dependent DNA replication
  Homolog annotation: Hit_ID=UPI00004C1731; Match level="QueryCoverage =85%, HitCoverage=20%, E-value=5e-90, Identity=87%"; Hit description =UPI00004C1731 related cluster
  Pfam annotation: Domain name=rve; Domain location=73-225; Score=86.9; E_value=6.2e-23; Accession=PF00665.16; Description=Integrase core domain
MRRPRHRSSSDGVWDEGEDGEGIERRVASSPSPQHFYWPTAVADATRIVRSCQGCQFYARQMHLLAQALQTIPITWSFAVWGLDLVGPLQKAPGGFLHLLVAIDKFSKWIEVRPLISIRSEQAVAFFTNIIHRFGVPNSIITDNGTQFTGKKFLDFCEDHHIRVDWAAVAHPMMNGQVERANGMILQGLKPRIYNDLNKFGKCSLCDATTPEGFGPEASRWETWYFGCGKTPEGATRLLLPRKGRSSSPRF

SEQ ID NO: 45294 - protein, 125 aa, Zea mays
  Coding DNA Sequence Number=SeqID_3515
MQVACNHTTGAHPSDFVASSMEAQAHTSCNRRAGYYVQELHRHLRQYRASSTAGPVPRLEATLRMAQQCRSSTLITGTWKGDISKGILLREGSEPRALLLIRGSKAGPSEGFDSRPRALRLQAHY

SEQ ID NO: 45295 - protein, 128 aa, Zea mays
  Coding DNA Sequence Number=SeqID_3516
  Homolog annotation: Hit_ID=Q6QP51; Match level="QueryCoverage=72%, HitCoverage=39%, E-value=1e-17, Identity=58%"; Hit description =Putative growth-regulating factor 1
  Subcellular localization annotation: CTP_CleavageSite=52; ConfidenceScore=5.44e-01
MAGASDTSGRRSGRRFASVMMTASKKGSGKGVFRKRTLPSEGNGPRALLLIRGSKVAPSGVRQPPQSTRAPCPLLIRGLKAGPSKGFDSRPRARRVRDGPGYVPYMAEARATFPRYPSTFPRPAGTIL

SEQ ID NO: 45296 - protein, 161 aa, Zea mays
  Coding DNA Sequence Number=SeqID_3517
MEQDEALGYPSRATISGEGKDVLVCGLDAWEAAVVKNVVQSIGFLQIEEALSKLKKRKLFQLSHPVLKCVEHRTVRWHTGLFGAHTPDCPVHQEPQPQLLVPGGTRREDHRTVRCEVRTVRCKRSTAPTITCSDRPTARRTGQETMRYLVHHQTVRCDRRK

SEQ ID NO: 45297 - protein, 126 aa, Zea mays
  Coding DNA Sequence Number=SeqID_3518
MRLEFAGVLGRAWASTSPRRDVGTQSMARQNWSEGRRGLGREVWRVGSGVRRGEHREARRQASREMRLTAGVAPKAWLRRHRGALGNRKGRWLGVLTGGGRRNWHKRGERAFLRDSRIGLMEAVGK

SEQ ID NO: 45298 - protein, 146 aa, Zea mays
  Coding DNA Sequence Number=SeqID_3519
MAAEQWLRVQGRWLLILEWRPGGRREGRLLAGDIVAFTVARPPAMNGHTSVVYCDMLNLTGSWHPSDGWQNSGEVIWTGDKASGYGGQLPISSTVKIFSPRGVIRAPTGMNRIDDVNPGARVADSKVHCTNDLLQLLYNQNFIQSV

SEQ ID NO: 45299 - protein, 36 aa, Zea mays
  Coding DNA Sequence Number=SeqID_3520
MEPLQALPIFLDRMFHHVLAVILSVTFVLAFGEVFI

SEQ ID NO: 45300 - protein, 88 aa, Zea mays
  Coding DNA Sequence Number=SeqID_3521
MGRGKSSFFASLFGCKKHGSGGRQDQVEAAAATRPPPQGYYHGTRVRPSDDDEYYGKNWYADRDINQKASEYIERMHRVMLISQHDDE

SEQ ID NO: 45301 - protein, 85 aa, Zea mays
  Coding DNA Sequence Number=SeqID_3522
  Subcellular localization annotation: CTP_CleavageSite=36; ConfidenceScore=5.23e-01
MAWMKSHVGGHPSASSRWCSSSRYLGEHARGRRQERARTFWSGQPTIGSHKSATGRVTAWRSRVGMGRHRDPQSEWLADVDNGPR

SEQ ID NO: 45302 - protein, 126 aa, Zea mays
  Coding DNA Sequence Number=SeqID_3523
  Gene Ontology: Biological process=response to auxin stimulus
  Subcellular localization annotation: CTP_CleavageSite=39; ConfidenceScore=5.12e-01
MHACCHLLSLPARPTARQHVQPLRGAQRLHLTCAVVCVRAYMGSWVRTITTPFRKACTIFGPQKDGGGGGKRSQQPNPATMVRHVDDAAERAKLHGEVMACAYEDVQVMWSMLDQTTRIGDLSGSS

SEQ ID NO: 45303 - protein, 124 aa, Zea mays
  Coding DNA Sequence Number=SeqID_3524
MGKSKKGGSSSHHSGDKGKRELTPPSEDFGDSEYSEEEFSSESEEVWTYIRAVERARLEGSDESEVFSDEENSSDSSEEGGSDGDSEGDGDDGGGGDGDGDDGEGGGSGDGGDDNKGSSNKASG

SEQ ID NO: 45304 - protein, 101 aa, Zea mays
  Coding DNA Sequence Number=SeqID_3525
MRLAGHVGREASDECKAKRFPGRVGQGREERTRRELREEEGVRGEEEEGSPVHVELGYDGDWTDWMRARRGLDPPWPQQQFGCNCADPDRDEGKKTEARRG

SEQ ID NO: 45305 - protein, 212 aa, Zea mays
  Coding DNA Sequence Number=SeqID_3526
  Homolog annotation: Hit_ID=Q6Z5M6; Match level="QueryCoverage=40%, HitCoverage=10%, E-value=4e-20, Identity=46%"; Hit description =Transducin / WD-40 repeat protein-like
  Subcellular localization annotation: CTP_CleavageSite=75; ConfidenceScore=5.63e-01
MTRPIVSFPMPNPNLNTNPNANPNAVAPGPNPGARLMQLLGNSGPTQFETADSMPPPTSEFAQLQSLPAMPSAPPARMLSSTSSKIDRCEPVVYGLRLDNICVLNINSALRSLLRGHTQGGSIHLTGRSAHSPPSAPSMEARSPNMRSSQRRSNPIQSTANNGIQWQRHCDDVRNTALLEPSKQPKSVTFSVKVSLAQMLRGMIIMDVVTLE

SEQ ID NO: 45306 - protein, 47 aa, Zea mays
  Coding DNA Sequence Number=SeqID_3527
MGRGKKSSFFASLFGCKKQSSGGRQQEVEAAASTPPQRIGFVVLLFL

SEQ ID NO: 45307 - protein, 224 aa, Zea mays
  Coding DNA Sequence Number=SeqID_3528
  Subcellular localization annotation: CTP_CleavageSite=18; ConfidenceScore=5.11e-01
MRFRGKGPTTARNSRPVDAARTRSPPCVCPELPPARPGRGNQSGWALMAWFNGSGGGFELPPRDILSWPDNAPGVRRWSIGTEPGEAGAILALSRCNGPSENPGSTSMAVDADLVTAPSGSTRGAGVRSNGGEADIGAHLASETRKDKAASMGCEAWRFRPARGWRNSVGEEEEVPDQGDPQSSHQAHAQDIAEMLAPLCRRARDKSGPCRGFSLVGRIRSRSP

SEQ ID NO: 45308 - protein, 244 aa, Zea mays
  Coding DNA Sequence Number=SeqID_3529
  Subcellular localization annotation: CTP_CleavageSite=18; ConfidenceScore=5.11e-01
MRFRGKGPTTARNSRPVDAARTRSPPCVCPELPPARPGRGNQSGWALMAWFNGSGGGFELPPRDILSWPDNAPGVRRWSIGTEPGEAGAILALSRCNGPSENPGSTSMAVDADLVTAPSGSTRGAGVRSNGGEADIGAHLASETRKDKAASMGCEAWRFRPARGWRNSVGEEEEVPDQGDPQSSHQAHAQDIAEMLAPLCRRARDKSGPCRGFSLVGRIRSRSPGYKLGVTNPTTLKNNLVLEI

SEQ ID NO: 45309 - protein, 194 aa, Zea mays
  Coding DNA Sequence Number=SeqID_3530
  Gene Ontology: Mol. function=phosphotransferase activity, phosphate group as acceptor; Cellular component=mitochondrial inner membrane; Biological process=nucleobase, nucleoside, nucleotide and nucleic acid metabolic process
  Homolog annotation: Hit_ID=Q08480; Match level="QueryCoverage=75%, HitCoverage=60%, E-value=6e-73, Identity=89%"; Hit description =Adenylate kinase B
  Pfam annotation: Domain name=ADK; Domain location=41-185; Score =223.0; E_value=6.8e-64; Accession=PF00406.12; Description=Adenylate kinase
  Pfam annotation: Domain name=ADK_lid; Domain location=163-194; Score =37.8; E_value=3.8e-08; Accession=PF05191.4; Description=Adenylate kinase, active site lid
  Pfam module annotation: Pfam domain module=ADK::ADK_lid; Domain location=41-185::163-194
MEITVRNATILCSYFWRSSSSSSIKFSALDFREFDTSSTNLVGPPGSGKGTQSPIIKDEYCLCHLATGDMLRAAVAAKTPLGIKAKEAMNKGELVSDDLVVGTIDEAMKKPSCQKGFILDGFPRTVTQAQKLDEMLAKQGANVDKVLNFAIDDAVLEERITGRWIHSASGRTYHSKFAPPKSPGVDDQYRHRCD

SEQ ID NO: 45310 - protein, 612 aa, Zea mays
  Coding DNA Sequence Number=SeqID_3531
  Gene Ontology: Mol. function=DNA binding; Cellular component=nucleus; Biological process=regulation of transcription, DNA-dependent
  Homolog annotation: Hit_ID=Q8LI26; Match level="QueryCoverage=99%, HitCoverage=100%, E-value=1e-139, Identity=46%"; Hit description=Myb- related protein-like
  Pfam annotation: Domain name=Myb_DNA-binding; Domain location=26-72; Score=47.4; E_value=4.9e-11; Accession=PF00249.21; Description=Myb -like DNA-binding domain
  Pfam annotation: Domain name=Myb_DNA-binding; Domain location=78-123; Score=38.9; E_value=1.7e-08; Accession=PF00249.21; Description=Myb -like DNA-binding domain
  Pfam module annotation: Pfam domain module=Myb_DNA-binding::Myb_DNA -binding; Domain location=26-72::78-123
MATGADLTSPTGAAAAAAAARKDRHIVSWSSEEDGVLRAQIALHGTDNWTIIAAQFKDKTARQCRRRWYNYLNSECKKGGWSREEDMLLCEAQKVLGNKWTEIAKVVSGRTDNAVKNRFSTLCKRRAKDDELYQENGVPCSNTNAKKVLTETGRLTPGGAGSLVHIKQTRSSSYNLKENLVPNMKLFELEKSTQDARQPLATISSNNQDNQSDFLCSLATKIKSDNTSKSMDEAWQQLQDHLVKKEHNKVPENSGSEIASLLEELDDLIVDPYERKDEDEQKLSEHNGRTDVDNDHCNGSSQTSIVVTTNMVPEEMMGDCPVDNCNEDSSLCRKVLSGSTEPCPGAKMTGCGNLSEDQVAEGSVLQRVESISPVITDIDDLLVDPYESEAEDEEKSGEQNGQIDVHAEQCFGSSQTIIEVISDMAPDEVMETCSADNREEHSSICRNVLSGSMAPCPGAEIPTSEKMSELAEDSRLQCMEFASPVLANFASKECGETPEPQVLNEIVEDSRLQCIEFNSPAHTILPDKTGAENFASPSFDVVAKDSKPPSLEFTSPAHTVATFQPYADGIPTPKFTASERSFLLSVLELTSPGSRPETSQQPSCKRALLNSL

SEQ ID NO: 45311 - protein, 302 aa, Zea mays
  Coding DNA Sequence Number=SeqID_3532
  Homolog annotation: Hit_ID=Q5VQY3; Match level="QueryCoverage=31%, HitCoverage=21%, E-value=9e-27, Identity=67%"; Hit description =Probable auxin efflux carrier component 5
  Subcellular localization annotation: CTP_CleavageSite=64; ConfidenceScore=5.18e-01
MECCVMGICVRSIQVRQLRRGAPLNPSSPTPASPNGVSSPILGAQNLLPPLAPPPPCPRSAVASASRVRRTSFLLSLRRRLPLDPLSRLRRAAPLGTPYTGALCYGRAVRQLRLARAQTGRGGAGRRERLSDEQCAGINHFVALYAVPVLIFHMVSTNDPYHMNERLIAADTLQKAVMLLALTAWAFWSHLSRRRDGGRGKRQVVQGAESPIKWVVTNFSVASLPRVPGGPRIGHCSTADATASGCRAGLASPAATRCTTLEFAYLPSAVVSASSSDDAAYVVRDAVRVHVQPVIRKERVGA

SEQ ID NO: 45312 - protein, 106 aa, Zea mays
  Coding DNA Sequence Number=SeqID_3533
MHGATPAAGGGRTHQGEALAPWGKAPAAGVHGEKMERGGGVRRERGELAAPQVHDVGAEGSGLAVLPKETRRARSGREEERMAGGTVKKMNSQQGWSPPAGQHIRR

SEQ ID NO: 45313 - protein, 52 aa, Zea mays
  Coding DNA Sequence Number=SeqID_3534
MANGEEMSSGMGAETRGQGARTDLEYADHGEPTHSSAENQIGGREKLGGSGG

SEQ ID NO: 45314 - protein, 119 aa, Zea mays
  Coding DNA Sequence Number=SeqID_3535
MASKDKGLRPAKGWPTVTLAGKGLQSVILAKDPQGEGFKVPDAPPGAAAAFAAAGPDAERLTPRRVGVCACCRCGWSGTAECGRQRRKAQRHRRGRVVTRRLGLGLDGSANGGRKQKGG

SEQ ID NO: 45315 - protein, 106 aa, Zea mays
  Coding DNA Sequence Number=SeqID_3536
MQAACNRAKWVHLSDFQRAQHGSPGPRVMQPGPGKGDTPKRILLCEGTRLRASLLIRGSKAGPSKGSTAASERAWAPHPLLVRGSKAGPSEGFNDCLRLLGLHAHY

SEQ ID NO: 45316 - protein, 159 aa, Zea mays
  Coding DNA Sequence Number=SeqID_3537
MGVGKERFVNKRKREPTPPSEDFGDSEYSEEEFSSESEGSPAPVSPPASSDDSDDSQGIAAEVWTYIRAVEHSGLEGSDESEYSSDEEDSDGGGEDEDDDDDDGDDDDGGDGDGSGNGRGSGDSGRDGDGGSSRGSTKGGSSKGSTKGGGGGSRGRASG

SEQ ID NO: 45317 - protein, 136 aa, Zea mays
  Coding DNA Sequence Number=SeqID_3538
MNCQCHRGVVLYAIERHTDPLLRPSWPRQQSCVTLGLQHAVLEAPASEPYQAHVWAKAVTRQRPCPRERSRGTSRVGSRTRAEEPLTTIGAHDPYSNTWIKEELGQSATEKSGSRGLKLERIKGKIISCMLPRKHD

SEQ ID NO: 45318 - protein, 548 aa, Zea mays
  Coding DNA Sequence Number=SeqID_3539
  Homolog annotation: Hit_ID=Q6ERD5; Match level="QueryCoverage=25%, HitCoverage=93%, E-value=3e-59, Identity=74%"; Hit description =Putative nuclear protein p30
  Pfam annotation: Domain name=DUF636; Domain location=35-130; Score =77.5; E_value=4.1e-20; Accession=PF04828.4; Description=Protein of unknown function (DUF636)
MTSSTSSHDDVVHTGGCHCRRVRWHVEAPASVVAWVCNCSDCSMRGNMHFVVLAAKFGLRASADESITTYTIGTHTARHTFCKVCGITSFYTPRSNLDGVAVTVACVDPGTLGHVEYQKADGRNWEEWFERSGIAGFSEGKADATAEYRNLRRPPVPVHVLPLRPRSAAISALHLAHRALIPPTPPHSIPPTPPRPQSSTPRPRPRHPPPRPRPQPVEISPARSRLARHQLTLALARDPSLPDARDPSSPPMAISGPRQVPSPLRQSSSRPRQAIRGKRPLTGEEHVAAPAVEETSEKKQASTTELPAPSGLTKKGCGGLLAFGSGGPDSEGMDEGTDDEGTDVAVEASLFPHPCLDGEGTDDDDGRGEENPPRTGTAGGISRQSRACTEMVVRKETTLHEAVRGGHEATPRAVNGKAPVICAAPGPATVVARRTTAQGLNGVSVAIAEPLGSHARPRFGETTVDVTGIPHRRSIRVADPPRTVDELATPSIVGENLLFMLAITPLGLSPTNVRASDCASAGEAPPWVGGAAIQTTVGREKISGSSIC

SEQ ID NO: 45319 - protein, 95 aa, Zea mays
  Coding DNA Sequence Number=SeqID_3540
MAAEREERKGDDTSVVATVAMATPAYVVDPTSGIGLEGPLHPCTRREKKQVAGGLSEVFVEGLDEGAVGTCCTKSGPFDFDPMVSIAHQFILGQI

SEQ ID NO: 45320 - protein, 89 aa, Zea mays
  Coding DNA Sequence Number=SeqID_3541
  Gene Ontology: Mol. function=lipoxygenase activity; Biological process=electron transport
  Homolog annotation: Hit_ID=Q8H016; Match level="QueryCoverage=98%, HitCoverage=7%, E-value=2e-29, Identity=73%"; Hit description =Probable lipoxygenase 6
MSAETHGFQGFHHVDNLYKEGLRLKLGLQEHLFQKIPLVQKIQESSEGMLRYDTPRMFSNSSAFMFRQCSYFDYAEDKFAWLHDDEFAR

SEQ ID NO: 45321 - protein, 75 aa, Zea mays
  Coding DNA Sequence Number=SeqID_3542
MALPPPPRSARSSKLQCRPSYGPKSAPDLLLNIGLAGAALATALDDYFWYKKPIYMISPGSTGRIKDLMKGPRAQ

SEQ ID NO: 45322 - protein, 104 aa, Zea mays
  Coding DNA Sequence Number=SeqID_3543
MAGKGHESTDREGRTAGAIWGIGHGDRCLTSGQSSRRLGAVFGELDGRERRRGSPTAAGGVGRARERVKLCEMRRGACAGHWRGSKKGARRMGGRRGRESRRRA

SEQ ID NO: 45323 - protein, 147 aa, Zea mays
  Coding DNA Sequence Number=SeqID_3544
  Gene Ontology: Mol. function=carbon-sulfur lyase activity; Cellular component=nucleus; Biological process=metabolic process
  Homolog annotation: Hit_ID=Q6ERD5; Match level="QueryCoverage=94%, HitCoverage=93%, E-value=2e-65, Identity=79%"; Hit description =Putative nuclear protein p30
  Pfam annotation: Domain name=DUF636; Domain location=35-130; Score =86.2; E_value=9.9e-23; Accession=PF04828.4; Description=Protein of unknown function (DUF636)
MTSSAGSHDDVVHTGGCHCRRVRWRVEAPASVVAWVCNCSDCSMRGNTHFVVPAAKFRLQAGADESVTTYTFGTHTARHTFCKVCGITSFYTPRSNPDGVAVTVACVDPGTLGHVEYRKADGRNWEEWFERSGIAGFSEGKADAAAE

SEQ ID NO: 45324 - protein, 94 aa, Zea mays
  Coding DNA Sequence Number=SeqID_3545
  Subcellular localization annotation: CTP_CleavageSite=56; ConfidenceScore=5.15e-01
MAAVFLALVLVAASVHADATAAPPARRLLGAGGGAAPPLPPPPQSCRNLRTWNEVVHNMKSMIGTKVESILKLRARKLRLNSRKRNRLKDEKAI

SEQ ID NO: 45325 - protein, 103 aa, Zea mays
  Coding DNA Sequence Number=SeqID_3546
  Homolog annotation: Hit_ID=Q653B6; Match level="QueryCoverage=59%, HitCoverage=7%, E-value=2e-26, Identity=88%"; Hit description =Putative potassium transporter
MEAVNDGGRHYWGGTCLASQGACLNLLGVRGPNRDSPGANARDAGVVHILGNTVIRARRDSGFIKKVAINYLYAFLRKICRENNTIFNVPHESLLNVGQVFYV

SEQ ID NO: 45326 - protein, 134 aa, Zea mays
  Coding DNA Sequence Number=SeqID_3547
  Homolog annotation: Hit_ID=Q6QP51; Match level="QueryCoverage=62%, HitCoverage=39%, E-value=1e-10, Identity=48%"; Hit description =Putative growth-regulating factor 1
  Subcellular localization annotation: CTP_CleavageSite=47; ConfidenceScore=5.27e-01
MSDFVTESHQREASSPLTLSNGSGFGKSPAGSSASLDLRPRPRKGVSDSELGLNLGLGRRSPPRPTLGLSLNHNLGRNRVLARPRPQPQEKPPPRPTLGSDQPRHRGYIITLPLASSGYEGTRPASHLAHPGNK

SEQ ID NO: 45327 - protein, 217 aa, Zea mays
  Coding DNA Sequence Number=SeqID_3548
MRIEVTSFVRGEISDEVPYIRHLLEGHSFVSVSLRRNFVSPSVKGLKTWSTGEWRCLALLLANWKVARKIEKRQYCKKGHAWYWYSTTFCGNRSGCGRSLALASAAATVAKVREKDTAPATPAGITLEDGSGERGGGAGAAHHRAPAAAAVAGEAAPLRWRAEKRERETRVCAARNDLILARLVVRLQLFGWFAACQQRFWASGRRATRINRGKMDP

SEQ ID NO: 45328 - protein, 356 aa, Zea mays
  Coding DNA Sequence Number=SeqID_3549
  Gene Ontology: Mol. function=protein disulfide oxidoreductase activity; Cellular component=mitochondrion; Biological process=cell redox homeostasis
  Homolog annotation: Hit_ID=Q9FHX0; Match level="QueryCoverage=90%, HitCoverage=67%, E-value=2e-40, Identity=66%"; Hit description =Similarity to glutathione-S-transferase/glutaredoxin
MFSQPSTKSKRVRIRCSLCHDDNFLSIVFISAFLDYHDIPYKVVEVNPLSKKELKWSDYKKVPILTVDGEQLVDSSDIINILQSRINPNEELTSDEEAKWRRWVDEHLVHVLSPNIYRTTSEALESFDYIAKHGCRTPGEGAGTQGAVAVGNQSPGLQGRCKRGGETCREPETVGGLPQTPHSAGTLRHWIGVGGAIDSGSDTVVGTRNDSGGNFSFTERFAVKYAGAAAMYMVSKKLKKKYNITDERASLYDAANTWIDALNGRDFLGTLFIRLLTMDRERVEIISFLEAMLTMAVRPGGSKPNLADLAVFGVLRPIRYLRAGKDMVENTEIGDWYRRMEDAVGEPSRIQDAEGN

SEQ ID NO: 45329 - protein, 84 aa, Zea mays
  Coding DNA Sequence Number=SeqID_3550
MEEESNDNARLPAVVRGLGDVALPSPLLASSQGRTFQRTQDRHTRSGSSQIKSNGRFARSQEQKKFLFYGKAKREDHTAYCAVG

SEQ ID NO: 45330 - protein, 614 aa, Zea mays
  Coding DNA Sequence Number=SeqID_3551
MQLFGFKNASIQRLLRELIVDSTGAVELNEPCEVTSEAGAHLVCKDASDVSEAEDPSVCLGMESGTPKRSIEPSQVENTLAVHYPDMLTAVDKCNVSTHKNTNEGDTVGRALLQDVSDSRCTLPLLEEVPKNAQSTSLDDNLGESSLVSSQQVGLSSGSYLNSEKSDIELAEKEVAKSMMSILLPQAIPLLMKSYKRKKFKHKNRENSTVSVKTVSAYNPSDSCCRGVTVPTIVGEGTNGNSSEMCDHGGSHHDKVKNGFANEDCRNDDLVVKLDEMNDYVADSFEDDAQILGDNTTKSMGNHHHYSEYVLSRGPNEKSKLLNGKSEVFEYQASVHNGKRAPDVVYNHENGQYMLSDSLVACLEDEFGGEDSSHPANYNQFNGDVKQFEQQFKELTAVIKNGSSVPVDVSYHKNTDNGSINVCAQAFARNGPGVSRNEECLANILPAPVHSNAHNDAVTSGKHDVSSTLNLPPACEAKSTLLVMRDGQHHTEVPAIDQKENRFHSVSYKCTKSDDNTSFHSENVEFVDKHVAFESPDNGMYSSDGSQRAITTEGWPAGDGVKADEENLLGKVEECQIRYKNGNKNTILSVYGEGCKTLIACAQSATCVNVKIIL

SEQ ID NO: 45331 - protein, 50 aa, Zea mays
  Coding DNA Sequence Number=SeqID_3552
MELMTMIGSLKVHMILVGRAEIVEFTKEAEMNKHSNDGLMLHYVKSLLKV

SEQ ID NO: 45332 - protein, 135 aa, Zea mays
  Coding DNA Sequence Number=SeqID_3553
  Homolog annotation: Hit_ID=Q6QP51; Match level="QueryCoverage=95%, HitCoverage=58%, E-value=3e-14, Identity=47%"; Hit description =Putative growth-regulating factor 1
MAPCDVVSLSPRSGEAEAPLRSRSSPSSEVEAESEPWGRARRSPSSETEAVSEPWGRARRSLSSSVEVKPEPWGRARRSFLWRPRLDLAAVSLTLSSGTAVGATQAALFSCQVGQRSDEVTVVTSALSTKERASG

SEQ ID NO: 45333 - protein, 133 aa, Zea mays
  Coding DNA Sequence Number=SeqID_3554
MASSKNRTNVTPDNIVRPTMESLSVEEQQFEDLMKQCDDDALRRRAQTTSLDASTTNRPAQTQPLYVGPSKYNLEPFGPMPNHPITHRGPSDNQHNNGHPSKLHVSESDPIPPTTMDKRVFGMAPGSSSSVEL

SEQ ID NO: 45334 - protein, 37 aa, Zea mays
  Coding DNA Sequence Number=SeqID_3555
MSIGGQLGNGRAADSYLLRHAGIGPGVVLLQFGYLSE

SEQ ID NO: 45335 - protein, 679 aa, Zea mays
  Coding DNA Sequence Number=SeqID_3556
  Gene Ontology: Cellular component=integral to membrane
  Homolog annotation: Hit_ID=Q8L4G8; Match level="QueryCoverage=90%, HitCoverage=89%, E-value=0.0, Identity=57%"; Hit description=C4 -dicarboxylate transporter-like protein
  Pfam annotation: Domain name=C4dic_mal_tran; Domain location=309-574; Score=284.2; E_value=2.6e-82; Accession=PF03595.8; Description=C4 -dicarboxylate transportermalic acid transport protein
MARCSTCDRFSRFMETTDEFAVPPRPALVHPDADGVRTPSALGPLSPEDPPPAFMERDWRHGGDNTAAYPGCSPFQPSAAGRPVSISLPASPTGGFDISSRTEAELQRDAAAVTDAPPPRMMMLPPFAPAPAMALEQPGKVVFRSQPIPAAPPVGDGGHDDEFGRSAPAAMALEQPGKVVFRSQPIIPGAPPEGDGAARGHDDFGRSAPAAKTRRDSRDTSYDSFKTWSGKLEKQIATHLLGSSLQQQPEHGEEPEEDDAASDRRNSSMPKVQRFFAALEGPELDKLRSSEELILPSDKTWPFLLRFPVSAFGMCLGMSSQAILWKRIAISASTRFLHITVKINLVLWCASVALMAAVSALYGCKLVLYFEAVRREYYHPIRVNFFFAPWIACLFLAIGVPDVVAATLPHWLWYVLMAPIVCLELKIYGQWISGGQRRLSRVANPSNHLSIVGNFVGALLGGIMGLKEGPMFFFSVGLAHYMVLFVTLYQRLPTSETLPRDLHPVFFLFVAAPSVACLAWARITGEFGYGSRVAYFIAMFLYASLAVRINLFRGFSFSLAWWAYTFPMTSAAIASIRYSSEVKNAFTQCMCIGLAAAATLAVAALFLATLLHAVVYRDLFPNDISIAITERRRSKPLVGEKMLLRLRSGKKVQQALSTAPADAAADLEAARAATTTSYT

SEQ ID NO: 45336 - protein, 338 aa, Zea mays
  Coding DNA Sequence Number=SeqID_3557
  Homolog annotation: Hit_ID=Q10QG0; Match level="QueryCoverage=23%, HitCoverage=29%, E-value=3e-12, Identity=50%"; Hit description =Uncharacterized plant-specific domain TIGR01568 family protein, expressed
  Pfam annotation: Domain name=DUF623; Domain location=279-338; Score =77.1; E_value=5.5e-20; Accession=PF04844.4; Description=Protein of unknown function, DUF623
  Subcellular localization annotation: CTP_CleavageSite=34; ConfidenceScore=5.53e-01
MNYGGGSRSSSRLRDRLARMFRPSALLRSTCNTAAAASSCSSSRALLGAVVDGDSSFLASSRRDLAVAGRAESFSAAVDRRRRSRSSLDAAPPPSRFSVDAPAALAETGRDKEEKKKKKKSPRDDDDDEHRLGVGGSSKNDSRMKLLLSNPYGFSSSDDTDVFSSDGEDDDRAAGRGSKRPGESAAETFFSSSRSFSSDSSEFYTNNKKQHKKKTATKAKAKAKGMAKAKPPAAAPSDRSSKAPASSSRRRPQYHRRAASSCDTCGEQVRRGFAVVKRSRDPYGDFRSSMVEMIVGRQLLGAPDMERLLRSYLSLNAPRHHPVILQAFSDIWVVVHGG

SEQ ID NO: 45337 - protein, 229 aa, Zea mays
  Coding DNA Sequence Number=SeqID_3558
  Gene Ontology: Mol. function=DNA-directed RNA polymerase activity; Cellular component=nucleus; Biological process=transcription
  Homolog annotation: Hit_ID=Q5JJW0; Match level="QueryCoverage=95%, HitCoverage=11%, E-value=7e-22, Identity=61%"; Hit description =Putative DNA-directed RNA polymerase II largest subunit
MDNTHHLWPAEAHGAAGGESHPDHALQPAPRQPIPGPAPAGRRQLRVLLLQRHAARQLRRAFRLHQAAGAHLPPQSHHRAGKILNLVCLRLKKPKQKDTGKECRFTSCSYCQHIPDVKKVQSGSLLCLNNEIVLLLQTPAFLLFQDLPPLCVSQVKKFNGARSLELKAPLKQEVAVRFWSFLDQFGFHTSGTSHRRPLHPKEVQDIMKKITEETRARLAAMGTIFRMDM

SEQ ID NO: 45338 - protein, 705 aa, Zea mays
  Coding DNA Sequence Number=SeqID_3559
  Gene Ontology: Mol. function=DNA-directed RNA polymerase activity; Cellular component=nucleus; Biological process=transcription
  Homolog annotation: Hit_ID=Q5JJW0; Match level="QueryCoverage=79%, HitCoverage=36%, E-value=1e-175, Identity=58%"; Hit description =Putative DNA-directed RNA polymerase II largest subunit
  Pfam annotation: Domain name=RNA_pol_Rpb1_2; Domain location=120-276; Score=92.6; E_value=1.2e-24; Accession=PF00623.11; Description=RNA polymerase Rpb1, domain 2
MKDWSEWERIAGIAIPSCQGRRAPGWPDRGYAVRSRRPSSPDTPKGLLRKILRTIEQIKSLNISQTRELGADDLQVAVGDYMDMGGPAEVFQHVTFTRQPAPKQWHKKMKALFLSKSSSYSCRAVITGDPYIGLDVVGVPDEVARRMTVQECVTNYNIARLQDMMEKGLCLTYTDLNTNTYDLDGKKGNKKCIMPRVGETVERRVLDGDLVFLNRPPSTDMHSVQALYVHVHDDHTIKINPLICGPLGADFDGDCVHIFSPRSVPGRVEAAELFTVEKQLLNSHNAKLNFQIKNDYLLALKIMCVRSYSREKASQIAMFSSGMILPGDWTIPQILQTTDALRTLPSHPNKQSVGASVTAIISSTLSEKGPRGAIKLINLLQPLLMESLLMDGFSISLKGLDGRCAMQKANQSSSLETDKFNKLTVDSIVNSSALGLLVDPKKDSTLKKLVEQIGFLGQQLQRTGRLYSSNLVEDCYNFLERCSGSTKCYDPSKGHDFVTSSFYNGLNPYEELLHSISVREKIERSSSKGLAESGNLFKNMMAMLRDVTVCYDGTMRTSCSNSIVQFDSTNVSSSVTPGDPVGILAATAFVNAAYKAVLDPVFGHSVEHPPGAQNPRMIASRRQGHMNVASLGALQLRLGSAAPPSSAMAAFSSGNSGRSGWPASGSKTSSSLEPKKKSELTGGHRGEEEREQLLVRENFPAAEYV

SEQ ID NO: 45339 - protein, 879 aa, Zea mays
  Coding DNA Sequence Number=SeqID_3560
  Gene Ontology: Mol. function=DNA binding; Cellular component=nucleus; Biological process=regulation of transcription, DNA-dependent
  Homolog annotation: Hit_ID=Q5QT32; Match level="QueryCoverage=99%, HitCoverage=100%, E-value=0.0, Identity=52%"; Hit description =Transcription factor myb
  Pfam annotation: Domain name=Myb_DNA-binding; Domain location=103 -149; Score=58.8; E_value=1.8e-14; Accession=PF00249.21; Description =Myb-like DNA-binding domain
  Pfam annotation: Domain name=Myb_DNA-binding; Domain location=155 -200; Score=48.3; E_value=2.7e-11; Accession=PF00249.21; Description =Myb-like DNA-binding domain
  Pfam annotation: Domain name=Myb_DNA-binding; Domain location=51-97; Score=61.5; E_value=2.8e-15; Accession=PF00249.21; Description=Myb -like DNA-binding domain
  Pfam annotation: Domain name=PDR_CDR; Domain location=717-841; Score=- 70.6; E_value=0.069; Accession=PF06422.3; Description=CDR ABC transporter
  Pfam module annotation: Pfam domain module=Myb_DNA-binding::Myb_DNA -binding::Myb_DNA-binding::PDR_CDR; Domain location=103-149::155 -200::51-97::717-841
MPSDKAKAPKKKGEEDPGIPPAPCEGEISHEPHRQRSLNGRTTGPTRRSTKGNWTPEEDAILSRAVQTYQGKNWKKIAESFPDRTDVQCLHRWQKVLNPELVKGPWSKEEDEIIVQMVNKYGPKKWSAIAQALPGRIGKQCRERWHNHLNPAINKEAWTQEEEITLIHAHRMYGNKWAELTKFLPGRTDNAIKNHWNSSVKKKVDSYISSGLLSQVPCLSLIECPAQCDSLSAMDQQNNGGTDCNDQNTSVVLSSDLQVNVDANKKEAHDSHSSLCQGVCYPSTETVGSVLPDDLEMDMDEGSGNSIFADDQTLCSTSNQEQSMVPFVVAQEMPVSVLSSVSSAEQKRHLISDAKSLKSELWKDVCLQTLITGDTDDPDASSRLNNPDSSKMDTNFLKEAYPLHTPNPSSVIETVYEPMALVTISPPFICSDGLSFAPENRSKPGEMSDCEAEMVTCSNNFFGNAEQSAKLASSDDRPEAFTMTESTTNCGGEQLTDAKEPVASTAKERLSKDIETMPDKKKGEGALFYEPPRFPGLDVPFISCDLVTSADLQEFSPLGIRQWMRSTMNVPTPLRLWGSPTHDESPDALKTAAESFPCTSSIMKKRQRSLLSPTPDERIEKKSGIAKGVTDISYMITATCSMNATNDEDIVTESAVCAKQPSLKHLDKKLEFSDINKENSDGASEQAKDAQNTQLVDEQHSSPNVVNPNTDLQDNIQPVQILVEQSSNNLISSDHGAKPSCFSVYEAKLWQVLFVNISYELLLLLDWLIPQGFVSPADRTYDALGLVNRLSKHSAAAAVEACEMLASGNTTSDKENKDNTDGKELVTRKSQIKIMAEARVLDFDESPAPARTADKKLGSCHRRSVSSPILPSPNLRSFR

SEQ ID NO: 45340 - protein, 620 aa, Zea mays
  Coding DNA Sequence Number=SeqID_3561
  Gene Ontology: Mol. function=protein serine/threonine kinase activity; Cellular component=membrane; Biological process=protein amino acid phosphorylation
  Homolog annotation: Hit_ID=Q8W0B8; Match level="QueryCoverage=65%, HitCoverage=66%, E-value=1e-173, Identity=75%"; Hit description =Putative brassinosteroid insensitive 1-associated receptor kinase 1
  Pfam annotation: Domain name=Pkinase; Domain location=244-524; Score =105.0; E_value=2.2e-28; Accession=PF00069.15; Description=Protein kinase domain
  Pfam annotation: Domain name=Pkinase_Tyr; Domain location=244-524; Score=141.7; E_value=2e-39; Accession=PF07714.7; Description=Protein tyrosine kinase
  Pfam module annotation: Pfam domain module=Pkinase::Pkinase_Tyr; Domain location=244-524::244-524
  Subcellular localization annotation: CTP_CleavageSite=74; ConfidenceScore=5.61e-01
MSTSPPPATSPPGAPPNGTASPTAAPPPPLPPAPSNSSSPTPATPTGAPPTAPAPPSTDSPAPPGTPPAPVSPNAAALPAPGRATPASASPPTPSSSGSGLTTSVVVGIAVGGFAVLLLGCLFCLCLFRSNKRSRRRHRHHPPPPPPPHLLHYYGHPPPPPPPPHKGDQHQSWQHNAPPPPPDHVIKINSHPTLPPPPHNVHSSGSASNHSGGESRPALSPGTALSFSRSTFTYEQLMTATNGFSDANLLGQGGFGFVHKGVLPDGTEVAVKQLRDGSGQGEREFQAEVEIISRVHHKHLVSLVGYCISGAHRLLVYEFVPNNTLEFHLHGRGRPTLDWPTRLKIALGSAKGLAYLHEDCHPKIIHRDIKASNILLDLRFEAKVADFGLAKFTSDANTHVSTRVMGTFGYLAPEYAASGKLTEKSDVFSFGVMLLELITGRRPVNSRQADDNLVDWISLLLSTIEARPLMIKAFEDGNHDALVDPRLGSEYNDNEMARMIACAAACVRHSSRRRPRMGQVVRALEGDVSLDDLNEGVRPGHSRFVGSYGSSTSDYDTSQYKEDLKKFRKMALGGSGLQSSSAQTPTSEHGENPSVSVSSSDGDGGGGTGEEREDRRQAAS

SEQ ID NO: 45341 - protein, 137 aa, Zea mays
  Coding DNA Sequence Number=SeqID_3562
MDNDAGLRLDMDNIKAIILVGGKRNNVHLCGARALSRTCLLPAPILTVLGWAMAELMNHLDKMQRLQAEIRAAVLGNNGGSRDLTEHVSNNTRDVTSSPALKMEKLTNEADVVTTRSDPVCFGSGSPGTVRKLDRTV

SEQ ID NO: 45342 - protein, 416 aa, Zea mays
  Coding DNA Sequence Number=SeqID_3563
  Homolog annotation: Hit_ID=Q2QXC0; Match level="QueryCoverage=63%, HitCoverage=40%, E-value=1e-23, Identity=27%"; Hit description =Expressed protein
  Pfam annotation: Domain name=DUF1618; Domain location=183-321; Score =78.2; E_value=2.6e-20; Accession=PF07762.4; Description=Protein of unknown function (DUF1618)
MSAAESSSRARQEAESEAEAEPPQRRWVALVSIPVILASGDERARSMLAHATNVELDLHDPPQPSYLLLHPSIVGLKPVAQQPSVYILATDGSGSLVFRVTNHGSNGPDEDDVMYFCDAHARRAISMPALYPRDSVLLGDKLLCCSTATFQWFVKPLLTSATTRMRNPSADTGVVAHAGRLYWLALAYGVFVCDPFADTAHLRFLALPADCDLGEKPYRINRAYVAQCRRVAPSEGQLRYVEIRGLSYEAYVAPAVAPPPVHPTVWMWTLVDPEATEPWRFEYEAPFAEVWAHESYAAAGLPHGEVPHVALVDPDDHGIVYFFQGSKSKLFGLDVRARRVVSCEECSVRDDLKMKDWNSRPIVDAWEVPPPSPPCSELSSPSPQGSDELAPVAKRVIEILRLMSDTDDDDGGYATI

SEQ ID NO: 45343 - protein, 195 aa, Zea mays
  Coding DNA Sequence Number=SeqID_3564
MKGMDDDEEEDGAYDLLVACDAELDPADGGLWDGRASSCRIVALHFNGVLSVQESADRTGCEFRRAQPTQATHDDYHDTGHSHQHGHAGRCSKDHRSGAGGDGGKAWEKARLIAAAPWPLADVQATADGSPSAHEEARLHGGRGPCCCASAKQRSSRADSTPARPIGCPVVDADAAIATSSPSHAPAYKIPFPVL

SEQ ID NO: 45344 - protein, 97 aa, Zea mays
  Coding DNA Sequence Number=SeqID_3565
MGIWFANLGASLAWNNFETMTFEDPPRGTCREAAYASLRPKGRLDASKLSARVAQGSHVKPPRFNGRLDPSPGDKSKQTKEGVEIDFKPGCLTPTWM

SEQ ID NO: 45345 - protein, 132 aa, Zea mays
  Coding DNA Sequence Number=SeqID_3566
  Homolog annotation: Hit_ID=Q2QLN9; Match level="QueryCoverage=37%, HitCoverage=37%, E-value=3e-07, Identity=47%"; Hit description =Expressed protein
  Pfam annotation: Domain name=GRP; Domain location=1-128; Score=-12.1; E_value=0.0012; Accession=PF07172.2; Description=Glycine rich protein family
MATKPGRAAAAVLLLTLLAALHVAAHNNNNENRNPSGGGGDPGAFFAGMPRFSGGGVPGSGRFFGGWGEGGLGYRRGVVVPPSTVCPQDGPCRGKRLTCPPRCFRTFSYGGKNGGGGGGCSFDCTERCAATC

SEQ ID NO: 45346 - protein, 254 aa, Zea mays
  Coding DNA Sequence Number=SeqID_3567
  Homolog annotation: Hit_ID=UPI0000D9F167; Match level="QueryCoverage =32%, HitCoverage=36%, E-value=3e-27, Identity=64%"; Hit description =PREDICTED: similar to nudix (nucleoside diphosphate linked moiety X)- type motif 21
  Subcellular localization annotation: CTP_CleavageSite=63; ConfidenceScore=5.19e-01
MPTPRHHRVVAPQLGLGAGVPRWHLCPASSPGLLAKPRARVHLPLPPFRLHSVVRRSVCVCVNCEASSKLHNLFLSLYPRVPDTRRVGECVAVWWRPNFETVMYPYCPPHITKPKECKKLFIVHLSEREYFAVPRNLKLLAVPLFELYDNVQRYGPVISTIPQQLSRFQFNMLHLSSLFSSSSSHIAMFPLENEVRSAFSKYSTRELKNILNKAFLPKKQTNKPDFGYKGPVYGLRLTGLTDFSSIRNQYHTRN

SEQ ID NO: 45347 - protein, 857 aa, Zea mays
  Coding DNA Sequence Number=SeqID_3568
  Gene Ontology: Mol. function=solute:hydrogen antiporter activity; Cellular component=integral to membrane; Biological process =potassium ion transport
  Homolog annotation: Hit_ID=Q9ZTZ7; Match level="QueryCoverage=36%, HitCoverage=95%, E-value=8e-44, Identity=69%"; Hit description=KEA1
  Pfam annotation: Domain name=TrkA_N; Domain location=683-798; Score =20.2; E_value=0.00051; Accession=PF02254.8; Description=TrkA-N domain
  Subcellular localization annotation: CTP_CleavageSite=93; ConfidenceScore=5.34e-01
MDLSRLASVAGPSRAAPRAGLQIGAAGNGFRVCSLRHRGAGNGRLTSAAALLRGSSGLFYLAPARGGPPRLRARGRPRCQGSDSLAYVDGPLEAAKGSGEVYDDDATSSGPDDDDNDKGPADVDGLREMLQRCRNELEVARLNSTMFEEKAQRISESAIALKDRAEGAQRDVSAAVATVQEVIVKEADAKEAVQKATMALSMAEARLQLASEALDAKRGSVGPMEVSIEGVEEEALVSAQEEIKDCRAALLRCEEELERIQEQKMNLQKEVDRLTELAEKAQLDASKAEEDVTNIMVLAEQAVALEMKATQRVNDAEAVLLKAEKVISSVDTVVELTSLAEEQKSAEEDSVSEGYEYSSNGTDDVPVRDEVSSIERLMVGDLTVEGIEQLEPSREIYDEASSDKMSVEPQKEAEPDSDKLKQGKKQEMERKEFTKEPLSAQKSLKKRSSRFFPASFFSSKADGEFTPTSVFRGLMKSVQKQAPKLVVGILLLGAGAFFLNRAEKSQLFQQQEIATSIGKVNEEEASLFDILYLLLASVIFVPLFQKIPGGSPVLGYLAAGVLIGPYGLSIIRNVHGTKAIAEFGVVFLLFNIGLEVLATTAAVGVIAHRFAVLPGPAAIVVGSGLALSSTAVVLQVGFQAIAEAMGMAAVKAVAAITAIIAGGRLVGMSIDPKLLLSNFPMISMILGLLIIGKTLLVTFVGRVFGVSTIAAIRVGLLLAPGGEFAFVAFGEAVNQVLHKVGAERACAAAITLDTPGANYRAVWALNKYFPNVKTFVRAHDVDHGVNLEKAGATAAKLPMSEIQESINEFRNRHLSELTELCATSGNSLGYGFSRVMSKSKSISSDDESETVDGALAI

SEQ ID NO: 45348 - protein, 234 aa, Zea mays
  Coding DNA Sequence Number=SeqID_3569
MKGTTQGPSGPRWDNVTNLYEVGTTMNTSEAHDNDMSGGTTVGDATDGNRSTAWGRPTTRSRWRREASMRSCTTRETRPACPVRKNPTRAPCRGARDQRRGRDGEGRQRHRGRLDLRVPCGRTPPSLRCSALRAWRVCIWSGPSGATTSADAAANGARAAIGIQLRTLVGEREGTGEEALCRRREREALVAWSHAVDAQATSGREACGPGQRGPRRPTRAGGQRVVGGGEGDGG

SEQ ID NO: 45349 - protein, 253 aa, Zea mays
  Coding DNA Sequence Number=SeqID_3570
MSIRHHDGTAGDEIVEDVVGESVSPKREDLAPPMRVVGGRGGLGCERRSLMVYRRMGEDETLRGGHLGSQGYAHGTLVLQGEGRGSLALLRGSHDGLDGGDGGDQRGVGGERRVGRDDVVLGGYSEGGKARRGASAPLLRCGRRRRCVGEGPEADDVGGASNNELAAGDEAGQGGADAQGGSQESGKEVLVGDDVQGRSATPAVRATSAAAPRPFMPVRGGRKATMRRGAGLADGEGGGRSEGSQGRLGWGDG

SEQ ID NO: 45350 - protein, 212 aa, Zea mays
  Coding DNA Sequence Number=SeqID_3571
MDSISSRMNSIQGNRHAFRVEGTRREAQSGKWNVDGAFLEFSSAVKKLQLGMTMSSLAGADPFGLRELRWIQEDDYLDHPLTLVPVVPQISSRISHLGVPPPSLQPTPLHRYTEINHHATAPPKPKPIPKSRAPKPLYAPAAPQWHTTTTPRLRFGRRRNGRRGCRVVLGVDGSASVGPTSMWSSCTSLPLQASILDKVVEALPSALVLVVA

SEQ ID NO: 45351 - protein, 148 aa, Zea mays
  Coding DNA Sequence Number=SeqID_3572
  Subcellular localization annotation: CTP_CleavageSite=17; ConfidenceScore=5.21e-01
MARRGHRTVRCAPDSVRCANGSKAANGRLRQTRKGIRTGQCPVVHRTVRARGSKLWRFLANGIKKSKAKHRGIQERRHHLPARLGSVAIARSWWSAIVGHPPWAQHHRWPPRIAAARMAEGTAAADRTPEGTTTTDHTPKGTVATAKT

SEQ ID NO: 45352 - protein, 151 aa, Zea mays
  Coding DNA Sequence Number=SeqID_3573
  Homolog annotation: Hit_ID=Q5K452; Match level="QueryCoverage=27%, HitCoverage=37%, E-value=2e-08, Identity=66%"; Hit description =Putative integrase
MHLHTRETTAEYHIRIRGECEAIEQAEPDPSDWRAPIIRYIKNEEEPVDKAVAECFARQSAHYAVIGKALGGDGSLGRVIGGGGSLGRAISGGSSLCHASGGDPGGPAMMLRPRRVTDDGTPPGTSDGDAPEAGRQVVTTLLKWTSGDDAP

SEQ ID NO: 45353 - protein, 163 aa, Zea mays
  Coding DNA Sequence Number=SeqID_3574
MAIQQVKSRGEMENEWEWEGGRWVDRRVTSTNNAALALAVKQSAKEIANAPSPVMPRMAVSSLLFVVAKSESEEWSVAVSEVEGFDGRKLSKGSIRGWRRGRDTKGEVVDGRGRDTRGRRWAVVSGSPVPTDATETEARPGKLMMSLSPDSLSGSWSGSNHTP

SEQ ID NO: 45354 - protein, 51 aa, Zea mays
  Coding DNA Sequence Number=SeqID_3575
MAVPEQGIPPNVVEDGEPFRHTISVPHGSVPEAPQSDSHVYSVDSNANGNL

SEQ ID NO: 45355 - protein, 46 aa, Zea mays
  Coding DNA Sequence Number=SeqID_3576
MANGRHGVSSAAQRGSAAGGQGTGRRAAGSASGVPGAAPAAWLGQV

SEQ ID NO: 45356 - protein, 118 aa, Zea mays
  Coding DNA Sequence Number=SeqID_3577
MEDWRVEVGGSWLNLGSPCSYIRHVRREQERELWALSTSKSRFAITPIPVAESGASEQRLRDGRCVLERGRWPSAVAGCRKVEGASLAVGSLMDASDQISRCYFRIVIWVIHPESNGV

SEQ ID NO: 45357 - protein, 204 aa, Zea mays
  Coding DNA Sequence Number=SeqID_3578
MELGSNMVLRVLKMMMRKSTRWHTIGREKVMGIETPKTLFPSIVVEVVPVWAVGVGCGSGESFRRCPLVSLDARRFLRVGGNAALEQLGHLGQLLVHGGYGILYALNRAFDPRSPGLEAGGHTLQGRHLCGGLGDDRSDPLPRDLLERRRLLREMRVEATTEIFTVAIQSVMDRGDILGVVGEGLLQGTPLQILSFELIAELLE

SEQ ID NO: 45358 - protein, 258 aa, Zea mays
  Coding DNA Sequence Number=SeqID_3579
  Homolog annotation: Hit_ID=Q10GW4; Match level="QueryCoverage=24%, HitCoverage=16%, E-value=2e-10, Identity=51%"; Hit description =Oxidoreductase, aldo/keto reductase family protein, expressed
  Subcellular localization annotation: CTP_CleavageSite=39; ConfidenceScore=5.32e-01
MAMPSFAVTSPPSHGTTLWAPHARRPQRPHKRHVRSQVRAVAQAQLQYQKLGDSDLLISEVTLGTVCMILELQSSNPLAASNVFPSQGSRQMGPGGGRACVKRYPEIWAVRSGSDGRDQHRVFCGCAVPLLLLGSEVARARAGVGYMGSEVAGVRRDLRGEPDKHIGGVLAMRSGLEMGERRRESSGWVGGNSSEESRSRGEAIECDRARSSSNGGRGVLWANTGAWDEAELAEHRVGRDEQARPNSGEAKLANVRQE

SEQ ID NO: 45359 - protein, 130 aa, Zea mays
  Coding DNA Sequence Number=SeqID_3580
MARTRRPHPLAPSEGVAALLPETMSEYRVRAVLVPDTTCYKVKIVPKNMESLIRQVVTSAVAQTLLSMVSGNTVARRNSDEKLERGGTSPEDCWEGPPGSDSDGGMRGRISRFTMFSFCFHMVDLTPIDR

SEQ ID NO: 45360 - protein, 215 aa, Zea mays
  Coding DNA Sequence Number=SeqID_3581
MGPNHPTSLGPQRLTRVSPVIDAWSRLHSRSLHACIASVVDTWAWAPGDTTARATIAITARWALLAVSCPRAYTELWDQAVIPFTWTSQTTCARAGADSGLHAQISVGCPTGMGASSPAAKPRCGSWGITMSSRGDYDLVYPLAGATAPELCLATMPTLTVESNVYATALHMVSGTGTAGTRYSGVVAESRAAAPSLGANGWGRWVLAVGSQSDG

SEQ ID NO: 45361 - protein, 176 aa, Zea mays
  Coding DNA Sequence Number=SeqID_3582
MAHRSYSGPLETFSPPFSPLCPWIHGLFPSIEFVVAFSPSLPNSGDPGATLARAVLNSGDPTAAERNRVARSRPPPWSDPLCSMQIARLRSRITLRVRALDALACLSAPRPSGAGPTRSACSPPLSLTLPGPPVSARSLARAPSATDLISAVGFRSDGGDAGNMDDFEEFQEYDEF

SEQ ID NO: 45362 - protein, 110 aa, Zea mays
  Coding DNA Sequence Number=SeqID_3583
MYIQVSRKFNHLFNPWSLKQMTLIQPYFSIGVVATQEDAHVVEDDVEETKRHLNVVFIGHVGVNFKWWKFFCLCEDLFFGGFVLGCKSLDILKLRWGQFMIFNVSVETER

SEQ ID NO: 45363 - protein, 46 aa, Zea mays
  Coding DNA Sequence Number=SeqID_3584
  Gene Ontology: Mol. function=nucleotide binding
  Homolog annotation: Hit_ID=Q6K3A5; Match level="QueryCoverage=78%, HitCoverage=25%, E-value=4e-13, Identity=97%"; Hit description=EF-1 -alpha-related GTP-binding protein-like
MDPLSSSAHAGKSTTGGQILFLSGQVDDRTIQKYEKEAKDKSRESW

SEQ ID NO: 45364 - protein, 259 aa, Zea mays
  Coding DNA Sequence Number=SeqID_3585
  Homolog annotation: Hit_ID=Q41137; Match level="QueryCoverage=42%, HitCoverage=68%, E-value=7e-27, Identity=60%"; Hit description =Eukaryotic release factor 3
  Pfam annotation: Domain name=GTP_EFTU_D3; Domain location=63-169; Score=58.8; E_value=1.8e-14; Accession=PF03143.7; Description =Elongation factor Tu C-terminal domain
MNRGGGSQIGGGSGESGMVVAQLGAGAAAAELWGERQPAAESWRRGNRGHPGEGLYALAANPVGAVSEFIAQLQILELLDNAIFTAGYKAVLHIHSVVEECEIVELIEEIGMKKKKEEDPKKKKPKRKPLFVKNGAIVVCRIQVNNLICIEKFSDFPQLGRFTLRTEVKYKMTTRGQAALGLIRLCGIVPESFHSTLFLISVVQSLYKVLYALSALDQSSWYNNVATPSSGGTCAVIGGGVAVRGGRELGDGLMAVDLR

SEQ ID NO: 45365 - protein, 59 aa, Zea mays
  Coding DNA Sequence Number=SeqID_3586
MGSARVAFVSLSVGVCSLWLSGPEHRGGDHPTMSPSEARSDSAEGGVDAEGAAAPPTDV

SEQ ID NO: 45366 - protein, 58 aa, Zea mays
  Coding DNA Sequence Number=SeqID_3587
MEITGIFLLHSKEVLQSLAQPLRKTLNPFVGEGDLLEVNQSSQMTNEVNPFVGEDDLC

SEQ ID NO: 45367 - protein, 218 aa, Zea mays
  Coding DNA Sequence Number=SeqID_3588
  Gene Ontology: Mol. function=mRNA (guanine-N7-)-methyltransferase activity; Cellular component=nucleus; Biological process=mRNA processing
  Homolog annotation: Hit_ID=Q6K833; Match level="QueryCoverage=99%, HitCoverage=56%, E-value=6e-83, Identity=71%"; Hit description=mRNA cap guanine-N7 methyltransferase 2 (EC 2.1.1.56) (mRNA (guanine- N(7)-)-methyltransferase 2)
TKYQKNVRASHNKGLKTVPNSIRSENYTITFEVEEEKFPFFGKKYQLKFASDAVFENQCLVHFPTLMRLSREAGLEYVEIQNLTEFYDDNRTQFAPMLGGYGASFLDARGKLVARSYDILGGVEFFFFLEGQAWCNDESCLTESLGLYSAFVFQKPDPEAIPPIVTPDLPDPDKGHEEQEWLQPQQASVEDGRRSHADVLPIDPEKGILGPGPADMRL

SEQ ID NO: 45368 - protein, 350 aa, Zea mays
  Coding DNA Sequence Number=SeqID_3589
GGFFQVDVTYLLRLTSGPQLTKGVLYYGYTRDVDVPTTMYQYTRPCTRVQDAACAAALRQQRPTQEGGVVGPAVSGGRGCRSSPHPPSVCSGPRKDPKRTPRAAALAGSAALPRLLPLCAKARLPSTGTGWLASASGAARVASACGRNGWIRADPPHAATPEPKRPLSPVQSRPIHHHHLESSTATRGVAQRWRGVARRAWQHATTTEKERGLAGWLAWEAGTDDGGVTPLPGIGRQRSMLAQMRHHGIAPPPRKVGILFSPPKPKGHHHSTITVRSVLLPSYNAPLFLTLRRRLATDSIVAACLPYHLTPPARLLLYLELPTSKALALCFLALCVARSRCQPQERRQAE

SEQ ID NO: 45369 - protein, 250 aa, Zea mays
  Coding DNA Sequence Number=SeqID_3590
MGTKTTAGDGATRARVEQYVGVAVANCGVRRAGGRASSNGESWHDDDDEQRRQAVHGDKARNSSVAMVGDVVREFGGARQGQRGRVAGSRVRGVGVGWSRDRARRPVCARVAAWLRPGAGPEAGQGLGRRLEFLGTPLMEVSGLGGCVLGRGREDVAAVGRERDGRTYLRQAGEGARMEGIAAELMWIERRKTSNTINGENCLLMEIRRGENVLISGTGGEQTWGGVTVVLAAIERGVTHTFSAMFLNGS

SEQ ID NO: 45370 - protein, 264 aa, Zea mays
  Coding DNA Sequence Number=SeqID_3591
  Homolog annotation: Hit_ID=Q1SGL9; Match level="QueryCoverage=33%, HitCoverage=18%, E-value=3e-08, Identity=38%"; Hit description =Protein phosphatase 2C-like
MDYGAILTPEVMQRRTNSNDQFIIMSRAFNDYYIMDCGVISAPKVTQRRTDINDQFIIMSRAFDDYYIMDYGVISAPEVTQRRTDSNGQFVILRTVGAYGGTCLMTDDVRGNFFRKEWGVLSNDETMEIVQRPREIATTALDRGLRFLPSLTSDYKNHAAAALDQSVRGNCTKPRTPPSSAKLGDCRREVESLGRPRQCFAGRPVYFGGTPRNRVGTSRTRGSTGLPRIPHRRHFSVADRTAPMVEHIQTPLKVGTISSFSPFD

SEQ ID NO: 45371 - protein, 150 aa, Zea mays
  Coding DNA Sequence Number=SeqID_3592
MRRPRHRSSSGDVWDEGEVGEGIERRVVSSPSPQQYYQHLVRHPNDAHAFVNLPFDWKLSWFSSFVNRSYPFLYIRRRSRHVSSRFPNKSYKKSRIIAECVPVWIVHTTTPDRQCPRDELSSHFGVPHMPRLLVELGEPKAPALVAPFKK

SEQ ID NO: 45372 - protein, 131 aa, Zea mays
  Coding DNA Sequence Number=SeqID_3593
MEKSNAVKIADEILVGLLDDSEDKQSAQLTVFGHVANFLQTTSPERQRGEKLWRTKCDKNELRSSKVILRERRVNFEAQKSFLRQRRVSSEAQKSFLRERRVSFEALKSFLRECRAKIPPKSKVKKLQSRS

SEQ ID NO: 45373 - protein, 336 aa, Zea mays
  Coding DNA Sequence Number=SeqID_3594
MSLRQYTGGRWTTRFEVEIHQLTPNALVALAKYVWVVSSYGREPSVEVFAKNYCLYWQKRKIGGKIAQFGSCTFMPRTRKTSVEVIEIVPCAKNKWEEDQDEEALRYAARLSNGHELVEEFIACGHSPWNCVGGMRPLSCGKWSRRPLRLSVINGNVCGSLGIDVYARAPGNFFAHAEVVMEKDRQDAQQNKCKAPIRLVDPRREAKLVAAQELSVYNYLVGGVNMFDIRQGCRLLVSCLDFFLVRGGGWAVDGGAVDSGYRPDGCGKGRCGDFGGPVGGFAPPPEHTEAVRDKSAAENKSRNLLEKLSAVEKEQEDLGRRLADEKEDAEKACAEA

SEQ ID NO: 45374 - protein, 142 aa, Zea mays
  Coding DNA Sequence Number=SeqID_3595
MGKNKKGRSSSPRSGDKRKREPSPPSEDFGDSEYSEEEFSSESEGSPGIAAEVWTYIGAVECSGLEGSDESEISSDEENSSDSSEEESGGGGDDEGDDGDGGDGGGDGDGDDKGDDDGGKGDGDSGKGDSGISKASGKVPLA

SEQ ID NO: 45375 - protein, 158 aa, Zea mays
  Coding DNA Sequence Number=SeqID_3596
MERLTIGAEGRGLPAGFSMEENGSCWIERAGRREQQRGVHGGALRRIATTGKKSRGAELLGASHGEKNSRGVKKGRGHTGRWRRHGRGRAELLLSHGREGALGKGMSWVALELLRAEKMSPFCSRSPGGAGRASRHGWLRVGALARLRKKKRERVHVG

SEQ ID NO: 45376 - protein, 135 aa, Zea mays
  Coding DNA Sequence Number=SeqID_3597
MGGGCSPARAQTRGGPAPTKGEWRSAMATLKGAWPEAKVCRVGEAGRFGRRRSHGRLGAGGCRERGARRVELLGDGSGCSLLLGKKGAVEGGEAKGGGVERPWWPCSCAEPERRKTLGDASALRNKGRRKNYAGC

SEQ ID NO: 45377 - protein, 925 aa, Zea mays
  Coding DNA Sequence Number=SeqID_3598
  Gene Ontology: Mol. function=ubiquitin-protein ligase activity; Cellular component=ubiquitin ligase complex; Biological process =protein ubiquitination
  Homolog annotation: Hit_ID=Q6ZC56; Match level="QueryCoverage=86%, HitCoverage=100%, E-value=0.0, Identity=47%"; Hit description =Putative arm repeat-containing protein
  Pfam annotation: Domain name=Arm; Domain location=670-710; Score =40.6; E_value=5.4e-09; Accession=PF00514.13; Description =Armadillobeta-catenin-like repeat
  Pfam annotation: Domain name=Arm; Domain location=711-751; Score =26.7; E_value=8.2e-05; Accession=PF00514.13; Description =Armadillobeta-catenin-like repeat
  Pfam annotation: Domain name=Arm; Domain location=752-792; Score =42.2; E_value=1.7e-09; Accession=PF00514.13; Description =Armadillobeta-catenin-like repeat
  Pfam annotation: Domain name=Arm; Domain location=793-832; Score =21.6; E_value=0.0028; Accession=PF00514.13; Description =Armadillobeta-catenin-like repeat
  Pfam annotation: Domain name=Arm; Domain location=833-873; Score =20.8; E_value=0.0049; Accession=PF00514.13; Description =Armadillobeta-catenin-like repeat
  Pfam annotation: Domain name=Arm; Domain location=875-915; Score =10.6; E_value=0.58; Accession=PF00514.13; Description=Armadillobeta -catenin-like repeat
  Pfam annotation: Domain name=U-box; Domain location=351-425; Score =89.8; E_value=8.5e-24; Accession=PF04564.6; Description=U-box domain
  Pfam module annotation: Pfam domain module=Arm::Arm::Arm::Arm::Arm::Ar m::U-box; Domain location=670-710::711-751::752-792::793-832::833 -873::875-915::351-425
MERLVLACGGEAVNSVDDLTERCLGWAGLVYDHVLGEEKYTFVENVKNPHSCTILIKGPNDHTIAQTKDAVRDGLRSVKNTIEDGAAVLGGWELDLVRKVRKPRTRARTARSEVGIGSSSRCFRSMEESVPMSVISSISNFRTLSTSSVVETELVKRYCRKINEILGLLKLVLDEVIPQISLDDRMLEGLAATINDAIKLVGSWDLMMSKIYFVMLVESLITKMQNYVLEVCQVVNSEVTPPETNRISVYLEKIKQFQCDKIMGIIKEASRDIAGKFTPKSETLTKIQVSLSLSTNQELLMEAVALAKIRTRVDAEDSSELDGINHISELVNHMLEKHVEEKQMHSINGVPIPADFCCPLSLELMSDPVIVASGQTYERVFIRKWLDLGYNVCPKTRQTLGHSNLIPNYTVKQLIENWSEVHGVVLPDPVKLLSLNFSVSLKPINGRTSDKSPFSENSSRENKFGSPDHISSDDSCHPNLLHENFDSDDQISKASSSEDTDDSETGPPKLLVASTEANKLMCNASIDGSDAIKQSRKDGFHASDVEPRLQRNSISGDIGTSASSSSNHLEVVEKDKEEQVSSNSIASETTRNGRTVTCSKPNFQPRLGGVRSRNHLVWQQRSDKAVSLDSRSDFAIVDNKVRKLIEDLKNERTDPERAAIGELLVLSRHNMESRISIANHGAIPFLVNLLYSADPSMQENAVTVILNLSLDDNNKITIASADAIKPLIHVLETGNPEARANSAATLFSLSVNEENKAKIGRSGAIKPLVDLLRDGSAQGKKDAATALFNLSIFHENKARVVEAGAVKPLVELMDPAAGMVDKAVAVLAILATVQEGRNGIAQAGGIPVLVEVVELGSARAKENAAAALLQLCTNNSRFCSLVLQEGAMPPLVALSQSGTARAREKAQVLLSYFRNQRQVGKVTRR

SEQ ID NO: 45378 - protein, 69 aa, Zea mays
  Coding DNA Sequence Number=SeqID_3599
MWGHRTVTVHCPVARLRVGRRELISGELVIGVGHWRVGQSIRLAELVDEVVETVLGMVFSKIHGRVGGI

SEQ ID NO: 45379 - protein, 97 aa, Zea mays
  Coding DNA Sequence Number=SeqID_3600
MAISGVEMCESSPGTGFGGAASQFLGAGAQVGWSQGQGSQCLRRLAAGRENLGCREVCGLNDSAGVGVSGQRRHLPRRGPCQQTNHPVIGKLTNDDE

SEQ ID NO: 45380 - protein, 152 aa, Zea mays
  Coding DNA Sequence Number=SeqID_3601
  Gene Ontology: Mol. function=zinc ion binding; Cellular component =nucleus
  Homolog annotation: Hit_ID=Q5N7H4; Match level="QueryCoverage=81%, HitCoverage=15%, E-value=3e-15, Identity=36%"; Hit description=Zinc finger (CCCH-type) protein-like
  Pfam annotation: Domain name=GYF; Domain location=95-150; Score=29.7; E_value=1e-05; Accession=PF02213.6; Description=GYF domain
MNIDQDECDHSRQVAMTRINEAEVIDLTSDDEEDPRTVQHKPEGKVMHDPTPWAMDGILQPEQRQPAHAAMNGIVPPEQHKPARAATNGVSPWTLQWHYIDPQGDTRGPFSLVHLLHWKRGGFFDEGFRVWRTGQTSEQAILLRDALLHLHL

SEQ ID NO: 45381 - protein, 211 aa, Zea mays
  Coding DNA Sequence Number=SeqID_3602
  Homolog annotation: Hit_ID=Q49I57; Match level="QueryCoverage=25%, HitCoverage=11%, E-value=1e-09, Identity=64%"; Hit description =Teosinte glume architecture 1
MATDPAVDLKQQLPPLFGWDTLLEHFGQAPCTVFYNHPRGCYYWVNADLQAIEYSFATSIAYILIDFIEGLHKVHRKFVILIVVDCFFKYIPKTCPQHHIDAHCHHHRGSPYGGSAHCHHICCAFPRGGHCLMKCPRSRSRPGGTGGAQCRSAHRAQWTAARLTSASVVTTTVAASHKVCEAHSKTPVVVVVFTDHKVYEAHSRTTNQQSD

SEQ ID NO: 45382 - protein, 157 aa, Zea mays
  Coding DNA Sequence Number=SeqID_3603
MSWKRQKQDKDEMTEECCFICKDSGHDLRRFCVANPPAYTSTGLGNVAWNCPKAYHPRCFQNKDELIIELNIWVTVLEVVQWLPSSVIFGQTLPLYENLLDTMNGFSSPMWNTSWRRVPVGRWEVVEYDVDHLEEVMLHMTDEDRIPVADDGGREAM

SEQ ID NO: 45383 - protein, 191 aa, Zea mays
  Coding DNA Sequence Number=SeqID_3604
MGRDRRDSGWPRHADGKRKRDPSPPSEDFGDSEYSEETSSEADCSPTLASTLASSEDSNDSMGLSIVAQPYWRFIKHARLGGSDESEVSSDEADSSDSSKKWSGGDSDDEGDDSSGGDDDGSDNSKGVEGKGGSDGSDDDGSSGDGEGDGDGDRGGSIKGDGDNSGGDGDGDSSGKGDGGRSKTSRIMPLV

SEQ ID NO: 45384 - protein, 97 aa, Zea mays
  Coding DNA Sequence Number=SeqID_3605
MGRVAQTLMQTPLDNWSTRNCNLAVGEYILVSEQGVAQEVAPDPAPEPAKRICLPQLWKASPGSLENMVAGVTWPSILPPGWTVEWDPTSAEEEHEE

SEQ ID NO: 45385 - protein, 66 aa, Zea mays
  Coding DNA Sequence Number=SeqID_3606
MKKDEEAIDTKVMQGSASIPISEVMKGMTTKLKKGKAEEATKEGVDSEENVSDGEDDVVVEEEGDL

SEQ ID NO: 45386 - protein, 125 aa, Zea mays
  Coding DNA Sequence Number=SeqID_3607
  Homolog annotation: Hit_ID=Q9FNQ1; Match level="QueryCoverage=53%, HitCoverage=3%, E-value=2e-16, Identity=63%"; Hit description=RNA helicase
MVDKAIQANSSDNDDEKDLRLMAVGGADGDRVDEAIVESTGRVGVPDVPRHRRPQLQPLGHHRIRDNLNRITNRNVLYPVDQHHLDDPHVKANLLFQAHFSKAELPISDYVTNLKLVLDQSIHII

SEQ ID NO: 45387 - protein, 930 aa, Zea mays
  Coding DNA Sequence Number=SeqID_3608
  Gene Ontology: Mol. function=protein serine/threonine kinase activity; Biological process=protein amino acid phosphorylation
  Homolog annotation: Hit_ID=Q2QLI7; Match level="QueryCoverage=99%, HitCoverage=99%, E-value=0.0, Identity=56%"; Hit description=Protein kinase domain containing protein, expressed
  Pfam annotation: Domain name=Pkinase; Domain location=612-927; Score =201.9; E_value=1.5e-57; Accession=PF00069.15; Description=Protein kinase domain
  Pfam annotation: Domain name=Pkinase_Tyr; Domain location=612-907; Score=-73.8; E_value=6.1e-08; Accession=PF07714.7; Description =Protein tyrosine kinase
  Pfam module annotation: Pfam domain module=Pkinase::Pkinase_Tyr; Domain location=612-927::612-907
MAAGGELSPSPVPPASPIKHSRSPDDAQPDASPKRRKRHHHRRHHHHRRHRHADSPVPVAADEEVEEGEILEDATAASAMEVDAESAAPEAFLAPEHFGNGADTDSNTDATKMQAPALPTLPSSEDGRRSLHDAPESERGDILSSDVEDNKGHERRQRQNRSKSPKSRREKERRHKDDHHTSSSKDYHSRNHSRTSPYSRHQSEAHSRDLYLRYREKGDYTNGSRANLRDGSDHESNDRNGKSGRHTTRTHGSERERSSSHGIHDRHGDRYSDRRASQERHRDDRIYRDKIDSLEAAPRHRERSRSHSRSDPRENTRLRDQSRERERRSGSSRHRDHDSKRDTSKDRHRESDRVNSAHERDRGREARDREWHRVKGSETHRAKEGRDKVSDNDRHRDSTRSKYSVSDGYKERTRSGEKGRDADHKNRKFEEMKENSLKEEDEEEYQEKIEQQLAMQEEDDPEKIKEEARRRKEAIMAKYRQQQSQKEDMESKPSGNDEEVRAMDGNEAIHQKDDIDSSFMGNVEAENKHDSSEVFDGKTGFNVGRSPAHNYASTSTGAFTDERTIGVSGLGEGSPKGKDDGLHIERNALHDNWDDADGYYTYRFGELLDGRYEIIAAHGKGVFSTVVRAKDLKASKDDPEEVAIKIIRNNETMYKAGKQEVSILEKLASADREDKRHCVRFISSFMYRNHLCLVFESLNMNLREVLKKFGRNIGLKLTAVRAYSKQLFIALKHLKNCKVLHCDIKPDNMLVNEAKNVLKVCDFGNAMLAGMNEVTPYLVSRFYRAPEIVLGLAYDHPLDMWSVGCCLYELYTGKVLFPGPSNNAMLRLHMELKGPFPKKMLRKGAFTMQHFDQDLNFHATEEDPVTKTAVRRLILNIKPKDVGSLFPNFPGEDPKMLSSFKDLLDKIFTLDPEKRITVSQALSHPFITGK

SEQ ID NO: 45388 - protein, 327 aa, Zea mays
  Coding DNA Sequence Number=SeqID_3609
  Gene Ontology: Mol. function=hydrolase activity; Cellular component =nucleus; Biological process=metabolic process
  Homolog annotation: Hit_ID=Q94JD7; Match level="QueryCoverage=97%, HitCoverage=91%, E-value=1e-80, Identity=50%"; Hit description =Putative PrMC3
  Pfam annotation: Domain name=Abhydrolase_3; Domain location=81-302; Score=222.7; E_value=8.2e-64; Accession=PF07859.3; Description =alphabeta hydrolase fold
  Pfam annotation: Domain name=Peptidase_S9; Domain location=97-327; Score=-75.0; E_value=0.023; Accession=PF00326.11; Description=Prolyl oligopeptidase family
  Pfam module annotation: Pfam domain module=Abhydrolase_3::Peptidase _S9; Domain location=81-302::97-327
MSGSTAPPHVVEDFLGVIQIFSDGSIVRGDESTIMPAGPCPDVPGVQWKDAVYEATRGLKVRVYKPPPTPGGGNQGKLPVLVYFYGGGYCGGAYDHPLFHSCCQRFAAELPAVVLSVQYRLAPEHRLPAAVEDGAAFFSWLRAQAQAQPAAPGAADPWLAESADFSRTFVSGGSAGANLAHHIVVRIASGQIALGAAVRVAGVERVATESDPPAGVYLTVETIDQLWRMALPVGAIRDHPLANPFGPGSPSLEPLPLPPALVVAPERDVLHGHVWRYAARLREMGKPVELAEFAGEGHGFSVGPWSEARDELMRILKRFVNQGAALG

SEQ ID NO: 45389 - protein, 450 aa, Zea mays
  Coding DNA Sequence Number=SeqID_3610
  Gene Ontology: Mol. function=RNA-directed DNA polymerase activity; Cellular component=intracellular; Biological process=RNA-dependent DNA replication
  Homolog annotation: Hit_ID=UPI00004C1731; Match level="QueryCoverage =99%, HitCoverage=32%, E-value=0.0, Identity=83%"; Hit description =UPI00004C1731 related cluster
  Subcellular localization annotation: CTP_CleavageSite=21; ConfidenceScore=5.05e-01
MADVCRLYWSKQSMSEGYLPSASHRSNRGFHCWVRNPVFPRCLLRVSPNQDERVRPARDFFHHALWHVLLRYYAIRFEECGCDIPKVHEPRVRRTHWSNGRAYIDDIVVKTRKASDLLSDLETTFWCLKAKGVKLNPEKCVFGVPQGMLPGFIISERGIKANPEKIAAITNMGPIKDLKGVQRVMGCLAALSRFISRLGKRGLPLYRLLRKTERFTRTPEAEEALGNLKALLTSAPILVPPATEESLLIYVAATTQVVRAAIVVERREEGHALPIQRPVYFISELRHYFESHPMTVVPSFPLGEIIQCREASGRITKWAVEIMGETISFAPRKAVKSQVLVDFVAEWVDTQLPAASIQPELWTMFFDGSLMKTGAGAGLLFISPLVKHLCYMLRLHFPTSNNVAEYEALVNGLHIAIELGVRCLDARGDSQLVIDQVMKNSHCRDPKMEA

SEQ ID NO: 45390 - protein, 115 aa, Zea mays
  Coding DNA Sequence Number=SeqID_3611
MHGDDNDTWARHMRAWEWAPRQGISGGARVVLIDQKRGREGRGLARINPIESSWPWRCGDAHAEGRRARRKVSVVKRNVSFARAGKAISRPIVHAHMVARHGGDVGARKERGEED

SEQ ID NO: 45391 - protein, 239 aa, Zea mays
  Coding DNA Sequence Number=SeqID_3612
  Pfam annotation: Domain name=DUF674; Domain location=1-213; Score= -328.7; E_value=0.072; Accession=PF05056.3; Description=Protein of unknown function (DUF674)
MKLLIDRKAQRVLFAEATKDVVDFIFSLLRLPVATAAKLVGKTAMVGCIGNLYAGVDKLDSIYLQDGVAKDALLCPTVVSQAAKNANSSLLPLPKPSVQPKMYRCANNYSECPNYITDEHGKACPRCRCSMTTEVQYLPSASHRSGSGQVVASASQQRKAGGFVQGIVTYTVMDDLTVTPVSAIVSSVALLKTFAMRNTGDLQQKTVQLGYNEVVRSIAGLAILKASLKSKSVLTDVFL

SEQ ID NO: 45392 - protein, 65 aa, Zea mays
  Coding DNA Sequence Number=SeqID_3613
MALSSSFSINGQPDADGNEIQQKDGSLPSLRDSQLGPISYPESLDFSGVGVMGSLVAEDNIGRDK

SEQ ID NO: 45393 - protein, 55 aa, Zea mays
  Coding DNA Sequence Number=SeqID_3614
MAQARSLGLGDGAGAARASGTADGAASGYPWIKYTIRTLPDVFRVLDPIGSTEKY

SEQ ID NO: 45394 - protein, 46 aa, Zea mays
  Coding DNA Sequence Number=SeqID_3615
MEVKLVAFSLCVGCVSFPNEGSGTTNEHPDARLRDAASNFCITASR

SEQ ID NO: 45395 - protein, 178 aa, Zea mays
  Coding DNA Sequence Number=SeqID_3616
  Gene Ontology: Mol. function=3-deoxy-8-phosphooctulonate synthase activity; Cellular component=cytoplasm; Biological process =biosynthetic process
  Homolog annotation: Hit_ID=O50044; Match level="QueryCoverage=67%, HitCoverage=50%, E-value=4e-46, Identity=67%"; Hit description=2 -dehydro-3-deoxyphosphooctonate aldolase
  Pfam annotation: Domain name=DAHP_synth_1; Domain location=1-165; Score=-108.3; E_value=0.00056; Accession=PF00793.10; Description =DAHP synthetase I family
MAVECRGSRSRRLSTWEGKDGTTGWPARCPSSMVVQKNLSGGGGDEEIDGSEHLHLQVMVNSTEKVRLAGNPNVMVYDLFVDPRNLEWLRESNCPVVADVTHALQQPAGRKLDGGGVASGGLRELIPCIARTSVAVGVDGIFMEPLRNLEELLEELIAIARVTKGKKPFKIDLTPFQE

SEQ ID NO: 45396 - protein, 50 aa, Zea mays
  Coding DNA Sequence Number=SeqID_3617
CSPTSGQPTLHIANRPQGGIACRLPKWYRATQAQLVITRGIEEAANPYTP

SEQ ID NO: 45397 - protein, 166 aa, Zea mays
  Coding DNA Sequence Number=SeqID_3618
  Gene Ontology: Mol. function=glutathione transferase activity; Cellular component=cytoplasm; Biological process=aromatic amino acid family metabolic process
  Homolog annotation: Hit_ID=Q9FQC1; Match level="QueryCoverage=99%, HitCoverage=86%, E-value=2e-87, Identity=89%"; Hit description =Glutathione S-transferase GST 18
  Pfam annotation: Domain name=GST_C; Domain location=45-150; Score =6.0; E_value=0.054; Accession=PF00043.15; Description=Glutathione S -transferase, C-terminal domain
VDYEYKSVNPRTDPDYGKINPIKYIPALVDGGIVVSDSLAISLYLEDKYPEHPLLPKDLKRKALNLQGLHEGRMSPDEGLHIVQSYIDKGFRAIEKLLEGCESKYATGDDVQLADVFLEPQIHAGINRFQIDMSMYPILERLHDAYMQIPAFQAALPKNQPDAPSS

SEQ ID NO: 45398 - protein, 132 aa, Zea mays
  Coding DNA Sequence Number=SeqID_3619
MGHEAVGELLRMPSSHSAIVTVLVIVNDLQEGFASSIFATTTIFVNALCFAYHTIIVLAFVGLLIAEDNGSSIAGLPAFLLESFDIKYLQNRMRTRTKMFSFVTTSYGNEGEQCQEKVFMILYARRYGQKSI

SEQ ID NO: 45399 - protein, 130 aa, Zea mays
  Coding DNA Sequence Number=SeqID_3620
  Subcellular localization annotation: CTP_CleavageSite=72; ConfidenceScore=5.14e-01
MCAHAGAKAAAPMLGLRVVGAWLPAPECSSHVAPAPVRRRGRADAPASWPGRRITRRVGMAASAPLCRRWVRALGRRAVWAPPRHRGRGLHPPSGPPAIEGRGTGMGEPPPRGKDEPPGRRRESMWLMLA

SEQ ID NO: 45400 - protein, 870 aa, Zea mays
  Coding DNA Sequence Number=SeqID_3621
  Gene Ontology: Mol. function=protein serine/threonine kinase activity; Cellular component=integral to membrane; Biological process=protein amino acid phosphorylation
  Homolog annotation: Hit_ID=Q2QW32; Match level="QueryCoverage=99%, HitCoverage=100%, E-value=0.0, Identity=64%"; Hit description =Leucine Rich Repeat family protein, expressed
  Pfam annotation: Domain name=LRRNT_2; Domain location=25-63; Score =19.2; E_value=0.0086; Accession=PF08263.3; Description=Leucine rich repeat N-terminal domain
  Pfam annotation: Domain name=LRR_1; Domain location=115-137; Score =16.6; E_value=0.087; Accession=PF00560.23; Description=Leucine Rich Repeat
  Pfam annotation: Domain name=LRR_1; Domain location=139-160; Score =9.3; E_value=5.2; Accession=PF00560.23; Description=Leucine Rich Repeat
  Pfam annotation: Domain name=LRR_1; Domain location=169-192; Score =3.4; E_value=65; Accession=PF00560.23; Description=Leucine Rich Repeat
  Pfam annotation: Domain name=LRR_1; Domain location=194-216; Score =11.1; E_value=2.4; Accession=PF00560.23; Description=Leucine Rich Repeat
  Pfam annotation: Domain name=LRR_1; Domain location=218-241; Score =9.0; E_value=6; Accession=PF00560.23; Description=Leucine Rich Repeat
  Pfam annotation: Domain name=LRR_1; Domain location=243-264; Score =15.3; E_value=0.22; Accession=PF00560.23; Description=Leucine Rich Repeat
  Pfam annotation: Domain name=LRR_1; Domain location=266-288; Score =3.7; E_value=59; Accession=PF00560.23; Description=Leucine Rich Repeat
  Pfam annotation: Domain name=LRR_1; Domain location=66-89; Score=1.6; E_value=1.5e+02; Accession=PF00560.23; Description=Leucine Rich Repeat
  Pfam annotation: Domain name=LRR_1; Domain location=91-113; Score =14.9; E_value=0.29; Accession=PF00560.23; Description=Leucine Rich Repeat
  Pfam annotation: Domain name=Pkinase; Domain location=549-819; Score =124.9; E_value=2.3e-34; Accession=PF00069.15; Description=Protein kinase domain
  Pfam annotation: Domain name=Pkinase_Tyr; Domain location=549-819; Score=119.7; E_value=8.6e-33; Accession=PF07714.7; Description =Protein tyrosine kinase
  Pfam module annotation: Pfam domain module=LRRNT_2::LRR_1::LRR_1::LRR_ 1::LRR_1::LRR_1::LRR_1::LRR_1::LRR_1::LRR_1::Pkinase::Pkinase_Tyr Domain location=25-63::115-137::139-160::169-192::194-216::218
  Pfam module annotation: Domain location=266-288::66-89::91-113::549 -819::549-819
MELSPWLVFSLGFLAQALVILADTNAQDASGLNGIQDSWNKKPSNWRVGTDPCGDKWNGISCTTSRVTAMDFSYNKDLGGPLPASIGSLSNLENLILVGCSFSGEIPKELGQLTKLRFLSLNSNKFSGSIPASLGRLSNLYWFDLADNKLSGGLPVFDGTNPGLDNLTNTKHFHFGVNQLSGTIPSQIFNSNMTLIHVLLDNNNFTGRIPPTLGLLNTLEVMRFDNNYQLTGPVPSNINNLTKLAELHLENNQLTGPLPDLTGMIALSFVYLENLRVTGQLPQALFSLPAVQTLLVGNPICSPGTGSSEKYCASPGQSNQAAPPPYSTPMNCSGLPPPCLSDQLVSPGCVCAVPYRGTLFFRSPSFSDLSNGSYWGQLETGIRAKFRSLSVPVDSVALHDPSVNSVNNLQLALEVFPSGKTQFSEQDISDIGFILSNQTYKPPSVFGPYYFLGQPYSFANVVLIPSKSKANNRLPLIVGASVGGAVLVAIVLALVTIVARRKKRPKQNEERSQSFVSWDMKSTSGSSVPQLRGARTFNFDELRKITSNFSEANDIGNGGYGKVYRGTLPSGQLVAVKRCQQGSLQGSLEFRTEIELLSRVHHKNVVSLVGFCLDQAEQILVYEYVPNGTLKESLTGKSGVRLDWRRRLRVLLGAAKGIAYLHELADPPIVHRDIKSSNVLLDERLNAKVSDFGLSKPLGEDGRGQVTTQVKGTMGYLDPEYYMTQQLTDKSDVYSFGVLMLEMATARKPLERGRYIVREMKVALDRTKDLYGLHDLLDPVLGSSPSALAGLEQYVDLALRCVEEAGADRPSMGEVVGEIERVLKMAGGPGPESASNSMSYASRTPRHPYGGDSPFDHSNSGLPSARVEPK

SEQ ID NO: 45401 - protein, 96 aa, Zea mays
  Coding DNA Sequence Number=SeqID_3622
MDSQAPTNIDGDQGSYPLIGDGDLLGTRNPNGYGYEDGYGDSSNMMGMRIRCYNPVGNSPLTSLVWGAKSCGPTSEALEPCGTIPEVGRPPSSQIK

SEQ ID NO: 45402 - protein, 60 aa, Zea mays
  Coding DNA Sequence Number=SeqID_3623
MTGSRRGRGASQVNEDKDEAHGWTSLKVVRLSGYGPGDAGLADWGLGAEPPMADRRGDSG

SEQ ID NO: 45403 - protein, 212 aa, Zea mays
  Coding DNA Sequence Number=SeqID_3624
MARPCWPSRVDRESAGTTRKERGAGEKKERVGLTMAMNDSDSGAPAVWSRGEAGREWEKMGRESGEVSFFFGIGAYAHASWATREGVEPGRGSGPARTVEWAEDDLESKIQRWHDTSHTTPLARRAHSSRAPVSLDESLKLPTANLIQQAMDQAVKRTNTMDQVVASSYKLLTILANTHHTETMQQHTAHRPWTKMRLAGGNGRGWSVSDCR

SEQ ID NO: 45404 - protein, 80 aa, Zea mays
  Coding DNA Sequence Number=SeqID_3625
MAHQTVRGLDAFRHHLCPFLSCVWSPYTLPPHHRGIAAHPVASSKEFLSMCDSGGMMRRGMSGIDRRITSLWTMEKSKAR

SEQ ID NO: 45405 - protein, 58 aa, Zea mays
  Coding DNA Sequence Number=SeqID_3626
MGKCNANECRPAKGDRIKDRLRYQSNKLIYHCFFPHMLITSHNMKNEFIPPNLWNDSQ

SEQ ID NO: 45406 - protein, 156 aa, Zea mays
  Coding DNA Sequence Number=SeqID_3627
MEDVCHSKSEELNRAGFCRGRCRVGGWPESGGGLWGTGGTARAALKPTGKIEHETAEWGSCWKPAVVATSSWPREGRPRRQCPHPRWCLRWAQGQGRRLRGRNDAQPGEARRRHGGQRPRPRMVAASKTRRRSKESGDQARLGVDGVVEEGVAGEG

SEQ ID NO: 45407 - protein, 163 aa, Zea mays
  Coding DNA Sequence Number=SeqID_3628
  Gene Ontology: Mol. function=transferase activity, transferring glycosyl groups; Biological process=sucrose metabolic process
  Homolog annotation: Hit_ID=P93783; Match level="QueryCoverage=98%, HitCoverage=37%, E-value=3e-58, Identity=93%"; Hit description =Sucrose-phosphate synthase
MVSLLIRTIRMPLRMHYINFFLINIFGQASSFKGVEEVDENPNLFRCNALYNHSATRLSVVPIHASRSQALRYLCIRLGIEVPNVAVLVGESGDSDYEELLGGLHRTVILKGEFNIAANRIHTVRRYPLQDVVALDSSNIIGVDGYTTDDLRSALQQMGILAR

SEQ ID NO: 45408 - protein, 62 aa, Zea mays
  Coding DNA Sequence Number=SeqID_3629
MPFPLLVPENAPVTRAVVVASGLLSVVFSAQRRARALGISYQGRWDLIFGAVGKGVPVVVFN

SEQ ID NO: 45409 - protein, 279 aa, Zea mays
  Coding DNA Sequence Number=SeqID_3630
  Gene Ontology: Cellular component=endoplasmic reticulum
  Homolog annotation: Hit_ID=Q943E9; Match level="QueryCoverage=47%, HitCoverage=78%, E-value=1e-47, Identity=74%"; Hit description =Putative LMW heat shock protein
  Pfam annotation: Domain name=HSP20; Domain location=159-261; Score =69.4; E_value=1.2e-17; Accession=PF00011.11; Description=Hsp20alpha crystallin family
MASQRRIAPVGARSIGWEDGDVGRAANRRAPLSIRSRISPRQANLPNRPRSHHYSTAVHPTGRVRGWRAPSRRSRAPINSRARTSAEQQQQLQQDTPKHLASLPHLLLGAAKIMSLVRLLDTLALDSWVRNPFTIFGTAVAADAWLASDTSAFANTHIESRDTAAAYVFSAALPPGVKKEEVTVELDEGNVLVIAGERSVCRQERSDGCHHIERSRATFLARFHLPEDAAVDGVRAALDAGRLTVTVPKVGAAAAAIVPEKPAADAPALAPVPVEAGPC

SEQ ID NO: 45410 - protein, 422 aa, Zea mays
  Coding DNA Sequence Number=SeqID_3631
  Gene Ontology: Mol. function=transcription factor activity; Cellular component=intracellular; Biological process=regulation of transcription, DNA-dependent
  Homolog annotation: Hit_ID=Q69XZ5; Match level="QueryCoverage=56%, HitCoverage=34%, E-value=9e-82, Identity=64%"; Hit description =Putative transcriptional regulator
MKLWKETSRSSKTTTSSRCGLAATPSRLPVKAAVIYVSFPHFDLLYGADKGNTSNKRWQQQQQELQYQDDEVGDTKGAIPQVDCTLSDASPKEAIKKTTSLCNINIKETASAKLALIDCSSMLTEILRRTRSILHKLKEQISDGTPVIRAGASTGISAKFEEAGGVDFIVMGSLAGLLPFGDANDIVLQMANEVLPVVKGVPVLAGVCATDPFRRMEYFLRQLETIGFCGVQNFPTVGLFDGNFRHNLEETGMGMEVEMISMAHRMGFLTTPYAFNPDEAAAMAKAGAHIIVAHMGLTTAGSIRAMTAATLDDSVLCVQAIADAAFGVKLISLFSITEPAVILLHFANSVISANLFTNTWTGNLVKIVIPRSNPNDAHVAGVGKFLMFPRELQLLGESVKLMKLVEAVAKGTINNETLGYFT

SEQ ID NO: 45411 - protein, 37 aa, Zea mays
  Coding DNA Sequence Number=SeqID_3632
MGCIITTSKIGPVEQATWHADDDEQGEGTGKGWFMKL

SEQ ID NO: 45412 - protein, 133 aa, Zea mays
  Coding DNA Sequence Number=SeqID_3633
MQEPVAAAGPIRVRPISRFRGAPWGYDGCNGCVTAEPTRVGGPRRRCPTCERVDLAGSGADRARLWPTRGLAVPTWIEGVHGGRMMSSLLADGCGAVTGNATEMRLVAADFPKGELRRCSPLSASSVGSQRRV

SEQ ID NO: 45413 - protein, 127 aa, Zea mays
  Coding DNA Sequence Number=SeqID_3634
MEPKLSSVGVRDLRRVVIPTLVLAVPLDARHDLHRVIIPTPVPIDPCRHPLSCDRIWKQQGTSGDGLDHLRALLQADLEVGGDGVVHDVSPKLARRRRLGVARSKGRRCRWGRHRKAQPSNSMAPTK

SEQ ID NO: 45414 - protein, 59 aa, Zea mays
  Coding DNA Sequence Number=SeqID_3635
MALVTPGVLHLYKPSCDPTSRRHPAPHRGSIQEKIFSDGANGGGGFVPPDYSENYADEL

SEQ ID NO: 45415 - protein, 115 aa, Zea mays
  Coding DNA Sequence Number=SeqID_3636
MAMMGSTSEKMYLCQLRYYPRRSTSSAGSVIVSPIGEGNQRLSSIVNLVDVLNTDLDHALDELSRARAEIAELCANHVEHRHHKDGSPALAGTQHPYRSPPCGHHAYGTSIVGPR

SEQ ID NO: 45416 - protein, 93 aa, Zea mays
  Coding DNA Sequence Number=SeqID_3637
MAHYDAPEHPLSAPAPSTPLLRSTVIHVPPYTSNNAAEYEALIHGLNIVVSLDIKRPMEIQQPSIMTSQQRNARQWSRQSQTRVTRGSQSSDT

SEQ ID NO: 45417 - protein, 45 aa, Zea mays
  Coding DNA Sequence Number=SeqID_3638
  Subcellular localization annotation: CTP_CleavageSite=7; ConfidenceScore=5.06e-01
MANSAMGAMPAWGHQRVQNATRWPNGGVDQLRVFNSNSNQVSNSN

SEQ ID NO: 45418 - protein, 187 aa, Zea mays
  Coding DNA Sequence Number=SeqID_3639
MNADFGEQASDLGETLADSLGRTTRGGLTLRRTQGDTADSTVGTTPARGHHRAQNAAEQPNDGIARVDSGGLRLHGENAGERGPGELERLGANWKGVTMGHPKPQRPPPPPTFAYPKTLNEWHQQEYGVSFITPKDEAEGFDDSFFQSAPAAAPGPIPGDPRPSGSEHPPSSPSFSGSFPFLWFSFI

SEQ ID NO: 45419 - protein, 73 aa, Zea mays
  Coding DNA Sequence Number=SeqID_3640
MRSCQRRGHNHGKALGGWGRTQCHTRILGTQARTYHQSMKTQLKPATRCLGDGEFDKGAYQGSEAMEESIHDG

SEQ ID NO: 45420 - protein, 147 aa, Zea mays
  Coding DNA Sequence Number=SeqID_3641
MERMKKEHEFEMTKLMQSSAEVAINLSSAQVKIEDLKAEINHTRNLNENYWILVANCHTLSNRGGKELSIEEFIKNKKKARQAAEMMWILEKSFRERKPKVVIEVKHTEAEAKDAAAEVEAISAIAIKKVADVEILKICEQIYEEAM

SEQ ID NO: 45421 - protein, 165 aa, Zea mays
  Coding DNA Sequence Number=SeqID_3642
  Gene Ontology: Mol. function=carboxyl- and carbamoyltransferase activity; Cellular component=ornithine carbamoyltransferase complex; Biological process=amino acid metabolic process
  Homolog annotation: Hit_ID=Q8SA97; Match level="QueryCoverage=95%, HitCoverage=24%, E-value=4e-28, Identity=48%"; Hit description =Ornithine carbamoyltransferase
  Subcellular localization annotation: CTP_CleavageSite=46; ConfidenceScore=5.02e-01
MAPPVVVAGLRPRLGDVEAPPKPRSSLSSVAKVESEPLVRARRRPSAKARAESEPWGRAKRGSSSSGAKPESEPWVGRSGVRRLLGLSPSPSPGSGGADGSGAGGAVFLLGRSVERRSDDGHFGSVGWGTRVRIKLYADGGYQLRIRSLEGTPNYGPRHHEHTKS

SEQ ID NO: 45422 - protein, 55 aa, Zea mays
  Coding DNA Sequence Number=SeqID_3643
MAEDSGFGHKPKGRSNCGTKVGTREVKDKEKYNTAPISDGVTRCELGPRCKPLAN

SEQ ID NO: 45423 - protein, 97 aa, Zea mays
  Coding DNA Sequence Number=SeqID_3644
  Subcellular localization annotation: CTP_CleavageSite=45; ConfidenceScore=5.64e-01
MASSSASPVPPPFSPPRAPIKGTARAPPSPHQPRLPPPLLPEPDRASATASSLRSAHACSSPIAPGGLAGDFTAASARHPPWTGHPKPPPVKLTPPP

SEQ ID NO: 45424 - protein, 178 aa, Zea mays
  Coding DNA Sequence Number=SeqID_3645
  Gene Ontology: Mol. function=binding; Cellular component =mitochondrial inner membrane; Biological process=transport
  Homolog annotation: Hit_ID=Q10QM8; Match level="QueryCoverage=84%, HitCoverage=36%, E-value=7e-77, Identity=95%"; Hit description =Mitochondrial carrier protein, expressed
  Pfam annotation: Domain name=Mito_carr; Domain location=3-61; Score =7.8; E_value=0.00068; Accession=PF00153.17; Description =Mitochondrial carrier protein
  Pfam annotation: Domain name=Mito_carr; Domain location=86-165; Score= 25.4; E_value=1.7e-05; Accession=PF00153.17; Description =Mitochondrial carrier protein
  Pfam module annotation: Pfam domain module=Mito_carr::Mito_carr; Domain location=3-61::86-165
MVAPGGEALGGVIGVARHMIQTEGFFSLYKGLVPSLISMAPSGAVFYGVYDILKMAYLHSPEGKKRVSMMKQQKQETNALDQLELGTVRTLLYGAIAGCCAEAATYPFEVVRRQLQMQVKATRMNALATCLKIVDQGGVPALYVGLIPSLLQGEDCFRSCQVRPEEQAVLGRRDGGLL

SEQ ID NO: 45425 - protein, 302 aa, Zea mays
  Coding DNA Sequence Number=SeqID_3646
  Gene Ontology: Mol. function=acetolactate synthase activity; Cellular component=chloroplast; Biological process=branched chain family amino acid biosynthetic process
  Homolog annotation: Hit_ID=Q9FUD0; Match level="QueryCoverage=88%, HitCoverage=53%, E-value=1e-89, Identity=84%"; Hit description =Acetolactate synthase
  Pfam annotation: Domain name=TPP_enzyme_M; Domain location=183-302; Score=184.7; E_value=2.3e-52; Accession=PF00205.12; Description =Thiamine pyrophosphate enzyme, central
  Pfam annotation: Domain name=TPP_enzyme_N; Domain location=65-161; Score=29.6; E_value=1.5e-10; Accession=PF02776.8; Description =Thiamine pyrophosphate enzyme, N-term
  Pfam module annotation: Pfam domain module=TPP_enzyme_M::TPP_enzyme _N; Domain location=183-302::65-161
  Subcellular localization annotation: CTP_CleavageSite=39; ConfidenceScore=5.66e-01
MATAAAASTALTGATTAAPKARRRAHLLATRRALAAPIRCSAASPAMPMAPPATPLRPWGPTDPRKGADILVESLERCGVRDVFAYPGGASMEIHQALTRSPVIANHLFRHEQGEAFAASGYARSSGRVGEAFFLASSGRPRPVLVDIPKDIQQQMAVPVWDKPMSLPGYIARLPKPPATELLEQVLRLVGESRRPVLYVGGGCAASGEELRRFVELTGIPVTTTLMGLGNFPSDDPLSLRMLGMHGTVYANYAVDKADLLLALGVRFDDRVTGKIEAFASRAKIVHVDIDPAEIGKNKQPH

SEQ ID NO: 45426 - protein, 360 aa, Zea mays
  Coding DNA Sequence Number=SeqID_3647
  Gene Ontology: Mol. function=acyltransferase activity; Cellular component=mitochondrion
  Homolog annotation: Hit_ID=Q6K2G7; Match level="QueryCoverage=57%, HitCoverage=80%, E-value=1e-113, Identity=96%"; Hit description =Putative mitochondrial NADH:ubiquinone oxidoreductase 29 kDa subunit
  Pfam annotation: Domain name=Hexapep; Domain location=159-176; Score =11.8; E_value=2.5; Accession=PF00132.14; Description=Bacterial transferase hexapeptide (th
  Pfam annotation: Domain name=Hexapep; Domain location=177-194; Score =1.2; E_value=1e+02; Accession=PF00132.14; Description=Bacterial transferase hexapeptide (th
  Pfam annotation: Domain name=Hexapep; Domain location=93-110; Score =8.2; E_value=15; Accession=PF00132.14; Description=Bacterial transferase hexapeptide (th
  Pfam module annotation: Pfam domain module=Hexapep::Hexapep::Hexapep; Domain location=159-176::177-194::93-110
  Subcellular localization annotation: CTP_CleavageSite=46; ConfidenceScore=5.70e-01
MAATSLARLSRRATISATAAAPSLRRLLSVTSTASVAASAPPPPPSAAGAAAVGADRVRWDYRGQRKLVPLGQWMPKVAVDAYVAPEAVLAGQVTVHDGASVWSGAVLRGDLNKITLGFCANVQERCVLHAAWTAPTGLPAETLVDRYVTVGAYCLLRSCTIEPECIIGQHSVLMEGSLVETNSILEAGSVLPPGRRIPTGELWAGSPARFVRKLTNEEIMEIPKLATAINDLMQSHFSEFLPYSNAYLEVEKLKKSFSIPLATRPAPAAVPTTPVKPTTAKFSLGRNRKLRLARPQASASGGDLYLARPKARPQPRPREESRPRPTLGLGLGLGGAAASPNLGLRATAPQGIHHYPTPS

SEQ ID NO: 45427 - protein, 214 aa, Zea mays
  Coding DNA Sequence Number=SeqID_3648
  Homolog annotation: Hit_ID=Q8RYH0; Match level="QueryCoverage=33%, HitCoverage=97%, E-value=8e-22, Identity=64%"; Hit description=GPI -anchored protein-like
MALRMPCDDGGSQPPYGRKRTALLQRVGRAGKDGTALAQGRSLPPAWTLVTPYCKRTRPGRGANTKAAGSTLPRLSPSGCFSPLRVPPRADPSGLGHAVTIYSSVQGPPGANGHLWCQIQQLGAPDRGIGLSGDPTGLSASSSPPMADWGPVVIATVLFVLLTPGLLFQLPAHGRIVGFGTMHTSGVAILVHAVLYFALITIFLIAIGVHIYAG

SEQ ID NO: 45428 - protein, 350 aa, Zea mays
  Coding DNA Sequence Number=SeqID_3649
  Gene Ontology: Mol. function=RNA-directed DNA polymerase activity; Cellular component=mitochondrion; Biological process=RNA-dependent DNA replication
  Homolog annotation: Hit_ID=UPI00004C1731; Match level="QueryCoverage =99%, HitCoverage=27%, E-value=1e-157, Identity=74%"; Hit description= UPI00004C1731 related cluster
  Pfam annotation: Domain name=RnaseH; Domain location=1-123; Score= -20.2; E_value=0.0044; Accession=PF00075.14; Description=RNase H
  Pfam annotation: Domain name=rve; Domain location=125-300; Score =99.6; E_value=9.1e-27; Accession=PF00665.16; Description=Integrase core domain
  Pfam module annotation: Pfam domain module=RnaseH::rve; Domain location=1-123::125-300
MFFDGSLMKTGAGTGLLFISPLGKHLRYVLRLHFPASNNVAEYEALVNGLRIAIELGVRRLDALGDSQLVIDQVMKNSHCHDPKMEAYCDEVRRLEDKFYGLELNHIARRYNETANELAKIASGRTTVPPDVFSRDLHQPSIKTDDTPEPEAPSAQSEKAPGGYTHLLVAIDKFSKWIEVRPLNSIRSEQAVAFFTNIIHRFGVPNSIITDNGTQFTGRKFLDFYEDHHIRVDWAAVAHPMTNGQVERANGMILQGLKPRIYNDLNKFGKQWVKELPSVVWSLRTTPSRATGFTPFFLVYGAEAILPTDLEYGSPRTRAYADQSNQANREDSLDLLEEARDMALLHSARY

SEQ ID NO: 45429 - protein, 478 aa, Zea mays
  Coding DNA Sequence Number=SeqID_3650
  Gene Ontology: Mol. function=Ran GTPase binding; Cellular component =microtubule associated complex; Biological process=protein complex assembly
  Homolog annotation: Hit_ID=Q6ZI83; Match level="QueryCoverage=96%, HitCoverage=95%, E-value=0.0, Identity=74%"; Hit description=RanBPM -like
  Pfam annotation: Domain name=SPRY; Domain location=91-229; Score =66.5; E_value=8.5e-17; Accession=PF00622.18; Description=SPRY domain
MVTNQDADAAAPGAGATVDPMRLASRWRSRPEWNCASAELEAEPSELNTVNSSGLFSVVSTDKLSVKYLGSHHHGHDVGVVQADRPAPTRRAVYYFEMGVRNAGYKGQTSIGFTSESFKMRRQPGLTIRPIFFLCILRCPGSWETNSCGYHGDDGHLYRGQGKGESFGPKFTSGDIIGAGINYLSQEFFFTKNGTLVGAIPKEIKGPLYPTIAVHSYGEELTVNFGKEPFCFDVEGYILEDKMRQQSVSDKLNLEPDISHWIVRSYLLHYGYQDTLNAFDMANATDRPTSRQNGNAEPPEMYGLSHRKLLRQLIMSGDIDSTFKRLREWYPQVIKDEQSVICFLLRSQRFIEYIRAEQLEVAVKYGRANLASFFTHKAFEGLLKDSVALLAYEKPTESCLGYLMDSSQREFVADAVNAAVLSTNPTVKDPESCLYSCLERLLKQLTVCSFERRAFNNYQGDAFLLHKEVQNYERSRRS

SEQ ID NO: 45430 - protein, 51 aa, Zea mays
  Coding DNA Sequence Number=SeqID_3651
  Homolog annotation: Hit_ID=Q6ZI78; Match level="QueryCoverage=90%, HitCoverage=8%, E-value=4e-14, Identity=78%"; Hit description =Putative DDT domain-containing protein
MTWPSNALEKRSKDIANRMLLEEGVLRRSTRVRAQPKDMAFLKYVNKWKDN

SEQ ID NO: 45431 - protein, 397 aa, Zea mays
  Coding DNA Sequence Number=SeqID_3652
  Gene Ontology: Mol. function=translation elongation factor activity; Cellular component=eukaryotic translation elongation factor 1 complex; Biological process=translational elongation
  Homolog annotation: Hit_ID=Q2VCK4; Match level="QueryCoverage=95%, HitCoverage=95%, E-value=1e-144, Identity=64%"; Hit description =Putative elongation factor 1-gamma-like
  Pfam annotation: Domain name=EF1G; Domain location=236-344; Score =150.5; E_value=4.4e-42; Accession=PF00647.9; Description=Elongation factor 1 gamma, conserved
  Pfam annotation: Domain name=GST_C; Domain location=91-180; Score =48.4; E_value=2.3e-11; Accession=PF00043.15; Description=Glutathione S-transferase, C-terminal domain
  Pfam annotation: Domain name=GST_N; Domain location=1-76; Score=45.7; E_value=1.5e-10; Accession=PF02798.10; Description=Glutathione S -transferase, N-terminal domain
  Pfam module annotation: Pfam domain module=EF1G::GST_C::GST_N; Domain location=236-344::91-180::1-76
MSFYSSIPRNPVNPPIMRILLRLSGIKVELVKDFQMGVSNKTPEFLKMNPIGKVPVLETPDGPVFESNAIARYDVSVRLNLCLFQAHIEQWMDFAATEVDASIGKWLYPQESAIAALKRAFGSLNTHLASNTFLVGHSVTLADIVLTCNLYMGFSRILTKSFTSEFPHIERYFWTMVNQPNFKKVIGDVKQAEAVPLLPKKIAPAKEQKPKEAKKEAPKPKEAEKPAEEEEAPKPKPKNPLDLLPPSKLILDDWKRLYSNTKTNFREVAIKGFWDMYDPEGYSLWFCDYKYNDENTVSFVTMNKVGGFLQRMDLCRKYAFGKMLVVGSEPPFKVKGLWLFRGPEIPKFVMDEVYDMELYEWTKVDLSDEAQKERVNAMIEDQEPFEGEALLDAKCFK

SEQ ID NO: 45432 - protein, 79 aa, Zea mays
  Coding DNA Sequence Number=SeqID_3653
MGRGSRLGRKNRAKAGKTNGMSDDGKNDATARVDVGAGVRQIWGGGACSHSLCREWVAWSWRHEGREKRSRMTNEVATT

SEQ ID NO: 45433 - protein, 113 aa, Zea mays
  Coding DNA Sequence Number=SeqID_3654
  Subcellular localization annotation: CTP_CleavageSite=68; ConfidenceScore=5.89e-01
MAHSLASALPTPALSGPLSAPSGPVPATNGPSSSPMSPASLAASVALGFPGPVFALAASATSFLAPPSSMGIVVRVLLHNVKVVWGTFMAFDRAMNPVLRDCIKIDPQVLLQR

SEQ ID NO: 45434 - protein, 124 aa, Zea mays
  Coding DNA Sequence Number=SeqID_3655
MTRSSHRAASSSMEAHGGERHRLAVGVASVGALRPIRGGRQLGARCRAGKRVVGVGGDLAEERTRSRCGFRSPTWVSECREEAQRDVQLDRAKLWPWLACPAAGRTGRGVYRAVDGEVRAVGGS

SEQ ID NO: 45435 - protein, 495 aa, Zea mays
  Coding DNA Sequence Number=SeqID_3656
MEVYKDAGGAVVPYVFPILGCPPMCSKLGFVEFDIVLLSKSAVEKETAQRRMEQQQKDKKDRVEKKWRRVEHQMRWDHGIKTDSTDEDEDDDASAGEATIDFPVVEEADFMELLALFSGSMALVAFVSLTTEPPVGRLSRAIGTRSFSTLGPFVTPLGAPLEMSTPTTKAGGEAGAPLRCLRGMVPSVGHRSVVPPNLWPRCHARKVISKRGRITPTINEGSGAVEFANASVRPLQGRDPRFAYHDTSELFGTIEGLEVDLTGATETTFEGRLSLPTHGEAQSMPLGLDGRAGFQTALDRFAKGDDPLALCKKLSEEGDASERALRDGLDQFSVTHQKLVSLTGTPASRLRLLLEQKEAWEHSASDILVARSEIQNAYKNLVSVARRDTESATLARLESAKANSHLHILERGKAVAKAHVVALEEELNGQTKKEEKLLASLSDMQGNFDTAEGDFLVVQRRSEELESFDTAEEASPVGGGECDARALQGTSLARV

SEQ ID NO: 45436 - protein, 432 aa, Zea mays
  Coding DNA Sequence Number=SeqID_3657
MGSKPFALRSPQANPDPAISFRSAHATRGCGLLIHMAMQSCEGEAVTAAAPEQIDQVGEVVAAAAAASEPDATSEARVVETPQEEAEDPEPAHRGSKSRTPAPAPASPSTVKERQIPVDPASLRRLGMVADEDWPLSAPSVLTEVVVQFPILPPLRRPTFVGASLPCSAASSPVHGARPGAGAKLEEQPAAHSPTSALRSLARQHSAALARLVAAPSTLSRSASRAEGRTMAPHDDEEPVQLQPKTIAAEDGFTCGALCMLFPGFSKRRPAFSGTTAGTAVSSSMQRQQSGLRPRRRCSASRVASLERFECGSWSPPLPPPHVAAQHDAVDCHATEVAKTSCADDDAEAPVKMAFVFDGEPPAAKKGILKNSASSRLDSARASTSSQRHVRFSTVAAADASSSSSCPSSPCITPRLARARAEFHAFLEAQSA

SEQ ID NO: 45437 - protein, 117 aa, Zea mays
  Coding DNA Sequence Number=SeqID_3658
MDPKGKGMMINDKEKETLYVDEPKGEKPTDSGSNNKKDGKNKRHIKKIIYYDNDASSSSPRDDDDEDSSSKKKMEEVPVGIVEELPGILVEEGEPEAEAQECPDHRPVPSRKVSPGI

SEQ ID NO: 45438 - protein, 541 aa, Zea mays
  Coding DNA Sequence Number=SeqID_3659
  Gene Ontology: Mol. function=nucleic acid binding; Cellular component= intracellular; Biological process=DNA integration
  Homolog annotation: Hit_ID=O24587; Match level="QueryCoverage=40%, HitCoverage=23%, E-value=1e-109, Identity=93%"; Hit description=Pol
  Pfam annotation: Domain name=rve; Domain location=306-457; Score =85.0; E_value=2.3e-22; Accession=PF00665.16; Description=Integrase core domain
  Pfam annotation: Domain name=zf-CCHC; Domain location=239-256; Score =29.5; E_value=1.2e-05; Accession=PF00098.13; Description=Zinc knuckle
  Pfam module annotation: Pfam domain module=rve::zf-CCHC; Domain location=306-457::239-256
MDPKGKGVVVNDNEKESIFNEPRDDKVNDSGSSQKKKDGKKKRRIRKVVYYDSDESSSSQKDDEYEEKKKTVNLNFSFDYSRIPHNSNTHLLSIPLASLCREEYNKVSGLDNAKQIWDTLKISHEGNDATMLTKMELVEGELGRYIKMTPEEILGKFVSGRMMIKEARYVDDALNGPIHEPQTIALKATSSREALPSKVAQVEAAGLNEDEMALIIKCFKTALKGRKEHPNKSKTKGKRSCFKCGKVGHFIPNCPNNDSDQDQEKKREKKKTYKKAKGEAHLSKEWDSDCSSSDDEGLAASAFNKSSLFPNEYHTCLMAKEKKQECNDHIKTSGVTSYGPLRTRRLPKHRRKRAQNEFELKVKKIRSDNGSEFKNLQVEEYLEEEGIKHEFSAPYTPQQNGVVQRKNRTLIDMARTMLGEFKTPERFWLEAVNTACHAINRVYLHRLLKKTSYELLTGNKPNVSYFHVFGSKCYILVKKGRNSKFAPKTVEGFLLGYDSNTKAYRVFNKSSGLVEVSSDVVFDETNGSPKEQVIDLDDVDE

SEQ ID NO: 45439 - protein, 128 aa, Zea mays
  Coding DNA Sequence Number=SeqID_3660
MAETLVASAAIDDIVGSAPLGLTLHSPSGKVKGEDESDMTSPPTLEPSALRRKPVTKMIKEQEMNEFRKLPNFITTRDYWTDLGEDTLERHACHDPWSTGRIMKGFRQRYRPDRIPFLGSKEVTAVVS

SEQ ID NO: 45440 - protein, 174 aa, Zea mays
  Coding DNA Sequence Number=SeqID_3661
MASQCDHHSSRCKGKHEYLSSKHKFMWSYDKEALKKKYHQKAKIKYDKELERSVENKINELCFLTNYTGSLCIIELGKDAVGSDDKDFGDDSTSEVLHSIDDLVTKSCRDDNTRIKEKNKYLRSVLSWVSSIEPQLGMMRRPTRPRGVVPHATKPKAVRPRGGHAQRGVGHVPY

SEQ ID NO: 45441 - protein, 148 aa, Zea mays
  Coding DNA Sequence Number=SeqID_3662
MASIGQIGVGPQHGRIILCKRVVAAPSPPAMCFPVAQNLGLSPVGNGQAARQVGGVPLGCEDIRCWHRGSSSAVSHRGGPCIKYDTHSTLHISPLSRDAQTFIPSLLPSSAGGRAGGASPRDCYVDSEQPCSWGDLSVVLARHPEPCL

SEQ ID NO: 45442 - protein, 228 aa, Zea mays
  Coding DNA Sequence Number=SeqID_3663
  Gene Ontology: Mol. function=nucleoside-triphosphatase activity; Cellular component=membrane; Biological process=defense response
  Homolog annotation: Hit_ID=Q9FWU4; Match level="QueryCoverage=88%, HitCoverage=88%, E-value=7e-81, Identity=70%"; Hit description =Putative basic secretory protein
  Pfam annotation: Domain name=BSP; Domain location=21-221; Score =377.3; E_value=2.4e-110; Accession=PF04450.3; Description=Plant Basic Secretory Protein
MKQLAGVGSIASLLLLLAATAGAVTFEAINNASTTPGGQRFDRSYGVGYAAQVLSDASCFAWAVFNQTSPADRRPVDRVTLVVNAMDGIAYTEGSTIVLNAGYVNNYTGDVKTEVTGVLYHETVHVWQWGLQDYDAHWWVFEGIADFVRLRAGYAPAHWVQPGQGSSWDKGYDVTARFLDYCDSLRPGFVALLNTKLKNGYSDDYFVQITGKCVQELWLEYKAKYGHH

SEQ ID NO: 45443 - protein, 137 aa, Zea mays
  Coding DNA Sequence Number=SeqID_3664
MVSKPEVSSLNPDRGFMSGTWELGTRYLPPVHIAEQACEAEQPTRSLSSKPTRRSGRPGRCRGTWRGGDPSPILLTHANHDRIRRHQTRLDIRTTRRIGDGRSLSAQPYIPKGRLQACLGYPMGSISAVGGPQHRSL

SEQ ID NO: 45444 - protein, 818 aa, Zea mays
  Coding DNA Sequence Number=SeqID_3665
  Homolog annotation: Hit_ID=UPI00004C1732; Match level="QueryCoverage =58%, HitCoverage=45%, E-value=7e-50, Identity=42%"; Hit description =UPI00004C1732 related cluster
MAQPLAVTEGETFSVGSRIMLSSLDFLVTVVSELRLSNLDRSWLSSAIDEHSSTIAATNRSTEKYMLQSPTTHDTPFEPREDHTVHLNPRWRQRGDEVVEDVVGEGESPKGEDHLSAPTRVVRGHRVQHNGHKGPNVVNPGGLSVKGGDGVGIEPEVWGVSGATRGLVMLPLLGSSDNSLDGGDGRNQRGEAWQGATSVLHSEGIGVNAWEGFKVGDERGLVPPSGGSNPAPEGASRPALESWPAATVASASAAASRAAEAALGEGMLVGSMAAKELGWRCSWPGMTVGDETRGQAATLGGGRRGRSELAREGEHRLGPRWRVDGGGAPGKWRSAWAEGRRRRGRSDLGRTVARWRQSLGPNAGRGDWCGGHRRRKRSDLGRLRRGGPAWGRRRRRGPAWLGAGGGSWWWGGERKVKKKPSSIPCGTYPSLSSQSWAQSASKVLMDGGSMLNIMYVETFDGLGIARSALRPSPTPFHSVTPGHQAYPLRRISLPVTFSDPSNFRIERLQFEVVHFPGAYNVILWRPHCIKFMAVPNYTYPKLKVPGPPGTITTLKASPDTFMSAEDTKDIQIDAIDTSKHIRIGAALSDRQGSTLVDFLRANRDVFVWKPVDMSGVPREVAEPSLNILPMARPVAQRLRRFDEEKRKAIDEEELEDVRRLVGCVAALSRFVSRLGERGMPLYKLLRKSDHFSWITEAQEALDRIKAFLTTTPILVAPNLGKALLYVAATTQVVSVALVVERENEVLIAKRKLIHYFDWHSVSVVSTTLLGEIVRNRDAFARIAKWSLELNGLDIGYVPKIAIKSQALVNFVTEWTEAQ

SEQ ID NO: 45445 - protein, 311 aa, Zea mays
  Coding DNA Sequence Number=SeqID_3666
MEKLKESEELLERNGGASGGGPSRRPVHQRLGPLASSGGHVAHVPLEEANYSCIVSDLVPVMRSVSPFLGAGTQRVEVEQPLENVVLDSTVRVTKEEEINLNPRISVSSVLEGYGDINAPVGRVEDRSLIEAVAATVAFGSIFQAQQQPNPLESGQVGPIVRVYSRRQRSASSAQENEAALDTSAQALISSIMRPIQYLLPLPTIHKRRSKELQPDFVPVRSSRLAKRHGRSVTAAMRQVRVSLIKHLSLNEDREVLGDFELDKHGQLFTKPLSQVHLAVLAALFGWNAPNNGEAPWDLEGLVVGSAPVDL

SEQ ID NO: 45446 - protein, 230 aa, Zea mays
  Coding DNA Sequence Number=SeqID_3667
  Gene Ontology: Mol. function=nucleoside-triphosphatase activity; Cellular component=membrane; Biological process=defense response
  Homolog annotation: Hit_ID=O24003; Match level="QueryCoverage=86%, HitCoverage=87%, E-value=4e-89, Identity=77%"; Hit description =Hypothetical protein precursor
  Pfam annotation: Domain name=BSP; Domain location=23-224; Score =407.1; E_value=2.5e-119; Accession=PF04450.3; Description=Plant Basic Secretory Protein
  Pfam annotation: Domain name=KapB; Domain location=109-226; Score= -38.7; E_value=0.075; Accession=PF08810.1; Description=Kinase associated protein B
  Pfam module annotation: Pfam domain module=BSP::KapB; Domain location= 23-224::109-226
  Subcellular localization annotation: CTP_CleavageSite=81; ConfidenceScore=5.50e-01
MMRRAAVVVGLASLLAGVAATAGGAVRFRATNAASSTAGGKRFGRDVGVAYSRRVLSDASSFCWKTFNQPSPGPGSRKPVSSVTLVVEDIGGVAFTSGNGIHLSAQYVGGYSGDVKTEVAGVLYHEVTHVWQWDGQGQANGGLVEGIADYVRLKAGYAPGHWVKPGQGDRWDQGYDVTARFLDYCDSLKPGFVAQLNAKLKGGYSDDFFAQILGKNVQQLWQEYKANYGA

SEQ ID NO: 45447 - protein, 395 aa, Zea mays
  Coding DNA Sequence Number=SeqID_3668
  Gene Ontology: Mol. function=RNA-directed DNA polymerase activity; Biological process=RNA-dependent DNA replication
  Homolog annotation: Hit_ID=Q6Z1K3; Match level="QueryCoverage=54%, HitCoverage=45%, E-value=7e-18, Identity=28%"; Hit description=Zinc knuckle domain containing protein-like
MKTDDHHQQVSPVPVVEAVVPEPSLLSVNNSKVFDSTLNSSCVLDYSDDLAREEIALRRALFVSVAGTRPVVLGSEIVDEVARQFDIAVKNMSIHQTLPEDFLLLMPDEDAASKVFNDGKALRGPRFTLLFKKWSRFAHASASSLVNLVDIEIRGIPEHAWSRSTTEHILRNSCWITDVHHNSGCGRDSASFWVRAWCLNTERVCRKLDLHILEPGDAIHEKRCLTYKIDISCRPVDLHSVASATPPPPLAPFRESEDDQDRHEQDPHLRRRGDAGVDGDSRRPIQFRLGPRLPLGRRRTLCRFVFWELIVIPAQLGGMRRCRFAIRKLVEMKRRMEGTMGLRLLHQQNKASLLLKLDLTKAFDSVSWPFLIEAVILSTAGDFVREILSPPCYSF

SEQ ID NO: 45448 - protein, 272 aa, Zea mays
  Coding DNA Sequence Number=SeqID_3669
  Gene Ontology: Mol. function=hydrolase activity
  Homolog annotation: Hit_ID=Q011W3; Match level="QueryCoverage=71%, HitCoverage=54%, E-value=6e-26, Identity=35%"; Hit description =Chromosome 09 contig 1, DNA sequence
  Pfam annotation: Domain name=Metallophos; Domain location=76-271; Score=6.3; E_value=0.09; Accession=PF00149.18; Description =Calcineurin-like phosphoesterase
  Subcellular localization annotation: CTP_CleavageSite=48; ConfidenceScore=5.76e-01
MTPHLPAVSSSSTTTTSRAAAAAAAPPSSPHQYRRRRRRRVPGCLRPRAASVRCCAAAAPAPQAAVPAAARAEATTRVFVVSNLHTDYPENMEWVRRLPAEVGAGKGEGVDALVVAGDVAETRDNFARTMEMLRDGFAAVFYVPGNHDLWLRREGGRYMDSLEKLTALLDACSELGVDTGPRTIGDLGIIPLFSWYHKSFDKEKDVSSVRVPSLEMACKDFHACQWPSDLTNDDEALALYFDKLNDKNHDATEEVKSSSKQILTFSHFVPRA

SEQ ID NO: 45449 - protein, 144 aa, Zea mays
  Coding DNA Sequence Number=SeqID_3670
MAKGITNCVTRGCFSSKQNGGRGIHGDCGEIIHRRNCTMPPSAGAGELVETRAMHIGGDSDASGGLEGSGKITVEENMGGRFWRNGTYFTDIIIEDSLLAQTHTGDETSSSRGNIFAEPEEAATTLIEFMACTFGELDNAHDVV

SEQ ID NO: 45450 - protein, 242 aa, Zea mays
  Coding DNA Sequence Number=SeqID_3671
MYIQLLTSWPNSDQQHLGHTPFSSNSTPFGDLELVRDVKVVVDLDDDPDRPKVVGVQVIGMDFPDFTASRKGVVLEGVGHTFKGQGVEGADELAMGLGVEQEDCHTPRGGMRFLRAWSQGASMSQGTVVVASHVTLSNAFIGARGLTTLGLDGVKRRGAEGGGNAAVSLKARSSGGRLARNGGTVEAKLNMLLTKSLVKWDEEKVGTNKMNATLRGCIGRATFDMVVGVGDTPVRWVAGVRG

SEQ ID NO: 45451 - protein, 92 aa, Zea mays
  Coding DNA Sequence Number=SeqID_3672
MGIRLRPFVGTYSHVDGDLLGPFGLLDGDLVSRSASHACLVGTWLVALPRRFARRGLGQSLRLIGLLDKWAGGRLWAYFGYLVPRFPTESLD

SEQ ID NO: 45452 - protein, 82 aa, Zea mays
  Coding DNA Sequence Number=SeqID_3673
MGQRKDFGMSFCQGGILILLSQSPSDPRYSLATTNTALEAADKEVVGLHDRLEQANNYVTSWYCFPVRKMDPGPFGSIDFGV

SEQ ID NO: 45453 - protein, 501 aa, Zea mays
  Coding DNA Sequence Number=SeqID_3674
  Gene Ontology: Mol. function=catalytic activity; Biological process =cellular metabolic process
  Homolog annotation: Hit_ID=Q653W0; Match level="QueryCoverage=72%, HitCoverage=99%, E-value=1e-111, Identity=59%"; Hit description =Putative dihydroflavonol-4-reductase DFR1
  Pfam annotation: Domain name=3Beta_HSD; Domain location=168-441; Score=-86.5; E_value=1.3e-06; Accession=PF01073.9; Description=3 -beta hydroxysteroid dehydrogenaseisomerase family
  Pfam annotation: Domain name=Epimerase; Domain location=167-430; Score=50.4; E_value=5.9e-12; Accession=PF01370.11; Description=NAD dependent epimerasedehydratase family
  Pfam annotation: Domain name=NAD_binding_4; Domain location=169-411; Score=-17.4; E_value=1.6e-07; Accession=PF07993.2; Description=Male sterility protein
  Pfam annotation: Domain name=NmrA; Domain location=167-460; Score= -108.9; E_value=0.067; Accession=PF05368.3; Description=NmrA-like family
  Pfam annotation: Domain name=adh_short; Domain location=165-311; Score=-32.5; E_value=0.00077; Accession=PF00106.15; Description =short chain dehydrogenase
  Pfam module annotation: Pfam domain module=3Beta_HSD::Epimerase::NAD _binding_4::NmrA::adh_short; Domain location=168-441::167-430::169 -411::167-460::165-311
MPIERLRGGRAFARRLSARSSLPAAAGEAGAAAIAREWDRQYRKSRVRPPERGRHPYPGELTIGREKEGMWRYGHVVFDVCQDKLCTTVNGSAMMDLLALALSRSALGYQLALAAPSLFEEISAANSQPRDRSRPAGAEMGSVGVGCGSPDEEQQTEGSGPLPPPAVCVTGSTGYVGSWLVRTLLRRGYRVHATARDTGKALQVLAVVEEGRDRLRVFRADMGEEGSFDAAVTGCVALFHVAASMDLHVSPAHQDNLEEHVRSSMLEPATRGTINVLRSCVRAGTVRRVVFTSSVSTLTAVDAVGRRKAVLDESCLRALDDVWRTKPVGWVYILSKRLTEEAAFRFARENGVHLVSLVLPTVAGPFLTTSVPTSIQLLLSPITGDPKLYSVLASVHARFGCVPLAHVQDVCDAHVLLMEAPRAEGRYLCAAGGYAAAQLARLLASRYLPAGDRHVVSAMATSGLFRRLLDLGFRFRHDVEDVVKDSVAQCLAHGFLEHPET

SEQ ID NO: 45454 - protein, 118 aa, Zea mays
  Coding DNA Sequence Number=SeqID_3675
MDGSDLGLCDTASHDDAPASAPEDGRRACGRGAGFVHACPGSRVATWTAPTGSSTNDAATGSATERHGPRTAGACGRRFAVSQICYVPAGQTRSGPQALLSVSSAAIRATFSSICMRG

SEQ ID NO: 45455 - protein, 90 aa, Zea mays
  Coding DNA Sequence Number=SeqID_3676
  Gene Ontology: Mol. function=polyribonucleotide nucleotidyltransferase activity; Cellular component=membrane fraction; Biological process =mRNA catabolic process
  Homolog annotation: Hit_ID=Q69LE7; Match level="QueryCoverage=95%, HitCoverage=11%, E-value=7e-35, Identity=74%"; Hit description =Putative polynucleotide phosphorylase
  Pfam annotation: Domain name=RNase_PH_C; Domain location=20-80; Score= 36.9; E_value=6.8e-08; Accession=PF03725.5; Description=3' exoribonuclease family, domain 2
MASVCGGCLALQDVGVPIKFPVAGIAMGLVLDTQEFGGDGSPLILSDITGAEDASGDMDLKVVGITLPVMEKALLQAREGRQHILSKSVL

SEQ ID NO: 45456 - protein, 505 aa, Zea mays
  Coding DNA Sequence Number=SeqID_3677
  Gene Ontology: Mol. function=electron carrier activity; Cellular component=intracellular; Biological process=electron transport
  Homolog annotation: Hit_ID=Q653W1; Match level="QueryCoverage=85%, HitCoverage=91%, E-value=1e-104, Identity=49%"; Hit description=Zinc finger (C2H2 type) protein-like
MNVCELTLAITPTGEEQFYPSSAIEQKGKTEQKKTKGKNKEAMAGSNPAIHQEQRRAWKRTLRRSKKMAILWWTALKKSLSCKSQDSCDVIKRDDASRGASASARGLGLKRSFLLQPSLSLPRSGCSRSISNLRDVIHSARFQAPPAVRSKCDSPMSVESSDVLNAVTHDVLLAAGGPASALAASDVGAVPPYAHSPLLMRCATGARLSQRKSPLRLGGGDLGSPIPAWAPCVEVGVRCNRCGARFPNDNALESHHLVFHAGKRHHLYFCGQEFRVVVLHFMSDDGSGLRFSRAVTEVVGGETASKVVELIYSVGWPNPEAALDRVERVVKVHSMERRVDRFKEYMEEVKGRAARLPNKHPRCVADGNELLQFHGTTVSCSLGSGGSHSVCTSSLCNVCRIIRHGFSATRKSRNSGGGVFTTSTSRHALECLQETSGVGAKHALLVCRVIAGRIHRPLEKLSQDFAVQPGFDSVAGQVGDDSSIEELYLLNPSALLPCFVVICKD

SEQ ID NO: 45457 - protein, 187 aa, Zea mays
  Coding DNA Sequence Number=SeqID_3678
MKAIAQEYNFEWDSSNTEAEFSKKFEDLLNGSGSSVHQVQPPTIEGSVSSPVASAPRDMPPTLNSPHLGNGRTIHGAQIEVDHREPRRDAHRARERHQWQGCSAASFPLTATAREREIRLWLGTAHGVESMEGAPFHRRYWRMQRMWYCEMEEAAESRNPTLAESREATWRDCTTACTRSRSVGARS

SEQ ID NO: 45458 - protein, 236 aa, Zea mays
  Coding DNA Sequence Number=SeqID_3679
  Homolog annotation: Hit_ID=Q9FWB6; Match level="QueryCoverage=21%, HitCoverage=14%, E-value=1e-07, Identity=55%"; Hit description =Putative alpha/beta hydrolase
MNQTADPTVDQEIVKFLIFWNTKNIGEDQPVNFISPTTCGCSATWVWIDEFFSTVAWIREPPPTNPQQITAHPIESFLLTPQSRVRAEYGKSDPNTRRDVKSKALDNKELADQLDLGQKLHVSWVLMGGYSIWRRLRQAFKKLIVPEQRTLCPLDCKQYTFPSAARAMRHPEIFCGHDMEVLQKMMNKSRQQGLCESTHRDLFVFWKLGICPINTTDRWAKRNLKALLGRRRDLSC

SEQ ID NO: 45459 - protein, 196 aa, Zea mays
  Coding DNA Sequence Number=SeqID_3680
MVGSYWCSLIDPCLLALLAPDSSDQLELVILVHGRWILLHQAAAGTTTTTKAARLNQVDDKWEKFLYQSAFCLRANETQCGVLCGPIGKCSIHLLTLGNLGQECCGGSGAVQREIVGDCRESWCSCGGRGARGWGALAMTARGDGPRGARGWGALAMTARQGGAEEDGARGGPVEEDGARGWASLGHKQMGLPEKV

SEQ ID NO: 45460 - protein, 79 aa, Zea mays
  Coding DNA Sequence Number=SeqID_3681
  Gene Ontology: Mol. function=drug transporter activity; Cellular component=membrane; Biological process=multidrug transport
  Homolog annotation: Hit_ID=Q10HY8; Match level="QueryCoverage=89%, HitCoverage=15%, E-value=3e-10, Identity=51%"; Hit description=MATE efflux family protein, expressed
MVSYINVGCYYFIDIPLGVLLRFRFGFGIKITLRTDWNKEFICSFFLASECKLRERGKDWISGTIQGGLFSQSTSDGWY

SEQ ID NO: 45461 - protein, 105 aa, Zea mays
  Coding DNA Sequence Number=SeqID_3682
  Gene Ontology: Mol. function=DNA binding; Biological process=DNA integration
  Homolog annotation: Hit_ID=UPI00004C1733; Match level="QueryCoverage =62%, HitCoverage=4%, E-value=8e-31, Identity=93%"; Hit description =UPI00004C1733 related cluster
MAPTQFTGKKFLDFCEDHHIWVDWAAVAHPMTNGQVERANDMILQGLKPRIYNDLNKFEKRWMKELPSVNPAKRIRSHVSGKADRAEGLLRLRDTDTSLVAFHKK

SEQ ID NO: 45462 - protein, 283 aa, Zea mays
  Coding DNA Sequence Number=SeqID_3683
  Gene Ontology: Mol. function=uridylate kinase activity; Cellular component=nucleus; Biological process=pyrimidine nucleotide biosynthetic process
  Homolog annotation: Hit_ID=Q5JJV9; Match level="QueryCoverage=60%, HitCoverage=49%, E-value=1e-78, Identity=89%"; Hit description =Putative UMP-kinase
  Pfam annotation: Domain name=AA_kinase; Domain location=89-276; Score= 58.5; E_value=2.2e-14; Accession=PF00696.18; Description=Amino acid kinase family
  Subcellular localization annotation: CTP_CleavageSite=50; ConfidenceScore=5.87e-01
MAASAAAAGPATFLPRLPSPRSPSPMLPPLGRRAHPVAAPLCLSAKRRACAAMGSSSSSNSGNQTSLMLPFSFTFDEDSSSSRRLYRWKRVLLKVSGEALAGNHTENIDPKITMAIAREVASVTKLGVEVAIVVGGGNIFRGASWAGCSGLDRSSADYIGMLATVMNAIFLQATMESIGIPTRVQTAFRMSEVAEPYIRRRAVRHLEKGRVVIFAAGTGNPFFTTDTAAALRCAEIVVFNLQEPGNIAKAIVGEKVGTFIGCTRDQELNGNTLVQERRLVNEA

SEQ ID NO: 45463 - protein, 173 aa, Zea mays
  Coding DNA Sequence Number=SeqID_3684
MAVRWGPLLGDPRERVGASLSTKSGFGRHRKLCLARPQGSDSASAPEDDELRLARPQGSAPVSAPDDKLCLARPQGSNSASAPEDDELRLARPEGSDLASAPEDDELRLARPPGLGLSLVLRRWSPPRPTRGSNSTSTSEDRLDLDLGGATASPDPGLGPTTSQGGLHYPTPS

SEQ ID NO: 45464 - protein, 415 aa, Zea mays
  Coding DNA Sequence Number=SeqID_3685
  Gene Ontology: Mol. function=protein dimerization activity; Cellular component=chromatin; Biological process=electron transport
  Homolog annotation: Hit_ID=Q2QPA8; Match level="QueryCoverage=97%, HitCoverage=59%, E-value=1e-129, Identity=54%"; Hit description=HAT family dimerisation domain containing protein
  Pfam annotation: Domain name=DUF659; Domain location=2-79; Score=1.9; E_value=1.6e-07; Accession=PF04937.6; Description=Protein of unknown function (DUF 659)
MVSTFDLVDRCIEEIGEANVVQVMTDNASVNTAAASLLTAKRPSIFWNGCAAHCLDLMLEDLGKLEPVEQTITSARQVTNVLYAHTRVLELGYLKKDKRKKANKVVRSATFWKNVDIAVNFFEPLANVLRRLDSDVPAMGFFHGLMLEAKKEISERFDNDESRYKVAWDIIDKRWDSKLKTPLHLVGYYLNPYFYYPKMSKIEHDGSFRAGVINCITKMIGDEETQDKIIEELYMYQDQQGTFGHEIAIRQRRNKNFNPVPQLVREIGPYLNRSIQKRRNKLLDDRMRGLVFVKFNSKLRGKKERTDRDPLQREVDDVVGDDENEFITGIVPLPNDVVEPAQDGRSHEEQTSQAQVQVQAKRKRSMKPRKKLRSLQSLMRDVQVQVQQSSSDSEDGDIAMESSESDKSPHAFDSD

SEQ ID NO: 45465 - protein, 89 aa, Zea mays
  Coding DNA Sequence Number=SeqID_3686
MEKGSQCVGMKECSSDTVAMPPIVDASSAVHRRPPSPPPPSIRCSIRLWYKAKRLIFLQPSILIDTWYMARKEVAKIKLIQRFILGHVL

SEQ ID NO: 45466 - protein, 245 aa, Zea mays
  Coding DNA Sequence Number=SeqID_3687
  Gene Ontology: Mol. function=heat shock protein binding; Cellular component=integral to membrane; Biological process=protein folding
  Homolog annotation: Hit_ID=Q5NBJ6; Match level="QueryCoverage=69%, HitCoverage=85%, E-value=3e-32, Identity=47%"; Hit description=DnaJ protein-like
  Pfam annotation: Domain name=DnaJ; Domain location=3-71; Score=79.9; E_value=8e-21; Accession=PF00226.21; Description=DnaJ domain
MGNHYQTLGVRQDATKAEVKAAFRRSALRDHPDRHAGSTDAAARADAASRFRQASDAYYVLSDDRRRAEYDLRLRGSTSSYARTSSSGWASSSASYGYGHGGGSWRRTPPGAGAGAGASVGSIDWEFLLKAVTRRGFLINLGLASVLLSGATFLDWTILEIWKMNNTGFYTLQRLRLLPTSRVSRLARVCKALRHFQGRSIAKLLKSLVVNKVKKSDQGHNLPVTRISRYFTKLVFGDSQPRCYS

SEQ ID NO: 45467 - protein, 225 aa, Zea mays
  Coding DNA Sequence Number=SeqID_3688
  Subcellular localization annotation: CTP_CleavageSite=22; ConfidenceScore=5.18e-01
MSWPLSRSPRRSPRKICDALIVAEVSGRVRLPLLLPLSLSFSGCSLPPHVFFPSPRCLAMRAAELPCARLGSPAARPSLAARHGVAILPVARHLLPARTRVEPLSCCPNKRRRLPILAMVDQPAQSLLPPQSRAVACSAPSWWLALRLAPPLAERPACRRREISEHRNWDVVRFAVVPLMGLGVCGSLCQGGHEEDGYDYDYGNGKEEGVEVDLQEFQDFDEFED

SEQ ID NO: 45468 - protein, 229 aa, Zea mays
  Coding DNA Sequence Number=SeqID_3689
MCCGVRPAGFGEIWQSLGGSGASSSGGSAGVPRLVVEEGTVAGGIGERQRWPQISTTTGCACVTRDSRRYAVRYACGVVALWASEKWTWTEGQRRLRHSDCSATRQSESDRQLGLAKGATANSAPPDPRARTRAKTRKTANSAPPDPRARTRAKTRKTANSAPPDPRARTRAKTRKTTKLRLARPQGSDSALASAGRLPPRPTPWLGLGHDNWRQDSTSASEETPRRPA

SEQ ID NO: 45469 - protein, 170 aa, Zea mays
  Coding DNA Sequence Number=SeqID_3690
  Homolog annotation: Hit_ID=Q6QP51; Match level="QueryCoverage=24%, HitCoverage=19%, E-value=7e-12, Identity=78%"; Hit description =Putative growth-regulating factor 1
  Subcellular localization annotation: CTP_CleavageSite=28; ConfidenceScore=5.18e-01
MRAACNRAKWAAFPTPNTPSMEAQTHASCNRRAECFASATAPPPAPPPRLLDCGTNTATRGDPAHNLATPAWRDGTGKGDTPEGILPYEGTRLRASLLIRGSKAGPSEGFNSRLRARGLHTHYWSGVRRPAPRKGSTAASGYSGSAPTTDQGFEGWPPKGSQPPQTQSKG

SEQ ID NO: 45470 - protein, 467 aa, Zea mays
  Coding DNA Sequence Number=SeqID_3691
  Gene Ontology: Mol. function=DNA-3-methyladenine glycosylase I activity; Biological process=base-excision repair
  Homolog annotation: Hit_ID=Q5VQI7; Match level="QueryCoverage=73%, HitCoverage=99%, E-value=1e-116, Identity=60%"; Hit description =Putative DNA-3-methyladenine glycosylase I
  Pfam annotation: Domain name=Adenine_glyco; Domain location=308-458; Score=187.8; E_value=2.7e-53; Accession=PF03352.4; Description =Methyladenine glycosylase
  Subcellular localization annotation: CTP_CleavageSite=43; ConfidenceScore=5.36e-01
MDVVAVANAKCPRPAFTGWKPSERGQRTVPRKTTGAVASGRSMASAIPVGYLQMLPRPDRDRDHDHDGPTPAREPLEDTGLLSCHVGTAYAYALVRQPVAWHMYIHILRQQQDRVESVMCNSNVKSAGVAQIDGRPVLQPAGNRVAAPDAARPLKKSLHKSFSMPPSYDNNATVPARPAPAENTRAAPAPPSLLPPTTPAPAPAAARATKAAGAVPAEKPRSKARKPGAVLPVATFAAPEAFEPAGSIAAARREHAAQAQAQRKSRIAHYGRTASFSRVEGRVGATATAEPAVPASPTTGLDEKRCSFITPYSDPLYVAYHDEEWGVPVHDDEEAFSGFDVDAVAKYTEKQMASLSADYGLDLGTVRGTVNNACRILEVRRDFCSLDKYVWAFVNNKPLSPSYKYSRKIPVKTSKSESISKDMVRRGFRFVGPTVIHSFMEAVGLTNDHLVSCPRHRVCSAAARVNN

SEQ ID NO: 45471 - protein, 75 aa, Zea mays
  Coding DNA Sequence Number=SeqID_3692
MAARSTRYESMGWFRLRVLGVVGELERVGSRAVASRVLHARCWWDASGATAGIGRAHACKALGWRCCWRARGVRG

SEQ ID NO: 45472 - protein, 380 aa, Zea mays
  Coding DNA Sequence Number=SeqID_3693
  Homolog annotation: Hit_ID=Q1SGC9; Match level="QueryCoverage=73%, HitCoverage=76%, E-value=3e-09, Identity=24%"; Hit description=HPr serine phosphorylation site
MAMAPRAGVLEEANPSRPSARREGVDQVPGRRPTAAARQGVDGVLGLPFLSGLAAGGDAKDLRFDLSTAFPSVPALRLSYRPNEPLQPFALSVRTGSPIRAPFALAAEFNLTSSNPPAFSLLFKPRIGDFAVASSVHSPPTPPPTSTPPPLAIKMVDLTTNSDDHDCEAHGNDLSFAENVFGANVAAATGTNGGGVGALLSGMRLTTRSVLPLWSKASLWFQWGLRVPPEIKATLADNGYGRKAGSLAISKLPLLVMNKITIEHTPKVPSQSEADKKRKKDTPPAAEDEEFSLMKRQLDKLNAESTMLRRAVEDLSAEIGAGKGNDRKLPTAVPPQQHTLVSKPDRHFHINAKELVDSGTKPASNEASEELKKVLEGRRK

SEQ ID NO: 45473 - protein, 699 aa, Zea mays
  Coding DNA Sequence Number=SeqID_3694
  Gene Ontology: Mol. function=nucleotide binding
  Homolog annotation: Hit_ID=Q2R4Z0; Match level="QueryCoverage=99%, HitCoverage=99%, E-value=0.0, Identity=50%"; Hit description=ATPase, histidine kinase, DNA gyrase B-, and HSP90-like domain containing protein
  Pfam annotation: Domain name=HATPase_c; Domain location=133-232; Score=16.7; E_value=0.0012; Accession=PF02518.16; Description =Histidine kinase-, DNA gyrase B-, and HSP90-like ATPase
MDAERDIKPFVSPIMATTIQHRRSLHGPNASQPTALASEHDGTPVLPQTQPQAACVLNKAASEVSGDVSDQSISAYETLEGTSTRRPCSAPRLSRKFWGAGDYDAAAGRSTPQPLSLQNRMCVHPEFLHSNATSHKWPFGALAELLDNAVDEIETGGATTILLDKVTDKRNGSPAILIQDDGGGMDPDSLRRCMSFGFSEKQSGSSIGQYGNGFKTSTMRLGADVIVFSRCTKSSGPTQSIGLLSYTFLVETGHTDVVVPVVDYKCNLMKGQTQRLERHGSEQFFSNLSALLKWSPFATEEELMQNFCDIGPHGTKIIVFNLWSNDDGNLELDFDTDPEDIMISGAPNPEEIRNSVKRANENHLANRLRYSLRLPDYFRIILRGQEVKRHRIAADLIYPECISYKPHSCGIKEPFHRVLNTSSSKGRSVSGVLEVDFIKPTHDKQDFEKSQLFQKLINRLKEMTNEYWELYSDKIGYMKKPRVSAAPLPPPVMLPIANGTAEPSDRSAPAPTQPLRSHSNYLNAVPIASAPPGFHSAPVKAESVAPGAHMGYSPSSLNAQTMQVNGIKSPSMVPATDSVDTRKRRNDDTTTMTVAFKRKATQDLAGSSCATDEASTDNIAVRPCYYLVALVHFVALILMQSLCCIDFSRQNRCSDFVMAEKALRLKEQNLRLEIEKAREQFKSLLNEYVSLSATPTQKR

SEQ ID NO: 45474 - protein, 129 aa, Zea mays
  Coding DNA Sequence Number=SeqID_3695
MGKSKKGGSSSHHFGDKRRREPTPPSEDFGDSEYSEEFSSESEEVWTYIRAIERAGLESSDESEVSSDEENSSDSSEEGGGDGDGKGDDDDGGDSDGDSDGGKGGGKGCSGDGEGGSKGGSKGSNRASG

SEQ ID NO: 45475 - protein, 124 aa, Zea mays
  Coding DNA Sequence Number=SeqID_3696
  Homolog annotation: Hit_ID=Q70ZY3; Match level="QueryCoverage=41%, HitCoverage=36%, E-value=4e-11, Identity=61%"; Hit description=M22 protein
MVVSIYPHYDSREEKNKDEASSDLQLMLSKIATWSPQSNADESDVDELEKLENLLRNALKDTRSRKVRFRCWRNKTAELVQAARKVRSKERLYTAYYCVLVPTDTCSDETTGLGKSIEQNDGIA

SEQ ID NO: 45476 - protein, 142 aa, Zea mays
  Coding DNA Sequence Number=SeqID_3697
  Homolog annotation: Hit_ID=P94029; Match level="QueryCoverage=36%, HitCoverage=64%, E-value=8e-07, Identity=52%"; Hit description =Metallothionein-like protein type 2
  Pfam annotation: Domain name=Metallothio_2; Domain location=90-141; Score=57.2; E_value=5.5e-14; Accession=PF01439.8; Description =Metallothionein
MDGYGQSRAVVCDATVPHGESQAEAAPRHEGTRGAWTAQDPSFFCEWNREEEGCRAAEATAGAAPAASAAAAAEGSMHAMQLHAHRWVWCKMYPDMAEQVTTTQTVIMGVAPSKGGFEAAAGAENGGCKCGANCTCDPCTCK

SEQ ID NO: 45477 - protein, 165 aa, Zea mays
  Coding DNA Sequence Number=SeqID_3698
  Gene Ontology: Mol. function=receptor activity
  Homolog annotation: Hit_ID=Q5ZDH7; Match level="QueryCoverage=92%, HitCoverage=28%, E-value=9e-65, Identity=70%"; Hit description =Senescence-induced receptor-like serine/threonine kinase-like
  Subcellular localization annotation: CTP_CleavageSite=73; ConfidenceScore=5.06e-01
MPVNVVIFFLDRNLSYNSLTGSLPPGLGQPSLVSLDISSNEFTGSIPGTIGSSKLQTALSGNKGLCGVPTLPACALFWEKGGLNKTGKIALGASFGFVLLVILIVVYILCIRRGPYDYDFDFPQDLTSISAISAKRNRYQRAKSVMLAEMEAHNPDGFYTNGSPH

SEQ ID NO: 45478 - protein, 71 aa, Zea mays
  Coding DNA Sequence Number=SeqID_3699
MKVRSRRSRSRPLRLPQRSLLALQRPLPLKNMYELLLKSLVLNAQKIEDSVGALPATDDEVAQMGRMRSRR

SEQ ID NO: 45479 - protein, 731 aa, Zea mays
  Coding DNA Sequence Number=SeqID_3700
  Gene Ontology: Mol. function=sugar porter activity
  Homolog annotation: Hit_ID=Q1RTB8; Match level="QueryCoverage=82%, HitCoverage=84%, E-value=1e-103, Identity=54%"; Hit description =Sugar transporter superfamily
  Subcellular localization annotation: CTP_CleavageSite=78; ConfidenceScore=5.34e-01
MASPRRRSLPLRFLIFIPAPLFLVLLFHRSSHSTAPLLHTAGSGSGPSSDPRRFSLLIKLLAYDRPAAFRRCLRSLAAADYDGDRVALHVLLDHRPPNSSLPPLATSHEILDFVDAFPWPHGEKRVHYRASNAGLQAQWIEAWWPGSDDEFAFVVEDDLQVSPLYYKFLKRLVLRYYYDRENYSPYLFGASLQRPRFVAVGSANSVFGKSIDIASAGRHKHNTATSTDLMNFSILFKETVKVNELPPDAQGSGSRLDVDIRVEHCRAVAGVLHVLARFVLVLQMQHLRGKHGNKIQLDSETRLFLYQMVGTWGQLLFPKPWKEFRLWYDDHKAKGLKPILQGMKTTGWYKKMGERIWTPWFVKFVHSRGYFNIYTNFLKERALSVSHRDAGVNYEKSVGPDSTLLDGKNLDFNLWELQPLKKLKWYDFCFNEALPGRIVRKNSELGSMLKSLQLKSTVVLVTLYSIEERFARNLICHLDKAGMKNTIFLGDNSEFLDDLAHRGYPVIDGVNFLQSIRLSSLQGSDGFVQETLVISYVIKACLDLGYNLWLLNGNMISLGNKLIEPSDQSVDFFTADEGLMFIRSSLDMKNKWNELAMSRVKAMCTSSDLSVSIKQKSFVHMLTEVMASSAGVRLGKLDEAMRVIELGPNTSNRSILEDKNRSENPEMIVQQQLESSKCVLPKLPEAISQPELALNVFLAAPISSPPEQGLGRTCASPNAFGSEVSIGALLG

SEQ ID NO: 45480 - protein, 118 aa, Zea mays
  Coding DNA Sequence Number=SeqID_3701
MSNELCLYAATFLAHIGRFDSLSCTTTSLNTTSSQRQGHEACVRHRHWRGHRVCKGHVFKMLLLCGRPCVAERREQGRAVGVVTHLDWVLHYGDDDQKVGGGAKNGVQRFLAWKIEKT

SEQ ID NO: 45481 - protein, 165 aa, Zea mays
  Coding DNA Sequence Number=SeqID_3702
  Homolog annotation: Hit_ID=Q2QNH1; Match level="QueryCoverage=29%, HitCoverage=5%, E-value=4e-12, Identity=67%"; Hit description=HAT family dimerisation domain containing protein, expressed
MTLGAAIVLVKEEEPTIGNSKEEDNLDINIEENNRNYEKFYINSNGNFYACVEMIAEFDLVIKINIDEYFWGFLKVNDTSDSGIFNILIDDMESFGLNVNDIRVQGYDNVSKKLQKPTTCIDSTLDLIQVQGRWSVKIMRVRADGPGAVKDERVGNRYPPGPPKG

SEQ ID NO: 45482 - protein, 338 aa, Zea mays
  Coding DNA Sequence Number=SeqID_3703
MRLKPYIQQDCSHIVSWLKLLRRYFGDLLHQPISQHIAKPENCLEDSPFLLDMVDLVESQDKSTRHLQRQAIYLFLSCSICLSYNRNDGALQCSCKRDECLLGDKVQGCSNHCNCFGLSEISDWFQKCYLNGSIDSKSSSFALSFLELYMEEDDMLFSILLQLLDAPLVFLKIANFETKELVGVKLFSSIFDPVHLFHLLLFLLHYDHMVLVDYLISRDVGVLCAQYLLRCLRLVSQSWHAFVDDSVYSTKIEKLNCKRQRISGDKDSDRASSSNQYKNGSGCDKEVEDSRKLFLDAKKCLYLLKRTLEDLQKKDLFPYNPKPLLRSLARFQELGEQG

SEQ ID NO: 45483 - protein, 206 aa, Zea mays
  Coding DNA Sequence Number=SeqID_3704
  Gene Ontology: Mol. function=oxidoreductase activity, acting on other nitrogenous compounds as donors, with NAD or NADP as acceptor; Biological process=nitrate assimilation
  Homolog annotation: Hit_ID=Q10CF6; Match level="QueryCoverage=48%, HitCoverage=12%, E-value=3e-18, Identity=53%"; Hit description =Expressed protein
MGSVFRQAKEMLGSVNSSVSDLQSENELQLEVFGAIIGECVNGLQEELERKLYAQMSITNTMSRNWKEAITQFATMLIAASPRLLNVGDPSFGKSLVASKKRLVGDVEEQLEPDKNDDGEASVAPAPILIPRTNTTFPPDWRSPYLLCLEVEPPVCDSRRPHLTRAALVRLTGKHPFNLEPSVSWLMAHDFITPAPHHYHYWKNIG

SEQ ID NO: 45484 - protein, 103 aa, Zea mays
  Coding DNA Sequence Number=SeqID_3705
MGMRRAQWRASRGHGGVKRGGVCRWWLEQGDGSWDASKRWGRKKGRKGCGDKDGGRKADAIRFEAGALVVVYTIILIDSRDLGGELTLSAKVAYSCQEIYLTS

SEQ ID NO: 45485 - protein, 67 aa, Zea mays
  Coding DNA Sequence Number=SeqID_3706
MQKRKLAHICDLVSSSLLLHLVNKTIRRWDQEEDEWACELFQETLSDSGEVHSCCLLPEARPYDGLV

SEQ ID NO: 45486 - protein, 136 aa, Zea mays
  Coding DNA Sequence Number=SeqID_3707
  Subcellular localization annotation: CTP_CleavageSite=37; ConfidenceScore=5.01e-01
MSGAPEDSNSNSPPSGISRGTRAIIHRTVRCTPDSVRCAKEERPQELASFGKLQRLVRYNSPDCPVCTGLSGVHRTVRCDSGATAISAPTALCRAFNARSARAEGRRAHTGTPDSKQYLSGVHRTPRRAHETEVPT

SEQ ID NO: 45487 - protein, 93 aa, Zea mays
  Coding DNA Sequence Number=SeqID_3708
MAAALRPSVRLGPNCWPASCADYTDSDFTPVCTNSRLQGVYALPSTAKSNWKDIYCIYFQNRFKMDLYVLKKGRTQDLPTTEDFLRLSAAFRL

SEQ ID NO: 45488 - protein, 133 aa, Zea mays
  Coding DNA Sequence Number=SeqID_3709
  Homolog annotation: Hit_ID=Q8H6X5; Match level="QueryCoverage=35%, HitCoverage=36%, E-value=2e-18, Identity=91%"; Hit description =Thioredoxin h-like protein
MGGCVGKVRRDDEEKLDFKGGNVHIITSKEGWDQKIAGANRDKKTVVAILQQPHVGDLLLVVVVGEIVPMPFTSPHMSIQTNGINEKCELKKLAKGINAFHWSIPQPFCDKKYIIHAKTLLSMTYFLNNSKLT

SEQ ID NO: 45489 - protein, 63 aa, Zea mays
  Coding DNA Sequence Number=SeqID_3710
METSPIISVEAQVCTRLKMKYTTFFKLQQDPELSTQAVCLMPPFHGLWAAPPILLKLFFECFW

SEQ ID NO: 45490 - protein, 508 aa, Zea mays
  Coding DNA Sequence Number=SeqID_3711
MQKRKLARICDLVSSSLLLHLEPAPSPPRQLTREGERQLLLALSTVNKTIRRWDQEEDEWACELFQETLSDSGEVHSCCLLPEARPYDGFGCLANIVSMLVGFLDFCSDYVKHSAGNILISVSSTLIKFESIWIQFIELAWGAIHAASKCVHNTSHSTTDSNSDDSTSSGTRITSFMTALSEHRLNTSRQTMSSLFRVLHAILKFLKQSDSDLKDDFICLSIHQIHKMPWNLFHQLHAGGLASCAKDSRFSTSNDSAQSRILTGSLLQLLGSLLDQSYLRDTDGQDMFVKLVDVVPKIASLSLGGQHDGSKSLYQYLKHKILDDMLFSILLQLLDAPLVFLKIANFETKELVGVKLFSSIFDPVHLFHLLLFLLHYDHMVLVDYLISRDVGVLCAQYLLRCLRLVSQSWHAFVDDSVYSTKIEKLNCKRQRISGDKDSDRASSSNQYKNGSGCDKEVEDSRKLFLDAKKCLYLLKRTLEDLQKKDLFPYNPKPLLRSLARFQELGEQG

SEQ ID NO: 45491 - protein, 783 aa, Zea mays
  Coding DNA Sequence Number=SeqID_3712
  Gene Ontology: Mol. function=protein serine/threonine kinase activity; Cellular component=membrane; Biological process=protein amino acid phosphorylation
  Homolog annotation: Hit_ID=Q6ZK10; Match level="QueryCoverage=96%, HitCoverage=92%, E-value=0.0, Identity=50%"; Hit description =Putative wall-associated serine/threonine kinase
  Pfam annotation: Domain name=EGF_CA; Domain location=295-336; Score =21.1; E_value=0.0013; Accession=PF07645.6; Description=Calcium binding EGF domain
  Pfam annotation: Domain name=EGF_CA; Domain location=338-379; Score =31.5; E_value=3e-06; Accession=PF07645.6; Description=Calcium binding EGF domain
  Pfam annotation: Domain name=Pkinase; Domain location=466-732; Score =119.2; E_value=1.2e-32; Accession=PF00069.15; Description=Protein kinase domain
  Pfam annotation: Domain name=Pkinase_Tyr; Domain location=466-732; Score=112.5; E_value=1.2e-30; Accession=PF07714.7; Description =Protein tyrosine kinase
  Pfam module annotation: Pfam domain module=EGF_CA::EGF_CA::Pkinase::Pk inase_Tyr; Domain location=295-336::338-379::466-732::466-732
MVLMMLPSFGGAAAARATGTGEASNCTRSCGNISIPYPFGIEPGCYLAAWFNLTCDHSYEPAKLFLGDGTVQVLEISVANGTVRINSTRLLYTVGGVSTTSGTWGRGLPPGGPFFLSESRSSVALVGCGAQVEVRGGVDNSLVASCAAVCPLDGDGRIVVDSSGACAGVGCCQANIVLGYDFYSIRINKLNGSVYALTASVYFVDQGFRNAQDMISAVYGYFPESLPATLEWVTSNYTCPTPYEYSHDPPPVNGECSMEHSVCLEGPYNVADRGSRCGGGVGYRGNPYVGDGCQDIDECTSPSTYSCYGDCKNIPGDFICQCPHGYYGNASLPNGCQDINECEYPEAHSCYGVCLNFPGTFQCQCPSGTYGNSSQKWGCLTIKNTTAVSGLGIGLGVSGGTILLLLTFGSPLIIRKAKERKAKKTREKYFRQNHGLLLQQLISHKADIGERMIVTLRELEKATDNFDRSRIVGGGGHGVVFKGILGLHVVAVKRSKIVVQREIDEFVNEVAVLSQVNHRNVVRLLGCCLETEVPLLVYEFISNGTLYHHLHVQGPVSLRWNDRARIALQVAKALSYLHSATSKPIFHRDIKSSNVLLDDTLTAKVSDFGASRYIPIDQTGVTTAIQGTIGYLDPMYYYTGRLTDKSDVFSYGVLLIELLTRKKPFAYRSDAGDGIVSYFVSLLAQGRLLEIMDPQVIDEEDGEIQEVAALAAMCTKLKGEDRPTMREVEMTLENLLVKKKHVPCDTSLRDEEIVARWMSNEQVSTETSSRQYTMEEDTLLSGR

SEQ ID NO: 45492 - protein, 713 aa, Zea mays
  Coding DNA Sequence Number=SeqID_3713
  Gene Ontology: Cellular component=membrane
  Homolog annotation: Hit_ID=Q6YYY7; Match level="QueryCoverage=46%, HitCoverage=84%, E-value=1e-127, Identity=71%"; Hit description =Putative MtN21
  Pfam annotation: Domain name=DUF6; Domain location=266-395; Score =58.8; E_value=1.8e-14; Accession=PF00892.11; Description=Integral membrane protein DUF6
  Pfam annotation: Domain name=DUF6; Domain location=85-218; Score =43.6; E_value=6.9e-10; Accession=PF00892.11; Description=Integral membrane protein DUF6
  Pfam annotation: Domain name=YibE_F; Domain location=134-347; Score= -151.7; E_value=0.093; Accession=PF07907.2; Description=YibEF-like protein
  Pfam module annotation: Pfam domain module=DUF6::DUF6::YibE_F; Domain location=266-395::85-218::134-347
METEHARACKPPRLTASTCTLDTVLCVHRYLQQQLQLQQQVTGDPIMGDDVRGLRAAAVTTAAGVVPAKTPERARLHVAMLALQFGYAGFHVVSRLALNMGVSKLVFPVYRNLIALCLLAPFAYFLEKKDRPAMTPAFLLQFFLLALCGITANQGFYLLGLDNTSPTFASAIQNSVPAITFAMAAALGIERVRLRRRDGLAKAAGTVLCVAGATVITLFKGPAVFGPAPSVAAAVPVPMPAPGGGNNNNNNKSWALGCVYLMGHCLSWSGWLVLQAPVLKRYPARLSVTSYTCFFGLLQFLAVAAVFERDAAAWALGSGSELLTILYAGLVASGVAFAVQTWCIDRGGPVFVAVYQPVQTLLVAVMASLLLGEQFYLGGIMGAVFIIAGLYLVLWGKSQERALAAKQTAAAAAGSVCDDDAAASCLKQPLLPPPPATSEAVEIEDEDVEESDEDSEERNTASLPEEGEIGKFEDEEDNDESEEEEPTNDDVYEFTEGPRSRKANRMEEAGPTGSFFWKPEITTTSDMQQMLKSVVQHFSCRHEVRIEAETLHNLFFNIMKIAFPDSDFSEAKNAMSFSSPGGSASGGAAAPAAPSSKHTASGHNLFIIRAVWDSTVLLTGMASICSAGTWPMGSILVRAPANSSRIPSYSSISTGEEKHKRLQRQERPSYSVKRLLLQHNARLPVGELNRVADRRVTVRSTDGIATCFLCCII

SEQ ID NO: 45493 - protein, 188 aa, Zea mays
  Coding DNA Sequence Number=SeqID_3714
MAGFGRLCVTAVTRYFGLQACEETMRLVDLAQTDILSSRADPISSRLRRRAKETATLEPDIETGQDKQDRKPHLIVCAAGEGKAMETNRAVCEGEYAMLDEPAQAVEMDGADEETGRTVVAGSAVASAADGGPLSDLFRRRRTIRSLTGTLQIKTTEKELCPLMSNRTHIFFYANVDERGRAFASRSV

SEQ ID NO: 45494 - protein, 223 aa, Zea mays
  Coding DNA Sequence Number=SeqID_3715
  Homolog annotation: Hit_ID=Q6ZI86; Match level="QueryCoverage=13%, HitCoverage=10%, E-value=1e-07, Identity=90%"; Hit description =Dehydrogenase-like protein
  Subcellular localization annotation: CTP_CleavageSite=65; ConfidenceScore=5.59e-01
MPGGNTGSVAALTATFPTEAALTGGVNSGPISARPSLPSSRRRPLPRAPRLKPPGRATDGRPPTTCARVASPGGSIRGRQRHACRARASDRQEARRPRASACSPPHARREADATLTAAVPSMAGEHDPPPPLSYSQVFPPFTSSSLARAAPLGARGAAAPLRAGVAHTPPAAPFPPHPLPAAAAAYPAGADSRHRWGDTLTAASVVAALAAVADGVPCPCNAF

SEQ ID NO: 45495 - protein, 134 aa, Zea mays
  Coding DNA Sequence Number=SeqID_3716
MSAETTADAHHTRGGSSHLRREGEAEEERIRRATDDLIATAPVYPVVVEEVPMDLHHLHVENIVVLEDSSEEFLPKPTPLAESLAFGARASSSAPPALVVQTRAPRGDDPDDSGDDNEDEEEEEENVNEEANDK

SEQ ID NO: 45496 - protein, 80 aa, Zea mays
  Coding DNA Sequence Number=SeqID_3717
MELDTITNNMVHGPIDGHENKLVVMKKDVHMHGTWDGRHDGGRSPLRRNQRGRGWWDPVEGCQGLGRRAQPAGEGRRARQ

SEQ ID NO: 45497 - protein, 109 aa, Zea mays
  Coding DNA Sequence Number=SeqID_3718
MGRSPAWRWWSRRVLELTCYGCGGGRPPTGGKRLNPNPNGPATQQWCRPTYTHTHSLTIWMSIVSLNEPFKEDEEVILCNRAVSRTCTFEDYHYDISIFAKLQDCKNDK

SEQ ID NO: 45498 - protein, 129 aa, Zea mays
  Coding DNA Sequence Number=SeqID_3719
MADSAGKATIATDLAMKTAIRPNNDGSGWEGHTNGGSGWEGHTNEESTTTKASSVRAGANRHDPVVGAPDLGRGKEVMRAMAGGAMAGDREPSRGDHGRGRTRGRDAQGVGEDSDTRVGELSVLQRVLA

SEQ ID NO: 45499 - protein, 187 aa, Zea mays
  Coding DNA Sequence Number=SeqID_3720
  Gene Ontology: Mol. function=catalytic activity; Biological process =cellular metabolic process
  Homolog annotation: Hit_ID=Q6ZI86; Match level="QueryCoverage=60%, HitCoverage=32%, E-value=5e-11, Identity=53%"; Hit description =Dehydrogenase-like protein
  Subcellular localization annotation: CTP_CleavageSite=31; ConfidenceScore=5.09e-01
MAVMPLFHHPARKHGGAGPSATDHRRRKPIRVNVAPSTLTRGSTHNWIDSESEDDNLTSGDNSPRYGGDEVVRGPPDSLLLCLALPSQTFLYGMLTLYNSLVYWRADNSSSILLKSGNAFFGNATPSDQRHIEKPFKVKEAEPVNVTKPSPHKLLVLGGSGFVGSHVCKEALDKGLVVSSLNRRTAH

SEQ ID NO: 45500 - protein, 66 aa, Zea mays
  Coding DNA Sequence Number=SeqID_3721
MAIGSVLSHGAPDSPYQRCDYEVSPFFEAKAASNGAAKRSSQTEQPNSMAGERKAIMAGQELSRHL

SEQ ID NO: 45501 - protein, 672 aa, Zea mays
  Coding DNA Sequence Number=SeqID_3722
  Gene Ontology: Mol. function=protein binding; Cellular component =integral to membrane; Biological process=protein amino acid phosphorylation
  Homolog annotation: Hit_ID=Q657S8; Match level="QueryCoverage=60%, HitCoverage=78%, E-value=1e-146, Identity=67%"; Hit description =Putative disease resistance protein
  Pfam annotation: Domain name=CbiN; Domain location=7-60; Score=-20.8; E_value=0.092; Accession=PF02553.6; Description=Cobalt transport protein component CbiN
  Pfam annotation: Domain name=LRR_1; Domain location=182-205; Score =9.0; E_value=5.9; Accession=PF00560.23; Description=Leucine Rich Repeat
  Pfam annotation: Domain name=LRR_1; Domain location=207-229; Score =13.8; E_value=0.63; Accession=PF00560.23; Description=Leucine Rich Repeat
  Pfam annotation: Domain name=LRR_1; Domain location=231-250; Score =13.2; E_value=0.92; Accession=PF00560.23; Description=Leucine Rich Repeat
  Pfam annotation: Domain name=LRR_1; Domain location=259-281; Score =11.2; E_value=2.3; Accession=PF00560.23; Description=Leucine Rich Repeat
  Pfam annotation: Domain name=LRR_1; Domain location=283-305; Score =12.3; E_value=1.4; Accession=PF00560.23; Description=Leucine Rich Repeat
  Pfam annotation: Domain name=LRR_1; Domain location=307-329; Score =14.5; E_value=0.38; Accession=PF00560.23; Description=Leucine Rich Repeat
  Pfam annotation: Domain name=LRR_1; Domain location=331-354; Score =11.2; E_value=2.3; Accession=PF00560.23; Description=Leucine Rich Repeat
  Pfam annotation: Domain name=LRR_1; Domain location=356-378; Score =6.7; E_value=16; Accession=PF00560.23; Description=Leucine Rich Repeat
  Pfam annotation: Domain name=LRR_1; Domain location=380-402; Score =12.3; E_value=1.4; Accession=PF00560.23; Description=Leucine Rich Repeat
  Pfam annotation: Domain name=LRR_1; Domain location=404-425; Score =3.8; E_value=55; Accession=PF00560.23; Description=Leucine Rich Repeat
  Pfam module annotation: Pfam domain module=CbiN::LRR_1::LRR_1::LRR _1::LRR_1::LRR_1::LRR_1::LRR_1::LRR_1::LRR_1::LRR_1; Domain location
MRRARGRRGLLLLLGVALSAAALLRGCAGQQGEDGSDAPAAAAAETAPMEEKERRALYAAIESFVGKGWNGSGLYPDPCGWSPIQARPCPSCAFPFASIYVTVLFDFLARGVSCDLFNGLWYPTVMSIGPVLDNSLQCGPDAKFSAQLFDLRRLRTLSFYSCFPASNPTAIPTGSWEKLAGTLETLEFRTNPGLNGAIPASLGRLASLQSLVLVENNLTGPVPAELGALSRLRRLVLSGNGLSGPIPVTLGNDRRADELLLIVDLSRNYLTGSLPSSLGGLTGLLKMDLSSNLLQGSIPPELAGLRSLTLLDLRNNSLTGGLPQFVQGMASLQDLLLSNNPLGGGLPQSGWGALAGLATLDLSNVGLVGAIPGSMAALTGLRFLALDHNRLTGAVPPELARLPSIGALYLNGNNLTGTLEFSAGFYQRMGRRFASWDNPGLCYNVAAVDAAHAPSGVVVCKDLQEPSVGGGARDGDGDGDAEEDGTKPEAGSSLVASSSSGMPVGSVGGLRYLVVVRGMAAAMVTEEGGNMDLDGVSHRLHYSSRVNYESSCGLKTIQMEEERASSTTGWSGGAAAYVRLPPAGDLGVSCCLLPLRVLESENKIKNMDRDADCAGPRARRGVRNRKDLSPWKAGGRSGALTDRLRSASLALAGGSGSSASPLQVEAGLHLDV

SEQ ID NO: 45502 - protein, 327 aa, Zea mays
  Coding DNA Sequence Number=SeqID_3723
  Gene Ontology: Mol. function=protein serine/threonine kinase activity; Cellular component=membrane; Biological process=protein amino acid phosphorylation
  Homolog annotation: Hit_ID=Q9ASK4; Match level="QueryCoverage=99%, HitCoverage=51%, E-value=1e-160, Identity=80%"; Hit description =Putative LRR receptor-like protein kinase
  Pfam annotation: Domain name=Pkinase; Domain location=19-262; Score =72.5; E_value=1.4e-18; Accession=PF00069.15; Description=Protein kinase domain
  Pfam annotation: Domain name=Pkinase_Tyr; Domain location=19-262; Score=72.4; E_value=1.4e-18; Accession=PF07714.7; Description =Protein tyrosine kinase
  Pfam module annotation: Pfam domain module=Pkinase::Pkinase_Tyr; Domain location=19-262::19-262
MGNCRFFTYEELYQVTNGFSAQNLLGEGGFGSVYKGCLADGEFAVKKLKDGGGQGEREFHAEVDIISRVHHRHLVSLVGYCISDEQRLLVYDFVPNNTLHYHLHGHPRIIHRDIKSSNILLDNNFEALVADFGLARIAMDACTHVTTRVMGTFGYLAPEYASSGKLTERSDVFSFGVVLLELITGRKPVDASKPLGDESLVEWARPLLTQALETGNAGELVDARLNRNYNEVEMFRMIEAAAACIRHSASRRPRMSQVVRVLDSLADVDLTNGVQPGKSEMFNVANTAEIRMFQRMAFGSQDFRTDFSQSSWSSQSRGLDASGSRPL

SEQ ID NO: 45503 - protein, 277 aa, Zea mays
  Coding DNA Sequence Number=SeqID_3724
MATTAPMPAFAPEDIPPLSTGEPLLCEAGLDDLFEPPVVTGRTGSAAIAGAGTDGVLPEPGVVVPGGEGLEGVGIKGSADVGEGLLVEGLTGIPEGGGARGGGGCANVGGVGSAGGLGVGRMVGGGDAAAGGLICIGDAFGGAAGVGGGGTATGAGGEGGGTTAAGAGGGEATSGGGGTASGGGGGKEGGGEVSCGGGVDAEGTGGGATGDEGGSAGVALGCVTGAGEAGVGVVVAGDGVALEGGKGALMVPGEGEGEDAIGAQQQARKHYSAGCDS

SEQ ID NO: 45504 - protein, 60 aa, Zea mays
  Coding DNA Sequence Number=SeqID_3725
MAKPPGQVAEGAMTPNRGLPRAADYSKGQGATAAAHAAGTLMESGGVEKIYRTHTILLGT

SEQ ID NO: 45505 - protein, 67 aa, Zea mays
  Coding DNA Sequence Number=SeqID_3726
MPCSGPSELLVGATSLPPTCSTLRLDLPDPWRRVEVLGLGNGALACPGTASPACASSCRARRCHLSA

SEQ ID NO: 45506 - protein, 100 aa, Zea mays
  Coding DNA Sequence Number=SeqID_3727
MGIDSHLSTCVDTQSPKYLEMAQGHISLSVSHIEGGGARGVDVGVASGLPGAMLVLAKSLVRESMPSAIPGLLRGMGCHEWHDCGCFVSASYDEKGGDGS

SEQ ID NO: 45507 - protein, 56 aa, Zea mays
  Coding DNA Sequence Number=SeqID_3728
MEPRKSNYLVALVLASFLLSVAVAGGHRKKLDDASESMDLSNSHSAKALELVYDIY

SEQ ID NO: 45508 - protein, 75 aa, Zea mays
  Coding DNA Sequence Number=SeqID_3729
  Subcellular localization annotation: CTP_CleavageSite=38; ConfidenceScore=5.22e-01
MAPHLVVVRPQRNPNSGKKPPLAFVVAPIGVYFCPMPRGNVGAPGRKIAGVLCRGGASMRLSLPLLGKRASGPSI

SEQ ID NO: 45509 - protein, 100 aa, Zea mays
  Coding DNA Sequence Number=SeqID_3730
MTPPTTTSTALAAEALLPVHPADAWVNVVRCLVCRGGIRGGGVTRWYFIPWSRDVQLAMARISDPGGYRPQRQAQELGTKTVQLGEKMGRAEEDVGVHMC

SEQ ID NO: 45510 - protein, 132 aa, Zea mays
  Coding DNA Sequence Number=SeqID_3731
MCSFAEELGFNSLMHVERRKKKVPNEKRAHGARKIEATRAKEHMLDNLVEIECIRKHITKETHARYVEKMVEIELLAEEKDDTSRLSELLALAKARLLLEEDKFMSQTIDEVEAAYYKQKANEAHDEDELIS

SEQ ID NO: 45511 - protein, 47 aa, Zea mays
  Coding DNA Sequence Number=SeqID_3732
MERRGLVEVCLVQDTMAHLLDKEFLQYMSSLAASLPEALAEPSLDMR

SEQ ID NO: 45512 - protein, 110 aa, Zea mays
  Coding DNA Sequence Number=SeqID_3733
MATEHSGGHGSDYVRHNSMLTPAQNSARMPPDAFRWDVQYDKPSGWALGCYLFASPEEESSLRARLLRLARPRVQPLGNFSASSDVKPSPRASSPPRPSSASATDYAVDP

SEQ ID NO: 45513 - protein, 201 aa, Zea mays
  Coding DNA Sequence Number=SeqID_3734
  Homolog annotation: Hit_ID=Q6QP54; Match level="QueryCoverage=47%, HitCoverage=26%, E-value=2e-17, Identity=60%"; Hit description =Putative kinase
  Subcellular localization annotation: CTP_CleavageSite=27; ConfidenceScore=5.29e-01
MAATSVTTNNKSRSTIEFSLGRNRKLRLARPQAPASGGGLRLVRPPDSASTLVSGGIASSPDPGLGLKRTRRRQQDPRHAASCAPTGLRRSSDSHTITCTGPKLSPNGHVGMVMMALPVDVAGLRPRLGDVEAPPKPRLSLSSVAEAESKPLGRARRRSFGRGQGGVRALGSGEAEFVIFRDLARVRALGRAERSSPSSGT

SEQ ID NO: 45514 - protein, 70 aa, Zea mays
  Coding DNA Sequence Number=SeqID_3735
  Subcellular localization annotation: CTP_CleavageSite=49; ConfidenceScore=5.17e-01
MAPEAGLGCCQPHPSGWHSSRSSAGDAVFLSGTLINHMIQKTRTESTPKMMQVVVFFARRCHQSDQFEDG

SEQ ID NO: 45515 - protein, 145 aa, Zea mays
  Coding DNA Sequence Number=SeqID_3736
MSMPRGDLADPANGVRDPTSNPAEIFARPAIRPGRKNISGVNMAAAVFAAMLGHGWRKVMSCQPLDPWWARTIRSGWPLGIGRRGPSDLDRRGADRLAFISFGPLDLDLMAMLAYRFGHDCFDLCGRIMIGWLTPSDTPSAGRFA

SEQ ID NO: 45516 - protein, 53 aa, Zea mays
  Coding DNA Sequence Number=SeqID_3737
MTRFTAAQSTELGEEGNSPAMERKAVVSNFAKTRWRPEREKATGVGETVALTG

SEQ ID NO: 45517 - protein, 193 aa, Zea mays
  Coding DNA Sequence Number=SeqID_3738
  Homolog annotation: Hit_ID=Q6QP54; Match level="QueryCoverage=25%, HitCoverage=17%, E-value=4e-09, Identity=68%"; Hit description =Putative kinase
  Subcellular localization annotation: CTP_CleavageSite=64; ConfidenceScore=5.68e-01
MVSALPDPRARTLPRRWTTVSASPDPRVRTQPRPRTKVSASPDPRARTQPRPRRSHHLARPRARTDHVTGGHHYPTPSQLRLRGTRPASHLARPGKKVLVLLSEMLPLNKVPKLQKSFLRERRVSSEATKVVPKGAQNVTLYHYNKSLVFFKNFLGGLIQQTIDDFVDDGIGNIHHIQCFFHNRIDLGVVWLG

SEQ ID NO: 45518 - protein, 71 aa, Zea mays
  Coding DNA Sequence Number=SeqID_3739
MADSVEMRAEESLHQFGVLRADHTGKKALLDRAHVAVSDQATAHGWVGPHASDRAPGERAGRTACKRDPQM

SEQ ID NO: 45519 - protein, 112 aa, Zea mays
  Coding DNA Sequence Number=SeqID_3740
MNLRRLWKPDSGRWGSAPRGLATNRAWGPGIYPPGSTPLTQLILYTCSAGLRPIWGAITSGHRFTGMHRRLHRHGSRALPSGDYRGEENPLAVRLTMGGWLEKMAWDGNGDR

SEQ ID NO: 45520 - protein, 92 aa, Zea mays
  Coding DNA Sequence Number=SeqID_3741
MGLSTAARAYWRSIERAGLGGSDDSEEVSSEEVDSSEEWNGGEGDGRENDISSGDDDTKGGGNGDGEGGDGEGDGKGDSKGNGKAGSIMLLV

SEQ ID NO: 45521 - protein, 103 aa, Zea mays
  Coding DNA Sequence Number=SeqID_3742
MSAPSPSLQLIPVDAGSLSYLRRSRDRARSGVIIPQIARRCSHSAADPPLIVAGAFPYKAIDVLDSAWEALVRLPVCSPVRNLGRLRTPVVRGEDNGDPLDPV

SEQ ID NO: 45522 - protein, 113 aa, Zea mays
  Coding DNA Sequence Number=SeqID_3743
MPACAPMYNIQNRKALLVDGPTGNNREDLIPILAQWGKLAASDGGDPSILASNSPPDDGSRARLLTRARSTQNGDPLVNSLANEELQAWDEHTAARQGFPFPRDSGVYDRPPW

SEQ ID NO: 45523 - protein, 411 aa, Zea mays
  Coding DNA Sequence Number=SeqID_3744
  Gene Ontology: Mol. function=oxidoreductase activity; Cellular component=vacuole; Biological process=response to oxidative stress
  Homolog annotation: Hit_ID=Q9FEQ9; Match level="QueryCoverage=85%, HitCoverage=94%, E-value=1e-144, Identity=76%"; Hit description =Peroxidase
  Pfam annotation: Domain name=peroxidase; Domain location=51-332; Score=383.8; E_value=2.7e-112; Accession=PF00141.13; Description =Peroxidase
MAKESKLTAGVAAALTVVAACALCLLLPATARAQLRVGFYDTSCPNAEALVRQAVAAAFAKDAGIAAGLIRLHFHDCFVRPSQESSVLTISRAFHDYCIKDCGIISAPEGCDGSVLLTVNPGGGQTERDALPNNPSLRGFDVIDAAKTAVEQSCPRTVSCADIVAFAARDSISLTGSVSYQVPAGRRDGRVSNATETVDLPPPTSTAQSLTDLFKVKELSVEDMVVLSGAHTVGRSFCASFFKRVWNTSTNPATAIVDAGLSPSYAQLLRALCPSNTTQTTPITTAMDPGTPNVLDNNYYKLLPRGMGLFFSDNQLRVNPQMAALVSSFASNETLWKEKFAAAMVKMGRIQVQTGTCGEVRLNCGVVNPSSYSSSSAVELGSSAPAAVVLIHMDEFPADTYHVFGYPTKRN

SEQ ID NO: 45524 - protein, 72 aa, Zea mays
  Coding DNA Sequence Number=SeqID_3745
MERRWRGSSASSRRFATHQDLLGAGVAGAGRGGIGDSGREEGGRDYGGAADLGTAGVRTAVGTAAARSHERG

SEQ ID NO: 45525 - protein, 70 aa, Zea mays
  Coding DNA Sequence Number=SeqID_3746
MDARDRVYEGGPHWVQKNCAMDSRDRVYEGGPHRLDHRRPANFSSDDGCQTSLVRWRLGSSSWMSRAEPG

SEQ ID NO: 45526 - protein, 297 aa, Zea mays
  Coding DNA Sequence Number=SeqID_3747
  Homolog annotation: Hit_ID=Q2QXQ5; Match level="QueryCoverage=33%, HitCoverage=18%, E-value=3e-40, Identity=82%"; Hit description=ATP -dependent RNA helicase, putative, expressed
NLTSLSELDLSINSLQGEVLEHQERDDMLDFVEAVFASGGFDHHSSLYPDGDRRYARGRPTSCGPARRRPRPFRQASAPSLAQQLRPTQRARENALFVMCAPIPPRTAQLLVLLSTSHPSTPRRLAAVSPKRPSQRSRDGEGRRAQRRVAGTSIGCTISWWSATVTQTAWLVSTACDIIARKERHGMVVSCPFLLYLVSSQDKAAQVRSICKPLKPLGIHSVSLHPGASIEHQISGLKTCEPEFLIATPERLLNLVSLKAIDISDGDKDDGFDYGNGKEEGVEANLQEFPDFDELED

SEQ ID NO: 45527 - protein, 310 aa, Zea mays
  Coding DNA Sequence Number=SeqID_3748
  Homolog annotation: Hit_ID=Q2QXQ5; Match level="QueryCoverage=45%, HitCoverage=25%, E-value=1e-35, Identity=58%"; Hit description=ATP -dependent RNA helicase, putative, expressed
  Subcellular localization annotation: CTP_CleavageSite=40; ConfidenceScore=5.50e-01
MKTMRSTSANKIKVVQRKSRVAGPPRASQRAWLAHPARPSAQAPTPRPPGQRPLPGPATAAHPARSRERVWPSCLAPAWASVAPALVPLGPPATLSNYSSSLGTLRDVRSHSAKNHPTARAPVDLPPLHSLTVGGCLAEATQPAHPRWRRATGAEEGRGDFDRLSKFLVVCLNAIRDAVAPEEGGNSIHGTGDWGVEFWRCCSAQASSDVLDASGACATVTQTAWLVSTACDIIARKERHGMVVSCPFLLYLVSSQDKAAQRNWGVVCFAVVPLMGLGVCGSLCQDGDKDDDFDYGNGKEEGVEADLQEF

SEQ ID NO: 45528 - protein, 156 aa, Zea mays
  Coding DNA Sequence Number=SeqID_3749
MAPSHCPAHHLPEAQLATQESSVLAMSRAFDDYYIKDCGVISASEVTQRRTNSDDHSPSSGASPTLPSPSPVAAPFPPPFPLPGGAPFPSPAAAAAAVAPTFPRPTPARTPPGSGGRAHPRPAQPRPPLRSPLPFLSSLFHGWEEEDGERKKMTIL

SEQ ID NO: 45529 - protein, 530 aa, Zea mays
  Coding DNA Sequence Number=SeqID_3750
  Homolog annotation: Hit_ID=Q2R276; Match level="QueryCoverage=72%, HitCoverage=82%, E-value=8e-63, Identity=40%"; Hit description =Expressed protein
  Pfam annotation: Domain name=DUF593; Domain location=157-250; Score =104.3; E_value=3.5e-28; Accession=PF04576.6; Description=Protein of unknown function, DUF593
MDDLSMRAFPILGQLADFQAQIIDDPFETHAPIIEQPGCFLHLLDLLNLLHRKPRLPPAGAFHAVPLPRLDHGHPRLLASRKPTPRAPAPAALASPSSPAAMAGENDPRSGGGPVPVDACPLCGGANGPPSRVALARRAPPGDALALAVALSPADEASALREALARHRRGVADLQAELEAERGAAAGAASEAMSMILRLQREKSEAMMEARQYRRYAEERFAHDAAEAAALHDALGRRDAAVRSLAARLRSCQARLLHLGFPSPSSPTPTAAEAEADHPFSSSDGDDGYHSVHCLDDHLADEGTPRAPHGAPSPPDSDKPVVMFGSPRRSSRHVRTFSGDGGPYSCRVALADEFPLFTDRDAPGQDDEEEADRVYTVDAVHGVPVMAPDDDCCDFGTTWEGEVGARAGAAGWAEEDEIQELKARLHALEADRESMRHAIMAMGDEKAQVVLLREIAQQLCRDAAPFPAVPLKVQPRPQPFVMAQRKVVKRHSSFAKIFIVTVIKTCIRKDNLICRTLIIELSETHYCLIM

SEQ ID NO: 45530 - protein, 607 aa, Zea mays
  Coding DNA Sequence Number=SeqID_3751
  Gene Ontology: Mol. function=oxidoreductase activity, acting on paired donors, with incorporation or reduction of molecular oxygen; Cellular component=chloroplast; Biological process=carotenoid biosynthetic process
  Homolog annotation: Hit_ID=Q2R2A6; Match level="QueryCoverage=87%, HitCoverage=86%, E-value=0.0, Identity=81%"; Hit description =Carotenoid isomerase, putative, expressed
  Pfam annotation: Domain name=Amino_oxidase; Domain location=71-580; Score=-11.7; E_value=1.9e-05; Accession=PF01593.14; Description =Flavin containing amine oxidoreductase
  Pfam annotation: Domain name=DAO; Domain location=63-578; Score= -26.7; E_value=0.00031; Accession=PF01266.14; Description=FAD dependent oxidoreductase
  Pfam annotation: Domain name=Pyr_redox_2; Domain location=63-562; Score=-41.4; E_value=0.1; Accession=PF07992.4; Description=Pyridine nucleotide-disulphide oxidore
  Pfam module annotation: Pfam domain module=Amino_oxidase::DAO::Pyr _redox_2; Domain location=71-580::63-578::63-562
  Subcellular localization annotation: CTP_CleavageSite=45; ConfidenceScore=5.01e-01
MPPLAARLYAPLNLAPAVPAASLRPATRLCAASGPRNEKAAAVAVAEKAGGEGGGGEDEGPYDAIVIGSGIGGLVAATQLAAKGARVLVLEKYLIPGGSSGYYRRDGFTFDVGSSVMFGFSDKGNLNLITQALEAVGRKMRVLPDPSTVHFHLPGDLSVLVHRKYEDFINELVSKFPHEKEGILKFYDTCWTIFNSLNSLELKSLEEPLYLFRQFFQKPRECLTLAYYLPQNAGDIARKFIKDQELLSFIDAECFIVSTVNALQTPMINASMVLCDRHFGGINYPVGGVGGIAISLADGLVEKGSEIRYKANVTNVILENGKALSTSVLQVGVRLSNGKEFFAKTVISNATRWDTFGKLVKEELPEEEKNFQKNYVKAPSFLSIHMGVKASVLPAGTDCHHFILEDNWNNLEKPYGSIFLSIPTVLDPSLAPEGHHILHIFTTAGIEDWEGLSRKEYEEKKEVVANEIIRRLEKKLFPGLQDSIVLKEWRSTHYGQLWLELYLKIMFGVVVGSPKTHRRFLARNDGTYGPMPRGKPKGLLAMPFNTTSIDGLYCVGDSCFPGQGVIAVAFSGIMCAHRVAADIGLEQKSPVLDAGLLGLLRWLRTLA

SEQ ID NO: 45531 - protein, 138 aa, Zea mays
  Coding DNA Sequence Number=SeqID_3752
  Homolog annotation: Hit_ID=Q8S2G0; Match level="QueryCoverage=38%, HitCoverage=13%, E-value=3e-19, Identity=79%"; Hit description =Putative isopentenyl monophosphate kinase
MAAAAVTLLRLLLARLSYHLRSVEEESAAEADAPRSFVLPQLPWPKLSVKEDVCPHGSTIVGIGSLDPPAFVYDDEDYKDVFVSEACLLTRDENEWYREPISANATSSKEDTEFDQRLDMVGKNTTVLAGIVHKTIWF

SEQ ID NO: 45532 - protein, 148 aa, Zea mays
  Coding DNA Sequence Number=SeqID_3753
  Homolog annotation: Hit_ID=Q6AT81; Match level="QueryCoverage=24%, HitCoverage=7%, E-value=4e-09, Identity=66%"; Hit description =Putative cytochrome P450
MVARREAAAMVAPRGLAGLGAKLREGRRELRAERRGKGEIEAVAAAGREAGSVRLLVTNIYSPIQVYIFRRIPFFKGKVLILFLVEVFTGGEGDMEPPAEELRAPAGVAVPSDRLDEGFAGAEREVVSYKRRMVPVGRVLENRWLPFV

SEQ ID NO: 45533 - protein, 333 aa, Zea mays
  Coding DNA Sequence Number=SeqID_3754
  Homolog annotation: Hit_ID=Q2R8U1; Match level="QueryCoverage=62%, HitCoverage=47%, E-value=8e-40, Identity=47%"; Hit description =Expressed protein
MVDKLGNYSKNQIYIRGSIRKARPPPVHCSKPSRTDRNRNYRGNYQDGPPQQGNYQNNRPPPQGGYHLPEQPAAARKLPDIPLAARWKRLCPHSRIMHKVVMMVEVLEGRNDYTDRSGYNGPPDFRSQSQYQGHVNPAGQGQGYNNPQERSNFSQGQAGEHLLLLQHLGLMANHQHLDLMVCPSANPGGNRVPGVNPSYGGDGRQGAGPAYGGDNWQRGSGQYPSPGEGQGNWQVVYKHRGLLTDQVLEDLTMYLRRQREGGDDAGAVVASSRDDNNVETMPESSEPYQHASSRDDDIKAMPESSDPYQGPAHACQEMGRRPIFIPCSSYVWD

SEQ ID NO: 45534 - protein, 106 aa, Zea mays
  Coding DNA Sequence Number=SeqID_3755
MANGYSRPHKDEAIKIIKHCMFATGAGLEIPNEQRRGGTPADAEANNAPDTARDVVQALREPQQIPEPDPNGSAVPSAWLLSQGKGNIKDSRERGQVTDYLHQLTF

SEQ ID NO: 45535 - protein, 467 aa, Zea mays
  Coding DNA Sequence Number=SeqID_3756
  Gene Ontology: Mol. function=nucleic acid binding
  Homolog annotation: Hit_ID=Q2R2A2; Match level="QueryCoverage=45%, HitCoverage=100%, E-value=4e-39, Identity=47%"; Hit description=Zinc knuckle family protein, expressed
  Pfam annotation: Domain name=zf-CCHC; Domain location=175-192; Score =29.7; E_value=1e-05; Accession=PF00098.13; Description=Zinc knuckle
  Pfam annotation: Domain name=zf-CCHC; Domain location=197-214; Score =19.9; E_value=0.00052; Accession=PF00098.13; Description=Zinc knuckle
  Pfam annotation: Domain name=zf-CCHC; Domain location=216-233; Score =29.1; E_value=1.5e-05; Accession=PF00098.13; Description=Zinc knuckle
  Pfam annotation: Domain name=zf-CCHC; Domain location=243-260; Score =8.8; E_value=0.035; Accession=PF00098.13; Description=Zinc knuckle
  Pfam module annotation: Pfam domain module=zf-CCHC::zf-CCHC::zf -CCHC::zf-CCHC; Domain location=175-192::197-214::216-233::243-260
MAQRWRSRARWDSDLDEDGSPPFRQPRRGGSDEEDDEVGNEDLSLEIIARAQRKRRWASCGGVTGFANLLSVSSGDDEDAVVELAEADEPRRKQKKRQHWKQRKRQRKEATAAAAAAAAVDEEEKEVGTTQEEQIGTAESVLTEDGVDAPTSHSMFLRKLLRIPRYFDPGETLLETCFNCSEEGHVAANCPMGKRKKPCFVCGLFGHNAKQCKQGQDCFICKKGGHMAKDCPDKHKRNDHQSTLCIRCGETGHDMFGCANDYPPDDIECNSALAARLAVITVPNLAILAWDVLSNAGKLVLSQPQPYASNVARKSDGPKGWSSPHSQRKGRWKNDGKSPSHIRRKEKWKKDSSARSAPHDACTTSKSNSPSFEERMGASNHKSKWRGGWTGDDDLPSKKYKPNGWGSPATPKRSYTNHQYLSGGGDYFTPQSSRRHNHGTASPGARKHRFSSSIFAASNTHVRFKRS

SEQ ID NO: 45536 - protein, 949 aa, Zea mays
  Coding DNA Sequence Number=SeqID_3757
  Gene Ontology: Mol. function=nucleoside-triphosphatase activity; Cellular component=intracellular; Biological process=defense response
  Homolog annotation: Hit_ID=Q84N08; Match level="QueryCoverage=97%, HitCoverage=97%, E-value=0.0, Identity=72%"; Hit description =Replication factor C 110 kDa subunit
  Pfam annotation: Domain name=AAA; Domain location=423-612; Score =35.9; E_value=1.4e-07; Accession=PF00004.19; Description=ATPase family associated with various cellular activities (AAA)
  Pfam annotation: Domain name=BRCT; Domain location=220-297; Score =80.2; E_value=6.6e-21; Accession=PF00533.16; Description=BRCA1 C Terminus (BRCT) domain
  Pfam annotation: Domain name=RFC1; Domain location=703-817; Score =82.3; E_value=1.5e-21; Accession=PF08519.2; Description=Replication factor RFC1 C terminal do
  Pfam annotation: Domain name=Rad17; Domain location=362-763; Score= -208.9; E_value=0.067; Accession=PF03215.6; Description=Rad17 cell cycle checkpoint protein
  Pfam module annotation: Pfam domain module=AAA::BRCT::RFC1::Rad17; Domain location=423-612::220-297::703-817::362-763
MSSDIRKWFMKPQDKSAAASGAAGKPSGSAAEKKPVLSIPEKKSAPPALASCDHDTSARRKTSKYFGSKAEKDSDVQMADASGGKSAAKRKLQKCNDEVKEDSKPFPAKKMFDDEEDDDFVAPAKKKTPVKPPPSKKLKVESNVEAPAKTTGVDDAEDEDRMDEDAKTPSKGAGRGRGRGGRGGAGAAPGGRGRGGGRGFMNFGERKDPPHKGEKEVPEGAPDCLSGLTFVISGTLDSLEREEATDLIKRYGGRVTGSISKKTSYLLADEDIGGVKSNKAKDLGVPFLTEDGLFDLIRKSKPAKAPVDKRQNNNSSEKLQKSQTKSSPAKVEKRAEASAVGKSIASNSNAASASADKQKPKIVDRGSMQWTEKYRPKVPNDIVGNQSMVKQLHDWLKSWDALFLHSGQKGKGKKQTDSAAKKAVLLSGPPGIGKTTTAKVVSQMLGLQAIEVNASDSRGKADSKIEKGVGGSTSNSIKELINNATLNYSDNRGQQFHRLKHPKAVLVMDEVDGMSAGDRGGVADLIASIKISKIPIICICNDRYSQKLKNLVNYCLMLNFRKPTKQQMGKRLMEIAKKEGIQAQENAMEELAERVHGDIRMALNHLQYMSLSQSVVKYDDIKERLNSSSKDEDISPFTAVDKLFGFNGGRLRMDERMDFGMSDPDLVPLIIQENYINYRPNTIGKDESGVKRMNALARAAESIADGDLVNVQIRRYRQWQLSQAACFASSIVPVSETLIGLVDGWVMRNNHGYPEHQPKSHVQDEAVQKVVEFMDTYSLSQEDFDTIVEVSKFKGHPSPMDGIQPAVKSALTKAYKQGSSSRVVRAADLINIPGMKKPLKKRVAAILEPVEESLPEENGLASAEDDEDGSSDAENNGACSPFPHELVPADSTPKLDLQSDKKKGIQVQLDLKSNGDGPRGKKAPAARSRATGSGGKAAAGGGSAGKRKR

SEQ ID NO: 45537 - protein, 401 aa, Zea mays
  Coding DNA Sequence Number=SeqID_3758
  Gene Ontology: Mol. function=DNA binding
  Homolog annotation: Hit_ID=Q9LGH0; Match level="QueryCoverage=37%, HitCoverage=41%, E-value=6e-28, Identity=41%"; Hit description=NAM -like protein-like
MDENGHYVVVALPSARCGGDDDEPTVKEEDEEAEEQEQSPTEAPALPAARAVRRRPNQKRTKNFSDREDEMLALAWLRVSADPAAGRAPFWSRLHDHFHAHRDFASERSENSLLHRWSTVQDNVRRFDRCVADVAGAAAGAAEGGLTPQDTVVRALALFKSRDKNNKPFQFMHCWILLRSQRKWMERSSQSQTSSPKLAWTSRPPPSQKKQKTAPSPSPSPCAPPRALDDGLDAAAAQEREEEEEEAVHAMQQPVDGTEEEEELQQGGGVGVGGASLYLEAADDLWWGKRKAADDNGEQQAGARTMQQLSNGAREKRALEQQRTVALALDQARAANEARSLEIRRREVELRTKEVDLKVMLEEERIMAKDTSAMSGIQQQYYRMLQNKIMTRRFGGSSWME

SEQ ID NO: 45538 - protein, 76 aa, Zea mays
  Coding DNA Sequence Number=SeqID_3759
MAGMQGCLGSTTTGIRLYGENDGEREPGETEGLGANQRMSRIAGEEAELTEATDVADARRRPRNGRRIRAELHGPA

SEQ ID NO: 45539 - protein, 124 aa, Zea mays
  Coding DNA Sequence Number=SeqID_3760
MELSWFLSAFLSRSVSLPGRRDLRAPERILSLQPQQEALLALPELVVADLRACTPWMDRLLAGLPCMCWRNLPCHYASGSGMQWQCHHGWDAHATSRSPAARALPGYLARSVWPMATGGASGGI

SEQ ID NO: 45540 - protein, 415 aa, Zea mays
  Coding DNA Sequence Number=SeqID_3761
  Gene Ontology: Mol. function=nucleic acid binding; Cellular component= intracellular; Biological process=chromatin modification
  Homolog annotation: Hit_ID=Q6ZFH4; Match level="QueryCoverage=80%, HitCoverage=76%, E-value=1e-117, Identity=63%"; Hit description =Putative transparent testa
  Pfam annotation: Domain name=zf-C2H2; Domain location=248-270; Score =21.7; E_value=0.0026; Accession=PF00096.16; Description=Zinc finger, C2H2 type
  Pfam annotation: Domain name=zf-C2H2; Domain location=332-354; Score =20.5; E_value=0.0061; Accession=PF00096.16; Description=Zinc finger, C2H2 type
  Pfam annotation: Domain name=zf-C2H2; Domain location=358-381; Score =8.2; E_value=1.3; Accession=PF00096.16; Description=Zinc finger, C2H2 type
  Pfam module annotation: Pfam domain module=zf-C2H2::zf-C2H2::zf-C2H2; Domain location=248-270::332-354::358-381
MEDPYTSFFKSSYYYYGSSYPAAPAPHHLPPYTTLYPAAASHQYPACFFQPPPLPLHEHDSPPSPPLREALPLLSQSPTRAASRARRPRPHVAVDSDSEDGADDFLREGAVGSSVAPSTTTTRAPLFADLNCMPSCCDDDPMDLEAAAAAPTDDDADDAAVALRIGLPPAPVNGCGGAGSDLRSGLSGRGACGGMEAEEDEDECNKVGDGDGDEVVPLGFASTPIGRLNKGQYWIPTPAQILIGPTQFSCPVCYKTFNRYNNMQMHMWGHGSQYRKGPESLRGVQPTAMLRLPCYCCAPGCRNNIDHPRARPLKDFRTLQTHYKRKHGLKPFLCRKCGKAFAVKGDWRTHEKNCGRLWYCLCGSEFKHKRSLKDHARAFGHGHGGAFGCNLAGADGLDDDDDGAVSDIEHDCAAR

SEQ ID NO: 45541 - protein, 62 aa, Zea mays
  Coding DNA Sequence Number=SeqID_3762
MTPTLLHSLKPQDMSVTIEEVQVSRKWEFHGNTDIGSILHIDMILADKEAIAVSDHHIVWLQ

SEQ ID NO: 45542 - protein, 209 aa, Zea mays
  Coding DNA Sequence Number=SeqID_3763
MSVAVQNGLAQLKSLMTATTANNIQDCPQQSGSLYDGEDTDGSNEEESQSRKGVRANISNDGDQISTKEYKKKQNEPTIRNYIGKVTAQFTMYNESKAVEDACLDMLKGGQRQMRYRLKQKYFNGIPANEVRTSSPIPSMSDEDWRRGLPQNTRINLIVKTYGINNAQDPSSTLQKLIYCVSFEELNMLLLQSCFTTVEISFEEFILEL

SEQ ID NO: 45543 - protein, 65 aa, Zea mays
  Coding DNA Sequence Number=SeqID_3764
MPRVRLRSTLCRTQHANQKNPKSEQFCWVAWTRSGAPQTKLSSFIPIQTSGQSGSGWVKVRSWSI

SEQ ID NO: 45544 - protein, 83 aa, Zea mays
  Coding DNA Sequence Number=SeqID_3765
  Homolog annotation: Hit_ID=Q6QP51; Match level="QueryCoverage=62%, HitCoverage=30%, E-value=8e-16, Identity=81%"; Hit description =Putative growth-regulating factor 1
  Subcellular localization annotation: CTP_CleavageSite=60; ConfidenceScore=5.06e-01
MPVFRPSNGSRNDRPANHLSRCINFAAPSPPTDQGFEGWPLGRVRQPPQSTQASGSLLIRGSKAGPSEGFDSRLRALGLRTHY

SEQ ID NO: 45545 - protein, 199 aa, Zea mays
  Coding DNA Sequence Number=SeqID_3766
  Gene Ontology: Mol. function=RNA binding; Cellular component=nucleus; Biological process=rRNA processing
  Homolog annotation: Hit_ID=Q1RX21; Match level="QueryCoverage=54%, HitCoverage=37%, E-value=2e-47, Identity=82%"; Hit description =Fibrillarin
  Pfam annotation: Domain name=Fibrillarin; Domain location=1-175; Score=119.4; E_value=1e-32; Accession=PF01269.8; Description =Fibrillarin
MNEDGTKVECRVWNPFRSKLVAAVLGGVDNIWIAPGTHVLYVSHVSDIVGPDGLVYAVEFSHRSGRDLVNMAKKRTNVIPIIEDVRHPARYQMLVGMVDVIFSDVAQPYQVPFPSSLVSESLGCHIVGLSVVYPRSLPLYSFDFDLAILSLTNDDHTRIPLQDINWMMQIRVSDASCAQCQTYLYLLCAIPISLFFFIG

SEQ ID NO: 45546 - protein, 221 aa, Zea mays
  Coding DNA Sequence Number=SeqID_3767
  Gene Ontology: Mol. function=peptidyl-prolyl cis-trans isomerase activity; Cellular component=integral to membrane; Biological process=protein folding
  Homolog annotation: Hit_ID=UPI0000588B74; Match level="QueryCoverage =95%, HitCoverage=59%, E-value=3e-51, Identity=47%"; Hit description =PREDICTED: similar to conserved hypothetical protein
  Pfam annotation: Domain name=DUF1295; Domain location=1-182; Score =231.6; E_value=1.7e-66; Accession=PF06966.3; Description=Protein of unknown function (DUF1295)
MRILQWGEDRRFDKMRDNLGKLAVFWIFQKFSPGHLFLFGQAVWVWSVSLPVTVVNASDRNPSIEARDIIGWIIWLVGICVEATADQQKLVFKNSPSNRGKWCNAGLWKYSRHPNYFGEIFLWWGVFVASTPVISDAEWLVILGPIFLTLLLLFVSGIPLLESSADKRYGRLEEYRAYKNTTSPLIPLPPAVYGSLPAWFKVAFLLELPLYNPGPGGDPIS

SEQ ID NO: 45547 - protein, 91 aa, Zea mays
  Coding DNA Sequence Number=SeqID_3768
MGTVLDSHFLALTAIVTVGYQLLFFIITALLRFDKVTDFAVCVAVVAPSLQKPNLSPELYYTHPIPNYKTMTYIAYIRACTTPFNMGSLRA

SEQ ID NO: 45548 - protein, 169 aa, Zea mays
  Coding DNA Sequence Number=SeqID_3769
MRRRADIVRRVQVVVGLGREAGRDGVLKGGPALKVQRATETELGVLCGGAARQALFMGTGRRRMNREAPGTRGVIRSQPHGEIRSSPPFARCLLRDPRNPRSRSGVRRLKGAPTRRTHTSAQQGPSWRSGATEPMVSRGQGSRSAVRPEEKSQREEEDTPNRWGPHGFF

SEQ ID NO: 45549 - protein, 169 aa, Zea mays
  Coding DNA Sequence Number=SeqID_3770
MRRRADIVRRVQVVVGLGREAGRDGVLKGGPALKVQRAMETELGVLCGGAARQALFMGTGRRRMNREAPGTRGVIRSQPHDEIRSSPPFARCLLRDPRNPRSRSGVRRLKGAPTRRTHTSAQQGPSWRSGATEPMVSRGQGSRSAVRPEEKSQREEEDTPNRWGPHGFF

SEQ ID NO: 45550 - protein, 188 aa, Zea mays
  Coding DNA Sequence Number=SeqID_3771
MEKARRRHVPAFGEWNYYYSSSSSTSPDSAPAAAEPCWWYAPEPEARSEAWFRYSPPPRRRPAPVPASKKARRPETAGGGGGAVAAAVAAERKRAAAPKGSGRRVVVVRPVDEDLYRVPPPDDNDGAAAVSRLPRRRQQHCRGTGGSNPMRGGKSGLSFRQMWNMLYNNETMQIVEYIEVYMILMVAM

SEQ ID NO: 45551 - protein, 321 aa, Zea mays
  Coding DNA Sequence Number=SeqID_3772
  Gene Ontology: Mol. function=small conjugating protein ligase activity; Biological process=protein modification process
  Homolog annotation: Hit_ID=Q2R2G6; Match level="QueryCoverage=93%, HitCoverage=90%, E-value=1e-111, Identity=60%"; Hit description=RWD domain containing protein, expressed
  Pfam annotation: Domain name=RWD; Domain location=7-117; Score=73.6; E_value=6.2e-19; Accession=PF05773.12; Description=RWD domain
MAAAQLEAEEELRLELEAVAAVYGDDVRVLRDLPPHLFVHVRPRTADDTSQQFVELFLGIKASSQYPKEPPHIYAVESKGLDENRQIYLITSIQNKANELSNCPMLVTLCEEAGEILSNMNHPAGDCPLCLYPLMGEDKGLDLSSSDKHYNVNQPRGFCPVCRKVFDEKDIEHVRDLLGDNTSRLASLTVDLGEDEKELLHSEAEQNRRKRIESLVNLQQELNGLIEPKKDLAIQPGMYVSVPPSTPDTAEEENADPSQGTATSTSETEQRGQASNASSNKPKNPGHRRRNRANASRRQPHGQGQPARQQWQRKEAGTSHQ

SEQ ID NO: 45552 - protein, 110 aa, Zea mays
  Coding DNA Sequence Number=SeqID_3773
  Subcellular localization annotation: CTP_CleavageSite=69; ConfidenceScore=5.58e-01
MGRHLARAHFAQRPAMRQGPYPARHKFFNQIATLRSRPSLQSLVRRRQNRWSLGGQMLGRRQRRHPSLEAFAAVAGPTETKQAFARYGARRRPATLSSHRAASSSSEAHV

SEQ ID NO: 45553 - protein, 397 aa, Zea mays
  Coding DNA Sequence Number=SeqID_3774
  Gene Ontology: Mol. function=DNA binding; Cellular component=nucleus; Biological process=RNA-dependent DNA replication
  Homolog annotation: Hit_ID=Q6EQL9; Match level="QueryCoverage=85%, HitCoverage=73%, E-value=2e-89, Identity=50%"; Hit description =Ribosomal protein-like
  Subcellular localization annotation: CTP_CleavageSite=17; ConfidenceScore=5.35e-01
MDPTNQRSSGAGRRRSVAAAKGHGQQHVPAPTSLRSPSSPDSQQVQSPNPPWNFYPPNGFVNLINQPYMPMPSQPLGENFHFVGLTQNFNTSLPPPPPPNAKRTQKPSRLAKGTIQIDGDGDATTEESKAVKKRYWTHDEEVRLASAWLNCSNDPIHGNDKKGETFWKEIAEYFNKHAPADRQRDVNQLKIHWTRLKTVINNFNGCWSAVSKMHTSGYSDDQLMDEAQKMYANGNNGKPFTLVHWWKTLRNEPKFCAQISQMDKEKGQSHTIDITEDRDLLPSQRPIGRDAAKAQRNGKRKAEEVLDGIARLGDSINKIVEVQQDRKQEREKVAETQLEISRLQLKAAQEQKEAKLLEVYSSLLQQDTSQLSDQGKINRERTLQKMELKLFGDSAED

SEQ ID NO: 45554 - protein, 75 aa, Zea mays
  Coding DNA Sequence Number=SeqID_3775
MGTWAWWRGRDEEVRCDRREASPTVVLLARLGEGGRARREATDPERGRGGREAGVGVGEGVAKAQARVMAISDSL

SEQ ID NO: 45555 - protein, 68 aa, Zea mays
  Coding DNA Sequence Number=SeqID_3776
MTYKEWEMVVHVIAAFWVPSSIMENNILYQIISPHDGAQILKNRGAFLNAFGSIVLNAPVGIKSLPLR

SEQ ID NO: 45556 - protein, 36 aa, Zea mays
  Coding DNA Sequence Number=SeqID_3777
MKLTVKTLKGTHFEIRVQPNDTGRVVGASARGPSDQ

SEQ ID NO: 45557 - protein, 48 aa, Zea mays
  Coding DNA Sequence Number=SeqID_3778
MALSYFTGIWYSGSIVAGIFWLKFYTLKVSNTSDIPCSTYDRSWGCFV

SEQ ID NO: 45558 - protein, 1139 aa, Zea mays
  Coding DNA Sequence Number=SeqID_3779
  Gene Ontology: Mol. function=integrase activity; Biological process =DNA integration
  Homolog annotation: Hit_ID=Q1SL72; Match level="QueryCoverage=98%, HitCoverage=98%, E-value=0.0, Identity=45%"; Hit description =Ubiquitin
MSSGSAVTGGGAEEAAAVPLGQKLIVHVAENGHTLEFQCGGDTLVEAIQHSIQLHCEIPPADQLLLCGNISLDGANALATYKLPRDDREVFLYNKARLLADSRPPAPESLYIPEPNIPPPPRPQGSPPSDASADPALKALVSYETRFRYHFQVANAVYQSSLAKFELCRRLLREGQVQERALDTAGSNLEHTFRKLSQRYSEFLRCFTQQHRSHVEMLANFERDVQKLRAVRLHPALQSEGRHCLMDLLKENDLRKLADECFCSHKKFEVKVSQLKANFLELKKRVEGLFHAMSSGGCKDVEKLIKEHQGVIGDQKIIMQALSKDVDTSKKLVDDCSSCQLSASLRPHDAVSAVGRIYEVHEKDNLPSIRDFDQRLTKLLEKCKDKKNEMNTLVHVCMQRVKSSQISIKGMMSELVAFQEVMGHQEDFDNLKIVSGLGHAYRACVAEVARRKSYFKLYTGLAGKYAETLAIECQNEKTRREDFHRTWSRYIPDDVMCSMGLFDSPSQCDVKVAPFDLDLLPIDVDDVEKLAPQSILGSFLKSERSQLAKPLLSNSTSGNLNKSEQHSLSADDKMDFQDFLGGYDTIDIAGTSKLEVENARLKAELASAIAILCGAGYGYESIDEGQIDAVLKKAREKTAEALAAKDEFAYQLQSLLTAKQEKCLAYEKRIQDLEERLTNQYMQGHMVSGSKGMSDSLLSAFKSNECNLDLSEGRQPQIRDESSVAMDEVSSTSEQPSKQTEGGDENMTDISGALNLQLIDSAACTNLDAFMTELPRDNEHKIVNINKEGHMLTQLTMADTSDVPIEDPLSNLNSRTDDHHALELRDKELLVSELQNTLDQKSKQLGETEIKLSAMMDEVNSLKKELEQTRGLLDESQMNCAHLENCLHEAREEARTNKCSADRRAVEYDALRSSALRIHGLFERLNNCITAPGVTGFAESLHSLAASLASSVKKDEADTTVQFQQCIKILADKVYLLTRQSAELLERYSAMQAVHGGITKELDEKKELIKNLYNKLQQEKQASKEKISFGRFEVHELAVFFRNPAGHYEAINRNCSNYYLSEESVALFTEQHSQHPVYIIGQIVHIERRVARPDQMGGAPRPDSSGGHRSPASMLNPYNLPGGCEYFVVTVAMLPDAAS

SEQ ID NO: 45559 - protein, 356 aa, Zea mays
  Coding DNA Sequence Number=SeqID_3780
  Gene Ontology: Mol. function=single-stranded DNA binding; Cellular component=nucleus; Biological process=response to DNA damage stimulus
  Homolog annotation: Hit_ID=Q6ETL3; Match level="QueryCoverage=92%, HitCoverage=94%, E-value=1e-128, Identity=68%"; Hit description =Putative RAD23 protein
  Pfam annotation: Domain name=UBA; Domain location=132-174; Score =44.3; E_value=4.1e-10; Accession=PF00627.21; Description=UBATS-N domain
  Pfam annotation: Domain name=UBA; Domain location=312-351; Score =47.0; E_value=6.2e-11; Accession=PF00627.21; Description=UBATS-N domain
  Pfam annotation: Domain name=XPC-binding; Domain location=231-289; Score=111.4; E_value=2.7e-30; Accession=PF09280.1; Description=XPC -binding domain
  Pfam annotation: Domain name=ubiquitin; Domain location=12-81; Score =27.4; E_value=5.2e-05; Accession=PF00240.13; Description=Ubiquitin family
  Pfam module annotation: Pfam domain module=UBA::UBA::XPC -binding::ubiquitin; Domain location=132-174::312-351::231-289::12-81
MGIKTPEQGHLSSAEQGTLWFLIYQIMAVKKNIEEIQGKDSYPWGQQLLIFNGKVLKDESTLEENKVNEDGFLVVMLSKGKTSGSTGTSSSQHSNTPATRQAPPLEAPQQAPQPPAPNTHDNAASNLLSGRNVDTIINQLMEMGGGSWDKDKVQRALRAAYNNPERAVEYLYSGIPVTAEIAVPIGGQGANTTDRAPTGEAGLSGIPNTAPLDLFPQGASNAGGGAGGGPLDFLRNNPQFQAVREMVHTNPQILQPMLVELSKQNPQILRLIEENHDEFLQLLNEPFEGGEGDFLDQPEEDEMPHAISVTPEEQEAIGRLESMGFDRARVIEAFLACDRNEELAANYLLEHAGEED

SEQ ID NO: 45560 - protein, 237 aa, Zea mays
  Coding DNA Sequence Number=SeqID_3781
  Gene Ontology: Mol. function=receptor activity; Cellular component =integral to membrane; Biological process=response to sucrose stimulus
  Homolog annotation: Hit_ID=Q6ETK9; Match level="QueryCoverage=91%, HitCoverage=99%, E-value=1e-85, Identity=70%"; Hit description =Putative adiponectin receptor 1
  Pfam annotation: Domain name=HlyIII; Domain location=3-216; Score =166.5; E_value=6.8e-47; Accession=PF03006.10; Description=Haemolysin- III related
  Subcellular localization annotation: CTP_CleavageSite=47; ConfidenceScore=5.06e-01
MSPARQGKRHGHGLICSQAGVPSHDGRASQSGVPRWPRTVFLVGAMSCLAISATAHLLACHSRRASVVFWQLDYAGISVMIVASFVPPVYYAFLCHPPARAAYLSAIAALGALVVAALLSPSCSSPRYRRLRAALFLAMGLSGVVPALHALWLNWGHAACYLALGLEVAMGLAYATGAWFYVSRVPEKWRPGVFDVVGHSHQIFHVLVLVGAVTHYVAVAVLIHWREKVAAACGAAS

SEQ ID NO: 45561 - protein, 227 aa, Zea mays
  Coding DNA Sequence Number=SeqID_3782
MDKTEERQIHRSSTPESIAEGGSAREWGYKILLPTTCRGWGIQEARRATADASTSTELGARRRSTGTTGRGGEHREGTEKRPGDGTEASSRAPRGKGTDGRRGEHHEGTDGAMRRLGEAARAERTAERTRRVQRLGAGGCAVRVSLREVGNTSRAYRAGRFKRAVPGRHGVPWSRPKPGTGVVPGSGTPNRVGPRAGPTNPAHLAISRWEGRPIGAPPHTKSNKNIG

SEQ ID NO: 45562 - protein, 927 aa, Zea mays
  Coding DNA Sequence Number=SeqID_3783
  Gene Ontology: Mol. function=protein kinase activity; Cellular component=integral to membrane; Biological process=protein amino acid phosphorylation
  Homolog annotation: Hit_ID=Q6YXY8; Match level="QueryCoverage=73%, HitCoverage=94%, E-value=1e-139, Identity=46%"; Hit description =Putative leucine-rich repeat transmembrane protein kinase 2
  Pfam annotation: Domain name=LRRNT_2; Domain location=240-281; Score =16.9; E_value=0.015; Accession=PF08263.3; Description=Leucine rich repeat N-terminal domain
  Pfam annotation: Domain name=LRR_1; Domain location=318-337; Score =8.9; E_value=6.2; Accession=PF00560.23; Description=Leucine Rich Repeat
  Pfam annotation: Domain name=LRR_1; Domain location=340-362; Score =8.0; E_value=8.9; Accession=PF00560.23; Description=Leucine Rich Repeat
  Pfam annotation: Domain name=LRR_1; Domain location=364-385; Score =14.3; E_value=0.46; Accession=PF00560.23; Description=Leucine Rich Repeat
  Pfam annotation: Domain name=Pkinase; Domain location=639-882; Score=- 82.0; E_value=0.0011; Accession=PF00069.15; Description=Protein kinase domain
  Pfam annotation: Domain name=Pkinase_Tyr; Domain location=639-906; Score=-71.3; E_value=4.3e-08; Accession=PF07714.7; Description =Protein tyrosine kinase
  Pfam annotation: Domain name=hATC; Domain location=186-254; Score =50.3; E_value=6.5e-12; Accession=PF05699.5; Description=hAT family dimerisation domain
  Pfam module annotation: Pfam domain module=LRRNT_2::LRR_1::LRR_1::LRR_ 1::Pkinase::Pkinase_Tyr::hATC; Domain location=240-281::318-337::340 -362::364-385::639-882::639-906::186-254
VEVVAVRDQVPAMEHRYDPTSINHDLVLMGQTLDNVDDVHDGLDDLFGSTAPTPNPNPNPTINLGDDNVAAEGDALPDATASTTASTGRKRKCTSDVWEDMDKIFATENGVQRTSNANPGEGKSKYAWDLVFGADGIGSSSSMALGAGLGAFGASSSSGMVPELSRRTSASALLHAASTPGISGSELAAYLDSDTVQKFDDEFNLLDWWHDHKLTYPVLSILAKDIISVPVSIVSSESTFSLAVDAINGLYAALGSPDLAGGWTGSGGDPCREAWQGVQCDGPNFTDVPAMRVHLPNRDLRGAGLRGELSQTLGDLTAVTELDLSGNRIGGALPRSLPPALARLDVSSNSLGGELPDSMAKLSSLSTLHLQNNQLTGTLDVLQDLPLTDLQAALSSQVPVSLSDEPRFTFNHLFESSRAVDRKAVVHFIACLTDTKTWLLVLAEETATTSPSQLRRLLQAVWQAPPAAPGEPPVLSGSHPPIYVIPAATQDDAPPSGHRGRVSPATAAGFSVLAAGSLGAAVVAVLLFTASRRRRERERALRVGCLRGAEMCAPSAVREARLRAAAKLEKDTGRHYSEEKIERTPRDCVEAAGSSLKHSSNGGIVVGGSEAQQEQPLQLRSASFTLFTVASLQQHTGGFSRQDLVRETCFGKIYAADRPTGSKLSVLKLDSDAARTPVPEFLEAVRGVAGLRHPNVEQLVGCCVEHGQRLLVYRHFSDRALDGVLRLEHGASTSGPDENETLRWDARVAVALEAAKALEYVVHRHFRPEHVLVDGELRVSVSGCGLAPLVAERSDCCGVATSYEPPEAGGGAAWTPKGDVYSFGVVMLQLLTGRRPYDGARARGERRLVPWASARLYDLAALRKMADPRLGAPPPGQVAVTLRRRHQPVHTEAEFRPAMSQVAQDLRRTLENARAVTGTGSGGSAQV

SEQ ID NO: 45563 - protein, 274 aa, Zea mays
  Coding DNA Sequence Number=SeqID_3784
MKAYKMKTDLKMIRTPKLLPDWQLRLITEMKPSHGLLVLAVVLLVVLGCWKLAAAELLSSGNESLSGLVPHSGNIHDLLLALGLSSCSSWWLGQEGEVPSCSTADIGFLPVGCPSGTTAVAEGTASRITVDADADAGALEGREGMIHQMVVKGVNQTSQKPVLPLGISVDILEVSMGAASETSARLSLEVLVATAAKVPHPEVPTALAGHAFHLGACCQTSIESIHTSDLALQTFNLLLLRELHDVARTATVVVISVWVSSSIGDALWWCRGHL

SEQ ID NO: 45564 - protein, 88 aa, Zea mays
  Coding DNA Sequence Number=SeqID_3785
  Subcellular localization annotation: CTP_CleavageSite=75; ConfidenceScore=5.01e-01
MGDKPSKSLLRALWCVSEPFPVGGSRSANLAIFPRHLRKVSTDGTAPQRQPIKWIFSGSSLAKGTGVQQKEFRPVSALKSANPEILEL

SEQ ID NO: 45565 - protein, 93 aa, Zea mays
  Coding DNA Sequence Number=SeqID_3786
MPVISLKLGIGEVRHGIEVVEWCDLVCLVSMEGQKTSTDDYYSPAESHSFPLKGPKDMSKKLFQIKDLPILRSTRILLLLIDTDEKEFRKAIL

SEQ ID NO: 45566 - protein, 412 aa, Zea mays
  Coding DNA Sequence Number=SeqID_3787
  Gene Ontology: Mol. function=cytochrome-c oxidase activity; Cellular component=integral to membrane; Biological process=electron transport
  Homolog annotation: Hit_ID=P92514; Match level="QueryCoverage=63%, HitCoverage=99%, E-value=1e-132, Identity=87%"; Hit description =Cytochrome c oxidase subunit 3
  Pfam annotation: Domain name=COX3; Domain location=22-279; Score =630.7; E_value=1.2e-186; Accession=PF00510.9; Description=Cytochrome c oxidase subunit III
MGVKGGLHTTGAKWFMIESQRHSYHLVDPSPWPISGSLGALATTVGGVMYMHSFQGGATLLSLGLIFLLYTMFVWWRDVLRESTLEGHHTKAVQLGPRYGSILFIVSEVMFLFAFFWASSHSSLAPTVEIGGIWPPKGIGVLDPWEIPLLNTPILPSSGAAVTWAHHAILAGKEKRAVYALVATVLLALVSTGFQGMEYYQAPSTISDSIYGSTFFLATGFHGFHVIIGTLFLIVCGIRQYLGHLTKKHHVGFEAAAWYWHFVDVVRLFPFVSIYWWGVWQTHRLFVAGHTAPVHRATLNCVVPKKLGLFSYEQAYQPLRIGSFQREVQLWDVAPPSDENRSRGDGLDKSQLASGCSIKKNKLGFSDDSSFFKSEQNVWIASCFLSLERMGYDTYKSICSGIHPIMEYSGQQ

SEQ ID NO: 45567 - protein, 149 aa, Zea mays
  Coding DNA Sequence Number=SeqID_3788
MFFWDYVGDLEGLWEYAWGQSVGDNLLNSVYAMGKCVQDFMADEKIHKPTLLGPHFALLVWLYEHTQVRKTVFSGKTGFRGQKERYMKKSQLKVVELPSLSGYEPIPSLEARREGISNSQSQTDKREPVSKVEAERKLYESLFPGKVYL

SEQ ID NO: 45568 - protein, 89 aa, Zea mays
  Coding DNA Sequence Number=SeqID_3789
MRDFAVLFDIFYTPDGVYMINGVSASVLGTEGHRFESCHLDVYLERTRSPEELLKLTNKIYEGKQSVLSELRRLAGPFHGQINPVPGYG

SEQ ID NO: 45569 - protein, 140 aa, Zea mays
  Coding DNA Sequence Number=SeqID_3790
  Subcellular localization annotation: CTP_CleavageSite=31; ConfidenceScore=5.31e-01
MQTTMTTATTAASGTGSALPVDSELGFPLPSADAATVAASARAAGLVPSGLGLPGYPTCTGARTGLLSPTRLLRKPPPGFSTTCSLVVDATWDSPMPSTNSVLASAIATIQAALAASQERELAAFHALEQEHALGATLTA

SEQ ID NO: 45570 - protein, 127 aa, Zea mays
  Coding DNA Sequence Number=SeqID_3791
MALFSQVCSVWEHRTVRWCTRQCPVRHAGSSELAALGNSLATYGYNSPDCPHDMKIAIDRKAHHLLFAEARKDVVDFFSLLVLLVGATVKLLGNKGMAGSTDNLYDSVEGLEYAHIQTIVVHRGRWT

SEQ ID NO: 45571 - protein, 526 aa, Zea mays
  Coding DNA Sequence Number=SeqID_3792
  Homolog annotation: Hit_ID=Q3LHL2; Match level="QueryCoverage=96%, HitCoverage=93%, E-value=4e-99, Identity=42%"; Hit description =Hypothetical protein PPS5
  Pfam annotation: Domain name=DUF292; Domain location=25-146; Score =245.6; E_value=1e-70; Accession=PF03398.5; Description=Eukaryotic protein of unknown function, DUF292
MDAFFGKGGGGGGFRGAKCKTLLKLSIPRIKLLRNRRELQLRQMRRDIAKLLEAGQEATARIRVEHIIREENMMAAQEILELFCELIAVRLPIIETQRECPIDLKEAISSICFAAPRCADLPELIQVQMMFATKYGKEFVAAASELMPDCGVNRQVVLDVCNTSELMLLQIIELLSIRPPPVHAKLKLLKEIAEEHEVDWDPSETEIEFLKPHEDLLNGPTYFNGSTLPLPKEKHEETVAASAAERPDKDCESDTGLDSLDFPEVPKAAIRPPSNTPLTPDIGPHAPGSQPLPREFSDRTNLEENPTAGGAFNVIQMKSLEHLISAPSAQPNTPDLPDEKKQFIPFASPPPVVATPLEKTETVPSPSMSPPVKPTEPKISTKRVDELATPPVPPTDYTFTKQPEQVRPISSESEASIDLDDVLSAAQTAAESAERAASAARAAANLVQLRIADLKKNSRVYNKYTDSAQKESPHQAEGTQKPVFDHQDSFTNETQDYVPSHVPQRSPSLEDDPYFSYPNLFSAPKP

SEQ ID NO: 45572 - protein, 200 aa, Zea mays
  Coding DNA Sequence Number=SeqID_3793
  Gene Ontology: Mol. function=protein serine/threonine kinase activity; Cellular component=integral to membrane; Biological process=protein amino acid phosphorylation
  Homolog annotation: Hit_ID=Q6S7F1; Match level="QueryCoverage=92%, HitCoverage=28%, E-value=1e-56, Identity=64%"; Hit description =Benzothiadiazole-induced somatic embryogenesis receptor kinase 1
  Pfam annotation: Domain name=LRR_1; Domain location=29-51; Score =16.4; E_value=0.1; Accession=PF00560.23; Description=Leucine Rich Repeat
  Pfam annotation: Domain name=LRR_1; Domain location=83-106; Score =14.8; E_value=0.31; Accession=PF00560.23; Description=Leucine Rich Repeat
  Pfam module annotation: Pfam domain module=LRR_1::LRR_1; Domain location=29-51::83-106
MSKDCMLFWELYSNNISGIIPSGFGNLTNLVSLDLYLNNFTGPIPDSLGKLLKLRFFYFVNKRRLNNNSLSGSIPKSLTAITALQVLDLSNNNLSGEVPSTGSFSLFTPISFANNPNLCGPGTTKPCPGAPPFSPPPYNPTPPVQSPGSSSSSTGAIAGGVAAGTALLFAVPAISFAYWQRRKPQEHFFEVPGRYSTAGE

SEQ ID NO: 45573 - protein, 111 aa, Zea mays
  Coding DNA Sequence Number=SeqID_3794
MARGRQGSGADWPPRTMEKKDGPRVSRWVRDRAHRGFGHGSMPVGAESPGLRPGALARKCPGQGVGRSHAAGWPRGAWALRGGVSHGQSPRPCSTRVQGGWLAGAWPKDAQ

SEQ ID NO: 45574 - protein, 136 aa, Zea mays
  Coding DNA Sequence Number=SeqID_3795
MVILKVGHHLYDVHHLFGTKQQRSLVPTRDEQYIGIGSARWTTRRSVTGCGVAWWCSLRRCGLSVALSQTVRDLAAGVGLLYVLPRQSTLWARRSTMAQGRLLVGPRSHPWGRDLRVLWVIWSPEVSLDDVESPRN

SEQ ID NO: 45575 - protein, 75 aa, Zea mays
  Coding DNA Sequence Number=SeqID_3796
  Subcellular localization annotation: CTP_CleavageSite=58; ConfidenceScore=5.31e-01
MTAPRAAITHIPPTAPASYQAQHKKGSPPASPRHRQGTIYLAYCSCVPDFFVASVSIRGLTVTTLARPSSRSLPL

SEQ ID NO: 45576 - protein, 208 aa, Zea mays
  Coding DNA Sequence Number=SeqID_3797
MVHDGGELILYSTPSRRMEEGRKGARLKALWPVKDGLTGDGVDGNVAEVVSVWSNYHMDGWAHTLGETSTHVHDKTAPTITYQMQPDQFLLVQPYNHISATGPINANMQPSHKHEGMSPQAAGRAQHKELCRALGYKGQGSHSPNDDSRAHAACTVCNKEYVTTRRSQACVTLPHGRTSGFTFTRWLLPKEATAGRRKRLAPKTRGGL

SEQ ID NO: 45577 - protein, 116 aa, Zea mays
  Coding DNA Sequence Number=SeqID_3798
  Homolog annotation: Hit_ID=Q6QP51; Match level="QueryCoverage=57%, HitCoverage=30%, E-value=3e-19, Identity=78%"; Hit description =Putative growth-regulating factor 1
MTIGEGLQPGCMMKILEAERCLKNANPHEVALLQQQQEEGNTGPRKGIFRKRSFSAKEMGSEPITDQGFEGWPLERVRQPPQSTRAPSPLLIRGSKAGPSEGFDSRPRALGLRALY

SEQ ID NO: 45578 - protein, 172 aa, Zea mays
  Coding DNA Sequence Number=SeqID_3799
MDHLKMLKLPVSVPHASDYSAVNIFVLVDPSLHVFLHASVVSRHGRGAPLYVWLQGVKLASEHMTVCGRAAAQAKPANLGRCNLSFIVDFVSLLFVYATYTEHVYPATPLRGLCSLLVDIREARESFTSLLDEWQNEQQSLSQMVILDYCCLQKFKYHILGINNLEYLLNNI

SEQ ID NO: 45579 - protein, 409 aa, Zea mays
  Coding DNA Sequence Number=SeqID_3800
  Gene Ontology: Mol. function=hydrolase activity; Cellular component =cellulose and pectin-containing cell wall; Biological process =electron transport
  Homolog annotation: Hit_ID=Q94DD0; Match level="QueryCoverage=71%, HitCoverage=85%, E-value=1e-95, Identity=54%"; Hit description =Putative hydrolase
  Pfam annotation: Domain name=Abhydrolase_1; Domain location=93-335; Score=12.1; E_value=0.0009; Accession=PF00561.10; Description =alphabeta hydrolase fold
MAPKLVFVLPVVLLALALQAILRPPPPKLCGSPGGPPLTSPRIKLRDGRYLAYKEDGVQRDKARYKIITVHAFDSTKDFPSPVSKELVEGLGIYLLAYDRAGYGESDPNPNRHVKSEALDIEELADQLGLGHKFYVLGASMGGYSVWGCLQLAGAALVVPIINYWWPSFPAELSKQAFNRLIVPEQRTLWIAHNIPSLLYLWMTQRWFPSSAAAMHHPEIFSKHDMEVLQKMMAMPRTIENKSRQQGIYESIHRDLLVAFGTWEFDPMNVTNPFPQNEGSVHIWQGREDRLVLVELQRYIAKKLPWIKYHEVPEGGHMFVMLISRGPRRHVAVRALRSTDDQFGRGRRLQKALERWNLGKSASAPVKVRRYLSIRIQLRDELCNADHWLMKTPEIYESPSVATSRASYE

SEQ ID NO: 45580 - protein, 210 aa, Zea mays
  Coding DNA Sequence Number=SeqID_3801
  Gene Ontology: Mol. function=sequence-specific DNA binding; Cellular component=nucleus; Biological process=regulation of transcription, DNA-dependent
  Homolog annotation: Hit_ID=Q60D94; Match level="QueryCoverage=54%, HitCoverage=21%, E-value=5e-28, Identity=54%"; Hit description =Unknow protein
MTERQIWCLAGASALHDLVLKLDHFGSFLEVSVEVVAGNGIEQATQGMRSSKFCVNIAELVREVKSADDNQGVLRQENFSHTVIEGYDNQGVLRQENFSHTAIEGSSGGPSAVACGVSTGQQHNRMNPDPASTGMDNFKTPKLTKENGLQEDGIGESSMYDERQPKRRKRTLMNNEQIDELEKALVDEPEMHNNPVLLQSWSEKLSLQNT

SEQ ID NO: 45581 - protein, 136 aa, Zea mays
  Coding DNA Sequence Number=SeqID_3802
MTEDEVILNTTVNLTLPLASSALLDRGQSTPSARDPNAPPGARWRDDITKGNPLPSSDAPVDPQATPSNKQERHHHHLEIWSKQAAGGRLATSVDMKARKCVWHNPLTLDTSSGQTYRSPSTSATTRAWSRTLRPT

SEQ ID NO: 45582 - protein, 168 aa, Zea mays
  Coding DNA Sequence Number=SeqID_3803
  Gene Ontology: Mol. function=calcium ion binding
  Homolog annotation: Hit_ID=Q94LH2; Match level="QueryCoverage=45%, HitCoverage=50%, E-value=2e-10, Identity=43%"; Hit description =Putative calmodulin-like protein
  Pfam annotation: Domain name=efhand; Domain location=19-47; Score =35.1; E_value=2.5e-07; Accession=PF00036.22; Description=EF hand
  Pfam annotation: Domain name=efhand; Domain location=55-83; Score =14.5; E_value=0.33; Accession=PF00036.22; Description=EF hand
  Pfam module annotation: Pfam domain module=efhand::efhand; Domain location=19-47::55-83
MAFMRYYRALPQGETTVEEFRAWLSQFDADGDGRISREELERALRSLNLWFVWWKAREAVRAADANRNGAVDGDEMGRLYAFAHKHLHLKMSQLGLGYTSNIYFYESGHCKVLTNGRVDILCCSSWENNLVTNGPLMHSLADRVENALKLYAKVSVRIFQVAIIQRFS

SEQ ID NO: 45583 - protein, 327 aa, Zea mays
  Coding DNA Sequence Number=SeqID_3804
  Homolog annotation: Hit_ID=Q6Z6F9; Match level="QueryCoverage=57%, HitCoverage=100%, E-value=4e-70, Identity=66%"; Hit description =Putative PGPS/D12
  Pfam annotation: Domain name=PLAC8; Domain location=49-148; Score =149.4; E_value=9.2e-42; Accession=PF04749.7; Description=PLAC8 family
MYPSAPPDAYNKFSAGAPPTAPPPPAAYQQQQHGANMDTSRPGGGLRKWSTGLFHCMDDPGNCLITCLCPCVTFGQVADIVDKGTCPCIASGLVYGLICASTGMGCLYSCLYRSKLRAEYDLDEGECPDILVHCCCEHLALCQEYRELKNRGFDLGIGWEANMDRQRRGVAGGGAVMGAPPAIPLGMIRTLGVNSTVLDGFVIGLDDLYKSGLDHLISICNNTPAPEEAMRCDGGLECIGSDRLEVSTYLTEAPGFVVWPANGDHREGFRDWSGRQAVIIPKGRDFIPGDQTTRTSGVITTIPEESTAAGVNLSDDATGGMSNADMT

SEQ ID NO: 45584 - protein, 595 aa, Zea mays
  Coding DNA Sequence Number=SeqID_3805
  Gene Ontology: Mol. function=transferase activity, transferring glycosyl groups; Cellular component=membrane; Biological process =cell wall biogenesis
  Homolog annotation: Hit_ID=Q6Z6F7; Match level="QueryCoverage=80%, HitCoverage=82%, E-value=0.0, Identity=83%"; Hit description =Putative xyloglucan fucosyltransferase
  Pfam annotation: Domain name=XG_FTase; Domain location=82-567; Score =657.0; E_value=1.5e-194; Accession=PF03254.4; Description=Xyloglucan fucosyltransferase
MDVKRSRSPRAPPDDDRKRAGGGGGWRGSGGVRPEMVLVGFLLTLPLLFLVFGGRWGSGSFPSSSSSSATSSPPVVPKPTARRVDGGGGDRGATPRQGQKPVGLNNVSVSTATSVSQDKLLGGLLSAAFDESSCQSRYKSNLYRKPSPFPLSPYLVQKLRKYEARHKKCGPRTKRYRRAVKLLKAGRNTDDSECKYVVWFPCNGLGNRMLTIASTFLYALLTDRVLLVHVPAEQEGLFCEPFPVSSWVLPGSFPQNNPHKLHIGAPESYANMLKNNIVRNDDGPGAPASSSLPPYVYLHLEQFQLKLSDNVFCDEDQVTLSKFNWMLLKSDSYFAPALFLTPMFEAELAKMFPRREAVFHHLGRYLFHPTNRVWGIVRRYYEAYLARVDEKIGFQIRIFPEKPIKFENMYEQLMRCVREQRLLPELGPAEPPTNATADAGDGKVKAVLIASLYSGYYEKIRGMYYESPTKSGEIVAVFQPSHEEQQQYTSNDHNQKALAEIYLLSYCDKITMSAWSTFGYVAYSFAGVKPWILIRPDWNRETSDVACVRSTSVEPCLHSPPILGCRAKTDVDVAAVKPYVRHCEDVGFGLKLFDS

SEQ ID NO: 45585 - protein, 251 aa, Zea mays
  Coding DNA Sequence Number=SeqID_3806
  Homolog annotation: Hit_ID=Q53NY5; Match level="QueryCoverage=42%, HitCoverage=41%, E-value=1e-10, Identity=42%"; Hit description =Expressed protein
  Pfam annotation: Domain name=DUF1685; Domain location=31-149; Score =128.4; E_value=1.9e-35; Accession=PF07939.2; Description=Protein of unknown function (DUF1685)
MDKAWQRNLHLIGGGGGGGEKKACPAAAPALGLQKHKSWSPDIERDEVWERRRRDMRRGGTALRRARSVTDDDLAELRGCIDLGFGFEPAESVCAACGCAVRNRLLDTLPALDLYYAVHGGGGACEAEGPKCSCGAASEASSDESPLGSPMSILSPGDPPETVKMRLKQWAQSNLGPALMDWRRSDGSSAVRTRGVRRLSASDVCAVPGCSAAGSRRLEDRDRFHEHRQMPSVPSMVLPCATRGPLDGQPF

SEQ ID NO: 45586 - protein, 77 aa, Zea mays
  Coding DNA Sequence Number=SeqID_3807
MAPCLGLGGSSGHTFGAQAIRRDRPLSFDARARAGDVSCAAVHIHRHVPDSGARGRLLDNANLPRPGARLGHEPWRR

SEQ ID NO: 45587 - protein, 481 aa, Zea mays
  Coding DNA Sequence Number=SeqID_3808
  Homolog annotation: Hit_ID=Q8RVV8; Match level="QueryCoverage=14%, HitCoverage=31%, E-value=5e-26, Identity=77%"; Hit description=DCL protein
  Subcellular localization annotation: CTP_CleavageSite=41; ConfidenceScore=5.16e-01
MAAPAVARPRLAPVAHPASTSCLLALWDRRRGHGRAVAAVRAREQGAAPPDPAAFLRRPEVATVTSTEEEREADAGSSFDGPGEDEAPEEEGVRGRRKAPEREWVDWEDLILEDTVPLVGFVRMILHSGKYESGDRLCPEHEKAILERLLPYHPQYNEKIGCGIDYITTPHYPVPVPGAPLFPSAATASTQIRRHDGSPDPVCRRPWDAQTCYPGRRQGCDVKPLQSSPYSRCSPPIVALETDLLAVPGPPCCHPLPPPGLVAETRPRAGKVGVVQEAAARPAVWHMTMDVHGRTGHVARPCTRIKGQRPVAAYGLGSKRVAAGAPQAKARCHLGRCCLLGKPWLNVMQQELSERSQCTARLAPDPVPCAGVSPTSDTDTDPLGGSWGALHCRCIYHGFMYVASVSPHACRLRLAKLSGSSWLCFSNKQAAAETGAALFRPCLPPGNGFGGLRVHLDRCERVSMYSPENRASIALERQMHI

SEQ ID NO: 45588 - protein, 218 aa, Zea mays
  Coding DNA Sequence Number=SeqID_3809
  Subcellular localization annotation: CTP_CleavageSite=50; ConfidenceScore=5.19e-01
MACINMYNPDGAAGFGGGPQQPAALGPRISFSSDFAVEPTPVQNRATSLRCQEEDLNFEFSVGSHPMMAADQLFSKGRILPLKDNGGGSVCFAAARPPTTLRDELRGGGDDDDERAAFSAAGTKGSNSNRWKEMLGLRKALCVGVGGGGNGSPAKKASSSDKQGVVAAAAPGPDDHMAASNQVGISCPARICMRPHDLVDTLPHQTFVFLTTQQEQLS

SEQ ID NO: 45589 - protein, 92 aa, Zea mays
  Coding DNA Sequence Number=SeqID_3810
MRKRKNERSEYFPYRDGLGSGQKNRETMGRKAAEMVIRLGKSESEIGAGRDCLGPPVVVVLTFFPRHAIEASTAVCLSWDTVTVAWMDHAAQ

SEQ ID NO: 45590 - protein, 358 aa, Zea mays
  Coding DNA Sequence Number=SeqID_3811
  Gene Ontology: Mol. function=cyclin-dependent protein kinase inhibitor activity; Cellular component=nucleus; Biological process =cell cycle arrest
  Homolog annotation: Hit_ID=Q52PU8; Match level="QueryCoverage=65%, HitCoverage=89%, E-value=3e-31, Identity=46%"; Hit description =Cyclin-dependent kinase inhibitor 2
  Pfam annotation: Domain name=CDI; Domain location=306-357; Score =54.1; E_value=4.8e-13; Accession=PF02234.9; Description=Cyclin -dependent kinase inhibitor
  Subcellular localization annotation: CTP_CleavageSite=46; ConfidenceScore=5.06e-01
GLSGKNNYACRVPGVEASPATFRLWAAPALHAVPTPVCQAPRPSVPAANPKRKRLQPAGSAAQAWEWPSGSGSEKEEPAKRSKREEGSAAAAFRKMGKYMRKRRGAAGEGVAAVEVSQVVGVRTRSRSAAATGGGVAKVAPPRRKKALLPAANVTTSGEPGAVGAGGGDGGSCCYIHLRSRMLFMAAPQQQPSAALTPVEAAGAAQQGGVVALAAGLSRCSSTASSVDVGGHACRSDAAPAEVDGDHVPDVVTASNSGSVPDRERRETTPSSSRAHGGELSDLESDLVGRQKTGCSSSPATTTSAAELIVPPAQEIQEFFAAAEAAHAKRFASKYNFDFVRGVPLDAGRFEWTPGVSI

SEQ ID NO: 45591 - protein, 62 aa, Zea mays
  Coding DNA Sequence Number=SeqID_3812
MEDCNEDQPQKISHSVHERMTKNRELVEVKRDEQHKEILARRERELDLKEQEIGVQDHGCVH

SEQ ID NO: 45592 - protein, 573 aa, Zea mays
  Coding DNA Sequence Number=SeqID_3813
  Gene Ontology: Mol. function=transferase activity, transferring glycosyl groups; Cellular component=membrane; Biological process =cell wall biogenesis
  Homolog annotation: Hit_ID=Q6Z7Q3; Match level="QueryCoverage=77%, HitCoverage=78%, E-value=1e-175, Identity=65%"; Hit description =Putative xyloglucan fucosyltransferase
  Pfam annotation: Domain name=XG_FTase; Domain location=67-540; Score =605.3; E_value=5.4e-179; Accession=PF03254.4; Description=Xyloglucan fucosyltransferase
MQQRKAKVVWGGAESAAAQEIPASSQLAMAHNSSWPEGEGAPEHSPVPRKKRLSLDEKRWNTVVNVMLVAFVMAVPPVVVVFAGGGIAPAVWIAAAKAQLRRGSGDGPPDRLLGGLLADGLDERTCRSRYESSLYSRRPARRPSPHLIAKLRRHEELQRRCGPNTDAYSRAVQQLRAGKSVGSPECKYVVSISYRGLGNRILAAASAFLYAVLTDRVLLVDPSNDMGELFCEPFPGTTWLLPREFPLASYTNFSIDTAESYGNMLKNRVLRADVPPPPTETQLPAFVYLHLDHDYGDEDKMFFCDDDQRLLSSVQWLVMRTDMYTVPGLFLVAAFQEELDVLFPERDAVFPPPGAVPVPSDQPRLGPRHAVRNFDPWAQQSPVVLRQITSCLWREKLLPEVLDTEEHAVPAPGGARTTAVLVTSLRSWYYERIKGLYWDQATATGEDVSVHQPSHEGQQQYGKKSHDDRAWAEMYLLSLCDVLVTSGWSTFGYVAQGLGGMTPWVLHKPTNATSPPDPPCFRDVSMEPCFHAPHVYDCKLKRGADTGKMLPHVRNCEDVSWGLKLVDTKLYRS

SEQ ID NO: 45593 - protein, 46 aa, Zea mays
  Coding DNA Sequence Number=SeqID_3814
MGKCYSGLRVSVTSNLPLWFEAAKDIENADEEKLEEIQEWEVGNAS

SEQ ID NO: 45594 - protein, 149 aa, Zea mays
  Coding DNA Sequence Number=SeqID_3815
  Subcellular localization annotation: CTP_CleavageSite=32; ConfidenceScore=5.07e-01
MTNRTPRSYTPRPNGGVGAIPPSAMRDLLLPSAALIGFRRRERLIGNGVTGALRPFLQSGCYTTRALEEEHEIADLRSKISRLRGDTSSLCVECDGARDDVDHLQDEGSQLGEALRGVKSHAELTKSSSQVEARLVQVDSEHVRERNAT

SEQ ID NO: 45595 - protein, 111 aa, Zea mays
  Coding DNA Sequence Number=SeqID_3816
MARVACTLRGKRLDDGVSMLSVGFALKPGVTVSYNSSDRPHEAPDSLEIPMHPWTEGNLGLPTGAPTTPRSLRAIKGTPRRMALYTKHPLNITETLRPHFCFDRLRFKHVF

SEQ ID NO: 45596 - protein, 134 aa, Zea mays
  Coding DNA Sequence Number=SeqID_3817
MGMDQQVWGEDLATAGQKESERMESIFIRVFLGIGYLHTGLAFTMTSQGKNAHLCRVSVEMMLKEIAPEELEKETYVAASVADEAICLRLPDMSKIMKLAIVSENTIEWSCQFNMKPIENPSMKTENESKVQHS

SEQ ID NO: 45597 - protein, 122 aa, Zea mays
  Coding DNA Sequence Number=SeqID_3818
MALRRQHEVTGEAGESSMVTGSVVAVVASNLGGISARPGSHSRSAAVMAWEWVCDLEERHTRRGGDVSQFYSDLQAQPEVDATGVAFPGKKDLMEVTHKVYFDIEVDGSKPTVICIKEKCTA

SEQ ID NO: 45598 - protein, 127 aa, Zea mays
  Coding DNA Sequence Number=SeqID_3819
MAGATGGGGEFSMLYDEEASSYYDSSISGLGDFPPRLCHAPMVIAALVAHNHLPSFDDMEFVGMADGGGELIFDTLYIDSDLGLSPPERSKEELPSGKEYKDHPSSTVPPAAHPKCGAIHGGSRRDR

SEQ ID NO: 45599 - protein, 66 aa, Zea mays
  Coding DNA Sequence Number=SeqID_3820
MVLKRLRRRHYTETPFSCKSTAQSRFNHLNPKVWYLAEVRPSASSCGEAHAQRHLVVDSALVLRIT

SEQ ID NO: 45600 - protein, 135 aa, Zea mays
  Coding DNA Sequence Number=SeqID_3821
MVHWKDLTMEPETLALKLEHRYAEEYESKKPDALLYLPEAAAEECPGLGQSSNEQREFAFSTSMVPATNPSGSGSMKVKQTQTHNKWLKLSLITLSEIGGRNWWSGRGSGSSGSSGRFFGDKFESWFPSFFLLSL

SEQ ID NO: 45601 - protein, 89 aa, Zea mays
  Coding DNA Sequence Number=SeqID_3822
  Homolog annotation: Hit_ID=Q8SA97; Match level="QueryCoverage=27%, HitCoverage=4%, E-value=3e-07, Identity=96%"; Hit description =Ornithine carbamoyltransferase
MAAVSLTLSSGTTVGAAQAALSSCQTVGVAIWPRLLLGEDWASGEPKLCADGGYQLRIRSLEGTPNYGPRQHYKETTVQQLEVDWETTA

SEQ ID NO: 45602 - protein, 87 aa, Zea mays
  Coding DNA Sequence Number=SeqID_3823
MPTLKPSPGRSSETTSADTTFLKHLIDRVIMTERKHREMEDWKRKIGGPQDESISRSRFSGNSPQQFKQSHSHEHQHQNQRPHQEQF

SEQ ID NO: 45603 - protein, 77 aa, Zea mays
  Coding DNA Sequence Number=SeqID_3824
MRCLIGHASEYIALRCIVLDLFECSFDVVSCASENMSRVYKKNIANKIMTCGSMGSIVMPEVSSHMLARYSTCEEAL

SEQ ID NO: 45604 - protein, 983 aa, Zea mays
  Coding DNA Sequence Number=SeqID_3825
  Gene Ontology: Mol. function=protein tyrosine/serine/threonine phosphatase activity; Cellular component=intracellular; Biological process=protein amino acid dephosphorylation
  Homolog annotation: Hit_ID=Q655C5; Match level="QueryCoverage=91%, HitCoverage=97%, E-value=0.0, Identity=72%"; Hit description =Putative PROPYZAMIDE-HTPERSENSITIVE 1
  Pfam annotation: Domain name=Act-Frag_cataly; Domain location=175 -449; Score=216.4; E_value=6.4e-62; Accession=PF09192.1; Description =Actin-fragmin kinase, catalytic
  Pfam annotation: Domain name=DSPc; Domain location=753-895; Score =101.8; E_value=2.1e-27; Accession=PF00782.11; Description=Dual specificity phosphatase, catalytic domain
  Pfam module annotation: Pfam domain module=Act-Frag_cataly::DSPc; Domain location=175-449::753-895
MEQRDATQPEAAAEERDQERPSIIPPPKLLFAGHWSDLGLVIMVLDTLGVSVRHMPNLATIFLVRQGKLTARLIPVQVEHIMDENEDKDLKLPSRVVSLLFGGDISTSAQTFEKWLSLVRKRSGAFRPSGFPHRGSRIEVMPSGSFSLFGSGDLSEHLIREAPTRKDPLDCDQSPEISLWERLGNSSALDIESSEFSWDVLLSLHHTEHSSSSEQTEDEMNKALEVTVNSGGVVFFALFSSPGNIGVPEAAAVIKFSSSKMATQAERLGYEFARLLGVHTPQARVVYNSSSEWLAIRHAAENARTVAVSNNDEVGEMTCSELLEALELSRCLLLMSYIHGSPLLESSKAFHSREAACVTASSLGRVLMLDLILRNEDRLPCRQLGWRGNPANLMISDKSSLPNLDRLDDFKSSTDSSNQLITHFLHREKRSHSLNGKFGSPGLDPMSPKLEPLINEKENAERTNGDFRIVAIDTGVPRRPPVGRRVKDHERYPKVVELILNSSDYSASILYEISGCKLGHPRPDEVTSSDSCCSLSDEDNAGVIHEFRGSFRAALRDLEGFHLFLLQLYQKLDGVLRVFLSIITKTSEESDNNDAALSDFPSPGASYSTPRLPSKHLNNELHSDSEMLKSAMKSSSVGSRGSSDSVSPLPRESWNNKSFKGSAEAPRSLRMTMKLRDFYKTPKVDPELLKEIEQWNEALKNDVIKFCQENNFHSGFFDGTENNMVADAYELKVRLEHIIERIALISDAANTERPSLVVNNLFIGGALAARSKYTLQHLGITHVLCLCSNEIGQSDSQFPDLFEYKNFSISDDDDANISDLFEEASDFIDHVDHVGGKVLVHCFEGKSRSATVVLAYLMLREGFTLAKAWNLLKKVHRRAQPNDGFAKALLALDKRLHGKVSMDWQHKRPEMKVCPICSKNVGLSTSSLKLHLQKAHKRLSAGSVDSAMTMEIQKSIESLQISRGGSLSPSQKLTKVFSNELSF

SEQ ID NO: 45605 - protein, 126 aa, Zea mays
  Coding DNA Sequence Number=SeqID_3826
  Homolog annotation: Hit_ID=Q6ASU1; Match level="QueryCoverage=82%, HitCoverage=31%, E-value=1e-27, Identity=68%"; Hit description =Expressed protein
MAPLLNDPGGASAVTARLRGFGSGAGNDSLFRWLYDVFRSNVPELQLALLVPSLARAHLCHAMSRKPLAGFEAVLLALYAHAASQRGAEEVETRDHIAPEPGKDFGTSQREPVGKIEQVQSIGEVH

SEQ ID NO: 45606 - protein, 207 aa, Zea mays
  Coding DNA Sequence Number=SeqID_3827
  Subcellular localization annotation: CTP_CleavageSite=32; ConfidenceScore=5.51e-01
MWNTWRRQILSGSPDITSKPSNFRSKPFDTLRQMVRRHTRPSGHLDRVVRICARAGLPLLQPAVQDINSYDKLCDLDVMSCIYLYDIIFIISVFLSHKIHLSNFHQIPFRMSAECHLDDLLFDSKYVCGLEDENIVIVEPQVPVVVLNQLAAEDQGVNNEKRTLPDTCMFQLQVGDCHQGLHPTHTKLQTEIRRQRLKIESVGFQAF

SEQ ID NO: 45607 - protein, 115 aa, Zea mays
  Coding DNA Sequence Number=SeqID_3828
MTDSKDLDDVPPGNDILRPNFESLLADDQQKLEDYKKKLEKEVHKFIYINSKSIVRNTVDYSEQEKLFGNSPVSGPSGSFRRTVRDTKGRTVPTRGADRPRLIEQGQRLGSGWWL

SEQ ID NO: 45608 - protein, 475 aa, Zea mays
  Coding DNA Sequence Number=SeqID_3829
  Gene Ontology: Mol. function=transferase activity; Biological process= paclitaxel biosynthetic process
  Homolog annotation: Hit_ID=Q5JKH0; Match level="QueryCoverage=96%, HitCoverage=96%, E-value=5e-49, Identity=36%"; Hit description =Putative hydroxyanthranilate hydroxycinnamoyltransferase
  Pfam annotation: Domain name=Transferase; Domain location=20-464; Score=183.4; E_value=5.6e-52; Accession=PF02458.6; Description =Transferase family
MEKEAAAELEIPGECQYAGDPVLVRPSQPTPRHTLHLSNLDDQRFLRFSIKYLYVFGADAAVPADALRAALGRVLADYYPLAGRLRPSAEEDGKLVVDCNAEGALFAEGRLPGLAAADFLSGSDRPHKSWRKLHYRVEAQSFVAVPPLVVQVTWLACGGMVLCTAINHCICDGIGTAQFLHAWARAVRGGGGRDALDAGGDDTALPFHDRRALRPRCPPRVAFAHPEYSTRGIINAAVANGNGNGSANEAPSLLARLLGQPLAPVSLTFTAAHLLRLKRQCVPSLKCTSFEALAAHVWRAWVRALDPPGALRVKLLFSVNVRRRLRPELPRGYYGNGFVLGCARSTAAQLTSPSCGSAARYGVRLVQDAKACVDDDYVRSMVDLLEERRGARPDLAASLVISAWTRLGLEDLDFGAGKAAHMGPLTSEIYCVFLPVVGDPHAVTVLVSVPQAAADKFQHFCLGFLKDVEVDAKLT

SEQ ID NO: 45609 - protein, 63 aa, Zea mays
  Coding DNA Sequence Number=SeqID_3830
MSPAEQVCEAEQTTNPLPSKSTTRTGRLGPLAEQVCEAERTTKSLAEGTPYYSMKTRCPRGYL

SEQ ID NO: 45610 - protein, 119 aa, Zea mays
  Coding DNA Sequence Number=SeqID_3831
  Homolog annotation: Hit_ID=Q657Z2; Match level="QueryCoverage=39%, HitCoverage=34%, E-value=7e-07, Identity=57%"; Hit description=IscA -like
  Pfam annotation: Domain name=Fe-S_biosyn; Domain location=19-91; Score=15.2; E_value=6.3e-05; Accession=PF01521.11; Description=Iron -sulphur cluster biosynthesis
  Subcellular localization annotation: CTP_CleavageSite=42; ConfidenceScore=5.02e-01
MSSSVLRAAADRAIRRQALTLTNAAVSRIRQLLSLRQRPYLRLGVKARGCNGLSYTLNYAANRSRRRDGCSLLEDAATENRNGRRIRLDFPKAFFKFLLVHSKVPNQENRSYKVRKIID

SEQ ID NO: 45611 - protein, 110 aa, Zea mays
  Coding DNA Sequence Number=SeqID_3832
  Gene Ontology: Mol. function=iron-sulfur cluster binding; Cellular component=mitochondrion; Biological process=telomere maintenance
  Homolog annotation: Hit_ID=Q657Z2; Match level="QueryCoverage=63%, HitCoverage=51%, E-value=2e-32, Identity=91%"; Hit description=IscA -like
  Pfam annotation: Domain name=Fe-S_biosyn; Domain location=4-88; Score= 4.1; E_value=0.00058; Accession=PF01521.11; Description=Iron-sulphur cluster biosynthesis
MVSKRVTERRVDLRSAVTGVCWPHLAASVFFAQLYAPLISDEKGKFDELVEEKGVKVLIDPKALMHVIGTKMDYVDDPLKSEFVFINPNSKGQCGCGESFMTTGSKGSTS

SEQ ID NO: 45612 - protein, 195 aa, Zea mays
  Coding DNA Sequence Number=SeqID_3833
  Gene Ontology: Mol. function=transcription regulator activity; Cellular component=nucleus; Biological process=regulation of transcription
  Homolog annotation: Hit_ID=UPI0000162EED; Match level="QueryCoverage =61%, HitCoverage=25%, E-value=5e-38, Identity=71%"; Hit description =transcription factor
  Pfam annotation: Domain name=HLH; Domain location=85-123; Score=1.9; E_value=0.09; Accession=PF00010.16; Description=Helix-loop-helix DNA- binding domain
MHVLMDLQCVLAASLVHALSLSDEILAEAKCMQMGASCGGRAQHEAACQSMAAAAARPALPVVPSSKKPRVEQRSSTIVPSFKVRKEKLGDRIAALQQLVSPFGKTDTASVLMEAIGYIKFLQDQVETLSRPYLKSSRSKKPRPTPRGSSNASAGELEETRPDLRSRGLCLVPLSCTSYVTNENGVWVPPNFRAN

SEQ ID NO: 45613 - protein, 112 aa, Zea mays
  Coding DNA Sequence Number=SeqID_3834
MAGSIYRIHERWRLIRGKTRDGRREGVLWRKRLVAFTVAGSPTTIGWAKMTHCGMVKEPRHVAQGRKVANSGEPIQSSRDTSGYGGRSRIVAGVYPQCGISYLLAVIHLRGA

SEQ ID NO: 45614 - protein, 86 aa, Zea mays
  Coding DNA Sequence Number=SeqID_3835
MALHELYDDGGPQLSYGSRTTGGDFLGALGGRTGQLAVLKSGPGNEIHKSLVTYKNDSTYTGLPRKFYPGIHVYEIPVDSKTGVLA

SEQ ID NO: 45615 - protein, 409 aa, Zea mays
  Coding DNA Sequence Number=SeqID_3836
  Pfam annotation: Domain name=PHD; Domain location=148-179; Score= -1.6; E_value=0.082; Accession=PF00628.19; Description=PHD-finger
MAINGGLHYGEEMGREKEEVAAVSSAGIVEGTRAGSARGTGSASGREILMAQVKGKNILTGPPMYPAPRSSPFGELHGCEGDGCASDQDTWPLHHVLRSGVHCRLCCSCILLSHRSLYCCRCFLLVTSPSCNYDNGDTLMAPPAPTVTCQVCHDAVAHLPCLYPPPTDGVFVCPPCTAAQNGRPFTYAPPCRQPLDERNARVLVLGARIALALLQRHATAAREAAERLAMEARDARARAHDALIVAFDLDAEEDLSCVVPQPTENDLAASEEEEEEEEEDSEAETDEGEVMLVRRNVMPPLVTPTIDTGGSVVPLASAEAKHMPPLSQPKLLFDLNENAAENEIDDAQAEPMRHQALNSFNVKEVAMAAGAEATRASPSTPQTLQLFPITYQDIVPRTLQLFNDDDEEM

SEQ ID NO: 45616 - protein, 68 aa, Zea mays
  Coding DNA Sequence Number=SeqID_3837
MLFPNFSADLNGTTGDMVDFQSTGDVGNSAAITEMGNLVPEPSYEEVMTNNNNCCACYKITCVLTATM

SEQ ID NO: 45617 - protein, 104 aa, Zea mays
  Coding DNA Sequence Number=SeqID_3838
  Gene Ontology: Cellular component=membrane; Biological process =cytochrome complex assembly
  Homolog annotation: Hit_ID=Q2RAR6; Match level="QueryCoverage=64%, HitCoverage=18%, E-value=5e-22, Identity=77%"; Hit description =Cytochrome C biogenesis protein transmembrane region containing protein, expressed
MSEEGELVDFQKNCLVILDILPNGMVIPAGVQAYLAGLTFVLSALPCSTPILATLLGYVDTSRDPIIGGSLLLTYTTDYVARLPTIASFARALQICVDTSYSSL

SEQ ID NO: 45618 - protein, 107 aa, Zea mays
  Coding DNA Sequence Number=SeqID_3839
  Homolog annotation: Hit_ID=Q9SXG0; Match level="QueryCoverage=78%, HitCoverage=68%, E-value=7e-14, Identity=51%"; Hit description=F1F0 -ATPase inhibitor protein
MDMNAVTVTGFDFYLKYYTDALIDKVEQEKLEKLARKGPSSGEQPSSTTGSAASDVKADAGPTESASASVSTDKNKNYAVLAGAVAALGGLGWYLLLKPKKSEEVVD

SEQ ID NO: 45619 - protein, 74 aa, Zea mays
  Coding DNA Sequence Number=SeqID_3840
MATRAAARFLQRRFLSSGGKVLSEEEKAAENVYIKCGSRKKYRAGDGGYVLCERLLVVDIGLVLSQFRFMWPNC

SEQ ID NO: 45620 - protein, 92 aa, Zea mays
  Coding DNA Sequence Number=SeqID_3841
  Subcellular localization annotation: CTP_CleavageSite=32; ConfidenceScore=5.52e-01
MALQPAGVGKRNAGSGSFGVASASPPLSQTPRQEKKRNECTVQADVTRTWRRRIACPDPVGAAQGGGPALVACVCLRHDKVHLNQRGKKTEY

SEQ ID NO: 45621 - protein, 255 aa, Zea mays
  Coding DNA Sequence Number=SeqID_3842
  Gene Ontology: Mol. function=nucleic acid binding; Cellular component= intracellular; Biological process=chromatin modification
  Homolog annotation: Hit_ID=Q1SGQ8; Match level="QueryCoverage=84%, HitCoverage=46%, E-value=4e-71, Identity=66%"; Hit description=Zinc finger, C2H2-type
  Subcellular localization annotation: CTP_CleavageSite=50; ConfidenceScore=5.38e-01
MSPSWTFSSRSQRNSVAPSGRHGAATRSLDFQNNFNNWDSSRKIVEIICRTSLLKSESSCVRIERVFKVHNTQRTLSRFEEYREAVKLRASKLPKKHPRCLADGNELLRFHGTTLSCALGGGGGGGGGSSRLCASDKCAVCRIIRHGFSGRKEGKTGVGVFTTSTSGRAFESIEAAGADGAGAGSVSGTTRRALLVCRVIAGRVHKPLDNLKEFAGQTMGFDSLAGKVGPYSNIEELYLLNPRALLPCFVVICKP

SEQ ID NO: 45622 - protein, 123 aa, Zea mays
  Coding DNA Sequence Number=SeqID_3843
MQIRLEVWTRYKSVLELIAQVLLTNPTRNLESTDSAYARTVRPQGRTVRMSFLLFNSAYEKQTVPVHVDDCPREHLQPSTPTAGGGAKRRRSSRRVLGWRDPRKILFAFAALFSFPVIFNLHD

SEQ ID NO: 45623 - protein, 113 aa, Zea mays
  Coding DNA Sequence Number=SeqID_3844
  Subcellular localization annotation: CTP_CleavageSite=33; ConfidenceScore=5.17e-01
MAPRKGSTAASEHSGFRLITDQSPNHQTSRLVKAAVAWRTGQSGAPPDSVRCASHVTRPLGFDRWSSDWWGHLAVRWCTGQVTVGAEVAVAPLAHRTVRCGTRHCPVLHRTVQ

SEQ ID NO: 45624 - protein, 742 aa, Zea mays
  Coding DNA Sequence Number=SeqID_3845
  Gene Ontology: Mol. function=protein serine/threonine kinase activity; Cellular component=integral to membrane; Biological process=protein amino acid phosphorylation
  Homolog annotation: Hit_ID=Q5N749; Match level="QueryCoverage=38%, HitCoverage=14%, E-value=3e-81, Identity=55%"; Hit description =Putative microtubule bundling polypeptide TMBP200
  Pfam annotation: Domain name=Pkinase; Domain location=31-336; Score =134.4; E_value=3.1e-37; Accession=PF00069.15; Description=Protein kinase domain
  Pfam annotation: Domain name=Pkinase_Tyr; Domain location=31-336; Score=61.2; E_value=3.2e-16; Accession=PF07714.7; Description =Protein tyrosine kinase
  Pfam module annotation: Pfam domain module=Pkinase::Pkinase_Tyr; Domain location=31-336::31-336
MESVLEKKLQHQSSTPKKLDINYLRSITKNFSEDQILGHGGCGIVYKVCMDFPSFMPFNERLKMYIYVMRVKQGERENGEVVAVKKLKVDNVGKDDKQFMNEVIHAMDICHPNIVRLEGYCCHTEKEVTFHDGSFVLAEEFYRLLCFEYIPNGSLDKYLSDESSGLDWHVRYNIIEGVCNGLHCLHEGRNILHLDLKPANILLDENKIPKIADFGLSRLIDEGKTHIHTKNLAGTCGYMAPEYIERYVLSKESDIYSLGVIIIEIVTGERKYPVGTSNEEFVEVYEKWRRRLQATRNKTSLEEECQQVNQCIEVGLKCMDNDPKRRPSIREVVQIIKRSENIDSCSVTTRDGKHREESVYSEWSEKINILVLGSSKQSIEAMETICHELKGLTDVPEYIIKDADRLVLDLTMMVEKSFNLTLAGASSMQLKHALNTLFQIFKVRHLAQAMKEGTLEKLVTQILIWISSETVLKTELDDARELLKALNVLMLHILDNVDRTSIFVILINLLFPFDPSRRPSYTPLELLAVTNAKILDLVVKCLVKLTKALGSTINTIDLDRVLQNIHVFFQQLGVRGMVRRTGTYDKPQRMIRTIVHELVKLLDSKIKDHLSLVPIDAEPRPFILGLIDFELKELAMSAPSLPMDPTHGDAATINSTDTSTNSSSLECMVLSLEKLPRPDNNPRSTNFGRTITKSTLETSLRAPESTSNLMALSEEMSHMSLKTDKDAADEMSSTSSYGREMP

SEQ ID NO: 45625 - protein, 85 aa, Zea mays
  Coding DNA Sequence Number=SeqID_3846
MARAVAALVLCAAVLVAAAHAGRVLDAGLDAAAAALAPVSPPARVPADAGGVLDDRERGGAIADVLWFVLQWANQAATGDRRKAY

SEQ ID NO: 45626 - protein, 110 aa, Zea mays
  Coding DNA Sequence Number=SeqID_3847
MDALGFDYLDYKKFSEEEVAIIKRKRTVSIMKRRTERLVKEDRRKKIALKKQKGADEGESSQSGPKSPTIKKSKSSKLGHDVKKPSEPPKQVDETPLTLSIGITKIVERR

SEQ ID NO: 45627 - protein, 101 aa, Zea mays
  Coding DNA Sequence Number=SeqID_3848
MKHCGSGISERSATDFGEGSEAVAPMEKGVGGQGGEEPLQLWCWRVLRHKFWRWWEAMESIWATSTNCSMVTIYLHYCALNRKKWRSWSVLRARGIAGRLL

SEQ ID NO: 45628 - protein, 139 aa, Zea mays
  Coding DNA Sequence Number=SeqID_3849
MACASSPLVSYPQGRLEEERIPRLCRARVAAGFGGGAVGAEDVAAEAEVDGNEATKKDADARRWAREAGRWRLAKRGREAGRRRLWKEERKLGRSRGQGSTEGGDARRVHRTMKTEAWTSQTVEIDRWQNGRTKEADYY

SEQ ID NO: 45629 - protein, 79 aa, Zea mays
  Coding DNA Sequence Number=SeqID_3850
MNSMRKVGRAGNDEVRTPVRLHGLRNGRRSTDSAAAGWLGRGWPGPVGVARLACRAWTSAGLGAWAVLGSALQGGVPGG

SEQ ID NO: 45630 - protein, 44 aa, Zea mays
  Coding DNA Sequence Number=SeqID_3851
MPLGVGQAPSTASTVGLLGMVTVDLMINGQCRMGSPDLIRYIDS

SEQ ID NO: 45631 - protein, 139 aa, Zea mays
  Coding DNA Sequence Number=SeqID_3852
MAELLVPLLHGALPPSLCYPWRQAAALPSLAVPKIASSVSSPPAIHASGIALVTVIRAWHAEDIHGKASSVPTRTSDPPPESSNLGFSPNQPRIPCLVSSPWPAQFRTQNPSPYPMNFTIDSGNPQFSEIREGKLYSRL

SEQ ID NO: 45632 - protein, 38 aa, Zea mays
  Coding DNA Sequence Number=SeqID_3853
MEAIVMVLAEATMRVSAMTRVKVAKTVVMARVQLVSDL

SEQ ID NO: 45633 - protein, 240 aa, Zea mays
  Coding DNA Sequence Number=SeqID_3854
MREGEVDGFGGRHHALSPSVGWGAAGWDFPVGLGSGGCGYGGGNGARGRGHGGAEQGEGGDDEAADKGIPTVTRAAFLPRLARHHSDGWRGARSAELAADLAFRFGGGAEVAGYRGRKGGITVMAGGVRGANGGRLPRKEGMPGKRMVQTPFHCGDGGGGEERRGSAWGRTALNAAAVERRVGDPRALIDEDPRALIGGGTVSTEQLLALMAGRVWGMSKGAWGRRIAGRTVVHYCGRLQ

SEQ ID NO: 45634 - protein, 67 aa, Zea mays
  Coding DNA Sequence Number=SeqID_3855
MEVLAGVVRMKATMMRRNPGNMMEASWCRKKIKSKMKEPYLIGQFPISVNCRHYEVLADPLFKKEIG

SEQ ID NO: 45635 - protein, 58 aa, Zea mays
  Coding DNA Sequence Number=SeqID_3856
MAFLGRRSPVDFQVLLHRCNGLAFDKLECGGGLLLQALLLAYKSGFQVWDVEHVYDVR

SEQ ID NO: 45636 - protein, 117 aa, Zea mays
  Coding DNA Sequence Number=SeqID_3857
MGTEKRERGRMRLHGGRGRTGRGRARNGSGAGYVAGKVKRTCREPFAEKWGGGGSVREGRRRARASAQRLRRGLRRWGREDVEPFAVGRGNEKLLSGAYGRDEDEASVRPEWDAVCP

SEQ ID NO: 45637 - protein, 104 aa, Zea mays
  Coding DNA Sequence Number=SeqID_3858
MTGRHNPSMSSTKPLSEITTSRGGYEEHEPLGMIGGADGDLYRQKERRSRANIPSPKDQHPHARGLLSANLVEKISSSRGRCRRARPNGQRPDEGTMWQTRRAR

SEQ ID NO: 45638 - protein, 100 aa, Zea mays
  Coding DNA Sequence Number=SeqID_3859
MVQAGDDYGGGEAFPSLSVCTDGAPMEFVWLAWISGGQEKSGWEKRADFAGFHATKPLDAREHVCLAKTGRLLIACRYHCDDIYGFRIKENKKYTHGMIT

SEQ ID NO: 45639 - protein, 82 aa, Zea mays
  Coding DNA Sequence Number=SeqID_3860
  Gene Ontology: Mol. function=protein serine/threonine kinase activity
  Subcellular localization annotation: CTP_CleavageSite=57; ConfidenceScore=5.02e-01
MEDVMLGAAPLPVLDMTKKRSRSSAIRIIKSVSRSVKLRLGTGGTTERIISALHTVLSEQGDEDDDLKKCKTSMCHVGKIQN

SEQ ID NO: 45640 - protein, 81 aa, Zea mays
  Coding DNA Sequence Number=SeqID_3861
MARLGASRGAHRRRPWTERWASLLVGVEEARDGGDRGRRGDSLYFSHYGEPGLLSQNISTNSFGTAIESNFNTSFNYQVLS

SEQ ID NO: 45641 - protein, 72 aa, Zea mays
  Coding DNA Sequence Number=SeqID_3862
  Gene Ontology: Mol. function=peptidase activity; Biological process =proteolysis
  Homolog annotation: Hit_ID=Q2QWY6; Match level="QueryCoverage=83%, HitCoverage=13%, E-value=1e-17, Identity=70%"; Hit description =Eukaryotic aspartyl protease family protein, expressed
MAPTAETGELSRTLEEVSGRSLPLCLKGKEPFKFVLDVKKEFKSLVLNFASGKKTLMEIPTENYLIVTVNIA

SEQ ID NO: 45642 - protein, 113 aa, Zea mays
  Coding DNA Sequence Number=SeqID_3863
MSERPPGKLHELEANARGWARAQELGVVAMAEQREQRAMDGGAEAELENGARREEHATGLEKGDGRAHGARLRAKPEHRIFFFLGDLGALQREHIITLVTYVEEYGDLLIEEE

SEQ ID NO: 45643 - protein, 120 aa, Zea mays
  Coding DNA Sequence Number=SeqID_3864
MVKGVKKLEHVGVRYNQVFHDAFDERWMVELHDINVAMMLVGSDGTLVPLQLPPDPNGCCHRTRFPIPKIFTHGRAFILLNHGQDFFFVPSNPSPKLSNMMLEPSQGAPFVSVSSDEMRH

SEQ ID NO: 45644 - protein, 56 aa, Zea mays
  Coding DNA Sequence Number=SeqID_3865
MARGDVPIEIASVRYRESPSPASWHCPHGTLPRSAMVNLAQQPQAPQQPVVCFSST

SEQ ID NO: 45645 - protein, 107 aa, Zea mays
  Coding DNA Sequence Number=SeqID_3866
  Gene Ontology: Mol. function=DNA binding; Biological process=DNA integration
  Homolog annotation: Hit_ID=Q8H6I0; Match level="QueryCoverage=99%, HitCoverage=6%, E-value=1e-49, Identity=88%"; Hit description =Putative gag-pol polyprotein
MTGEKRMFSSYEKNHDPQRAITFGDRNQDSLDYNLLSVSQLCKMGYNCLFTDIGVTVFRRSDDSIAFKGVLEGQLYLVDFNRAELDTCLIAKTNMGWLWHRRLPTLG

SEQ ID NO: 45646 - protein, 350 aa, Zea mays
  Coding DNA Sequence Number=SeqID_3867
  Gene Ontology: Mol. function=DNA binding; Cellular component=nucleus; Biological process=regulation of transcription, DNA-dependent
  Homolog annotation: Hit_ID=Q6AU56; Match level="QueryCoverage=99%, HitCoverage=99%, E-value=1e-104, Identity=61%"; Hit description=P -type R2R3 Myb proteind
  Pfam annotation: Domain name=Myb_DNA-binding; Domain location=14-62; Score=48.5; E_value=2.3e-11; Accession=PF00249.21; Description=Myb -like DNA-binding domain
  Pfam annotation: Domain name=Myb_DNA-binding; Domain location=68-113; Score=38.1; E_value=3e-08; Accession=PF00249.21; Description=Myb-like DNA-binding domain
  Pfam module annotation: Pfam domain module=Myb_DNA-binding::Myb_DNA -binding; Domain location=14-62::68-113
MGRAPCCDKATVKKGPWSPEEDAKLKSYIEQNGTGGNWIALPQKIGLKRCGKSCRLRWLNYLRPNIKHGGFSDEEDMIILSLYISIGSRWSIIAAQLPGRTDNDIKNYWNTRLKKKLFGKQSRNKDQRQQHQFMRQLAGSAASDGMVKQEAAAGGDADAAAAGSSSVAVAATYNWHHHAMAMAMPVQPVPGSTTIMEGHRAEADEVDESIRKLLYKLGGAAGPSTALSSVPQCVRPMYEERSAASLMPPPPPPPSCPAVVDASSSASLDEGGGVLPALELDQSFHFGQVKLDGLESFFGMGGQSGMRWWSEASPLVCPSSTVAAASSSSHGMQMQQYCVVVDEPGKLGMN

SEQ ID NO: 45647 - protein, 660 aa, Zea mays
  Coding DNA Sequence Number=SeqID_3868
  Gene Ontology: Mol. function=protein-methionine-S-oxide reductase activity; Biological process=protein metabolic process
  Homolog annotation: Hit_ID=Q8W1N8; Match level="QueryCoverage=81%, HitCoverage=97%, E-value=0.0, Identity=67%"; Hit description=CSLC9
  Pfam annotation: Domain name=DUF1753; Domain location=475-652; Score=- 84.8; E_value=0.036; Accession=PF08552.1; Description=Golgi protein of unknown function (DU
  Pfam annotation: Domain name=Glycos_transf_2; Domain location=246 -421; Score=11.8; E_value=0.00014; Accession=PF00535.16; Description =Glycosyl transferase
  Pfam module annotation: Pfam domain module=DUF1753::Glycos_transf_2; Domain location=475-652::246-421
MAPCSGLWGGKAGGDAYRGTPVVVKMENPNWSISEISSPEDDDDDEDILAAAGGRRRKGARTKNAKQIRWVLLLKAHRAAGCLASLASAAVALGAAARRRVAAGRTDADADADAGVLAVAGESPVVRSGFYAFIRAFLVVSLLLLAVEVAAYINGWDLAASALALPALGLESLYASWLRFRAAYVAPGIQFLTDACVVLFLVQSADRLILCLGCFYIRVKRIKPEPKSPALPDAEDPDAGYYPMVLVQIPMCNEKEVYQQSIAAVCNLDWPKSSFLVQVLDDSDDLLTQALIREEVAKWQQQGARIVYRHRVLRDGYKAGNLKSAMSCSYVKDYEFVAIFDADFQPQPDFLKRTVLHFKYINLCFHFEVEQQVNGVFLNFFGFNGTAGVWRIKALEDSGGWMERTTVEDMDIAVRAHLHGWKFIFLNDVECQCELPESYEAYRKQQHRWHSGPMQLFRLCLPDIIKCKMAFWKKGNLILLFFLLRKLILPLYSFTLFCIILPTAMFVPEAELPDWVVCYVPALMSLLNVLPSPRSFPFVIPYLLFENTMSVTKFNAMVSGLFQLGSAYEWVVTKKSGSGPRSSEVAGDLVSLAAAAPTAKKKKKKKHNRIYKKELALSMLLLTAAARSLLSKQGIHFYFLLFQGVSFLLVGLDLIGEQVE

SEQ ID NO: 45648 - protein, 99 aa, Zea mays
  Coding DNA Sequence Number=SeqID_3869
MPRPTAWGRALAELKAARHRHAGPSSRPRRAGAGHAKAGGLPGPRHGQATAAPRPCHGRGKAGRRDRPHHSRARGARRGKRAREEGAEQGRGEAKPPQR

SEQ ID NO: 45649 - protein, 739 aa, Zea mays
  Coding DNA Sequence Number=SeqID_3870
  Gene Ontology: Mol. function=RNA-directed DNA polymerase activity; Biological process=RNA-dependent DNA replication
  Homolog annotation: Hit_ID=UPI00004C1732; Match level="QueryCoverage =99%, HitCoverage=88%, E-value=1e-123, Identity=52%"; Hit description= UPI00004C1732 related cluster
MSEPSTTEGCRIHGEIKGLLETTKEIAPTVRDRLSGRLHHDDRRQATHVYHPWRDGRYDSGEDRSPSLEPPGSRQGHLSQGQGQREVEGGRPGATSQHNTKKSNKKKSPQHRHEALNADLVATAERWNPRGPQGGPNVFNKMLKESCPYHKGPVKHTLGKCDMLRRFYNKPGPSMDDGMKKGSGDKEDDQGEEFPDVHNCYIIFGGQTVNLSTRQWKQELWEVFSIKVAAPVYLDWFDHAITFDRDDHPDYVPNPRNSLNIIYAETLDLMEINRPKIWARATPFHGITPGFKGTYHVILGRPCYAKFMAIPNYTYLKLKMPGPAGVITFSPLYRHTYECDVEYAEALVESEALIIDLENLANEVFDPKRHELITDVLRSNAKVLVWSPSDMPGIPREVAEHSMDICAGSRSVKQHLRRFDEEKCRVIGEEVHKLLAAEFIKEVFHPEGLANPVLVRKKREMENREASGRVAKWVIELMGETLSFAPKKVFKSHALAYFLAEWTDTHLPTAPIQAELWTMYFDGSLMKTGVGAGLLFISPLGVHLRYVVCLRFAASNNVTEYEALVNGLRITIDLGVRRLDLNHVARQYNEVADELAKIASGRTTVPSNVFAKDIFKPSVMPKEASELAPHEEAPPAGGPEAMQIDGDENRAALASDWRAPYLDPLGILQRCIPISQGQELLGEKAPGGFTYLMVTIDKFSKWIEVQPLNNVKSEQAIAFFTDIIHHFGVPNSIITDNGT

SEQ ID NO: 45650 - protein, 850 aa, Zea mays
  Coding DNA Sequence Number=SeqID_3871
  Gene Ontology: Mol. function=RNA-directed DNA polymerase activity; Cellular component=intracellular; Biological process=RNA-dependent DNA replication
  Homolog annotation: Hit_ID=UPI00004C1731; Match level="QueryCoverage =93%, HitCoverage=54%, E-value=0.0, Identity=84%"; Hit description =UPI00004C1731 related cluster
  Pfam annotation: Domain name=RnaseH; Domain location=356-483; Score =4.1; E_value=2.4e-05; Accession=PF00075.14; Description=RNase H
  Pfam annotation: Domain name=rve; Domain location=549-721; Score =101.9; E_value=1.9e-27; Accession=PF00665.16; Description=Integrase core domain
  Pfam module annotation: Pfam domain module=RnaseH::rve; Domain location=356-483::549-721
MADVCGLHWSQQSMSEGYHQIRMKESDQLATSFITPFGMYCYVTMPFGLRNAGATYQRCMNHVFGEHIGHTVEAYVDDIVVKTRKAFDLLSDLEVTFRCLKAKGVKLNPEKCVFGVPRGMLLGFIVSERGIEANPEKIAAITSMGPIKDLKGVQRVMGCLAALSRFISRLDERGLPLYRLLRKAEYFAWTPEAEEALGNLKALLTKAPILVPPADGEALLVYVAATTQVVSAAIVVERQEEGHALPVQRPVYFVSEVLSETKIRYPQVQKLLYAVILTRRKLRHYFEYHPVTVVSSFPLGEIIQCREASGRIAKWAVEIMGETISFAPRKAIKSQVLADFVAEWVDTQLPTAPIQPELWTMFFDGSLMKTGAGAGLLFISPLGKHLRYVLRLHFPASNNVAEYEALVNGLRIAIELGVIRLDARGDSQLVIDQVMKNSHCRDPKMEAYCDEVRRLEDKFYGLELNHIARRYNETVDELAKIASGRTTVPPDVFSRDLHQPSVKIDDTPEPEAPSAQPKAPPARPEAPSVQPEVPSAPEGEALHVEEEQSGAMPDRNWQTPYLQYLHRGELPLDQAEARRKAPGGYTHLLVAIDKFSKWIEVRPLNNIRSEQAVAFFTNIIHRFGVPNSIITDNGTQFTGKKFLDFCEDHHIRVDWAAVAHPMSNGQVERANGMILQGLKPRIYNDLNKFGKRWMKELPSVIWSLRTTPSRATGFTPFFLVYGAEAILPTDLEYGSPRTRAYNDQSNQASREDSLDQLEEARDKALLHSARYQQSLRRYHARGVRSRDLQVGDLVLRLRQDARGRHKLTPPWEGPFVIAKVLKPGTYKLANNQGEIYGNAWNIKQLRRFYP

SEQ ID NO: 45651 - protein, 159 aa, Zea mays
  Coding DNA Sequence Number=SeqID_3872
  Homolog annotation: Hit_ID=Q2PW34; Match level="QueryCoverage=31%, HitCoverage=18%, E-value=1e-08, Identity=53%"; Hit description=L -asparaginase 2
MLGRNGDSPLIRFGTYTCGACAVSGTLKWDMATVMEYKGLPLQQVVDYYVRDMATVMEYKGLPLQQVVDYYVRGTMQNIRSVAIRQYMGLIYEHLWSQLVQPSKQCPMLECEIPWTKANEQELRRKFLYGWIVVLEMYNNCSKEMLEDKEATKKHYKEA

SEQ ID NO: 45652 - protein, 161 aa, Zea mays
  Coding DNA Sequence Number=SeqID_3873
MPKLLDGSFSVYLCAIFASVLILQSEAPRHDTEDAVAMSARVDLWRLPSPPLFRDGDDGTISPCVWVVREMWGDTIRLQIYMQDVGRNHFSQLATELVARDLGQRGPILAEKKTQCTAACPWSLAERPHATATDANAMVGPTSETEGAGGAGLRGMWPRSQ

SEQ ID NO: 45653 - protein, 91 aa, Zea mays
  Coding DNA Sequence Number=SeqID_3874
MEPCNAVPSGVSWEVRPDVDASEEKNEKQESCSTTVDEAHEEGWRGLTKGVATSRVGAAQVEVELTAVFHRALGERRGHGFGTGMLLYRSG

SEQ ID NO: 45654 - protein, 86 aa, Zea mays
  Coding DNA Sequence Number=SeqID_3875
MQGSCLTDIAAKSTKDLPTLTTPLLPLPLSDDHARGSERPAAEADDSDEPLSVPSATIPPDEATVASGEHPQIHPAEPRIRPATHD

SEQ ID NO: 45655 - protein, 72 aa, Zea mays
  Coding DNA Sequence Number=SeqID_3876
MQGSCLTDIAAKSTKDLPTLTTPLLPLPLSDDHARGGERPAAEADDSDEPLSVPSATIPPDEATVTSDLVWV

SEQ ID NO: 45656 - protein, 168 aa, Zea mays
  Coding DNA Sequence Number=SeqID_3877
MLSGRAWRGEGRRTVWTLLLLLRTAPIAHFSVRLRTSLRQLGSRLVGKTPRPDAQRRGPPSVPTSNPNPFDFDRPAALPTPHFPSSPLRRSPVPTRPTANQCARPQSGGGGSGSSAACGLRAVELRATSGRAEGHERTPAGYCGSKTARGGGDCVCATVRTVRWPVGY

SEQ ID NO: 45657 - protein, 485 aa, Zea mays
  Coding DNA Sequence Number=SeqID_3878
  Gene Ontology: Mol. function=RNA-directed DNA polymerase activity; Cellular component=intracellular; Biological process=RNA-dependent DNA replication
  Homolog annotation: Hit_ID=UPI00004C1733; Match level="QueryCoverage =99%, HitCoverage=35%, E-value=0.0, Identity=88%"; Hit description =UPI00004C1733 related cluster
  Pfam annotation: Domain name=RVT_1; Domain location=56-225; Score =131.7; E_value=2.1e-36; Accession=PF00078.17; Description=Reverse transcriptase (RNA-dependent
MPGIPRDVAEHSLDIRAGARPVKQPLRRFDEEKRRAIGEEIHKLMATGFIKVVFHPEWLANPVLVRKKGGKWRMCVDYTGLNKACPKVPYPLPRIDQIVDSTAGCETLSFVDAYSGYHQIRMKESDQLATSFITPFGMYCYITMPFGLRNAGATYQRCMNHVFGEHIGQTVEAYIYDIIVKTRKASDLLSDLETTFRCLKAKGVKLNPEKCVFGVPRGMLLGFIVSEQGIEANPEKIAVITNIGPIKDLKGVQRVMGCLAALSRFISRLGERGLPLYRLLRKTEHFTWTSEAEEALGNLKALLTSAPILVPPAAGEALLIYVATTTQVVSTTIVVERREEGHALPVQRPVYFISEVLSETKICYPQIQKLLYTVILTRRKLRHYFESHPVTVVSSFLLGEIIQCREASGRIAKWAVEIMGETISFAPQKAIKSEVLADFMAEWVDTRLLAAPIQPKLWTMFFDGSLMKTGAGAGLLFISPLEKHL

SEQ ID NO: 45658 - protein, 167 aa, Zea mays
  Coding DNA Sequence Number=SeqID_3879
  Gene Ontology: Biological process=protein modification process
  Homolog annotation: Hit_ID=P55857; Match level="QueryCoverage=43%, HitCoverage=73%, E-value=8e-34, Identity=94%"; Hit description =Ubiquitin-like protein SMT3
  Pfam annotation: Domain name=ubiquitin; Domain location=91-159; Score= 39.0; E_value=1.6e-08; Accession=PF00240.13; Description=Ubiquitin family
MSGAGEEDKKPAEGGAHINLKVKGQVAVELGLVGSDVSVLIDGSLRANVLSIAPGPTSSLLYAIQEELPCTFHHTYHIFLNYDSDNTSIRQTRDGNEVFFRIKRSTQLKKLMNAYCDRQSVDMNAIAFLFDGRRLRGEQTPDELEMEDGDEIDAMLHQTGGSVPSTT

SEQ ID NO: 45659 - protein, 122 aa, Zea mays
  Coding DNA Sequence Number=SeqID_3880
MGKNNKRKREPTPPSEEFGDSEYSEEEFSSESEGPPGPIPLRESSDDSDDSQGLAAEVWTYIRAVERSGLEGSDESYDGSGKGGGGGSKDGDGSDSRGSNRGGSSRGNTRGGSGGGSSRASG

SEQ ID NO: 45660 - protein, 70 aa, Zea mays
  Coding DNA Sequence Number=SeqID_3881
MAPCGANGSLRCIKCARSARRSQNRPYRCTGHQTVHVRCAPGHPGGPTSQKLQRSESNGNGDVAEAPDCP

SEQ ID NO: 45661 - protein, 86 aa, Zea mays
  Coding DNA Sequence Number=SeqID_3882
MDMSRMETLYHAEKEKTEALILELAGRVASSSNQQIRKLQWRCKVSHQISSQLTNTKGCRNHTVVVQNKQFATDSHPRGPGYAKGC

SEQ ID NO: 45662 - protein, 239 aa, Zea mays
  Coding DNA Sequence Number=SeqID_3883
  Subcellular localization annotation: CTP_CleavageSite=27; ConfidenceScore=5.79e-01
MAGRSPPPSSGAAGQGFTSNSVRRGLRHSSLSPLRFVRWRLMDGLRRPRSQQTPTAAQRPWIPGLPACYSSGIRTAASRPCPTLLPLRLFPINAEQQCRYCKQDSERESVRKLPPPIGFAPMAASPRMLAPVGSPGTLVIGQWCCQSRGSPWPYELLTVAVLRRMPARCREREASHHHFGYGHLSRIRRLLIHRLAPLCVGFARRWGRTAIAGMPAAVRANGAVLLAVVRGHGMVAVGY

SEQ ID NO: 45663 - protein, 118 aa, Zea mays
  Coding DNA Sequence Number=SeqID_3884
MAASPRMLAPVGSPGTLVIGQWRCQSRGSPWPYELLTVAVLRRMPARCREREASHHHFGYGHLSRIRRLLIHRLAPLCVGFARRWGRTAIAGMPAAVRANDAVLLAVVRGHGMVAVGY

SEQ ID NO: 45664 - protein, 656 aa, Zea mays
  Coding DNA Sequence Number=SeqID_3885
  Homolog annotation: Hit_ID=Q9LJU8; Match level="QueryCoverage=43%, HitCoverage=68%, E-value=2e-19, Identity=26%"; Hit description =Arabidopsis thaliana genomic DNA, chromosome 3, TAC clone: K10D20
MDFSAPSFSLGFDWDDDDPPASSDRREQPRGYGAPDAPSFSLGIDDDDDVEEPRIPARGRQNEQAREFTAPDPPSFSLGFDDEHGDGDILSADRCREQSQPQVAPGSPSNGTADDDDDKEDGFVVAGGKRPVRVERDTLYPDPLPTPAETNRFKRLRKGSATAHPAQTPQVPHREAPDAPSSSLSISDDDFLTGGQHHERLKPQASPRIPSSLSIEDEDDDFFLAGDRQPEPTLPQVTQLKRLRKGPVPPHLAPSPPPPKVPGQPTTEASPVMTEDAARGAVGSWEDEIEDWTTDEDRPVRDVPPSVGSCSTSSNSKFSLLNRGVLMTQSGTKASTSKFTQTPNTSASISLEESCTKKLLPKITVSPMRKIYLLDSDTDADDDYSQNKAKSMQQNRKPQMNSTVQKSGAMMSDNWATPALDEFCKEYFESPKDAGFSQPKEGNTHYKASQPKNSGHFQQQASSSGGEVDDGPPAMQYLYHPDPRVGDLFRNRLQHFVPIGAGSTIANEQNRAKSLRSCRRQSSSSAAATDDWVTPGRVSVPTDASKRRVHASGTHSGSGHWFTNDSGRKVYVSKNGQELTGRDAYRQYQKGIKTVVLVERKHVSLSQHAAMLGQGLGQDYPSVVPSYPSKLEGREDARGRPYPGCPATKHTLISGG

SEQ ID NO: 45665 - protein, 192 aa, Zea mays
  Coding DNA Sequence Number=SeqID_3886
  Subcellular localization annotation: CTP_CleavageSite=99; ConfidenceScore=5.77e-01
MATVYPSNGAPYSSSQIASCSRRFPFLRFLSPPPKSKSTIRHSTAASPLCLSSVCFALYLAPPQRRRSPVRQSRRHVERGSSRDRTAGAGAPSNSRWARASRSRSRSEQRRRTRSASSASSSSSSDYRTVVFHLPEHNDAQKRACSKSRRPEAAAPLGGRRLSCLGGRQQIPPPRSCKYEREYEQPLEKRNR

SEQ ID NO: 45666 - protein, 148 aa, Zea mays
  Coding DNA Sequence Number=SeqID_3887
  Gene Ontology: Mol. function=structural constituent of ribosome; Cellular component=ribonucleoprotein complex; Biological process =translation
  Homolog annotation: Hit_ID=Q6K4T1; Match level="QueryCoverage=85%, HitCoverage=93%, E-value=6e-66, Identity=96%"; Hit description =Putative 60S ribosomal protein L27
  Pfam annotation: Domain name=KOW; Domain location=5-40; Score=34.1; E_ value=5e-07; Accession=PF00467.19; Description=KOW motif
  Pfam annotation: Domain name=Ribosomal_L27e; Domain location=52-136; Score=140.3; E_value=5.1e-39; Accession=PF01777.8; Description =Ribosomal L27e protein family
  Pfam module annotation: Pfam domain module=KOW::Ribosomal_L27e; Domain location=5-40::52-136
MVKFLKPGKAVILLQGRFAGRKAVIVRVFEEGTRDRPYGHCLVAGLAKYPKKVIRKDSAKKTAKKSRVKCFIKLVNFTHLMPTRYTLDVDFKDVASGGPDALSTRDKKVEACKAAKARLEERFKTGKNSLDGPFEFPLIPKGRAELCD

SEQ ID NO: 45667 - protein, 182 aa, Zea mays
  Coding DNA Sequence Number=SeqID_3888
  Gene Ontology: Mol. function=drug transporter activity; Cellular component=membrane; Biological process=multidrug transport
  Homolog annotation: Hit_ID=Q5GAV3; Match level="QueryCoverage=88%, HitCoverage=12%, E-value=2e-36, Identity=51%"; Hit description =Putative integral membrane protein
MEVPMNTTQSGPHFPVQHRSLSLDIKGNKTDIVINKYEDTFLVIVTQIGCMGTILAAKKDESVFSDPTYNVSVLFGKRDEPLLLACARQLIEHIRLRLHTALAKGQSRAEQSREEGDSAGCWRQAALSASGALEEGCGRCWRQWQWLSPVIGDFSGSERSFSGNAEGYYCSCDRESPLVMIE

SEQ ID NO: 45668 - protein, 204 aa, Zea mays
  Coding DNA Sequence Number=SeqID_3889
MEMEPIAISTYVFPIRSQPTGLPASVRLSGHNLQRHSRRHPVAHRGTDPTPTLELLCPGGPSLARAPPPPADQSSASETTRLPPVAQAACPPGRTPRRALSRQLLARADLFFGNRAPASSSSPSPAAARQRRAPPRGSASAQSELRPAASSVEASTPRPSSARECLCRIQQTEICNSNTLILERVSPIPTPLGSKQDFMASNQY

SEQ ID NO: 45669 - protein, 483 aa, Zea mays
  Coding DNA Sequence Number=SeqID_3890
  Gene Ontology: Mol. function=protein binding; Cellular component =endoplasmic reticulum; Biological process=regulation of epidermal cell differentiation
  Homolog annotation: Hit_ID=Q1SJP5; Match level="QueryCoverage=69%, HitCoverage=94%, E-value=1e-127, Identity=62%"; Hit description =Cyclin-like F-box; Serine/threonine protein phosphatase, BSU1
  Pfam annotation: Domain name=F-box; Domain location=143-190; Score =16.4; E_value=0.1; Accession=PF00646.23; Description=F-box domain
  Pfam annotation: Domain name=Kelch_1; Domain location=230-272; Score =5.9; E_value=0.83; Accession=PF01344.15; Description=Kelch motif
  Pfam annotation: Domain name=Kelch_1; Domain location=274-320; Score =43.2; E_value=8.7e-10; Accession=PF01344.15; Description=Kelch motif
  Pfam annotation: Domain name=Kelch_1; Domain location=322-368; Score =33.7; E_value=6.5e-07; Accession=PF01344.15; Description=Kelch motif
  Pfam annotation: Domain name=Kelch_1; Domain location=375-415; Score =0.6; E_value=3.3; Accession=PF01344.15; Description=Kelch motif
  Pfam annotation: Domain name=Kelch_2; Domain location=221-272; Score =10.9; E_value=1.4; Accession=PF07646.5; Description=Kelch motif
  Pfam annotation: Domain name=Kelch_2; Domain location=274-320; Score =27.9; E_value=3.7e-05; Accession=PF07646.5; Description=Kelch motif
  Pfam annotation: Domain name=Kelch_2; Domain location=322-368; Score =6.8; E_value=4.9; Accession=PF07646.5; Description=Kelch motif
  Pfam annotation: Domain name=Kelch_2; Domain location=375-415; Score =12.6; E_value=0.82; Accession=PF07646.5; Description=Kelch motif
  Pfam module annotation: Pfam domain module=F-box::Kelch_1::Kelch _1::Kelch_1::Kelch_1::Kelch_2::Kelch_2::Kelch_2::Kelch_2; Domain location=143-190::230-272::274-320::322-368::375-415::221-272::27 -320::322-368::375-415
  Subcellular localization annotation: CTP_CleavageSite=78; ConfidenceScore=5.06e-01
MDSLAPAVVWMGGLCSHSPTHCSYKAAQVCRRVYVTAFLVWPVCLAGRSDSEAGEPLVLGAGMQAAGTRRFPGSRRRRVSARKGCYFSGESKKHSDVFCDISELDFFPYATDSDSEELELKEQKPVPKALSGGDSSGNRSNDCYFPGLHDDLSQDCLAWASRSDHPSISCLNKRFNLLMNSGYLYKLRRKYGIVEHWVYLACSLMPWEAFDPSQRRWMRLPRMPCDECFSCADKESLAVGTQLLVFGREYTGLAIWVYNLLTRSWSPCAPMNLPRCLLASGSSGEIAIVAGGCDKNGQVLRSVELYNSETGHWETVPGMNLPRRLASGFFMDGKFYVIGGVSSQRDSLTCGEEYSLETRTWRRILDMYPGGTSASQSPPLVAVVNSQLYAADQSTNVVKKYDKANNAWDVVKPLPVRADSSNGWGLAFKACGDRLLVIGGHRGPRGEVILLHSWCPEGGEDWEVLSVKERAGVFVYNCAIMGC

SEQ ID NO: 45670 - protein, 463 aa, Zea mays
  Coding DNA Sequence Number=SeqID_3891
  Gene Ontology: Mol. function=protein serine/threonine kinase activity; Cellular component=membrane; Biological process=protein amino acid phosphorylation
  Homolog annotation: Hit_ID=Q6H6V1; Match level="QueryCoverage=72%, HitCoverage=87%, E-value=1e-119, Identity=63%"; Hit description =Putative receptor protein kinase PERK
  Pfam annotation: Domain name=Pkinase; Domain location=39-310; Score =141.0; E_value=3.3e-39; Accession=PF00069.15; Description=Protein kinase domain
  Pfam annotation: Domain name=Pkinase_Tyr; Domain location=39-310; Score=100.0; E_value=7.1e-27; Accession=PF07714.7; Description =Protein tyrosine kinase
  Pfam module annotation: Pfam domain module=Pkinase::Pkinase_Tyr; Domain location=39-310::39-310
MACCFLFGKKAKQTTEGDEDLHSVKVFSYSELRKATQDFSGANKIGEGGFGSVFRGVLKDGTVVAVKVLSATSRQGIREFLTELTAISDIKHENLVTLIGCCAEGSRRILVYNYLENNSLAQTLLGSRHSNIRFNWHARARIAVGVARGLAFLHEEIRPPIIHRDIKASNILLDKDLTPKISDFGLARLLPPNATHVSTRVAGTLGYLAPEYAIRGQVTKKSDIYSYGVLLLEIVSGRCNTNTRLPSEDQFLLERTWALYEQGRLEDIVDMDIGGDRDVEEACRFLKIGLLCTQDAMARRPNMTNVVRMLSGERRISVEKITRPAMISDFAELKMIKISFARRFSLSNYFGLLQLGDYLDQFTLHLLGFCPTEYVKENRLASRCYVMREKKKRAPRFLVRTNVDSTLMLPMSAGRTGTVKWLRVFAEMRQAVEEERRTDQTWKSPRSSARDFGRQTRRPAVTG

SEQ ID NO: 45671 - protein, 50 aa, Zea mays
  Coding DNA Sequence Number=SeqID_3892
MSQYGLEPQEYSPVIDGPFYWELATHQCTAIIGALASAAAYGMEKAFQAR

SEQ ID NO: 45672 - protein, 135 aa, Zea mays
  Coding DNA Sequence Number=SeqID_3893
MACKTKSLLLALSVAALLAARSESHGLGDFTSGSDEATTTPEMQTFFKPQAAAALPEALDASMPAKPEATALPATTTAAAATTAGTAPSATPRRSVSVAAGVACGVAAVAVAGIAAAVAYVVVRGARRGTEVQLG

SEQ ID NO: 45673 - protein, 356 aa, Zea mays
  Coding DNA Sequence Number=SeqID_3894
MATATVTSPSDPFTFHGPVAALAVPAQADVDEFEFHVVPAAAVALSAADELFSGGKLVPLRRPAPASAPCSPPPPRLEVEPASEPTSPRAPRCAGRRWRDLLLLLVSSYRRKPKAASGGDASRCAADRCLKARRRATHFRPLLSRDSSSSSSASSVDSGKSARRPPPSCSPLRTRSAPVANLLHLMSRTRSTGGDKVGAAADAPKRQEPAGARLLPTRASSSSSSSAGSCRNPRAGAGAGPWPPQRGPSRPSRPAAAAESPRVSASGRVVFRGLERCASTPASAGVGPRRPRGMERSYSANVRVDPVISVFGFGHLFMPSSPAKERKADRERDVVGGRRNNRPEKLAMVLMRDPQD

SEQ ID NO: 45674 - protein, 375 aa, Zea mays
  Coding DNA Sequence Number=SeqID_3895
  Homolog annotation: Hit_ID=Q2QMB8; Match level="QueryCoverage=26%, HitCoverage=23%, E-value=4e-21, Identity=57%"; Hit description=Helix- loop-helix DNA-binding domain containing protein, expressed
  Pfam annotation: Domain name=HLH; Domain location=39-88; Score=57.7; E_value=3.9e-14; Accession=PF00010.16; Description=Helix-loop-helix DNA-binding domain
  Subcellular localization annotation: CTP_CleavageSite=28; ConfidenceScore=5.19e-01
MQRAKGKAGDRASFVKSELMEDGSSAPRRATPPTRRSRSADFHNFSERRRRDRINEKLRALQELLPNCTKTDKVSMLDEAIDYLKSLQLQLQMLVMGKGGGMAPVVPPELQQYMHYITADPAHQMMPPPLRPSAGQLQPAAGRQFQITQAAAAAANNDNDPQRRRQSNVESDFLSQMQNLHPSDQPPHHHNFLRPPRLQLFTPQYATACVWLLLIVRSSGIASLNPVRSQMKNSIIVAVPACDHKVLPYSQTVILSRRVWCGGGGEFSWTFFSPPMSYCRQFERHICPLGLMRIHVIITLDVMDTFVCIQSNEMNNISLPHCTTTWPNLSASILLRRQTQASCCGTENEESKKQDYLCHPLFFKPIPPSGSGSMG

SEQ ID NO: 45675 - protein, 148 aa, Zea mays
  Coding DNA Sequence Number=SeqID_3896
MHAVALHADSQRTDLTDGLAGQLVDESCMKPNAKAGAAAAGGGHTLTRNAAAAAAAGIQAPARTHACMRQGGHRQMIRPRHLCTRPGLGALARSSQSYDLGPTLFIAAALHLGWGRKAASQCDMAVTASLVRFLRLPRHAAGVGGVHA

SEQ ID NO: 45676 - protein, 451 aa, Zea mays
  Coding DNA Sequence Number=SeqID_3897
  Gene Ontology: Cellular component=integral to membrane; Biological process=sugar mediated signaling
  Homolog annotation: Hit_ID=Q5JLB2; Match level="QueryCoverage=99%, HitCoverage=84%, E-value=1e-180, Identity=68%"; Hit description =Putative HYS1
MSFAAVLAQVVNTKNRSGERLQPALLSKFETEPRLWMQICTSAVKESLRNIYGNKLDSFMRNFEKSFSSTLTTLHLVNEMPVYGQGPVPQCSSKHEDSEASSKLSTGGTQNLTREIKQERLNSVESQLVLYAGGYQQMTRRAHSLSSPEADQRILNAFERSLKEQTRSNELKEFEISLSMRKLKLKQSQLELNSYSHMLDKIKLSLGFQKASFQVEKFKTQMQDTRHAQIMRTLIDFLVSAVIIMSVCFGYGTYTYSYQRITDITAACSATSKGSKSWWMPNSVSNFNTGLLFIRCHVIAATRMFFGIVMILAVVWLAFQRSAVSVSSMPVTFNIILLGVICGYAGRFCTNTLGGDGNMWLICWEVLCSVHLIGNCYPSVLYRVLHGPISVSHSKESVWFPYWIRRWMFYAVLGFFIPALNGLLPFASLSDWNNHFTKELKSIFIDERIEA

SEQ ID NO: 45677 - protein, 55 aa, Zea mays
  Coding DNA Sequence Number=SeqID_3898
MEELLARIMAHTTWPGGGDADRRRRSDKSESNEGESEYHYDYVWRKINLFIGLRI

SEQ ID NO: 45678 - protein, 231 aa, Zea mays
  Coding DNA Sequence Number=SeqID_3899
MDFDGAIGDQGELWEWQSQEYCMQKDSLAGLLHVIASLFLLEIYIHVETLWAEASNNVGGDWSIFEEQTPIKHCTDFEFQFCDVGDIIVKEFEERKETLQAKRTRMLQFCPENLEMTCSVTEDGLLESLQEMIFQLAKFIIGAKKARPSVSLPFVLIKPYSIHGDITLNDINEKIHAPSPHKIRHRSDEEPDPLQASAAISGKPVAHKTKIHTEGGKGEGEHHDHQNQRLG

SEQ ID NO: 45679 - protein, 148 aa, Zea mays
  Coding DNA Sequence Number=SeqID_3900
MTTRSGFFVEHLVNIAQGFAVFYHRNPKTTQPAPWSELRCRPLVTSAKPSKVFETRIGACGPDNMGGSATEEAKTMYKNLHNFMEMAAVQQAKIDPQFPLRIKSYARKRPCLGVGSTTLLVHKDVCSMKDRLVDICDARRILNNRRQE

SEQ ID NO: 45680 - protein, 51 aa, Zea mays
  Coding DNA Sequence Number=SeqID_3901
MTNEPQLKELAKALMDAGSAGTRPSGTGLVGLATTVSSCFSLGRGSVDPLK

SEQ ID NO: 45681 - protein, 882 aa, Zea mays
  Coding DNA Sequence Number=SeqID_3902
  Gene Ontology: Mol. function=protein serine/threonine kinase activity; Cellular component=integral to membrane; Biological process=protein amino acid phosphorylation
  Homolog annotation: Hit_ID=Q4PLL4; Match level="QueryCoverage=91%, HitCoverage=87%, E-value=0.0, Identity=62%"; Hit description=SHR5 -receptor-like kinase
  Pfam annotation: Domain name=LRR_1; Domain location=116-138; Score =5.5; E_value=26; Accession=PF00560.23; Description=Leucine Rich Repeat
  Pfam annotation: Domain name=LRR_1; Domain location=140-162; Score =15.9; E_value=0.15; Accession=PF00560.23; Description=Leucine Rich Repeat
  Pfam annotation: Domain name=LRR_1; Domain location=164-187; Score =12.7; E_value=1.2; Accession=PF00560.23; Description=Leucine Rich Repeat
  Pfam annotation: Domain name=LRR_1; Domain location=189-211; Score =14.6; E_value=0.36; Accession=PF00560.23; Description=Leucine Rich Repeat
  Pfam annotation: Domain name=LRR_1; Domain location=20-42; Score=6.6; E_value=17; Accession=PF00560.23; Description=Leucine Rich Repeat
  Pfam annotation: Domain name=LRR_1; Domain location=213-236; Score =12.2; E_value=1.5; Accession=PF00560.23; Description=Leucine Rich Repeat
  Pfam annotation: Domain name=LRR_1; Domain location=44-66; Score=5.3; E_value=29; Accession=PF00560.23; Description=Leucine Rich Repeat
  Pfam annotation: Domain name=LRR_1; Domain location=68-90; Score =12.2; E_value=1.5; Accession=PF00560.23; Description=Leucine Rich Repeat
  Pfam annotation: Domain name=LRR_1; Domain location=92-114; Score =10.9; E_value=2.6; Accession=PF00560.23; Description=Leucine Rich Repeat
  Pfam annotation: Domain name=Pkinase; Domain location=498-766; Score =165.6; E_value=1.2e-46; Accession=PF00069.15; Description=Protein kinase domain
  Pfam annotation: Domain name=Pkinase_Tyr; Domain location=498-766; Score=141.4; E_value=2.5e-39; Accession=PF07714.7; Description =Protein tyrosine kinase
  Pfam module annotation: Pfam domain module=LRR_1::LRR_1::LRR_1::LRR _1::LRR_1::LRR_1::LRR_1::LRR_1::LRR_1::Pkinase::Pkinase_Tyr; Domain
  Subcellular localization annotation: CTP_CleavageSite=43; ConfidenceScore=5.09e-01
MTLRLRGDFNPSASTFGLYSTLIVNLAQNYLTGPLPSFLGNLTAMQYMSLGINALSGSVPKELGNLVNLVSLGIGSNYLNGSLPSELGNLAKLEQLYIDSAGLSGPLPSSFSRLTRMKTLWASDNDFTGEIPDYIGSWTNLTELRFQGNSFQGPLPATLSNLVQLTSLILRNCRISDSLASVNFSQFAKLNLLDLSFNNITGQVPEALVKLNSLSFLDFSYNQLSGNFPSWTTQNNLQLVLPSGLSCLQRDTPCFLGSPQSASLAVDCGSSRSISGYQPDAASLGAASYYVTGAQTWGVSNVGKFMEASNGSYIIYSLHQFQNTLDSELFQTARMSPSSLRYYGIGLENGNYTVTLQFAEFDFEDSQTWKSVGRRVFDIYLQGERKEKNFDIRKASGGKSYTAVEKQYIVPVTRNFLEIHLFWAGKGTCCIPAQGYYGPAISALSATPTVLGVLALAGICMWRQKRRKLLLEQQELYSIVGRPNVFVYGELRTATENFSSNNLLGEGGYGSVYKGKLADGRVVAVKQLSETSHQGKQQFAAEIETISRVQHRNLVKLYGCCLEGNKPLLVYEYLENGSLDKALFGNGKLNLDWPTRFEICLGIARGLAYLHEESSIRVVHRDIKASNVLLDANLNPKISDFGLAKLYDDKKTHVSTKVAGTFGYLAPEYAMRGHMTEKVDVFAFGVVILETLAGRPNFDNTLDEDKVYILEWVWQLYEENHPLDMLDPKLAEFNSDEVLRAIHVALLCTQGSPHQRPSMSRAVSILAGDVEVGQVANKPSYITEWQIKGGNTSSFMSSNVSGQSGVAPRSASHASSQFLGSVIEEGRWNLYANDDIGWLSLFVILDVLSRIRNRRGSASINQEDRSNRRRERRKGENITTRQ

SEQ ID NO: 45682 - protein, 286 aa, Zea mays
  Coding DNA Sequence Number=SeqID_3903
  Homolog annotation: Hit_ID=Q6IEM8; Match level="QueryCoverage=49%, HitCoverage=26%, E-value=3e-25, Identity=57%"; Hit description=WRKY transcription factor 53
MVSLSSKQHFASEKSDDLVSATPCKKSWTLIYAYLFTCSPPPTPQRHRRPWPHRSWGWPPSPRGLFHRGATRGGGVGVPKFKSVQPPSLPISPPPMSPSSYFSIPPGLSPAELLDSPVPLHSSSNFFASPTTGAIPAQRFDWKQAADLIASQSQQDDSKTTAELRSAAPSTTSPSTRPPCPRRPRCSLPSRSSSNSKSKQRPWVGATGRGAQIGGDLGAVVEGRRGRGGGMGGRNGEGRGEDYRRWGGRIGSGGGRGGGCGRGGELTRRRRRSGGRDEGCRGSGAD

SEQ ID NO: 45683 - protein, 416 aa, Zea mays
  Coding DNA Sequence Number=SeqID_3904
  Homolog annotation: Hit_ID=Q10RX2; Match level="QueryCoverage=28%, HitCoverage=26%, E-value=2e-57, Identity=76%"; Hit description =Cysteinyl-tRNA synthetase, putative, expressed
  Pfam annotation: Domain name=CBFB_NFYA; Domain location=147-202; Score=51.9; E_value=2.2e-12; Accession=PF02045.6; Description=CCAAT -binding transcription factor (CBF-BNF-YA) subunit B
  Pfam annotation: Domain name=tRNA-synt_1e; Domain location=66-290; Score=-13.7; E_value=3.2e-14; Accession=PF01406.10; Description=tRNA synthetases class I (C)
  Pfam module annotation: Pfam domain module=CBFB_NFYA::tRNA-synt_1e; Domain location=147-202::66-290
MWESIRNSANSMRATCHKGNGYEMKHSGHKVCDWDSSSKSDRSHQEASAASESSPNEHTSTQSDNDEDHGKDNQDTMKPVLSLGKEGSAFLAPKLHYSPSFACIPYTVDAYYSGVGVLTGYAPHAIVHPQQNDTTNTPGMLPVEPAEEPIYVNAKQYHAILRRRQTRAKLEAQNKMVKNRKAAKEGEPFWDSPWGRGRPGWHIECSAMSAHYLGHVFDIHGGGKDLIFPHHENELAQSQAAYPESEVKCWMHNGFVNKDDKKMAKSDNNFSRLEISDVNHSDQALEIASDRVYYIYQILNTSFVKAFTCLKEDVGLLLLHHHRYHATCWNATAGQEHGDEQAQDDSKWRRIPTFDDWNLRDDMPVTQYLQAGTSSSLCRRQRRTTTRICSRCPCVPCQALQLQEVLGANSGLRGPQ

SEQ ID NO: 45684 - protein, 514 aa, Zea mays
  Coding DNA Sequence Number=SeqID_3905
  Gene Ontology: Mol. function=helicase activity; Cellular component =mitochondrion; Biological process=embryonic development ending in seed dormancy
  Homolog annotation: Hit_ID=Q9LUD6; Match level="QueryCoverage=64%, HitCoverage=82%, E-value=5e-86, Identity=44%"; Hit description =Similarity to salt-inducible protein
  Pfam annotation: Domain name=PPR; Domain location=221-255; Score =12.5; E_value=0.25; Accession=PF01535.11; Description=PPR repeat
  Pfam annotation: Domain name=PPR; Domain location=292-326; Score=8.9; E_value=0.65; Accession=PF01535.11; Description=PPR repeat
  Pfam annotation: Domain name=PPR; Domain location=327-361; Score =45.8; E_value=1.4e-10; Accession=PF01535.11; Description=PPR repeat
  Pfam annotation: Domain name=PPR; Domain location=362-396; Score =33.5; E_value=7.3e-07; Accession=PF01535.11; Description=PPR repeat
  Pfam annotation: Domain name=PPR; Domain location=397-431; Score =49.5; E_value=1.2e-11; Accession=PF01535.11; Description=PPR repeat
  Pfam annotation: Domain name=PPR; Domain location=432-466; Score =22.6; E_value=0.0015; Accession=PF01535.11; Description=PPR repeat
  Pfam annotation: Domain name=PPR; Domain location=467-501; Score =20.1; E_value=0.008; Accession=PF01535.11; Description=PPR repeat
  Pfam module annotation: Pfam domain module=PPR::PPR::PPR::PPR::PPR::PP R::PPR; Domain location=221-255::292-326::327-361::362-396::397 -431::432-466::467-501
MAGGVGADMRRSCGYGCEEGTQPAAAADYSSSSQRRRYIFRYLGTGDGGGAQARARARSDGVSGFPLRLLPVASRPCLRSSAHQPVTLCACPPLSLLPPPVDRQTEPGLGVCAARGLRAAGGGGGGFSSRCSSKAVAGLWERLCPKAKIMSRALARHPVPPFLKLRSTVCDDGYWMGRLDHKDWLAPNEVLKVFVNIRDTSLINSVFKKACSRRDYKPSEALYSLMIDRLACARRFSDVEELLSKARTEKLRFSDEFFYRLIKMYGNVAEHPQKAMDTLFAMPGYNCWPSTKTFNYVLHMLVCKRQYEVVHEVYSSAPRLGVTLDTCSFNILVKGLCQYGKFDEAISLLHEMPKQGCQPNATTYSTFMHFLCQRSQVDKAFELFERMRKQDIAADTVVYNILISGLCRDERVTEAFDLFKSMTSEGCCPNSGTYQVLLDGLISLGKLFEAKSLVCTMSTEGVRPSFQSYKLLIDGLCSDDCVGDAHLVLKQMVGQGFVPRMGTWTKLLTSMFKF

SEQ ID NO: 45685 - protein, 81 aa, Zea mays
  Coding DNA Sequence Number=SeqID_3906
MWVFSNSRGRALAATKTLVDVVVLLLPPLERFRGRVRGGDEFLSVSFLAADFTCQQPQGAEARLGPLGLGSCQQRGGHLDH

SEQ ID NO: 45686 - protein, 66 aa, Zea mays
  Coding DNA Sequence Number=SeqID_3907
MAMRCSFKAIWFYLYMTIYQFGQTFNIGKFFSYNVIRLARKLPTGDLQAIKKSDDGEESLDEDDLT

SEQ ID NO: 45687 - protein, 191 aa, Zea mays
  Coding DNA Sequence Number=SeqID_3908
  Gene Ontology: Mol. function=intracellular transporter activity; Cellular component=endoplasmic reticulum; Biological process=ER to Golgi vesicle-mediated transport
  Homolog annotation: Hit_ID=Q9SPE5; Match level="QueryCoverage=97%, HitCoverage=74%, E-value=8e-73, Identity=63%"; Hit description=Gamma- soluble NSF attachment protein
  Pfam annotation: Domain name=TPR_2; Domain location=123-156; Score =8.3; E_value=3.6; Accession=PF07719.7; Description=Tetratricopeptide repeat
  Pfam annotation: Domain name=TPR_2; Domain location=44-77; Score=2.1; E_value=19; Accession=PF07719.7; Description=Tetratricopeptide repeat
  Pfam annotation: Domain name=TPR_2; Domain location=83-116; Score =9.9; E_value=2.3; Accession=PF07719.7; Description=Tetratricopeptide repeat
  Pfam module annotation: Pfam domain module=TPR_2::TPR_2::TPR_2; Domain location=123-156::44-77::83-116
MAGSSDPDKLMSKADKLKDNEKAKDAFEKASKGQEMISSPWDAAKHMESAAALAKELGRWNEVSDFYHRASELYRECGRPQPASDALAKGASALEEKSPEEAIKMYDEACSVLEEDGKEQMAFDLYRAAAALYIKMEKYSDAAALFLRLGSAADKCNAINSQCKAYLSAIIIYLYTHDFQQAQKCYNDCSE

SEQ ID NO: 45688 - protein, 173 aa, Zea mays
  Coding DNA Sequence Number=SeqID_3909
  Subcellular localization annotation: CTP_CleavageSite=36; ConfidenceScore=5.23e-01
MAGERREGGAVVKSSDSSAVFFAVAFCAPSPGLSVTAAAAMVEMRQRRKPLVLASTQALLDSLPGDRPPPPPQKPVRLKAGVLRFPSGGGGAEFGELASFVGIPAPALRRLAVVTGTPVSPLVSVICFELESRAGKFDRLGFVAGTLLGAFRKSFGRSVELEGCTGLSFTTRL

SEQ ID NO: 45689 - protein, 921 aa, Zea mays
  Coding DNA Sequence Number=SeqID_3910
  Gene Ontology: Mol. function=nucleoside-triphosphatase activity; Cellular component=membrane; Biological process=peroxisome organization and biogenesis
  Homolog annotation: Hit_ID=Q93X55; Match level="QueryCoverage=83%, HitCoverage=85%, E-value=0.0, Identity=48%"; Hit description=Peroxin 6
  Pfam annotation: Domain name=AAA; Domain location=272-487; Score =12.7; E_value=2.3e-05; Accession=PF00004.19; Description=ATPase family associated with various cellular activities (AAA)
  Pfam annotation: Domain name=AAA; Domain location=585-761; Score =253.2; E_value=5.5e-73; Accession=PF00004.19; Description=ATPase family associated with various cellular activities (AAA)
  Pfam annotation: Domain name=AAA_2; Domain location=581-701; Score= -42.9; E_value=0.017; Accession=PF07724.4; Description=ATPase family associated with various
  Pfam annotation: Domain name=AAA_3; Domain location=585-703; Score= -22.0; E_value=0.084; Accession=PF07726.2; Description=ATPase family associated with various
  Pfam annotation: Domain name=AAA_5; Domain location=585-709; Score= -8.5; E_value=0.0079; Accession=PF07728.4; Description=ATPase family associated with various cel
  Pfam module annotation: Pfam domain module=AAA::AAA::AAA_2::AAA _3::AAA_5; Domain location=272-487::585-761::581-701::585-703::585-709
MALASSSLTQFRCNFSCLDATDLQVLVKNTDNNVGRIVKAVLFGNPSLDKSCSEHTDQVVSASLSGHAMGFLPCRTFPAIGFTSMDEDVGYVSPLLAFNLGLHVSCLKLLIQREGQPFKFCSRAEEIDATASSGSDLSLHLDLLPCPQVPKYALHLRVSVVRIPDCGVLASLKIYSSFGGSEYQDMVDQALNEYFKFDRFLARGDVFGIQNSWKCGSSCCLACNKQDNKLNPRNMIYFKVTGMEPSDEPILRVNCNETALVLGGAASAAIPPYSFFASSGCGKRTVVRHVANHLGLHVVECSCHDLMTSSESGAPAALATAFKEAQKYSPCIILLRHFDAIGNASSNEGPQSEQSGIASNIESVIKQYIGQRWVAKDSLPGKDVNGSSYLVEPECVSSLQIILVATADSSEGMQQSIRRCFRYEIDMKTMNEEQRNELISETLQGIPKVADESICDKFIKDLAAQTSGFMPRDILALVADAGVSFAHKIAAGKDSKAISKHTEVLPESSSATQNEEHHFSKEDIMSSLERAKKRNRAALGTPKVPNVKWEDVGGLEDVKKVILDTIQLPLMYKHLFSSKLRKRSGVLLYGPPGTGKTLLAKAVATECSLNFLSVKGPELINMYVGESEKNVRDIFEKARSARPCVIFFDELDSLAPARGSSADSGGVMDRVVSQDLFIIGATNRPDLLDSALLRPGRFDKLLYVGVNTEASYRERILKAQTRKYKLHKNVSLLSVAQRCPPNFTGADIYALCADAWFHAAKRSVETFEIDPSRSNEASAEEVIVEIDDFITAGTQHLHILFYGTVRTELNYPHAYDDTFLVIVTQIGCMGTILAAKKDESVFSDPTYNVSVLFGKRDEPLLLACARQLIEHIRKSFRELLELLLAAGSAWWRCRLRRPTALWELEAGSLTWKMMGLTVMGL

SEQ ID NO: 45690 - protein, 83 aa, Zea mays
  Coding DNA Sequence Number=SeqID_3911
MAAREFGYGQKGVLRIPCAAAELRRAVAADRHRWTGRARRSTARLWLYTGDTYDADRHRHVQKLINSLLAVRIYGLGPIKIFK

SEQ ID NO: 45691 - protein, 359 aa, Zea mays
  Coding DNA Sequence Number=SeqID_3912
  Homolog annotation: Hit_ID=Q10HP1; Match level="QueryCoverage=50%, HitCoverage=83%, E-value=1e-80, Identity=82%"; Hit description=DAG protein, chloroplast, putative, expressed
MESEYQTIMTIRIRGSNTGLSSLPDQRCAVDGLINAVQQSMTGWVRLYETRQPSQCRQELMCDYWGARYAMLGIAAWGHRHRHHVLETLTASGSPPLGAPPRPAAVSIGAPYRLPRTMAAASATRRGLSSLLLSPSSRALRRRLGPLAAAAASPHVAPWPLLAPRGARTASSGGSGHSPLNDPSPNWSNRPPKETILLDGCDYEHWLIVMEFPTDPKPSEEEMVAAYVKTLAAVLGSEEEAKKKIYSVCTSTYTGFGALISEELSYKVKGLPGVLWVLPDSYLDVPNKDYGGDLFVDGKVIHRPQFRFNERQQTTRDCPSGAEGDDAKRPFDDAATEAAMSTGGRYTESGAALKPCWQE

SEQ ID NO: 45692 - protein, 64 aa, Zea mays
  Coding DNA Sequence Number=SeqID_3913
MASCREDWATGDDSAGRTGRGLAAEGWAHGGVRGDLGGTVTATASEGRGGIVDERRDGATMGQK

SEQ ID NO: 45693 - protein, 120 aa, Zea mays
  Coding DNA Sequence Number=SeqID_3914
  Homolog annotation: Hit_ID=Q53KA2; Match level="QueryCoverage=23%, HitCoverage=2%, E-value=8e-08, Identity=75%"; Hit description=ABC transporter-like protein
MARLFICQTLIAEFLFQSELLAAEINYMAKRETELQNDHMNLRTKDPRTCPTGHRPEDQPAGHQEHALQAAQVPVLLPRILLPRTTKFLAILNRLIYRTAASKNNKEQGMSYWASDLMIH

SEQ ID NO: 45694 - protein, 344 aa, Zea mays
  Coding DNA Sequence Number=SeqID_3915
  Subcellular localization annotation: CTP_CleavageSite=97; ConfidenceScore=5.07e-01
GLESRSLEFGSSEVSFSPPLPYFLSPPPPLLLPRATLLPVRLAPPTAAPSPDPRSHPRPAPGEPSRPRRDSPSPRPASCPAPAPAPVPRPPRALPAPASRAPASLAPGGLPGRLASLSPRRPSVVPCSPPRRAPLLGEPPLHRPCARGPLCARARHQRLGPCPHALAPPSPPSPRPHPAKPALAAASPRQAHSRHEPLLPGRAPAATPSLRAPAAVPGPAPWSPALGHAPARTRAPATRVPRACMRTIRLKSPRNSQEKSLSNSWLVEANIRAEDEAIGQFEAQGAIEDSSSDDDEDLGIPPPPHVPPHSHDHEADSSNAAPAAPPAIDPDVDAILQSLTQQQA

SEQ ID NO: 45695 - protein, 43 aa, Zea mays
  Coding DNA Sequence Number=SeqID_3916
MEGAETVVASKEENRRLSGTVIRGTPRLLISAGNPHQHKAAKA

SEQ ID NO: 45696 - protein, 52 aa, Zea mays
  Coding DNA Sequence Number=SeqID_3917
MDGSSQEWEGQRWERGEGMENVGECPGAVYIDGGGREGSDRKGQWQSSYRVV

SEQ ID NO: 45697 - protein, 126 aa, Zea mays
  Coding DNA Sequence Number=SeqID_3918
MRHHSPGSSGAEDEDGIYRCWSTPAPPSNSRGRGWKLRRDYGMVPVAFSKGENHWVAGDFSLKTSRHALPWVVLTSTTQLVLDPKDFIVYRFGARMFKSTSCIADPAVIKGYWFTLDQDLIWALDH

SEQ ID NO: 45698 - protein, 188 aa, Zea mays
  Coding DNA Sequence Number=SeqID_3919
MVPLVDKRKKVEARAKGPTRRTKAWEKFTEEMAKTCAESMEIMTLLILWEASTRMLEVTKGKSSKKKTKALLWLVDPRRDTKALRIGAVGGSKSKAAKAAAAVATMPPPAAPYASVVPPSPSKASQDEVANAAEAGAGGRTLPDLSGDDYVLEGADAGLGSSQLVMTQARLRASVDPWAQLCAVVDEG

SEQ ID NO: 45699 - protein, 168 aa, Zea mays
  Coding DNA Sequence Number=SeqID_3920
MDRAEPRTRMGSAVVSPCLHRRRILEAEAGSFAATLGCCTWPSPKGRTIGSPVISRQSHQRMPYRGSSSPRQPGCGSWGSKSRAAAGEDLATARFHRGQKTVPPGHNILDPKDFIVYRFGARMFKSTPCIADPAVVKGYRFTLDQDLIWALDHLTDGPGWPIPFAVAN

SEQ ID NO: 45700 - protein, 487 aa, Zea mays
  Coding DNA Sequence Number=SeqID_3921
  Homolog annotation: Hit_ID=Q1X871; Match level="QueryCoverage=51%, HitCoverage=48%, E-value=3e-08, Identity=24%"; Hit description =Fanconi anemia E
  Subcellular localization annotation: CTP_CleavageSite=58; ConfidenceScore=5.53e-01
MEQWLALFRHLLTSPAANAAAFSSSPSSGDCPSAPPSAAALLRLLLSPAPTLPASDPTAAILFQTLPPFLQSQALSFLVSSAGLLDPHLLRTLAARVLSAPHGLYGLWVLRGARHLIDGLPEEEGVPGVASEEFIDGFHDPPTWLQEAGARAHPVLPWLPVDCRSLMGSGCGTRAGRGGEYGSDGIGLENLVLVQNEDVEMQEAGRVLPPQAPPLEDSIMQRVVALQKEIVTVESVLAARRVAKDLQDLCVESRNAAGVLSLVQPWEADDDTLRVLLSNLVLEEDGVDGKGPALVLCSVFLPQLLELQRPASSVLLSTALGLCKRHPAAALEAVLFPLVLRKGGLNVPQCDVLTRIIKECMHPLQVTAFCHRLLSGKEQERKPICMPQHMENIGTHLVWTESLFALFYNILSQDIYLTPSTVNELISVIDDRASEFPRSLKFGNFLLCFLSKCWHECKHQRVLLERAAKRTNTFLTKAILAKLRPAS

SEQ ID NO: 45701 - protein, 275 aa, Zea mays
  Coding DNA Sequence Number=SeqID_3922
  Gene Ontology: Mol. function=catalytic activity; Cellular component =intracellular; Biological process=metabolic process
  Homolog annotation: Hit_ID=Q6K1V9; Match level="QueryCoverage=60%, HitCoverage=17%, E-value=1e-45, Identity=56%"; Hit description =Ribosomal protein-like
MDVLSRSIIFRENDDLDDYLLLMIREYRRRKNAPSNRHRGSIFGHKVYDRNREEGARKLHRDYFDENPTYPEKIFRRRFRMSSRLFNRIAKAVEEHDHYFVQKKNAAGVRGFSCRQKVTAALRQLAYGVPADYVDEYVRIGESTAIESLRKFVRAIVHLFRNEYLRAPNVDDTTRLLNIAECRGFPGPWDVGTTAEGRVAGRRPIAAAPDFDEGAGRFPAGGTPSGIAYKLGGCAEYDKGNTAQGEMRRRRWIGSSKNWRWWIGSSKNWRRWIRY

SEQ ID NO: 45702 - protein, 98 aa, Zea mays
  Coding DNA Sequence Number=SeqID_3923
MAARHLNRTVCQWRGEEEDESRRQPVTGFGGTPWSSGDWRPAVGGGGWCLTACCVPPPAGSVLRERLRATEVEDRQRPTAPAGLLAALLHGPPMSHKF

SEQ ID NO: 45703 - protein, 386 aa, Zea mays
  Coding DNA Sequence Number=SeqID_3924
  Gene Ontology: Mol. function=starch synthase activity; Cellular component=chloroplast; Biological process=glucan biosynthetic process
  Homolog annotation: Hit_ID=Q6Z1D6; Match level="QueryCoverage=91%, HitCoverage=19%, E-value=1e-164, Identity=78%"; Hit description =Putative starch synthase DULL1
  Pfam annotation: Domain name=Glyco_transf_5; Domain location=12-174; Score=85.4; E_value=1.8e-22; Accession=PF08323.2; Description=Starch synthase catalytic domain
  Pfam annotation: Domain name=Glycos_transf_1; Domain location=217 -384; Score=-25.6; E_value=0.09; Accession=PF00534.10; Description =Glycosyl transferases group 1
  Pfam module annotation: Pfam domain module=Glyco_transf_5::Glycos _transf_1; Domain location=12-174::217-384
MSALLCCDNVNAIYLRINPVQHQPTKHVEVKDLHYQQSFASGGTEVKVWFGKVEDLPVYFLEPQNGMFWVGCVYGKNDESRFGFFCHSALEFLLQKGSSPDIIHCHDWSSAPVAWLYKEQYALNGMGNGRIVFTIHNLEFGAHHIGKAMAHCDKATTVSDTYSKEVAGHGAIAPHYYKFHGIRNGIDPDIWDPYTDRFIPVHYTSENVLEGKSAAKKALQQMLGLQQTDSPVVGIITRLTVQKGIHLIKHAMHRALERNGQVVLLGSAPDHRIQGDFTNLASKLHGEYHGRVKLCLTYDEPLSHLIYAGADFILVPSIFEPCGLTQLIAMRYGSIPIVRKTGGLYDTVFDVDDDKDRAQAQGLEPNGFSFEGADSSGVDYALDRQV

SEQ ID NO: 45704 - protein, 773 aa, Zea mays
  Coding DNA Sequence Number=SeqID_3925
  Gene Ontology: Mol. function=RNA-directed DNA polymerase activity; Cellular component=intracellular; Biological process=RNA-dependent DNA replication
  Homolog annotation: Hit_ID=UPI00004C1731; Match level="QueryCoverage =94%, HitCoverage=52%, E-value=0.0, Identity=83%"; Hit description =UPI00004C1731 related cluster
  Pfam annotation: Domain name=RnaseH; Domain location=312-439; Score =15.3; E_value=2.2e-06; Accession=PF00075.14; Description=RNase H
  Pfam annotation: Domain name=rve; Domain location=486-644; Score =89.2; E_value=1.3e-23; Accession=PF00665.16; Description=Integrase core domain
  Pfam module annotation: Pfam domain module=RnaseH::rve; Domain location=312-439::486-644
MSFGLRNAGAMYQRCMNHVFGEHIGRTVEVYVDDIVVKTRKASDLLSDLKATFRCLKAKGVRLNPEKCVFGVPRGMLLGFIVSERGIEANPEKITVITSMGPIKDLKGVQRVMGCLVALSRFISRLGERGLPLYRLLRKVECFTWTPETEEALGNLKALLTKAPILVPPAAGEALLVYVAATTQVVSATIVVERQEEGHALPVQRLVYFVSEVLSKTKIRYPQVQKLLYAVILTRRKLRHYFESHPVTVVSSFPLGEIIQCRETSSRIAKWAVEIMGETISFAPRRAIKSQVLADFVAEWVDTQLPTAPIQPELWTMFFDGSLMKTGAGAGLLFISPLGKHIRYVLRLHFPASNNVAEYEALVNGLRIAIELGVRRLDARGDSQLVIDQVMKNSHCRDLKMETYCDEVRRLETKFYGLELNHIARRYNETADELAKIASGRTTVPPDVFSRDMHQPSVKIDDTPEPEATSAQSEVPSAQPEVSSAQPEAPSTRPEASSVQPEKAPGGYTHLLVTIDKFSKWIEVRPLNSIRSEQAVAFFTNIIHRFSVPNSIITDNGTQFIGRKFLDFCEDHHIRVDWAAVAHPMSNGQVERANGMILQGLKPRIYNDLNKFGKRWMKELPSVVWSLRTTPSRATGFTPFFLVYGAEAVLPTDLEYGSPRTRAYSDQSNQASQEDSLDQLEEARDKALLHSARYEQSLRCYHARGVRSRDLQVGDLVLRLRQDARGRHKLTPPWEGPFVIAKVLKPGTNKLANSQGEVYGNAWNIQQLRRFYP

SEQ ID NO: 45705 - protein, 399 aa, Zea mays
  Coding DNA Sequence Number=SeqID_3926
  Gene Ontology: Mol. function=kinase activity; Cellular component =nucleus; Biological process=regulation of transcription, DNA -dependent
  Homolog annotation: Hit_ID=Q6Z1C1; Match level="QueryCoverage=93%, HitCoverage=83%, E-value=5e-88, Identity=47%"; Hit description =Putative RNA-binding protein Virp1a
  Pfam annotation: Domain name=Bromodomain; Domain location=105-194; Score=74.8; E_value=2.8e-19; Accession=PF00439.15; Description =Bromodomain
MASSLLAGRGGGHHHNWGETRAPLEPIPPNPSPSQPHPRADGSKSKPRAAAGYVKFRPASLGHREARALRDRLAVELGQVRALLSRIDTWQQQGPPPRAVLRGAMRKRCGQILSRLRKDKRSVWFNAPVEVERLGLHDYHAVIKRPMDLGTVKEGLAAGRYASHDDFAADVRLTFTNALRYNPVGHEVHTFAGALLAYFERMYKEALVCLEEERKRLEPPRPVAAELPPPPAVEPVEAKAKTRAGNVRMRKPKAREPNKREMSLEEKNMLRLGLVSLPEEKMHNVLQIVRKRNNNPEMLGDEIELDIDEMDVETQWELDRFVTNFNKALKKSQRAAMLNGGVADVTSTAVAEDDTAPVGDVPTLVGNDDAVMTIGAARLFLVAASGRVNWALMLVIVSV

SEQ ID NO: 45706 - protein, 732 aa, Zea mays
  Coding DNA Sequence Number=SeqID_3927
  Gene Ontology: Mol. function=nucleic acid binding; Cellular component= intracellular; Biological process=DNA integration
  Homolog annotation: Hit_ID=Q8W0X4; Match level="QueryCoverage=99%, HitCoverage=48%, E-value=0.0, Identity=91%"; Hit description =Putative pol protein
  Pfam annotation: Domain name=RVT_2; Domain location=316-571; Score =526.1; E_value=3.7e-155; Accession=PF07727.4; Description=Reverse transcriptase (RNA-dependent
  Pfam annotation: Domain name=rve; Domain location=2-103; Score=51.0; E_value=4.1e-12; Accession=PF00665.16; Description=Integrase core domain
  Pfam module annotation: Pfam domain module=RVT_2::rve; Domain location=316-571::2-103
MSYFELKVKKIRSDNGSEFKNLQVEEYLEEEGIKHEFFAPYTPQQNGVVERKNRTLIDMARTMLGEFKTPERFWSEAVNTACHAINRVNLHRLLKKTSYELLTGNKPNVSYFRVFGSKCYILVKKGRNSKFAPKAVEGFLLGYDSNTKAYRVFNKSSGLVEVSSDVVFDETNGSPREQVVDLDDVDEEDVPTAAIRTMAIGDVRPQEQKEQDQPSSSTMVHPPTQDDEHVHQEEARDQGGAQDDHVMEEEAQPAPPTQVRATIQRNHPGDQILGDISKGVTTHSRLVNFCEHYSFVSSIEPFRVEEALLDPNWVLAMQEELNNFKRNEVWTLVPRPKQNVVGTKWVFRNKQDEHVVVKRNKARLVAKGYAQVAGLDFEETFAPVARLESIRILLAYAAHHSFRLFQMDVKSAFLNGPIKEEVYVEQPPGFEDERYPDHVCKLSKALYGLKQAPRAWYECLRDFLIANAFKVGKADPTLFTKTCDGDLFVCQIYVDDIIFGSTNQKSCEEFSRVMTHKFKMSMMGELNYFLGFQVKQLKDGTFISQTKYTQDLLRRFGMKDAKPAKTPMGTEGHVNLNKGDSDYAGCKVDRKSTSGTCQFLGRSLVSWSSKKQTSVALSTAEAEYVATGQCCTQLLWMRQTLRDFGYNLSKVPLLCDNESAIRMADNPVEHNRTKHIDIRHHFLRDHQQKGDIEVFYVSTENQLVDIFTKPLDEKTFCRLRSELNVLDSRNLD

SEQ ID NO: 45707 - protein, 128 aa, Zea mays
  Coding DNA Sequence Number=SeqID_3928
MAWKNSGDGVDEQESEEHVHNARKKRLRMSLELLGVGRRRLRSMARFLARLHLGAARRCLGSARVGFKGAVLRGVTTGDSWRVGAGVQTQRGCRDTCRALGPAGSWARAWLGVQGRQRLGGSRVGGSA

SEQ ID NO: 45708 - protein, 1131 aa, Zea mays
  Coding DNA Sequence Number=SeqID_3929
  Homolog annotation: Hit_ID=Q2QV87; Match level="QueryCoverage=87%, HitCoverage=87%, E-value=0.0, Identity=43%"; Hit description =Expressed protein
MPPSPSPRRSLKEVCHARGHSFVSILPAKSKDDELTLFKDMQKYERDNFLLEATEDFDESISKLRYFRDSKIGVNIAARGENRDLLNTDGERNDYDWLLTPPETPLFRSLDDEDQHIGMAHRGRAQVKPISISRSSTMENTQSFNRRSASPSRLSPAPRSCSSTMLTRIRSSNSSSRCSPALHLQPAAPSRRSSTPPASRTSTPPQRSPSPASRRLSTGSSDPILNRKGGTSPVKTSNRPSSPKLQGWQSSDPGFSFDAPPNLRTSLSDRLVSHSRGGSPSSFSGLDMNWRGRRQSVSPTPSRRASSSHSNDRFSSYSKASATSSAEDDLESMQSVLISYSSSPALRKNMPVIKSRTIASPKKPSKSFSPSSGPKRSFDSAVWLMDRRKAPQDKFRPLLSSVPCTTFGVGKGDNVHSSMLSHNSSLTTSSNLSSDHGVTFSPCMGNEQGPSDIAGDCEATPTYSLSATQSSPKSPSTEKNAESNMEDLNMERSRIVETSGNVASGSKAGLTKMATCTRCEKLFNAIKDDGEIDLCEECGLVDEVLFVNPKIETLEEHQKDHKTRISKPCVALEAPHITPDHGEDTKKSFLDSQLLNDEPPADCLQKCPQSQSTIYTTDRMLLMLHGENVNENLRPDDVGNSSQGSSLDISSHQCNINNYQQSELASVVECDNLRDQTANHQNEVFQRLPGSVYQSIEFASNTLTYDSCCKQGSAGHSNLKVENTEGAGISVLLQKSSSNKWPVIEGRPLAGTNIICSEPYYTRDGVTMLKRTIGWDSSSASSIDQGSTRQSGHLEHLKSSNRHDFEKSQISSTMSCKSIASMSDMSSSNCSVSVCPRDDAIADTGFLTDNSESSAPRSIICTEELNESCKYTLSSAIECWSAAQAIVNVGIGSTEDVVIQKLCTGRMVHKDYTSDNSCSSDTETCSNISLSLAPEERCIQKIEEGTSVGTPEHPDGDCGISNYQMQHETIPEADRLDDGCASVISEEANIMGLPGNALCVDNVEVAECKGVEPLSRCSASGTYGRCSCRGHRRRQAAQVAGAGVACGKARGASGGARMMVSQKEGAIDEDSDTIEEVVEEVADAEDDAVKLSWTRRAPGLARLETCRRRMHVPMLPVSHVLGRRPQPSVSV

SEQ ID NO: 45709 - protein, 102 aa, Zea mays
  Coding DNA Sequence Number=SeqID_3930
MTSIFYQGIQNHARSRLILVDAPTQRTLPAISTIELPVETSQDSFPLVTIGAVSLAPDSPVALQELAIGLLFPGAPGSPAVWHRTVRCATGQSGALSRMVRK

SEQ ID NO: 45710 - protein, 276 aa, Zea mays
  Coding DNA Sequence Number=SeqID_3931
  Gene Ontology: Mol. function=catalytic activity; Cellular component =intracellular; Biological process=metabolic process
  Homolog annotation: Hit_ID=Q6K1V9; Match level="QueryCoverage=59%, HitCoverage=17%, E-value=1e-45, Identity=56%"; Hit description =Ribosomal protein-like
KMDVLSRSIIFRENDDLDDYLLLMIREYRRRKNAPSNRHRGSIFGHKVYDRNREEGARKLHRDYFDENPTYPEKIFRRRFRMSSRLFNRIAKAVEEHDHYFVQKKNAAGVRGFSCRQKVTAALRQLAYGVPADYVDEYVRIGESTAIESLRKFVRAIVHLFRNEYLRAPNVDDTTRLLNIAECRGFPGPWDVGTTAEGRVAGRRPIAAAPDFDEGAGRFPAGGTPSGIAYKLGGCAEYDKGNTAQGEMRRRRWIGSSKNWRWWIGSSKNWRRWIRY

SEQ ID NO: 45711 - protein, 343 aa, Zea mays
  Coding DNA Sequence Number=SeqID_3932
  Gene Ontology: Mol. function=starch synthase activity; Cellular component=chloroplast; Biological process=glucan biosynthetic process
  Homolog annotation: Hit_ID=Q9LKW6; Match level="QueryCoverage=93%, HitCoverage=19%, E-value=1e-146, Identity=77%"; Hit description =Starch synthase III
  Pfam annotation: Domain name=Glyco_transf_5; Domain location=1-131; Score=24.7; E_value=7.4e-13; Accession=PF08323.2; Description=Starch synthase catalytic domain
  Pfam annotation: Domain name=Glycos_transf_1; Domain location=174 -341; Score=-25.6; E_value=0.09; Accession=PF00534.10; Description =Glycosyl transferases group 1
  Pfam module annotation: Pfam domain module=Glyco_transf_5::Glycos _transf_1; Domain location=1-131::174-341
MGMQYFTLYFTGILDFQFSLAEYMFWVGCVYGKNDESRFGFFCHSALEFLLQKGSSPDIIHCHDWSSAPVAWLYKEQYALNGMGNGRIVFTIHNLEFGAHHIGKAMAHCDKATTVSDTYSKEVAGHGAIAPHYYKFHGIRNGIDPDIWDPYTDRFIPVHYTSENVLEGKSAAKKALQQMLGLQQTDSPVVGIITRLTVQKGIHLIKHAMHRALERNGQVVLLGSAPDHRIQGDFTNLASKLHGEYHGRVKLCLTYDEPLSHLIYAGADFILVPSIFEPCGLTQLIAMRYGSIPIVRKTGGLYDTVFDVDDDKDRAQAQGLEPNGFSFEGADSSGVDYALDRQV

SEQ ID NO: 45712 - protein, 109 aa, Zea mays
  Coding DNA Sequence Number=SeqID_3933
MVDLQRLMNPDPHANVGRHNKPKKLNVARVVPQDYMCTKDDVKLIEYIKSLSRKNVMVNIDNAWLNRNDMECLFHVDMQLIGEVLSAYIHSIWDEEHLLHSSGGRRTKL

SEQ ID NO: 45713 - protein, 88 aa, Zea mays
  Coding DNA Sequence Number=SeqID_3934
  Subcellular localization annotation: CTP_CleavageSite=51; ConfidenceScore=5.29e-01
MLAHFPLLICALSRAPLPPSLALRVHPGSSVAAHRSPSPVPRPPLSLGRVRCLGDSGHFPEYLSVRTYLGSDTQDNNATMRVEWDALR

SEQ ID NO: 45714 - protein, 378 aa, Zea mays
  Coding DNA Sequence Number=SeqID_3935
MQASIAVAEALDAGKLTPQPVADAADFAVAGLAVAIGTLAVTASFMLVSFDARAGQGQLRRILDLGPSLCGPRLLLVFFVGLLAAAEMLRLPFFHGAMLPPRHHVMPCLAYPLVAHGIAEPGLLACVLLLLRVSVGGARLPASALVVPLACLPFLTVHVLVLATPATVAAYPGQLAHAADGIGHCAYPTYAATLLLALIAVLALALTSVWDMHQYTSPTVGLVGFVAVAVAAEATLVILVMLPHFRVAIILKHAGNERVLQEDISTFSMKQWRIHSEGKEESQPPSRLQPFARKAENRSCPPGASAQQPQAPPPFAQAPSQPAVLFHRSTSRQRPAACGLRPRRSPSGPAVEARTQEPRTQPPSGKSFGPSGSASALA

SEQ ID NO: 45715 - protein, 41 aa, Zea mays
  Coding DNA Sequence Number=SeqID_3936
MRLMVFGIDSSDGLPCKVKNSTQIVFLSQLMKLLDPLYCIE

SEQ ID NO: 45716 - protein, 485 aa, Zea mays
  Coding DNA Sequence Number=SeqID_3937
  Gene Ontology: Mol. function=nucleic acid binding; Cellular component= nucleus
  Homolog annotation: Hit_ID=Q5JLB5; Match level="QueryCoverage=67%, HitCoverage=82%, E-value=1e-169, Identity=76%"; Hit description=Zinc finger CCCH domain-containing protein ZFN-like 2
  Pfam annotation: Domain name=zf-CCCH; Domain location=173-199; Score =42.2; E_value=1.8e-09; Accession=PF00642.15; Description=Zinc finger C-x8-C-x5-C-x3-H type (and similar)
  Pfam annotation: Domain name=zf-CCCH; Domain location=219-245; Score =39.4; E_value=1.2e-08; Accession=PF00642.15; Description=Zinc finger C-x8-C-x5-C-x3-H type (and similar)
  Pfam annotation: Domain name=zf-CCCH; Domain location=371-397; Score =46.8; E_value=7.3e-11; Accession=PF00642.15; Description=Zinc finger C-x8-C-x5-C-x3-H type (and similar)
  Pfam annotation: Domain name=zf-CCCH; Domain location=417-443; Score =48.2; E_value=2.8e-11; Accession=PF00642.15; Description=Zinc finger C-x8-C-x5-C-x3-H type (and similar)
  Pfam module annotation: Pfam domain module=zf-CCCH::zf-CCCH::zf -CCCH::zf-CCCH; Domain location=173-199::219-245::371-397::417-443
  Subcellular localization annotation: CTP_CleavageSite=18; ConfidenceScore=5.03e-01
MDDAGRAPPPAPAAVTVSATAAPAPTPPSATAAADKSSLDPDALYEEGMWQQMAMNSGATMQPGSYPERPDVLPLSDILVVMYISSIVMDHVWLEGILSLNQRPLEFFPFCCVSVASRNKMHSKKQCLKSKAVVMCLCNHSWYLILFSWENMQKIPVPAIASARMKGEYPERVGQPECQYYLKTGTCKFGPTCKFHHPREKAGIAGRVQLNTLGYPLLPNEKECAYYLKTGQCKYANTCKFHHPELFNVVPSSRGSPIYTSVHSSASAGPQSYTGTMSSWTFPRASFIPSPRWQSPSNYAPMVVPHGLVQVPSWNSYPGQLQSPGAQQTYGSSQQGEASAGNQGMLSPYRSSSFPVPQYALQRDNVFPERPDEPECQYYMKTGDCKFGAVCKFHHPRVRSQPPPDCVLSPMGLPIRPGEELCKFYSRYGICKFGANCKFDHPTMAAPMGVYAYGFSGSASVAPASTNAPMTRHLLGSPSGSGYMS

SEQ ID NO: 45717 - protein, 201 aa, Zea mays
  Coding DNA Sequence Number=SeqID_3938
  Homolog annotation: Hit_ID=Q5JLB5; Match level="QueryCoverage=12%, HitCoverage=5%, E-value=9e-09, Identity=100%"; Hit description=Zinc finger CCCH domain-containing protein ZFN-like 2
MNPPHPEPGLPRRHHHMVHLHLDPRHHHHVHIHLRCCHHHHHGTHLLAPAPPARLNDNQQRHPAPVLFPNTYPNPSAAPGQPEPPRAAVREDVEDLDPEPGLLHAEEEEEEDEEPVFVLTDEWAEFFAKSEAKRRLGLRCPHSHGGGWASENGGVRMIKFTVGAELADAITRIEFAKFFTLKTIGQDNQDGRPFNEVYQKD

SEQ ID NO: 45718 - protein, 142 aa, Zea mays
  Coding DNA Sequence Number=SeqID_3939
MDMSRMETLYHAEKEKTEALILELAVSSPTQKGAAITPLLCKTNNLPLILTQEDQDMLRGVKYRKFVPGISKSQEFDTKSSHSKQSSLSKSSGHSRASGSRKDLFPALNFTKGRPKRKKFFSFRRKEYFNEAPDTQLTDLLL

SEQ ID NO: 45719 - protein, 66 aa, Zea mays
  Coding DNA Sequence Number=SeqID_3940
MAYSTTRPVHRRPMQPGHGRGVRSGQPLGLAVRCRGYWFPSWICGGLAPPMLPIGGISNLDGMMGI

SEQ ID NO: 45720 - protein, 86 aa, Zea mays
  Coding DNA Sequence Number=SeqID_3941
MGKPVPSLLMLLLSQVTALVPTITGMGDYVSGRVRGYVGYQVHSDNQSPWIVVHRSTSLDYECGYNQFLTSCECWKNHSTSTEIPN

SEQ ID NO: 45721 - protein, 243 aa, Zea mays
  Coding DNA Sequence Number=SeqID_3942
  Homolog annotation: Hit_ID=Q9FKU2; Match level="QueryCoverage=63%, HitCoverage=52%, E-value=6e-08, Identity=27%"; Hit description =Genomic DNA, chromosome 5, P1 clone:MDA7
  Pfam annotation: Domain name=Hin1; Domain location=27-172; Score =77.6; E_value=3.8e-20; Accession=PF07320.4; Description=Harpin -induced protein 1 (Hin1)
MTVCLTCCCILFWLLVVCVGLAILVVYLLYHPRAPRIHVSTATLNAGYIDELPPPHLGKALNSDLYVLAAIYNPNTKVDVVLRYMQLDLYFQGRLIGTQAVWPPLYEKPGDSALRSVHLVVSEVVMTQEDAEVWKNVTTGGGLVEMHLQGKFHVQLNFGRWLPFSLRDTSLAPPETHISLLKPCNISLDRQPCCDIIPSYWHWDTSVSGKNRHQVKMAIVEPRQGKKICGQMVANKMYMTEFS

SEQ ID NO: 45722 - protein, 158 aa, Zea mays
  Coding DNA Sequence Number=SeqID_3943
  Homolog annotation: Hit_ID=Q94F81; Match level="QueryCoverage=25%, HitCoverage=14%, E-value=6e-09, Identity=75%"; Hit description=HD2 type histone deacetylase HDA106
  Subcellular localization annotation: CTP_CleavageSite=44; ConfidenceScore=5.24e-01
MPTLHANMAEMPSAAMAKARSLLRRTDRGSSSIPTRKRKKRRPGCEEEQQRHEARKTRGRSGTEFSAAKFPVKDVIQNADETSGDDDDFTDSESEMSLEDDSSSEEQTPSPNKTDVVVGKKRAIEAEAPSGKKAKSEQSAQKTAQLGSHACKSCNKYV

SEQ ID NO: 45723 - protein, 167 aa, Zea mays
  Coding DNA Sequence Number=SeqID_3944
  Gene Ontology: Mol. function=nucleic acid binding; Cellular component= intracellular; Biological process=chromatin modification
  Homolog annotation: Hit_ID=Q7EZ27; Match level="QueryCoverage=73%, HitCoverage=56%, E-value=3e-16, Identity=37%"; Hit description =Putative zinc finger transcription factor ZFP2
  Pfam annotation: Domain name=zf-C2H2; Domain location=103-125; Score =6.2; E_value=2.2; Accession=PF00096.16; Description=Zinc finger, C2H2 type
  Pfam annotation: Domain name=zf-C2H2; Domain location=56-78; Score =20.6; E_value=0.0056; Accession=PF00096.16; Description=Zinc finger, C2H2 type
  Pfam module annotation: Pfam domain module=zf-C2H2::zf-C2H2; Domain location=103-125::56-78
MALTKPPTATDDDQAERKYLTSCLIMLSCGLRDGDMANATREAGATPTSANMADDYKCSLCDKVFASYQALGGHKTSHRKPAAAPSDEASSSGTAYEKEEKLHQCSLCPRTFSWWQALGSHIQDPEIAIGDSQRQQHPGRERRLSDRGGEELQLGQDVRHDARNAVM

SEQ ID NO: 45724 - protein, 123 aa, Zea mays
  Coding DNA Sequence Number=SeqID_3945
MEPGTGESLTQASFAGVTPYPSAATDDFEVRLRFRDMYVVVVCDLRVCGVARVCSLGEDRGNDLLVARWPELHLPMVAAWKELQLGTRCRRRLIPRTKLTSYEAWDEVSALFATWATQVETAA

SEQ ID NO: 45725 - protein, 172 aa, Zea mays
  Coding DNA Sequence Number=SeqID_3946
  Gene Ontology: Mol. function=carboxyl- and carbamoyltransferase activity; Cellular component=ornithine carbamoyltransferase complex; Biological process=amino acid metabolic process
  Homolog annotation: Hit_ID=Q8SA97; Match level="QueryCoverage=95%, HitCoverage=23%, E-value=1e-26, Identity=48%"; Hit description =Ornithine carbamoyltransferase
MAPPVDVVGPCPRLGEVEAPPRSRSSLSFKVEVESEPPGWTRQCPSAEARAKSEPWGRAKRSSSSFGAEPESEPWGQAERSSSSSGAEPESEPWGRAERSSSSFGAEPESEPWGRAERSGAVLLSDRSVERRSDCGHFDSVDWRACVRIKLCADGGYQLRFRSLEAPEASEE

SEQ ID NO: 45726 - protein, 133 aa, Zea mays
  Coding DNA Sequence Number=SeqID_3947
  Gene Ontology: Cellular component=integral to membrane
  Homolog annotation: Hit_ID=Q69L84; Match level="QueryCoverage=55%, HitCoverage=26%, E-value=1e-32, Identity=86%"; Hit description =Putative transmembrane protein
  Pfam annotation: Domain name=DUF1084; Domain location=1-133; Score= -27.2; E_value=2.4e-08; Accession=PF06454.2; Description=Protein of unknown function (DUF1084)
  Subcellular localization annotation: CTP_CleavageSite=74; ConfidenceScore=5.26e-01
MSNVVLTFNASHAVVISSQSDHHTEYQGLFCSSSNNMTVPNCSHLHNFYSDVAFFITSQVGTVTAICVTCFLIRCVVVALSAFDADVSLEVLDHPVLDFFYYMFAEILPSALVLFVLRKLPPKRVSAQYHPIN

SEQ ID NO: 45727 - protein, 239 aa, Zea mays
  Coding DNA Sequence Number=SeqID_3948
  Gene Ontology: Cellular component=integral to membrane
  Homolog annotation: Hit_ID=Q69L84; Match level="QueryCoverage=82%, HitCoverage=69%, E-value=3e-82, Identity=76%"; Hit description =Putative transmembrane protein
  Pfam annotation: Domain name=DUF1084; Domain location=18-237; Score =415.5; E_value=7.6e-122; Accession=PF06454.2; Description=Protein of unknown function (DUF1084)
MRRELASPLATAAAATAGASSSAAASLRGWWDDVNESPQWQDGAFFSLAAAYALVSAVALIQLVRIQRRVPEFGWTTQKVFHLMNFLVNGVRALVFGFHVHVFLLRTKVYKLVLLDLPGLLFFSTYTLLVLFWAEIYHQARSLPTDKLRPAYIAVNAIIYVVQLCIWIYLGINDNAAVELASKIFIVAVSFVALLGFSVYGGRLFVLLRRFPIESKGRQKKLYEVTATLQQLPLLFNCP

SEQ ID NO: 45728 - protein, 505 aa, Zea mays
  Coding DNA Sequence Number=SeqID_3949
  Gene Ontology: Mol. function=nucleic acid binding; Cellular component= ribonucleoprotein complex; Biological process=RNA processing
  Homolog annotation: Hit_ID=Q69L83; Match level="QueryCoverage=87%, HitCoverage=90%, E-value=1e-127, Identity=60%"; Hit description =Putative RNA-binding protein homolog
  Pfam annotation: Domain name=La; Domain location=150-209; Score =104.8; E_value=2.6e-28; Accession=PF05383.7; Description=La domain
  Pfam annotation: Domain name=PAM2; Domain location=49-66; Score=18.8; E_value=0.02; Accession=PF07145.5; Description=Ataxin-2 C-terminal region
  Pfam annotation: Domain name=RRM_1; Domain location=240-322; Score =13.1; E_value=0.0087; Accession=PF00076.12; Description=RNA recognition motif. (a.k.a. RRM, RBD, or
  Pfam module annotation: Pfam domain module=La::PAM2::RRM_1; Domain location=150-209::49-66::240-322
  Subcellular localization annotation: CTP_CleavageSite=77; ConfidenceScore=5.28e-01
MAQAQPQAQATSEVVVKCATKAMTNDKDRAAIASASAAASQGSVGSGAATPFKFNVHAPEFVPMSPAAASPMASPMSAPAGGYYSPFMQMQPGLAPADWSFFHEHEPVFFMPDLAHAKFGAATATAAGAAGSNSAQAKGAATTTDVAQKIVKQVEYQFSDINLVANEFLLKIMNKDTEGYVPLSVIASWKKIKSLGATNQMLVKALRTSTKLNVSDDGKKVRRRQAFTEKHKEELQSRMIIAENLPEDSSRNSLEKIFGVVGSVKNIKICHPQEPNTARASKSDTLVSNKMHALVEYETSQQAEKAVEKLNDERNWRKGLRVRTVLRRSPKSVTRLKRADLDHFVASDDDSPHSSSDSPTADCSSPAEAAAAHAHVYHQQQQEEQQNGGNCKHKGSWARGRAGTATKLHITAPQSPQSAPAGMAGGHFDPTSPRPSSSSQKQCPSSPGSRQLPASASASSHKCPFSPRQAQHHPPQGPRMPDGTRGFTMGRGKPTSPPAAAAVLV

SEQ ID NO: 45729 - protein, 588 aa, Zea mays
  Coding DNA Sequence Number=SeqID_3950
  Subcellular localization annotation: CTP_CleavageSite=76; ConfidenceScore=5.24e-01
MTPSSATARRRTSQRRRPCNAASASARALAAGLWRLRHAERMMAAGASPPPAAQTKPQKLMGRSRTRPSHHLCRCRCTSSSTRNGILDKIDACLDGSSSMEKATKWDANHSHLRGRRARGLRLDNIFFASTSAMSSPLLLLMEAELEKARGEARELEEERRLMTKRLDRFLRRLAEEKAAWKSRVRDKARHAVAALQDELGAERRHRRQLEQANARLLRDLAEARAAAKQQAQSYEMERKARELMEDACSELTREVEEDQAEVELLRGECLRMREEMEEERRMLQMAEVWREERVQMKLSDAKLALENKYTHLNRLQAEMEAFLRNKGDESASHSAVLREARLISDAAAATSSDHFRRKESERQHAAAAERERDGDGRRNSRPASPASSKSSDMLQSVSPATDLFLAKADGGDGDDDDDDDMFADGGSSADLEMASCSWVGTSDRSASVANGNGGVTTEARSSGASRRSTKNTALIRRLWRSAITESRKKTGRTAADWSPSYSDRRMSSVTAEGPPPPLPPPAVAGEQCSSSGGSGLPQRVGGGGGRLKQSLKEKLMEARMDDQKPLPSVCKNLDDEQHYQNSSDHKF

SEQ ID NO: 45730 - protein, 585 aa, Zea mays
  Coding DNA Sequence Number=SeqID_3951
  Homolog annotation: Hit_ID=Q6EJ97; Match level="QueryCoverage=44%, HitCoverage=43%, E-value=8e-43, Identity=38%"; Hit description =Isoprene synthase
  Pfam annotation: Domain name=Terpene_synth; Domain location=292-462; Score=11.0; E_value=5.8e-08; Accession=PF01397.11; Description =Terpene synthase, N-terminal domain
  Pfam annotation: Domain name=Terpene_synth_C; Domain location=473 -585; Score=2.1; E_value=1.3e-05; Accession=PF03936.6; Description =Terpene synthase family, metal binding domain
  Pfam module annotation: Pfam domain module=Terpene_synth::Terpene _synth_C; Domain location=292-462::473-585
MNQLMDPLPLDPYIEAALSPVSSMVQLVVSAEEEVITNSPNRCLMICFNLLQRCFSWDATPHRQPWPPPHIHVEFWCGSAALRPIPWPPPTSLDSLYTKEFYCRVQFPGFGRTFVFNAEILKRVGRTSEAKDSSRVALKSSWGTLGCSHEEAAELASLLDGYQLMRAASASDRVSSLKNYHHTLGLCDHWAEKRFNGHKCVQFHAIEEVCEFLCMEGSPEQKPDSNEQLILTLYCTAWSGAHAAATFCLRDSIQQQIRQQDVLVLGDQTSFVKEITTIVCRAGSGIGFPGVANMLMLRQRQQQQEDDSDSTASRRLLVRAIHQLQSLGIAYHFQQEIRCILLPSMQQQQPLDLHSAALLFRMLRGLGIPASTDMLMSALLREESGKLAADSDGLLALYQASYLAFPGETELDQARAFAVAKLAGRRDDGSADSCPSSTHLSLPLHWTAPRLQAMWSLKDQVERGRPDHQDQAIILQLAQLDFNLVQALHRRELAEVTRWWKETSRLGEHAFARDRVVECFFCAACIAPEPRLAECREVLAKAGALIVHLDDIYDVYGTPDELRAFTDAVASWEHSATRTTHSPST

SEQ ID NO: 45731 - protein, 487 aa, Zea mays
  Coding DNA Sequence Number=SeqID_3952
  Homolog annotation: Hit_ID=P16081; Match level="QueryCoverage=15%, HitCoverage=9%, E-value=6e-11, Identity=46%"; Hit description =Nitrate reductase [NADH] 1
MESPPALQLHMRRRRSANYQPTTWDYDSICSLLRQDPLGSQQQEEQAAAAAAVTEAESVQASLKDSDSMEAAIQDILDALARTEARLTDVLAGRYDEQSSRERTSSFHGSTSPSSVVNTQYRGEACLPPLVHDDAAKVASLDSGNNFGLQQTATVLAFLGSDEMHSSTTLLAGSVFDRFIPPLYDDDRYTTPQSSVDTIANPDDDLLQELDGLDEDAASANAADDDSGVVHVHAPLNPGATLDSNVDTSGSPRYPCLPEGATLFRRNPDEKIHDGLIGGISQHIWSIADEVEHTTSGLIQTFIVVDRHFDLIIKARIKHLDPLPPLVPNTDAEEEEVLTTTSTRCSRMGLNRGAYSVPNLLVVCIVGAPKSNEYSTNRVLHRTRLQRRPLQHLTVDPVSAVHGGGGYELSHSEAGSVPATATLPNPCKKIRCQLVNRTRLARDVLSLHMSTHDFDCASVDMKSYLRAYTPTSMEDEVGHFDLDTKEY

SEQ ID NO: 45732 - protein, 101 aa, Zea mays
  Coding DNA Sequence Number=SeqID_3953
MEEEDPKRAAIYSGRMKKERKCHVASRGGKTGWKLLVLPTMQRLNKAATAIQLALTACTKSTSRNQWTGLDRQTANQNNYRKPEASRPQHAQPLFPAPILI

SEQ ID NO: 45733 - protein, 159 aa, Zea mays
  Coding DNA Sequence Number=SeqID_3954
  Gene Ontology: Mol. function=DNA binding; Biological process =regulation of transcription
  Homolog annotation: Hit_ID=Q6Z869; Match level="QueryCoverage=86%, HitCoverage=30%, E-value=7e-19, Identity=43%"; Hit description=Myb family transcription factor-like
MPDWLQSVQLWSNQQQPSASPPQHQDELLLPCRPVALNACRKPGGAFQPFEKEEKKKDKEEKQRAELELELPLPAAASSAVVGDSCDRAGATDTDTAENNKASSTKGGKDKEAQLSSQAPSRKARRCWAPELHCRFLQALFLYKPDIHKINRFYIKTTV

SEQ ID NO: 45734 - protein, 91 aa, Zea mays
  Coding DNA Sequence Number=SeqID_3955
  Homolog annotation: Hit_ID=Q1SF96; Match level="QueryCoverage=86%, HitCoverage=12%, E-value=2e-27, Identity=72%"; Hit description =Membrane attack complex component/perforin/complement C9
MTVELIEVTKKMLELLNQKSSVQGKVLSGYFNALFELSGAWLTDAKETKHLAFDGYFISLYNLHLKASPLVLRDEVKKAVPSKWDPIALSW

SEQ ID NO: 45735 - protein, 165 aa, Zea mays
  Coding DNA Sequence Number=SeqID_3956
  Gene Ontology: Mol. function=DNA binding; Biological process =regulation of transcription
  Homolog annotation: Hit_ID=Q10S98; Match level="QueryCoverage=41%, HitCoverage=17%, E-value=3e-21, Identity=71%"; Hit description=Myb -like DNA-binding domain, SHAQKYF class family protein, expressed
  Pfam annotation: Domain name=Myb_DNA-binding; Domain location=19-70; Score=38.3; E_value=2.6e-08; Accession=PF00249.21; Description=Myb -like DNA-binding domain
MRGFERKGVRQYNRSEVPRMRWTEELHRQFVEAVECLGGQDEATPKRILQLMGAKGVSISHIKSHLQMYRASISSSSSTHHQPSLQKSTSTAASNNKRVFFTREDCASQEGNAPASDKNIYTTTVRGCGQYSSPYQIPSLQQVFRCWEQKRGRVAWNSDVLTTEK

SEQ ID NO: 45736 - protein, 134 aa, Zea mays
  Coding DNA Sequence Number=SeqID_3957
MPERNCANSEGLRYSPRSPKVATQTGDPSEQLSKVQAMVIHEFDDAEHLTAPNRSCRRCTTPLRKEDDDVTPPVRDTGTCDHKDVSLINAPYLLAMECGQPVWVVGGRVLLGRSTNIRSSGPTRVHWAQVPYPI

SEQ ID NO: 45737 - protein, 105 aa, Zea mays
  Coding DNA Sequence Number=SeqID_3958
MGEGLSMATKEGAGVHTMGRSKEDAGQRAGASFREERRPPGNRKQGRALGWMPSRSWKPWKVRPSAMGREEGGTTVGSCREGARLGERRAGKRVACVKGAAAMAR

SEQ ID NO: 45738 - protein, 170 aa, Zea mays
  Coding DNA Sequence Number=SeqID_3959
  Gene Ontology: Cellular component=membrane
  Homolog annotation: Hit_ID=Q6ZLQ0; Match level="QueryCoverage=50%, HitCoverage=12%, E-value=4e-31, Identity=76%"; Hit description =Putative ERD4 protein
  Subcellular localization annotation: CTP_CleavageSite=49; ConfidenceScore=5.11e-01
MDLALFITSVLTSFVIFVAPVLLFTWLSRRPRNAPVYYPNLLLRGLDLWAGRGRGTRSPVGWLRDAISASEPDVIAAAVYLVFLSSETEAGEDDGKPSRMRQMMSMLMWTAEVLRMAPAKKNMPPISIEFLRPIVLIKWPNTRLERMAARYNEETNKIFMDGFSSIVNKI

SEQ ID NO: 45739 - protein, 352 aa, Zea mays
  Coding DNA Sequence Number=SeqID_3960
MMTNIVIIVDTFSGANHYNENRRRRPLQRRGRYAARGRTPSNRSFSASLLDTIYHSLDDGDGADVVVDAARGSVEEKATATATAQFWWANKAAPKPCRQSSSTADRDRRRREAGVARPRHSGSGYALSSDSSAASYSSLSCSSGSTVGIESTCRRHGPPPPRVSLSEESVATDAEEATPPPPKSKPKKARPCFPVARIRPRASVPPPSSGPQPPSSPATFACALKALFSSARLQRKPKAPAPARTTPPPKISQPPRMSTMSAAKAADAPQPSEPTTVRLHPEAEASVVRRRVEELVRGLEELEEDEEGSDASSDLFELESLRGAGADELPVYGTTSLVANCAIAQGQTRPDI

SEQ ID NO: 45740 - protein, 681 aa, Zea mays
  Coding DNA Sequence Number=SeqID_3961
  Gene Ontology: Mol. function=RNA-directed DNA polymerase activity; Cellular component=nucleus; Biological process=RNA-dependent DNA replication
  Homolog annotation: Hit_ID=Q8S472; Match level="QueryCoverage=99%, HitCoverage=63%, E-value=0.0, Identity=78%"; Hit description =Putative gypsy-type retrotransposon RIRE2
  Pfam annotation: Domain name=Retrotrans_gag; Domain location=170-261; Score=72.7; E_value=1.2e-18; Accession=PF03732.7; Description =Retrotransposon gag protein
MPEPSTTEGRRIQGELKNLLEDAAVRRAESSASRRQGYPSEHRVATSRFMWEASVHTGRTRHTAPAAPGRLGNEHHPRNRRAHLDERVRRGYHPRRGGCYDSGEDRSPSPEPPDPQAFSRAIRRAPFPTWFRTPTTITKYSGETRPELWLADYRLACQLGGTDDDNLINRYLPLFLSDTARAWLEHLPPGQISNWDDLVQAFVGNFQGTYVRPGNSWDLRSCRQQPGESLRDYIRRFSKQRTELPNVTDSDVIDAFLASTTCRDLVSKLGRKTPTRASELMDIATKFASGQEAVEAIFRKDKQPQGRQPEDVPEASTQRGTKKKGKKKSQAKRDAADADLVAAAEYKNPQKPPGCANLFDKMLKEPCPYHQGPVKHTLEECVMLRRHFHKVGPPVEGGRAHNNDKEDHEAEEFPEVRDYFMIYGGQVANASARHRKQERREVCSIKVATPVYLDWSDKPITFDHGDHLDRVPSPGKYPLVVNPVIGNVRLAKVLMDGGSSLNIIYAETLGLLRIDLSSVRAGAAPFHGIIPGKRVQPLGQLDLPVCFGTPSNFRRETLMFEVVGFRGTYHAVLGRPCYAKFMAIPNYTYLKLKMSGPNGVIAVGPTYRHAYECDVKCVEYAEALAESEALIADLESLSKEAPDVKRHAGNFEPAETVKFVPLDPSNDASKQIRIGNELDPK

SEQ ID NO: 45741 - protein, 89 aa, Zea mays
  Coding DNA Sequence Number=SeqID_3962
MAAGARPWRPVWPPGVLRSPPPRENDLVEEPEELAGEAPVQQSVAMRLMVLGIGSGNGCPHCNHCSGEDEAVEGDFEEFQDYDVTEPPK

SEQ ID NO: 45742 - protein, 86 aa, Zea mays
  Coding DNA Sequence Number=SeqID_3963
MEEREFQKHMESTRLATQVSIASPSSSQGLPTSARANQEETDMAGTDEGYPWSSLMLQDQYRCVSLLVVSEWGQYNFGECELCFCL

SEQ ID NO: 45743 - protein, 44 aa, Zea mays
  Coding DNA Sequence Number=SeqID_3964
MRSFTCLHVSGRQIFSSTALSSCSGDHTSERDAKKAGEKTKFFR

SEQ ID NO: 45744 - protein, 139 aa, Zea mays
  Coding DNA Sequence Number=SeqID_3965
MAVSPVLLPGNRWGRLICLGMEFLATSLAYGIIFYTFSGGYGCLSNLAVYLATGLDSRVGPYLSRAEHTVESRALHVLTTFCGFHPLELSTHPIGLFPAEKEDDPMWKDRVEHAKDALRGEAMSQLMGLVESTKITLDN

SEQ ID NO: 45745 - protein, 119 aa, Zea mays
  Coding DNA Sequence Number=SeqID_3966
MTQIGARPWGEERRRERARVAWRQPGTMGGARSRREGSHGDKQQQPRTVMNTNSGNWETAEEKVRTRVQNSRGDISRSMGWRVKSGAKQQADNSGKVRIAGKQTSLEHYLQNAIEPSNA

SEQ ID NO: 45746 - protein, 34 aa, Zea mays
  Coding DNA Sequence Number=SeqID_3967
MEIRVGTKVEPASKLRARELRLSSRKRNQLKEEN

SEQ ID NO: 45747 - protein, 183 aa, Zea mays
  Coding DNA Sequence Number=SeqID_3968
MTVSNLPEPELSDCIKLSCSNSITMKEKLSDSYIRCTKFYEIINHAINLVKNKLTIGKVFGEGLRSTVVSSREERSRSSIRLRGWAQGLGRRLESGARGIGLVAVGLRCAGGFRSCSFLSAGSASCMGIQAAGRSAGAAWRAGQHGSAAGARAWKQGEGERRAGGEEGEGGMGADSWLGRGGG

SEQ ID NO: 45748 - protein, 101 aa, Zea mays
  Coding DNA Sequence Number=SeqID_3969
  Subcellular localization annotation: CTP_CleavageSite=41; ConfidenceScore=5.52e-01
MAAANLEASKGLVSNYRQLGYSPSSAISSSRVLPLQTMDTSANTTTSVLGDMSTRITSTYIHRETDLTTNEVAAGASKADSHQMMSTEQTIEVPSEISMLL

SEQ ID NO: 45749 - protein, 107 aa, Zea mays
  Coding DNA Sequence Number=SeqID_3970
  Subcellular localization annotation: CTP_CleavageSite=60; ConfidenceScore=5.11e-01
MAAHPRSGGDGGYARHGGRPAAALTQDRATTTLSKRTSGGGAPQVRWRQRLRELWYASAVAVALRERDGGGSGRRAHGGASQRRTHDVGSLEARAPEWHLLASHLRQ

SEQ ID NO: 45750 - protein, 81 aa, Zea mays
  Coding DNA Sequence Number=SeqID_3971
MSSLSKWVGCLTFIKLKGLNPVMADASSISVMFPEYAARNRSVKPIFKQTKEIDDHLGWVFPAAANEEPGAGPTLSTAPGA

SEQ ID NO: 45751 - protein, 81 aa, Zea mays
  Coding DNA Sequence Number=SeqID_3972
MKFVAAYLHVALAGNPIPPLRNHHHFGVSVWFRSQLGWCTDKIGFSLADVEILKSVLRNSLTSPGEEFWNAAIECADGISA

SEQ ID NO: 45752 - protein, 32 aa, Zea mays
  Coding DNA Sequence Number=SeqID_3973
MVQTNLSIDKINAMLKAFDHTRGVILIPVHVA

SEQ ID NO: 45753 - protein, 67 aa, Zea mays
  Coding DNA Sequence Number=SeqID_3974
MDPGSGNLFTPCFLENLGRERDVGEERDFLLATTAMMHGELARLGTPRSRLRNGRRCRLRFAANKAE

SEQ ID NO: 45754 - protein, 435 aa, Zea mays
  Coding DNA Sequence Number=SeqID_3975
  Gene Ontology: Mol. function=translation release factor activity, codon specific; Cellular component=cytoplasm; Biological process =translational termination
  Homolog annotation: Hit_ID=Q2R068; Match level="QueryCoverage=74%, HitCoverage=78%, E-value=1e-168, Identity=91%"; Hit description =Peptide chain release factor 1, putative, expressed
  Pfam annotation: Domain name=PCRF; Domain location=112-227; Score =205.1; E_value=1.7e-58; Accession=PF03462.9; Description=PCRF domain
  Pfam annotation: Domain name=RF-1; Domain location=256-364; Score =190.4; E_value=4.5e-54; Accession=PF00472.11; Description=Peptidyl -tRNA hydrolase domain
  Pfam module annotation: Pfam domain module=PCRF::RF-1; Domain location=112-227::256-364
  Subcellular localization annotation: CTP_CleavageSite=43; ConfidenceScore=5.41e-01
MEAFLAGLFRAPPRAVPAPRGTPLPSLPLFYGRRRRRPSSSVVCMAEPYLIAKLDSAEKAWKEMSVRLADPDIVSDPSEYQKIAQSVSELDQVVTTYRQFKDCERQLEATKALEKENEGDPDMLEMIASELEALSNQLAELEEKMKFLLLPSDPLDSRNILLEVRAGAGGDEAGIWAGDLVRMYQRYCERNNWKFKPVSCSEAEMGGYKTYVMEVKGKQVYSKLKFESGVHRVQRVPLTEAMGRVHTSTATVAIMPEADEVDVVIDPKDIELKTARSGGAGGQNVNKVETAVDLIHKPTGIRIFCTEERSQLQNRERAFQLLRAKLYEIKLREQQESLRNQRKLQVGTGARSEKIRTYNYKIQRNPNPNELAAQRWCQSIYTYMDNIGTHILTFPALTSGAPQTMRLEEELKVGADELKSPSSRSVVRMRMLCLE

SEQ ID NO: 45755 - protein, 443 aa, Zea mays
  Coding DNA Sequence Number=SeqID_3976
  Gene Ontology: Mol. function=structural constituent of ribosome; Cellular component=intracellular; Biological process=translation
  Homolog annotation: Hit_ID=Q2R069; Match level="QueryCoverage=98%, HitCoverage=68%, E-value=1e-162, Identity=69%"; Hit description =Kelch motif family protein, expressed
  Pfam annotation: Domain name=Kelch_1; Domain location=2-48; Score =14.0; E_value=0.1; Accession=PF01344.15; Description=Kelch motif
  Pfam annotation: Domain name=Kelch_1; Domain location=59-109; Score =4.7; E_value=1.1; Accession=PF01344.15; Description=Kelch motif
  Pfam module annotation: Pfam domain module=Kelch_1::Kelch_1; Domain location=2-48::59-109
VSRSGHTVIRAGPVLILFGGEDAKGKKLHDLHMFDLKSLTWLPLNYKVHCFRGAGPSPRSNHVAALYDDRVLLIFGGQSKSKTLNDIHALDFETIAEKFDIFILLDGMVKGQNPWASSITSSRRWKQEKTWSVCVVPPSSSITTKKGFSMVPLYYRDKIVLVAFGGNKKEPSDKVEVLVVLQNEHCFSWRSAPEVEPLLYDESPPGSRELADHLSSCAPPYPTSSAARSGLAATAENSCGRKPLPDSLLRTSNLGGSSLRRQFRQEEECSSLAQKLQKPIDDDRYKDAADECSEHQPPSATNPKPRNDARRSSPEVVVDAKARRLLGRSSSDMNNHQDARVAALVRRNVALEEQLSAALASKDEAEKNLSLVIDSKDGLEKRLAEKDREVEALREKATGLELAQEEANSLSNTVHADNVRLEREVAFLKAVMDETQKARELLS

SEQ ID NO: 45756 - protein, 161 aa, Zea mays
  Coding DNA Sequence Number=SeqID_3977
  Subcellular localization annotation: CTP_CleavageSite=34; ConfidenceScore=5.01e-01
MGKAAQPPSPGLWAPRSRCLSSNQLLCSVCPICVSELVIAVCIEPVPPIVLAVTEKVKSKVEMQTLVDDAGIFTEVKSKVEMQTPVDDAGIFTEAFSTRKWCFASGSSQTLSVVSTIKLLAETLRASFALPEGARLRTSQRKLFGVPPDSPMHTRQVLFTA

SEQ ID NO: 45757 - protein, 693 aa, Zea mays
  Coding DNA Sequence Number=SeqID_3978
  Gene Ontology: Mol. function=protein binding; Cellular component =cellulose and pectin-containing cell wall
  Homolog annotation: Hit_ID=Q9SPM0; Match level="QueryCoverage=52%, HitCoverage=35%, E-value=0.0, Identity=94%"; Hit description =Extensin-like protein
  Pfam annotation: Domain name=LRRNT_2; Domain location=79-118; Score =15.6; E_value=0.02; Accession=PF08263.3; Description=Leucine rich repeat N-terminal domain
  Pfam annotation: Domain name=LRR_1; Domain location=152-174; Score =1.9; E_value=1.3e+02; Accession=PF00560.23; Description=Leucine Rich Repeat
  Pfam annotation: Domain name=LRR_1; Domain location=176-198; Score =2.1; E_value=1.1e+02; Accession=PF00560.23; Description=Leucine Rich Repeat
  Pfam annotation: Domain name=LRR_1; Domain location=200-219; Score =13.3; E_value=0.88; Accession=PF00560.23; Description=Leucine Rich Repeat
  Pfam annotation: Domain name=LRR_1; Domain location=223-245; Score =1.9; E_value=1.2e+02; Accession=PF00560.23; Description=Leucine Rich Repeat
  Pfam annotation: Domain name=LRR_1; Domain location=246-268; Score =1.6; E_value=1.4e+02; Accession=PF00560.23; Description=Leucine Rich Repeat
  Pfam annotation: Domain name=LRR_1; Domain location=295-317; Score =11.2; E_value=2.3; Accession=PF00560.23; Description=Leucine Rich Repeat
  Pfam annotation: Domain name=LRR_1; Domain location=319-341; Score =10.0; E_value=3.8; Accession=PF00560.23; Description=Leucine Rich Repeat
  Pfam module annotation: Pfam domain module=LRRNT_2::LRR_1::LRR_1::LRR_ 1::LRR_1::LRR_1::LRR_1::LRR_1; Domain location=79-118::152-174::176 -198::200-219::223-245::246-268::295-317::319-341
MDPPLRLLPDGRLMAALLLLAACMSACSVQAVTSAEASYIARRQLLAMKEAGAGEGGDLPADFEFDDRVGAANFPNPRLRRAYIALQAWRRAFYSDPKGYTANWVGEDVCKYNGVICTEALDDPKVTVVAGIDLNGADIAGYLPPELGLLTDLAFFHINTNRFCGIIPKSMSRLSLLHEFDVSNNRFVGVFPYVCLEMVSLKYLDLRFNDFEGELPPALFDKDLDAIFVNTNRFVGYIPENLGNSTASVIVFANNAFVGCIPKSIGRMVKTLDEIIFLNNKLDGCLPLEMGLLVNTTVIDVSGNMLVGTIPEQLSNIAKLEQLDVSRNVFTGIVHESICELPALVNFSFAFNFFNSEAVVCMPSDKALVNFDDRDNCLGALRPAQKTALQATIVVGAREAAFGAREACCTCAHANPAYTAGCVARTASRTFAGACTCTHADADPSFTAGGRIHSNATCTREVTASDLATGITWCSTASGTTSSCLLPACNTCEIVSSASSSCFTTTCEDSFSSGPCCFTTTRSTSELSTASSKITSSTSTGGLTTTTHEVASPTSASGITSAADEITSTTSTSGLSTPTVEISTTASTGGLSTSIGEISTTAGTSGLSTSTGEISTTAGSSELTFSSGEVATTTSSWEINPTSRRGKTNTTYSSKVIAASREVSTSTHSDYLSTTTREAYSSINSIQTTTISS

SEQ ID NO: 45758 - protein, 426 aa, Zea mays
  Coding DNA Sequence Number=SeqID_3979
MSLNEGGGRASAGGAVESSSFFGGAEVTAGGGELTGAGGGSDGGFTGAGGGELIGAGGGGDFIGGGGELTGAGGGGDFTGGGSELIGAGGGGDLAGGGGELIGAGGGEDFTSGGGKLTGAGGGDDFGADGGELTGAGGGEDFSSGGGELTGVGGGDDFGAGGGELTGVGGGEDFTSGGGELTGVGGGNDLGAGGGELTSVGGGEDFTTGGGELTGVGGGDGLGVGGGKLTGAGGGEDFTTGGGELTGAGGGNGLGVGGGELTGVGGGEDFTTGGGELTGAGGGNGLGVGGGELTGAGGGEDFTTGGGELTGAGGGDDLGVGGGELTVAGGGEVFSTIGGDDGDLGSDGGELIGASGGDDFSASGGELTCAGGLDDLGVIGGELSGAGGGEDFTVVGGELTELGGDDGLGSNGGELTGAGGGEVFST

SEQ ID NO: 45759 - protein, 143 aa, Zea mays
  Coding DNA Sequence Number=SeqID_3980
METQGRQTLHQSSPPLGIGTCLNHQLGVGILPSPDVLHPWHVDVTIRFRSHELMPLNFGYDITLLPPGYPANIVYHFYQLGRAQSHLLPWPIVGYLNTMIWFRSLEFMTLGISHNKTLPPAGTHFGLRPPFSLAKRSETKPAP

SEQ ID NO: 45760 - protein, 140 aa, Zea mays
  Coding DNA Sequence Number=SeqID_3981
MAKNFGSKTVQIAMNAVVTSHLLVCLYSTAAFENKSPTDLLSLCAELKDEVVATCGRVVPLQEEVRLLNERVALLDQEAMKSLRERVVPLEEEVRRLKESLLAVAGERDESRRQAIDAFLRADSLARDLETERSAQSLRA

SEQ ID NO: 45761 - protein, 271 aa, Zea mays
  Coding DNA Sequence Number=SeqID_3982
  Gene Ontology: Mol. function=oxidoreductase activity; Cellular component=mitochondrion; Biological process=metabolic process
  Homolog annotation: Hit_ID=Q2R092; Match level="QueryCoverage=98%, HitCoverage=98%, E-value=2e-98, Identity=67%"; Hit description =Tropinone reductase, putative
  Pfam annotation: Domain name=Epimerase; Domain location=19-265; Score= -62.7; E_value=0.048; Accession=PF01370.11; Description=NAD dependent epimerasedehydratase family
  Pfam annotation: Domain name=KR; Domain location=17-212; Score=-33.4; E_value=2e-05; Accession=PF08659.1; Description=KR domain
  Pfam annotation: Domain name=NAD_binding_4; Domain location=21-246; Score=-104.6; E_value=0.074; Accession=PF07993.2; Description=Male sterility protein
  Pfam annotation: Domain name=adh_short; Domain location=17-195; Score= 116.2; E_value=9.7e-32; Accession=PF00106.15; Description=short chain dehydrogenase
  Pfam module annotation: Pfam domain module=Epimerase::KR::NAD_binding_ 4::adh_short; Domain location=19-265::17-212::21-246::17-195
MVAAGRNRAERWNLAGATALVTGGSKGIGYIHTYIQHAIVEELAGFGARVHTCSRNAAELEECRRRWDEKGLQVTVSACDVSARADRERLVATVGATFGGRLDILVNNAGQSLFKRTAECTGEDYSRIMATNLESCFHLSQLAHPLLRLASGGGGGSVVHVSSVAGFVGLPALAVYSMSKGALNQLTRSLAAEWAGDGIRVNCVAPGGIRTDISSDKTIDPELAKREMARVPMGRIGEPEEVASMVAFLCMPAASYMTGQVICIDGGRTIA

SEQ ID NO: 45762 - protein, 232 aa, Zea mays
  Coding DNA Sequence Number=SeqID_3983
  Gene Ontology: Mol. function=structural constituent of ribosome; Cellular component=intracellular; Biological process=translation
  Homolog annotation: Hit_ID=Q2R069; Match level="QueryCoverage=56%, HitCoverage=25%, E-value=3e-32, Identity=59%"; Hit description=Kelch motif family protein, expressed
ELVTHSTGDRVVVGGGIAVAAVGFRLGYQPPPPPPPPPPPFPEGGERYRGARQTPSRNAQDVRVLSAPDEAGQVEGPSARPFPWPSKPVSDHQAFQQSSQQDPLATSVSGRADDLAWRCSSDTFDLNGRDFESSENWAVLSTEGDKPAPRFDILSLDKLTWDSVAPKVRPPLNGRSLKLRPCRGHCLRPLQQPRAGAKGAQLQQTGQSHAGEGLLRVRNRADNGYCAATVVQ

SEQ ID NO: 45763 - protein, 110 aa, Zea mays
  Coding DNA Sequence Number=SeqID_3984
  Gene Ontology: Mol. function=protein disulfide oxidoreductase activity; Biological process=cell redox homeostasis
  Homolog annotation: Hit_ID=Q2R076; Match level="QueryCoverage=99%, HitCoverage=100%, E-value=1e-31, Identity=68%"; Hit description =Glutaredoxin-like family protein, expressed
  Pfam annotation: Domain name=Glutaredoxin; Domain location=13-83; Score=48.5; E_value=2.2e-11; Accession=PF00462.14; Description =Glutaredoxin
MDRVAKLASERAVVVFTASNCSMGDVVTSLLSSLGVSAAVHELDSDPRGQEMERELARRLGGGSAAERGTTALPAVFVGGSLVGGTNRVMALHLAGELVPMLKSAGALWL

SEQ ID NO: 45764 - protein, 129 aa, Zea mays
  Coding DNA Sequence Number=SeqID_3985
  Homolog annotation: Hit_ID=Q2QX93; Match level="QueryCoverage=50%, HitCoverage=9%, E-value=5e-18, Identity=64%"; Hit description=WD repeat domain 48, putative, expressed
MAMLMHSFLFVFQHCVGINCLAYLDGSIFSTSDHLFCGSRDGTLKRWELNNGDASFSGTFESHVDWRFDIGGTAVECGDIGGKRMLMWEARELLRTDERASRGSGLGTERLRPIDFLEWDGSGSEENIP

SEQ ID NO: 45765 - protein, 78 aa, Zea mays
  Coding DNA Sequence Number=SeqID_3986
MHKSPLPQLLKKRDVVALSGVETPIDVVIVTNVVVDSDEDGREEDIVDANWEAHCVEMRMAYFCKTNDGKKYISVLKA

SEQ ID NO: 45766 - protein, 503 aa, Zea mays
  Coding DNA Sequence Number=SeqID_3987
  Gene Ontology: Mol. function=zinc ion binding
  Homolog annotation: Hit_ID=Q6K9X4; Match level="QueryCoverage=53%, HitCoverage=36%, E-value=1e-21, Identity=24%"; Hit description =Ubiquitin-protein ligase-like
  Pfam annotation: Domain name=zf-C3HC4; Domain location=451-489; Score= 12.1; E_value=0.0089; Accession=PF00097.15; Description=Zinc finger, C3HC4 type (RING finger)
MEELVAAIAHRRRREVAALAERHAVSRFAHKGRIQSMLRLRLLRQRGTVEDEPWSLLKPVRPHQQKHVGKLRYDSRDTDLQKANNSCQQNNSKCMPDEQLYNDRVPAEEKSNDISAEGLVDGSGNLQCDEQMKAKGDTCQKDCENFCVHSQHYSEASSFARYGEHSTIDENQFVEDISPSTTSTLHELETPSSRGDNLREEDNQSINGSWEERGLWISSLGWPAPIDTMSPDSWHQETMGDIENHNNPIQFNDRPWIESPNSWRSLCVVTQSDCHALSHNADICNLLERKKVSKSLESDFSNKMNQLLLTALQKQRQQRMMDDFGGYYDERMYWRQNDEIRDADKEASAPCSLAPVAHLGAHQQESWQHSSFGSQHQHHDNQNLLEMEVRVRGEMSQIHQEIYQLRKLVESCIASQVKMQHSIKEEVCSALREAGLMRSQPDTAAAKRGNCCICHRMQVDSLLYRCGHVCTCFDCADQLKSSGMSCPICQSPIDDVVLARLNF

SEQ ID NO: 45767 - protein, 119 aa, Zea mays
  Coding DNA Sequence Number=SeqID_3988
MKLMIIVLTHGQHPEFKYLTHMHLGSFGKRRSCPMLEGATEDMDLMGRLLDELDLLQRHSPDVDLDMVDMDLLKHIVVHKNNTFLYRQNNFQNFTCPPASLNQSGTGDDLPASCENREA

SEQ ID NO: 45768 - protein, 262 aa, Zea mays
  Coding DNA Sequence Number=SeqID_3989
  Subcellular localization annotation: CTP_CleavageSite=12; ConfidenceScore=5.19e-01
MDTFPNDGRRVSQAHPGPASSLRLSRLFRMPSLSNKNAAHTGRDDDDVDRALQSKRSSDTASDTVLGRAEHTACSLAAPRRRVSARSGARRRPTRLAQREHLDRRHLTRAGTMTRRPEPAGTLAPWNRDGGDGQRPIGVDAGELAEREGVDGHVPHPVTLVSSGRPLPTSLCMAERVRAAVGSGDWRREEEQSEFGDPEPTPAMARSIQFLVLASSPRWNQISWARVRGAGTRDEELQLGGLWTFSTTLMGLRRETVSNSVP

SEQ ID NO: 45769 - protein, 319 aa, Zea mays
  Coding DNA Sequence Number=SeqID_3990
  Homolog annotation: Hit_ID=Q6QAE2; Match level="QueryCoverage=26%, HitCoverage=27%, E-value=1e-18, Identity=54%"; Hit description=MYB transcription factor
MVPCLVWSVRGAHANSDPTHRWAQIAKHLPGRTDNEVKNFWNSCIKKKLIAQGLDPKTHNLLPASRTLLHGNGANPSSNNPAHFNSNGCAAVVSVATTPFTISSPTKAAAYGTVTATPPPETMAPATYDVPNNYPDGMLMRHDQAATAAAIPGYPYHPGNGGGVLMSFRDQNAGLQTSVDFVNGSSSSSSMDHAAGMPNGNGFSQQGMGAAFMDVTAGMWSTAAVDSGMCAGMEVAQPPPPPPQQPLPPQGLVQGEVLVGRQTVMNGGGAVADKGMDMMDVSSVYGGAGAMAFDLELMESCALFCGSTGNTMEQLQWDC

SEQ ID NO: 45770 - protein, 364 aa, Zea mays
  Coding DNA Sequence Number=SeqID_3991
  Gene Ontology: Mol. function=oxidoreductase activity; Cellular component=vacuole; Biological process=response to oxidative stress
  Homolog annotation: Hit_ID=Q5U1J1; Match level="QueryCoverage=83%, HitCoverage=87%, E-value=8e-81, Identity=53%"; Hit description=Class III peroxidase 102 precursor
  Pfam annotation: Domain name=peroxidase; Domain location=84-326; Score=305.8; E_value=7.9e-89; Accession=PF00141.13; Description =Peroxidase
MRTPRGVSSSFLALYGFLLLVAVSVAATGYAASPGESSNGYGAAAGSNGGGQEGSYTVPPYQKSVDGLDERYYERSCPKMEEIVGTAVMKAVKADETLAASIIRLFFHDFAVGGVDGSVLVDVPGQSEKYAEASRTLRGFELIEGIKKEVEAKCRATVSCADILTAAARDAAFSAGAPYWSLKYGRRDRKDYSSAEAADRDVPMGGQRVTELVAFFDTKGLNIQDLVALSGAHTIGRATCGSVRPGLCKRRKARTLDRQYGDFLQRKCRAGGDAAEAYVELDGETPTAFDNQYYKNLLHGKGLLDTDQALLADSRTAGFVKSFAYQKPQEFAHQFAKSMRRLGEAQVLTGNEGEVRRKCSAVNY

SEQ ID NO: 45771 - protein, 303 aa, Zea mays
  Coding DNA Sequence Number=SeqID_3992
  Gene Ontology: Mol. function=carboxypeptidase activity; Cellular component=proton-transporting two-sector ATPase complex; Biological process=ATP synthesis coupled proton transport
  Homolog annotation: Hit_ID=Q69RQ8; Match level="QueryCoverage=87%, HitCoverage=64%, E-value=1e-132, Identity=81%"; Hit description=Leaf senescence related protein-like
  Pfam annotation: Domain name=DUF231; Domain location=134-298; Score =192.2; E_value=1.2e-54; Accession=PF03005.6; Description=Arabidopsis proteins of unknown function
MRLGGDNVLWCGRVAFKEPIRVLGFPGFVGDSLNRNMFASLVCMLRGVNGEVRKWRPAGADRGFTFLRYNLTVAYHRTNLLVRYGRWSRNPNGGPLESLGYKQGYRVDVDIPDQTWVEACSFHDVLIFNTGHWWWAPSKFDPIRSPMLFFEKGRPIVPPLLPPAGLDLALQNMISFANKATRPNTVKFFRTQSPRHFEGGDWNEGGSCQCNQPLSSKEVEEIFSLDNNSTNVEARLVNQHLVKALQQTSFRVLDITRMSEFRADAHPSTTGGKKHDDCMHWCLPGPTDTWNDLLALSLEALES

SEQ ID NO: 45772 - protein, 64 aa, Zea mays
  Coding DNA Sequence Number=SeqID_3993
MGLGAVFVNQLVKFDEKLKEDLDKMLERARLANEQRYIGTVLTCPGMLCLQIHFAIVAGCKCGI

SEQ ID NO: 45773 - protein, 627 aa, Zea mays
  Coding DNA Sequence Number=SeqID_3994
  Gene Ontology: Mol. function=protein phosphatase type 2C activity
  Homolog annotation: Hit_ID=Q9LUS8; Match level="QueryCoverage=78%, HitCoverage=97%, E-value=1e-130, Identity=52%"; Hit description =Similarity to protein phosphatase-2c
  Pfam annotation: Domain name=PP2C; Domain location=155-484; Score =70.2; E_value=6.6e-18; Accession=PF00481.12; Description=Protein phosphatase 2C
MVDVELFVKETSDHSISSEEEDILVRSCSNLNVSFGYHCDSHQSFSPENDHGNGISPKNTFGTNTMMGSRNGSFTCLSGAAISANFTLANTNICNGLIGEEILPELDSPNSFRKIVSSPSMSRLDSFSTSQGSPVSTESSIFEISKNLWRSSAPTTVSSNFLTNTEVKMAGGAAGEDRVQAVCSEKNGWLICGIYDGFNGRDAADFLAVTLYDNIVYYLYLLENRIKQQNGLYNSSESSLDGLKSELTLAMRNSENEDIKFSETFRSGVLNCLSTAVEQAENDFLCMVEQEMDDRPDLVSVGSCVLVLLLHGTDLCILNMGDSRAVLASMPYVENGALKAAQLTETHSLENPSEYQRLLAAHPNDSSVVRGNKIKGKLKVTRAFGVGYLKQRKFNDALMGILRVRDLSSPPYVYTNPHTLSHKVTDDDLFVVLGSDGLFDFFSNDEVVLLVYQFMHDNPMGDPAKYLIEQLILKAAKEAALTAEELMRIPVGSRRKYHDDVTVVVITLGNAQRTMTASTSISEIEERMEVFIHEDYVNKRNELRREQRRRELQRLQVESNPDASREALASRESPRTPAQCLTPTGASPSSFRSPTSRSTLQSPAAAAGQAAGWPSEHRRLYDCLKPY

SEQ ID NO: 45774 - protein, 337 aa, Zea mays
  Coding DNA Sequence Number=SeqID_3995
  Gene Ontology: Mol. function=protein dimerization activity
  Homolog annotation: Hit_ID=Q2QPA8; Match level="QueryCoverage=61%, HitCoverage=92%, E-value=1e-32, Identity=54%"; Hit description=HAT family dimerisation domain containing protein
  Pfam annotation: Domain name=zf-C2HC_plant; Domain location=95-151; Score=82.6; E_value=1.2e-21; Accession=PF07567.3; Description =Protein of unknown function, DUF1544
MGGDCSPSSNLPRGISWMRRPRFPEHRLRLGRRLQRVHGQDSVTTSEFEASICSVYGTKSTTSSLLQQDGNSGEPSSVNSASVTQKTSNAIKSDDPTWEHCFVPDMSKKHAIQCKYCDKVIHGGITRVKYHLANIGGFNVTKCKKVPAPVNQEMEALLTKKTSEKEQRKKEKQRERDEIDLDKSDGSNEEDNEHENDIVVLKSTRNDRMRDLVFVKFNSKLREKRNNKSKDPIEKELNDILEDGGNEFITGVVPDENVDQDEDHEGAHDEPSQEPSISKAQLPAKRKRHGHPRKKKLRSLKSLLSGDLEPATCASSSESEDNESMQIEASNSDSGDE

SEQ ID NO: 45775 - protein, 202 aa, Zea mays
  Coding DNA Sequence Number=SeqID_3996
MGMGALAFGVVCQGYIYAFGTLRSPLNENTLIPRDCQRNHHYRQPSCMISRAAVARPPGSKEGGWTHTSARFTVHTKESGVAEFSLDRNFGVEQRRHQDLGEGEIPGHTDEVVTSGTGAAPSLPRREFEEERHAVDWEIKDEQAIEDPGVQQVETAEQELVEGKLLLGTQHPNEEIFLSQIKELETVYTMTLVNQCYGPTVE

SEQ ID NO: 45776 - protein, 183 aa, Zea mays
  Coding DNA Sequence Number=SeqID_3997
  Subcellular localization annotation: CTP_CleavageSite=27; ConfidenceScore=5.23e-01
MMVLASVATTSFAILLLLSLPSCLHLRATPFSVEDVGACASSPYSSDTSPDTNSRSGYCTSSAHHHFRLVGRPVRLPGLRPVLPPQPAALAHGRSRELINARRRGAGKTLAFSHPSWIDACGILPMSPSDAQVFVVSLSGNEQGGGNGSPGLPLVREAPVSKWVPKLRCKNRVHPIVCGFWLE

SEQ ID NO: 45777 - protein, 161 aa, Zea mays
  Coding DNA Sequence Number=SeqID_3998
MAACPSKPTPQQAQLPGPPSRLRPLAQYWDDPWRRAQARSIYTVGKERGWTRWSPLRRQRQRRRRSRRRQRWPARTCPSCPRPPPSQGRKSRVARISVGFAYFIVFMMILSVIGLFSLGSNLWLINTLTISNEGIRINDGRLTQTCFDKNRAAMLPFRTAT

SEQ ID NO: 45778 - protein, 61 aa, Zea mays
  Coding DNA Sequence Number=SeqID_3999
MAMGTRYPMDIYSIRVYMWAKYSTRGPVIGQKSSLNRYLIFVSMGDPMGNPYPHGYRYGVY

SEQ ID NO: 45779 - protein, 644 aa, Zea mays
  Coding DNA Sequence Number=SeqID_4000
  Gene Ontology: Mol. function=heat shock protein binding; Cellular component=integral to membrane; Biological process=protein folding
  Homolog annotation: Hit_ID=Q6K2F0; Match level="QueryCoverage=99%, HitCoverage=88%, E-value=0.0, Identity=73%"; Hit description=Heat shock protein-like
  Pfam annotation: Domain name=DnaJ; Domain location=2-52; Score=65.1; E_value=2.3e-16; Accession=PF00226.21; Description=DnaJ domain
MADEEEVKKQYRKLTLQLHPDKNKSVGAEVAFRLISEAWSVLSDKSRKMLYDQKRRDHCVASVSNGLYAYDYDTKLSKRARKNAVASASAAVEATTRLAGADTFWTSCNSCRMQYEYLRVYLNHNLLCPNCHHAFMAVETGFPCNGTSSSFTWTTKSQQQQNHDTVADHSYQSASRTSSIPDTGHGAYQQENTYELYKNQSFQFTQYPKTTCVAATNGYSTHASEKSKRKHEENYIYNYISSGKSNEYPSGRGRHSKRRQNFSNGCASVEVNGQNLAATAGMSGIADGGRFNGTSGEKFRSAVNARKANVLREIFQLDTRGLLLEKAKAEVREKLQVWNILTSSQFVEKRKSDRREKHIQNNIKANGILSDNPTNKCKKCISKDADTEIPVTDVMNPEQMRVPMSIDVPDPDFHDFDKDRTERAFGNDQIWATYDSEDGMPRLYAMVQKAISMKPFRIRMSFLNSKSNNELAPINWIASGFTKTCGDFRIGRYQITETVNIFSHRVCWSKGPRGIIRIIPQKGDTWAVYRNWSPDWNELTPDDVIYKYEIVEVIDDFTEEQGVTVVPLLKVAGFRAVFHRLTGSSVVRRIPKEELFRFSHRVPSCLLTGEERNNAPKGCHELDPAATPVDLLKIITDVKDDTTR

SEQ ID NO: 45780 - protein, 206 aa, Zea mays
  Coding DNA Sequence Number=SeqID_4001
MSGTHRIVRCPLLAVDSATCPAQIARPTVGPADRWLTGQSDAHRTVRSLTIGPTAYADALQVPSRNIVAAAVEAYIRHRHMLGLTPMSSMSTGALAECRCCRSRHLLVTTFKDCCNMAALPPACSSCGGLTELLNAMDAQWVAGPSSSVDAIDSVLFQPTAFVATETEAGQLAEVLRQSGPLDNGDIGGEPTFSEFFGGSRQERRR

SEQ ID NO: 45781 - protein, 1104 aa, Zea mays
  Coding DNA Sequence Number=SeqID_4002
  Gene Ontology: Mol. function=protein serine/threonine kinase activity; Cellular component=integral to membrane; Biological process=protein amino acid phosphorylation
  Homolog annotation: Hit_ID=Q8LPB4; Match level="QueryCoverage=91%, HitCoverage=97%, E-value=0.0, Identity=50%"; Hit description =Phytosulfokine receptor precursor
  Pfam annotation: Domain name=LRRNT_2; Domain location=96-135; Score =20.1; E_value=0.0069; Accession=PF08263.3; Description=Leucine rich repeat N-terminal domain
  Pfam annotation: Domain name=LRR_1; Domain location=139-161; Score =3.9; E_value=54; Accession=PF00560.23; Description=Leucine Rich Repeat
  Pfam annotation: Domain name=LRR_1; Domain location=163-185; Score =9.9; E_value=3.9; Accession=PF00560.23; Description=Leucine Rich Repeat
  Pfam annotation: Domain name=LRR_1; Domain location=187-206; Score =9.7; E_value=4.3; Accession=PF00560.23; Description=Leucine Rich Repeat
  Pfam annotation: Domain name=LRR_1; Domain location=210-231; Score =1.0; E_value=1.8e+02; Accession=PF00560.23; Description=Leucine Rich Repeat
  Pfam annotation: Domain name=LRR_1; Domain location=233-255; Score =2.6; E_value=91; Accession=PF00560.23; Description=Leucine Rich Repeat
  Pfam annotation: Domain name=LRR_1; Domain location=258-280; Score =8.8; E_value=6.3; Accession=PF00560.23; Description=Leucine Rich Repeat
  Pfam annotation: Domain name=LRR_1; Domain location=282-304; Score =12.2; E_value=1.5; Accession=PF00560.23; Description=Leucine Rich Repeat
  Pfam annotation: Domain name=LRR_1; Domain location=306-328; Score =6.4; E_value=18; Accession=PF00560.23; Description=Leucine Rich Repeat
  Pfam annotation: Domain name=LRR_1; Domain location=330-352; Score =14.8; E_value=0.32; Accession=PF00560.23; Description=Leucine Rich Repeat
  Pfam annotation: Domain name=LRR_1; Domain location=354-376; Score =2.6; E_value=92; Accession=PF00560.23; Description=Leucine Rich Repeat
  Pfam annotation: Domain name=LRR_1; Domain location=378-400; Score =9.9; E_value=3.9; Accession=PF00560.23; Description=Leucine Rich Repeat
  Pfam annotation: Domain name=LRR_1; Domain location=402-423; Score =7.8; E_value=10; Accession=PF00560.23; Description=Leucine Rich Repeat
  Pfam annotation: Domain name=LRR_1; Domain location=425-447; Score =18.6; E_value=0.022; Accession=PF00560.23; Description=Leucine Rich Repeat
  Pfam annotation: Domain name=LRR_1; Domain location=449-470; Score =18.2; E_value=0.029; Accession=PF00560.23; Description=Leucine Rich Repeat
  Pfam annotation: Domain name=LRR_1; Domain location=475-499; Score =1.9; E_value=1.3e+02; Accession=PF00560.23; Description=Leucine Rich Repeat
  Pfam annotation: Domain name=LRR_1; Domain location=501-523; Score =9.6; E_value=4.6; Accession=PF00560.23; Description=Leucine Rich Repeat
  Pfam annotation: Domain name=LRR_1; Domain location=525-547; Score =18.3; E_value=0.027; Accession=PF00560.23; Description=Leucine Rich Repeat
  Pfam annotation: Domain name=LRR_1; Domain location=549-571; Score =15.3; E_value=0.22; Accession=PF00560.23; Description=Leucine Rich Repeat
  Pfam annotation: Domain name=LRR_1; Domain location=610-632; Score =1.0; E_value=1.8e+02; Accession=PF00560.23; Description=Leucine Rich Repeat
  Pfam annotation: Domain name=LRR_1; Domain location=634-656; Score =20.5; E_value=0.0059; Accession=PF00560.23; Description=Leucine Rich Repeat
  Pfam annotation: Domain name=LRR_1; Domain location=658-680; Score =22.3; E_value=0.0017; Accession=PF00560.23; Description=Leucine Rich Repeat
  Pfam annotation: Domain name=LRR_1; Domain location=682-704; Score =4.5; E_value=41; Accession=PF00560.23; Description=Leucine Rich Repeat
  Pfam annotation: Domain name=Pkinase; Domain location=822-1090; Score= 108.4; E_value=2e-29; Accession=PF00069.15; Description=Protein kinase domain
  Pfam annotation: Domain name=Pkinase_Tyr; Domain location=822-1093; Score=90.1; E_value=6.9e-24; Accession=PF07714.7; Description =Protein tyrosine kinase
  Pfam module annotation: Pfam domain module=LRRNT_2::LRR_1::LRR_1::LRR_ 1::LRR_1::LRR_1::LRR_1::LRR_1::LRR_1::LRR_1::LRR_1::LRR_1::LRR_1: LRR_
  Pfam module annotation: Pfam domain module=Pkinase_Tyr; Domain location=96-135::139-161::163-185::187-206::210-231::233-255::258 -280::282-304::306-328::330-352::354-376::378-400::402-423::425 -447::449-470::475-499::...
  Pfam module annotation: Domain location=501-523::525-547::549 -571::610-632::634-656::658-680::682-704::822-1090::822-1093
  Subcellular localization annotation: CTP_CleavageSite=52; ConfidenceScore=5.74e-01
MQFPPPIVNRSSIPANWTVTSPTQPPPVTRRSKPAIHRSFAPLTRGSILRMVCFLESYNTHAFHGSQMERKGGLRTTVRPILNRVDSLKKTTISCDPGDLKALEGFSEALDGGSVAGWEHPNATSCCAWPGVRCDGSGRVVRLDLHGRRLRGELPLSLAQLDQLQWLNLSDNNFHGAVPAPVLQLQRLQRLDLSDNELAGTLLDNMSLPLIELFNISYNNFSGSHPTFRGSERLTAFDAGYNSFSGQINTSICGSSGEISVLRFTSNLFTGDFPAGFGNCTKLEELHVELNSISGRLPDDLFRLPSLKVLSLQENQLTWGMSPRFSNLSSLERLDISFNSFFGHLPNVFGSLRKLEFFSAQSNLFGGPLPPSLCRSPSLKMLYLRNNSLNGEVNLNCSAMTQLSSLDLGTNKFIGTIDSLSDCRNLRSLNLATNNLSGDIPDGFRKLQSLTYLSLSNNSFTDVPSALSVLQNCSSLTSLVLTKNFRDEKALPMTGIHGFHNIQVFVIANSHLSGSVPPWLANFTQLKVLDLSWNQLVGNIPPWIGDLEFLFYLDLSNNSLSGGIPESLSSMKALVTRKVSQESTETDYFPFFIKRNKTGKGLQYNQVSSFPPSLVLSHNRLTGPILSGFGILKNLHVLDLSNNNISGIIPDDLSEMSSLESLDLSHNNLTGGIPSSLTKLNFLSSFSVAYNNLNGTIPSAGQFLTFSSSAYEGNPKLCGIRLGLPRCHPTPAPAIAATNKRKNKGIIFGIAMGVAVGAAFVLSIAAVFVLKSNFRRQDHTVKAVADTDRALELAPASLVLLFQNKADKALTIADILKSTNNFDQANIIGCGGFGIVYKATLQDGAAIAIKRLSGDFGQMEREFKAEVETLSKAQHPNLVLLQGYCRIGSDRLLIYSFMENGSLDHWLHESPDGPSRLIWPRRLQIAKGAARGLAYLHLSCQPHILHRDIKSSNILLDENFEAHLADFGLARLICPYATHVTTDLVGTLGYIPPEYGQSSVATFKGDVYSFGIVLLELLTGKRPIDMCKPKGARELVSWVTLMKKENREADVLDRAMYDKKFETQMRQVIDIACLCVSDSPKLRPLTHQLVMWLDNIGVTSDEPK

SEQ ID NO: 45782 - protein, 362 aa, Zea mays
  Coding DNA Sequence Number=SeqID_4003
  Gene Ontology: Mol. function=oxidoreductase activity; Cellular component=proton-transporting two-sector ATPase complex; Biological process=gibberellin metabolic process
  Homolog annotation: Hit_ID=Q84RC3; Match level="QueryCoverage=97%, HitCoverage=93%, E-value=3e-81, Identity=46%"; Hit description =Gibberellin 2-oxidase 1
  Pfam annotation: Domain name=2OG-FeII_Oxy; Domain location=215-315; Score=143.9; E_value=4.2e-40; Accession=PF03171.10; Description=2OG -Fe(II) oxygenase superfamily
MPAFAGGAAEPPLADSYYALLRRGNDDEGAYTTSTAPWDDVSLPVAECELPMIDVGCLTTADDGSSPEAEAERAACAAAIARAAEEWGFFQVRNHGVPQELLEEMRREQARLFRLPFETKATAGLLNDSYRWGTPTATSPRQLSWSEAFHVPLAGVSGSGTTCDFGDLTTLSRDVTREVAGAMSKLAGTLARVLAEALLGRRPAGERFPEGCDETTCFLRLNRYPACPISPGALGLVPHTDSDFLTVLCQDQQVGGLQLMKGDSWVAVKPIPGTLVVNIGDLFQAWSNNRYKSVEHKVMTNARTERYSVAYFLCPSYDSPIGTCEEPSLYRTFTFGEYRRKVQEDVKRTGKKVGLPNFLAQT

SEQ ID NO: 45783 - protein, 87 aa, Zea mays
  Coding DNA Sequence Number=SeqID_4004
MGPRFWLQHAAPLRSCLRNALHGLRGSCHAFLGSLWVDAFMHASFSDLIGSVGKQMCARIGDRNSELCACAVTISNDLWATWACLIA

SEQ ID NO: 45784 - protein, 302 aa, Zea mays
  Coding DNA Sequence Number=SeqID_4005
  Gene Ontology: Mol. function=DNA binding; Cellular component=nucleus
MAMLNTTSSTIVSTGSPNMVADSSCQNLKYSAPLAVEWSYPELQLLNDGLNKYANEPGIMKYIKIAATLPDKTVRDVAMRCQWMAARKEATRRRKPEERYLGKKIKDRKDKMAQPSSWGTNPPVQAEMRSSSFMPRNAKHNGFLSGDSQIDHEMLNILEENARLLNQIEVNILTSQAHNNINLFHHIRRNINGLLQSMCQIPGIMSKMPPLPVSVDERLASYILPRAHTVAFLIKDNIQRFNFNDETGSDTSDRAISYLSRILEPGTDTSNNDIRNLIFGYSDSAMVGYKCSNSDTNYPYIV

SEQ ID NO: 45785 - protein, 73 aa, Zea mays
  Coding DNA Sequence Number=SeqID_4006
MELRGCVCRIKSSALELLSMEEDLTTDLDDDLWDLLGDTVANRSVSVVKSSYGEGVRRLRRSASARWSPPAAA

SEQ ID NO: 45786 - protein, 243 aa, Zea mays
  Coding DNA Sequence Number=SeqID_4007
MICTDEIPKITNSRPARSVASRWGDTGGRNPSRRHPIPPLQPTSPSPEGAAGCPRDPKEGGGGAILLWFGRVRPDLGGIPGGGSGAKWTVVAPAAFAVVRVPADLARRSGCCQGWLARGAAVARPGSWAQPEGVAGDATCDCCGSRSVVGPLVGSVWVVWVAATVEVLCPGVLAKRCAGGFSWAKALATVTPLGAASPIEGVVFPSYVFRGQKPGPPWTGDVGVPDVTPFLKASLLKFVSATS

SEQ ID NO: 45787 - protein, 99 aa, Zea mays
  Coding DNA Sequence Number=SeqID_4008
  Subcellular localization annotation: CTP_CleavageSite=34; ConfidenceScore=5.12e-01
MTLSSSSRLDSGFLKKYRDKTSTTNEGFGIASVSSSAAGPGSGAASALLRAADDVYRSMGLSELDAQSSELLKQDEEYSVEWDFAQIVVKVPEGLPHPK

SEQ ID NO: 45788 - protein, 800 aa, Zea mays
  Coding DNA Sequence Number=SeqID_4009
  Gene Ontology: Mol. function=protein binding
  Homolog annotation: Hit_ID=UPI00005C2935; Match level="QueryCoverage =29%, HitCoverage=51%, E-value=2e-14, Identity=29%"; Hit description =PREDICTED: similar to germ cell-less
  Pfam annotation: Domain name=BTB; Domain location=52-166; Score=44.0; E_value=5.2e-10; Accession=PF00651.21; Description=BTBPOZ domain
  Pfam annotation: Domain name=MATH; Domain location=667-799; Score =7.0; E_value=0.02; Accession=PF00917.16; Description=MATH domain
  Pfam module annotation: Pfam domain module=BTB::MATH; Domain location= 52-166::667-799
MAAPRQPHPPAAEEGAAPAGPLPAAAPGPRPYDVTVAATELRPVDCNLAALCDHVQAEGFGSGAFSDLVVEAMGATYRLHRLILSRSAYFRNMLHGPWRESGAPTVVLHIDDANVDSDAIAIALAYLYGQPPKLTDSNAFRVLAAASFLDLQDLCTICTDFIISELWTSNFLQYQLFAESQDYGSHGERVRNACWGYLCQSATMELREVLPKLSSQTLHALLTSDELWVPNEEKRFELALLTLLAKVAMCEIQVSGNETNLPSADRSMRKGKTPMNESGEELLMDSELQNLKLHDNLGNEISHNIIAISDMNGEAPKRMEIDCSTGGPSGESTSYQFNENNWISSEQTANNYFSRTSSSVVVPTEWGRPNAPLWGGRVVGRRQIRYIRGSSCLSTDEYNAFMNIFERGSLLYCNMSFDALLSVRKQLEEFGFPCKAVNDSLWLQMLLCHRVQAIVADTCRNCCLMNSSCACKQAYVSSHTHYRQEHDRSSASDNIGNVYLADGQGDGNGVLGPVRVNVRGAVDGLAGIGRGNSNVPGAAWAPTRYVFSRVPYGLGSRNGQQFAIDESEPRIDRNGDISADGLTALVNLSQENNAAHLQDQSLFETGMQTRYRSVPSVSTPGGSSVQMQESKEHELGSDWETTKDATISLDMKTPLSHFPPFRFGVEFEDVHRLADGQVKHSTEVFYAGSLWKVSVQPFNDEDPHGRRTLGLFLHRRKAELLDPLRKAHLYVDPREKVTARYQLICPSKREVMIFGSLKQAGTLLPKAPKGWGWRTAILFDELADLLQGGALRIAAVVQLV

SEQ ID NO: 45789 - protein, 228 aa, Zea mays
  Coding DNA Sequence Number=SeqID_4010
MLARPSALNSNLTGAMREEGKRNDPDELSPVIMTPWRLATAGSGSTAELQLRESPLPPTGRRNARESKYDGSYLVFSELATMVASATDAGEREVLGFDGGVQNFGLYAPRRSPCGSRAPAGSRRPGTRRRFRRDCYGEQPSPSPLRDPRGRGISGCRDPRLPRARSTAPVQTSGTETSPASQMRLRSQDLEAGHRVWEMEDRCDTRCVEDDEIPVHRPLVTDGAPPPM

SEQ ID NO: 45790 - protein, 400 aa, Zea mays
  Coding DNA Sequence Number=SeqID_4011
  Homolog annotation: Hit_ID=Q1RTH1; Match level="QueryCoverage=29%, HitCoverage=35%, E-value=1e-19, Identity=45%"; Hit description =Peptidase C19, ubiquitin carboxyl-terminal hydrolase 2; Zinc finger, FYVE/PHD-type
  Subcellular localization annotation: CTP_CleavageSite=20; ConfidenceScore=5.09e-01
MVLGTSIPAMPTPNFCSLVLGAVRRVVPYGRLRHTRPQDRCHEVRPGQPFMTEDTLKDPNWVMAMQEELNNFKRNECRPSPAPASPLYAHAPIITAKAVTTTPRNPPLNSCRSVPSPFRVCDARGPQPRAVIDTPVLAEGWGGGGRGGGGGGEKRGGLVEEDGVVEVGIVGLVPAGGAEDLGVVDIDDDLVAGPHRGGGVRGSVGGAEDDSAGEAGVEAGGGGQGRGGAGRAARELARVPSDLGAAERAHARAAAEEAQRARGQAMRGEVRAGRWYGRGRHRGGDRPGCDVVGTAAAGDGVAGSGWGCGQWSVAAGGAGGGGALVLWSDGGGGAVAAMVLLYLDQREVCQVAHLNSAFHGAASADCVWATKLPANYRYLAALAATADDEGCGDGDASGKR

SEQ ID NO: 45791 - protein, 319 aa, Zea mays
  Coding DNA Sequence Number=SeqID_4012
  Gene Ontology: Mol. function=DNA binding; Cellular component=nucleus; Biological process=RNA-dependent DNA replication
  Homolog annotation: Hit_ID=Q9LGH0; Match level="QueryCoverage=91%, HitCoverage=91%, E-value=2e-44, Identity=33%"; Hit description=NAM -like protein-like
MTALFAEWSLNMGMSMGVFDSAYYTDLLLNGVDESQDPTPPTDARSQHGHATTKSTRGRSKIFRNEEDILLVSAWLNVAMDPIQGVDQSHGTLWTMIHEYFIANKTFKSNRSEGSLMNRWIEAQNHSGWSVYDKVVKQSSANACVMFKAKDPKKTKFSYLHCWKILKDKPKWIDRRKEIINAKKISCKEKKTLATSSAIVAAQDAPVGGPCDGEPATRPDDKKKEKQKLRQCSTIEAVDYLMEKKKETDHEKELKKEERFNKAFALQEERIKLEKEKFEFKRQMEEERIIGLDLSTMNYKQQQYYERRQNEILDRCLNN

SEQ ID NO: 45792 - protein, 173 aa, Zea mays
  Coding DNA Sequence Number=SeqID_4013
MWVATIVQCATGSDVLRWRSLYASYDISWRVHYYEVFDHGIREVLCCLGTKKVVSDDKLAKFALLDPKPSIGEQVLSANSFSRAVTCAGSGGKQDRQGAKEAFSFSGTCCLCSICSAADIRGRESCMVAVSRSCAELVLEALAIQISSGSLCRAGGLGGLRQEARAGATHKPS

SEQ ID NO: 45793 - protein, 224 aa, Zea mays
  Coding DNA Sequence Number=SeqID_4014
  Gene Ontology: Mol. function=translation initiation factor activity; Biological process=cellular metabolic process
  Homolog annotation: Hit_ID=Q5JMI2; Match level="QueryCoverage=90%, HitCoverage=76%, E-value=7e-48, Identity=50%"; Hit description =Eukaryotic translation initiation factor 2B family protein-like
  Pfam annotation: Domain name=DUF567; Domain location=18-216; Score =80.8; E_value=4.1e-21; Accession=PF04525.3; Description=Protein of unknown function (DUF567)
MAITRIQPLSAHLHPRAVAATPAAGKQQQQAVYTVWMKSLVLGGHGCTVYGDDGRVAYRVDNYACSRSREAYVMDGDGRTLLKLLKKHFAAFATWKGYSYRTADSDPAGAAAGVEQEESPRPWFSVRKARRVLKQKGRQRGGGAVATVCVGGEVYRIDGVPRKSEYRIRGPGGEVVAETRRKQTGSGVALGEDVLSLTVGPAAHAERLLLVGLVVVCGLIGHSI

SEQ ID NO: 45794 - protein, 248 aa, Zea mays
  Coding DNA Sequence Number=SeqID_4015
  Homolog annotation: Hit_ID=Q9LIE8; Match level="QueryCoverage=65%, HitCoverage=9%, E-value=4e-08, Identity=29%"; Hit description =Similarity to cell wall-plasma membrane linker protein
  Subcellular localization annotation: CTP_CleavageSite=52; ConfidenceScore=5.20e-01
MEGVHPTSPCPRPSVRHHHARAPVIRGGNGFPTRDGISSPSPILAPRLPSTLASTPVPTRDTGRAISARPQAAFNADGAILAAVDDHLQSTPASTLVPTRDAGRAISHQRPSPCPRSVLPHRVQALPHRFRHGTSTAHIGLPKGDRNIHHARDSAARICFPTGDRAIHHAVQHPFTTAVHAPRPGTSANPTCPQRTMMEDTSRSPHPPPPPPPSRHPPPICNLAPSSSPTMGSPLPSTPDQGADAVNQ

SEQ ID NO: 45795 - protein, 138 aa, Zea mays
  Coding DNA Sequence Number=SeqID_4016
MKGPSSLIHSSCPAPAPGVVDLVVGTWLARSGGAGRAFIYGMLPLLASEEAHKGMVGDVRRCGLGLAMAVALMLTALVVVASGGTETRQKLPAGSGNDDDYSTILSHLSNIIDPPGSWPEHADAVVVKRCGGVAALPL

SEQ ID NO: 45796 - protein, 79 aa, Zea mays
  Coding DNA Sequence Number=SeqID_4017
MPARLLGIHAPMYRTLNQRMPEKGQAKKPCRGDGALESLWRRCGGVEVEPSALNESARVDDGMMQIRADCGSLRRIREA

SEQ ID NO: 45797 - protein, 403 aa, Zea mays
  Coding DNA Sequence Number=SeqID_4018
  Homolog annotation: Hit_ID=Q6Z284; Match level="QueryCoverage=77%, HitCoverage=69%, E-value=2e-59, Identity=43%"; Hit description =Putative lateral organ boundaries (LOB) domain protein
  Pfam annotation: Domain name=DUF260; Domain location=88-188; Score =141.3; E_value=2.5e-39; Accession=PF03195.5; Description=Protein of unknown function DUF260
  Subcellular localization annotation: CTP_CleavageSite=62; ConfidenceScore=5.86e-01
MTSSVSPAAAASQSQLHITTTGTGTGSTAIISPSSNQSTSNANARSSSSSSSSPHSASSPPRARGPSTTGGTGSSGGSGSGSGCTNQACAACKYQRRKCNTDCPLAPYFPADQQERFLNAHRLFGVRKILKTLENISPELSADAMATLIFQSDMRAQDPVGGCYHLILSLERQLQIETAELSAMLQTLALFGQATTTTTMPPDQGGGGTAGLDYTASSNLLHNAQQEVLYALYKNKHEEADIVHSDNEVVRHHGGGGHGPNKDDHGRQQHQVLNYFYCNNATASDDVDNMQQFHFNDSCAAADKVDLTPPAGADEMRHHHQHLDENCQIDHKDYFEIKAAAALVDDAFHMRQEVVDVSAEVDMEDIKTVDVNNAGIGGVDIKAMAMNANVVDVTPQMAAESSH

SEQ ID NO: 45798 - protein, 330 aa, Zea mays
  Coding DNA Sequence Number=SeqID_4019
  Pfam annotation: Domain name=Hin1; Domain location=147-305; Score =34.1; E_value=4.7e-07; Accession=PF07320.4; Description=Harpin -induced protein 1 (Hin1)
MAAEGIVVVAPETADMQRDDQVQTGTHPLARGPDEVGRGGPCDDIAVSLDGHLNDLRDHLLDDLRDDLGKRATYTRCLGSCAFFFLCHALGELFLELCCCSRCLPCLEVSTPRHLAPENRTQKFFAFFAKNLSKLWVTTLLVLFIRWVLFRPIDVKPHLGTSAVHEFALLQPSSSDDAADADAFAGLSAAGVPRLRFNLTAYLLFKNGHDYYDINYDNLAVSVLYAGEKIGPVDDELPSFKQHPHGSTVMRLAFVGQLRNASSTVAEMFSGDRDKGLFEMVVRIRVTLGYKSWPLKEEYFTIYDCPVSSPFPQVGEPALSSPAWCTANDI

SEQ ID NO: 45799 - protein, 104 aa, Zea mays
  Coding DNA Sequence Number=SeqID_4020
MDKYFNNNDELHSTTPLGGNHTVVPLFQQDLTKDRCVSKTMDIAELYEQIDKGAALAFVVTQLRIGIDLHAPTGLPQGASSMAFENLIKGYDEAIGGVAGTVSS

SEQ ID NO: 45800 - protein, 210 aa, Zea mays
  Coding DNA Sequence Number=SeqID_4021
MTGDDCSSRLPGRLYRPKTASEHPLISLEYPENSRSTHGGPTHVLRPRIVTHAHASHVGKGYSEGDGGMDDTAAKFNVHGGRRKVAVDEQAALAIISVQLLYYYYCYCCYCYYCCYCYCYYCCYCCYYYCYYCYYCYCCYFYYCCYCYCYYCCYCYCCCYYYYYYYYYYYYCYCYCYYCCYCCYCYCYCYCYYCYCYCYCYCYCYYYYYC

SEQ ID NO: 45801 - protein, 90 aa, Zea mays
  Coding DNA Sequence Number=SeqID_4022
  Subcellular localization annotation: CTP_CleavageSite=45; ConfidenceScore=5.09e-01
MAADSVEDALTALAHKPASQETLKSAGVRVSARWARLRSDNADARAARTSARIPPVGLGERRNVRFERSMTKMDRHTLVIKTLDRKKREN

SEQ ID NO: 45802 - protein, 60 aa, Zea mays
  Coding DNA Sequence Number=SeqID_4023
MVDGGVGTGKTMLIDLSYEQLLSLYYVQVCLGLNICRQPFVLYLNFMPSEKFNIHSVWLT

SEQ ID NO: 45803 - protein, 66 aa, Zea mays
  Coding DNA Sequence Number=SeqID_4024
MEWGRCCWWWVRCKGEVGRWWCTWRHARVRGARLIPGFKGKLPGIFLGSSQSEEKLHCPMHAEDWA

SEQ ID NO: 45804 - protein, 84 aa, Zea mays
  Coding DNA Sequence Number=SeqID_4025
  Subcellular localization annotation: CTP_CleavageSite=46; ConfidenceScore=5.09e-01
MSRSTALMAQMVLTTIRRSSTRSGEPTQVTERVVSGSSVSTEDKPVATHDGEELYAELAVHAGVEEYATSTDERDKARPSTMAA

SEQ ID NO: 45805 - protein, 46 aa, Zea mays
  Coding DNA Sequence Number=SeqID_4026
MASSSPLPWLQQGAQLLSSAAMVLDASPLQAWQQLLLLPYVFPFEK

SEQ ID NO: 45806 - protein, 84 aa, Zea mays
  Coding DNA Sequence Number=SeqID_4027
MTTVIPPTTLTTPPELYCRRGLYPSRDLRRGLPFWLWWVQVRSLHDDSRGSLEDMVAGVTWLSILPLGWTVEWDPASAEEGHEE

SEQ ID NO: 45807 - protein, 209 aa, Zea mays
  Coding DNA Sequence Number=SeqID_4028
MARGAEKTAATGSWALSKLESGMQRSKARAATEREERRRARQCTATMGMEDREESRDEQGAGNLKARLWGGRRRRGGASTRFSADCIVAASCGATGFTLRPSLSAGNTAEHPSRVEGAAGREEWLGELEEQGAGTPAGELHGDLEGEEERLVREEHAGRKKTAAARAGKKTEAGAWPKNPTADEDKGMYSGTPKRIRSIEQTTNSYSGK

SEQ ID NO: 45808 - protein, 68 aa, Zea mays
  Coding DNA Sequence Number=SeqID_4029
  Subcellular localization annotation: CTP_CleavageSite=30; ConfidenceScore=5.47e-01
MPCSLELTQPLAQSLCALCAQPSSSLRVLRPAKVSPARALKSTGTLKAPNSQLVTPISIKLQRPDGCD

SEQ ID NO: 45809 - protein, 80 aa, Zea mays
  Coding DNA Sequence Number=SeqID_4030
MAGPRPSPPISDRVVVAARVGEKVAAGTGGADLGRGRGGISSEGESGGVASMVVVVDGAEGGGTGGADLGRALDYQNLIF

SEQ ID NO: 45810 - protein, 62 aa, Zea mays
  Coding DNA Sequence Number=SeqID_4031
MVLVLFPPQELDRAPLKFSPEEIFAEDPPSPRMTPLQQHSPVKNRYHRMRRMEDAAMRSLEV

SEQ ID NO: 45811 - protein, 130 aa, Zea mays
  Coding DNA Sequence Number=SeqID_4032
MIQGQYDGTSDYRKATWLRAKAIAGDFGMVVTGAKTECAVPHDRGTRRAQATERRAQAVRVGRGSAGEPSARDEERGRGAAVGICVRSGGRGIVEADKVAPNCSGTGRQVHALGKSRQGGPPVSGWRNVG

SEQ ID NO: 45812 - protein, 240 aa, Zea mays
  Coding DNA Sequence Number=SeqID_4033
  Gene Ontology: Mol. function=amino acid transporter activity; Cellular component=membrane; Biological process=amino acid transport
  Homolog annotation: Hit_ID=Q7Y166; Match level="QueryCoverage=94%, HitCoverage=69%, E-value=3e-79, Identity=67%"; Hit description =Putative amino acid permease
MCTNLSCAPNIFSIQKTKLPSQRQQQQELPPEDGVIVQALTSQDEQQQAAQGRHGTVQGDQHHRSSSKLTVLPLIFLIYFEVAGGPYGSEQAVRAAGPLFTLLGFLVFPFAWGVPESLVTAELSAAIPGNGGFVRWADLAFGPLAGSLLGTWKYLSCVINIAAYPALVADYLGRVIPAVAGTGRTRTCTVVGMTVFLSFVNYTGLSIVGWGAVALGLVSLAPFVLMTGIAVPKMRPRRWT

SEQ ID NO: 45813 - protein, 219 aa, Zea mays
  Coding DNA Sequence Number=SeqID_4034
  Gene Ontology: Mol. function=amino acid transporter activity; Cellular component=membrane; Biological process=amino acid transport
  Homolog annotation: Hit_ID=Q1RZ34; Match level="QueryCoverage=89%, HitCoverage=40%, E-value=9e-42, Identity=45%"; Hit description=Amino acid/polyamine transporter I
MAATGATDAPPDTWANGYLVDAAGVIGGPWLKFWIEAGVVLSSIGMFEAQLSSGAFQLLGMADLGLLPAVFARRAARFRTPWVAVAASSAVTLAVSFLAFDDVVATANFLYSLGTLLEFAAFLWLRVRQPYLKRPYRVPLSLPALAAMCAVPSTFLAYVCVVAGWRVFALAGALTVFGVGLHGTMRLCRAKRWLRFKTGLVAAAEDRRGDVAVSAGDRV

SEQ ID NO: 45814 - protein, 449 aa, Zea mays
  Coding DNA Sequence Number=SeqID_4035
  Homolog annotation: Hit_ID=Q10LM1; Match level="QueryCoverage=23%, HitCoverage=22%, E-value=2e-38, Identity=79%"; Hit description =Photolyase/blue-light receptor PHR2, putative, expressed
  Subcellular localization annotation: CTP_CleavageSite=34; ConfidenceScore=5.59e-01
MALFVSSLAAALSHLSLPSTSTPKPHPASLLRLRSTYRRVVSLALHTEELDGHRLGGRSKNDSRMKLLLSNPYTDVFNSDGEDDERAAGRGSKRPGESAVETFFSSSRSFSSDSSEFYTNKKQHKKKTATKPKGNGEEVMAVEEEAEEDARAVGRVRFTSRSGSTSTIDRAVQAQLHVLQADPATFTSDLEDAEDFAAWSKEALSQAAAEMQGFSCESDKAWVAQAEMQDKELDIIEMAMYGDVIRPGKQCRCRIVAEVLGQVKPTNHMAAWPLKDHIYLHLNHLPPEVLKERLPGISETDAIFAGVDVTKEPIPVLPTVHYNMGGIPSPNELPWGGIMGRSPRRGEGAKGCGEGGYQCEVLLGSTLYHVEDLPFRLDDIPSNYGGFKEAMKGLDIRKVLEAPEEVKCVPMKNVLEPGDIPTLAELSLTTPPGMAQMSRLQDIDHFLFL

SEQ ID NO: 45815 - protein, 102 aa, Zea mays
  Coding DNA Sequence Number=SeqID_4036
  Gene Ontology: Mol. function=protein serine/threonine kinase activity; Cellular component=cytoplasm; Biological process=protein amino acid phosphorylation
  Homolog annotation: Hit_ID=Q9LUL2; Match level="QueryCoverage=51%, HitCoverage=11%, E-value=1e-15, Identity=67%"; Hit description =Protein kinase
MSNHKLLHVYSKMLEKKKRNLGLQTLHLASKLVSGSGHDNGVDWWAFGVFLYELVYGRTPFKGHTKEATLKNILSKQATYLGFSLSGFARHFVLVFLTYLFA

SEQ ID NO: 45816 - protein, 424 aa, Zea mays
  Coding DNA Sequence Number=SeqID_4037
  Gene Ontology: Mol. function=ubiquitin-protein ligase activity; Cellular component=ubiquitin ligase complex; Biological process =protein ubiquitination
  Homolog annotation: Hit_ID=Q6ER82; Match level="QueryCoverage=97%, HitCoverage=98%, E-value=3e-77, Identity=42%"; Hit description =Putative immediate-early fungal elicitor protein
  Pfam annotation: Domain name=U-box; Domain location=10-84; Score =83.9; E_value=4.9e-22; Accession=PF04564.6; Description=U-box domain
MEEDPQPQVEVPCYFLCPISLAIMRDPVTLPTGITYDRDGIERWLLTATTCPLTKQPVPADCDPTPNHTLRRLIQSWCALHDADSADRVHTPKPRVDRTAVTALVSRVHSAATGSAPPQRPQLLAALRELRDVAAESDRNRKLVAAVPGAVDVLAAVFAASANKSSEGTGTADAVRDDALEVIALLPVPEQCLRRLEETNEALVSALVSALQWSSAPSRARAALLLERVTAALPPSRLASLPEQVFREAVELLRDRPVSRPATKAALQVLVRTAAWGRNRVKAVDAGAVPVLVDMLFDDGAERRACELVLAALDRLCGCADGRAELVAHAAGVAAVGRKALRVSEVATDKAVRVLRSVARHAGTSAVVQEMAQAGVAAMLCVVAQSEQYGKRTRERARETLRLHARAWRTSPCLNHHLQAVYPC

SEQ ID NO: 45817 - protein, 112 aa, Zea mays
  Coding DNA Sequence Number=SeqID_4038
MERSRDGRGRSRAGMGRARRAERSDLANLVGAGREPGGWRSWTEEDGGRGIGWTQQQEGELVGPEQGDVGHGGLGIDARLGRSQGWRLRKRDAGEGISRVGEENWAPCLHGG

SEQ ID NO: 45818 - protein, 82 aa, Zea mays
  Coding DNA Sequence Number=SeqID_4039
MALPDTCLPVLTCWVGFFWLGVQYRTTTKVKIMWALGPSSFKGSFGFGTKNFPHNGMKGDEEWTVKLKDKDLRPNMLTKLKA

SEQ ID NO: 45819 - protein, 505 aa, Zea mays
  Coding DNA Sequence Number=SeqID_4040
  Gene Ontology: Mol. function=protein phosphatase type 2A regulator activity; Cellular component=protein phosphatase type 2A complex; Biological process=signal transduction
  Homolog annotation: Hit_ID=Q6Z8B7; Match level="QueryCoverage=88%, HitCoverage=88%, E-value=1e-105, Identity=43%"; Hit description =Serine/threonine protein phosphatase 2A 55 kDa regulatory subunit B beta isoform
  Pfam annotation: Domain name=WD40; Domain location=137-176; Score =11.1; E_value=1.9; Accession=PF00400.22; Description=WD domain, G -beta repeat
  Pfam annotation: Domain name=WD40; Domain location=231-269; Score =9.9; E_value=2.6; Accession=PF00400.22; Description=WD domain, G -beta repeat
  Pfam annotation: Domain name=WD40; Domain location=282-320; Score =2.4; E_value=19; Accession=PF00400.22; Description=WD domain, G-beta repeat
  Pfam annotation: Domain name=WD40; Domain location=336-373; Score =6.5; E_value=6.3; Accession=PF00400.22; Description=WD domain, G -beta repeat
  Pfam annotation: Domain name=WD40; Domain location=395-431; Score =1.2; E_value=26; Accession=PF00400.22; Description=WD domain, G-beta repeat
  Pfam annotation: Domain name=WD40; Domain location=58-96; Score=2.1; E_value=21; Accession=PF00400.22; Description=WD domain, G-beta repeat
  Pfam module annotation: Pfam domain module=WD40::WD40::WD40::WD40::WD4 0::WD40; Domain location=137-176::231-269::282-320::336-373::395 -431::58-96
  Subcellular localization annotation: CTP_CleavageSite=12; ConfidenceScore=5.29e-01
MSNSGRWRRRTRSVAPSPATSSPSSPGLREAQPFRLPQWKFSQVLGELPPAAEARRDGAPRPQDDDDADEISAIEFDGRGEYLAGGDNAGRVILFRRTDGDGDDARPRAELERTDRAGAPPPRYSYATEFQSHEREFDVLDSLDISERIKKVRWCARPNSSLLMLAANDRTVKLWKVSEHKAEAPKKGNGRPSWGTAALSAATKLPRGCSSAEPDERPEKAAGDVGDGYSAKCRRVFGRAHEFNIHSVSTNCDGETLVSADDVRINLWHAEVTRQCFNIVDMKPADMEDLVEVITTAEFHPSSCSMLAYGSSSGLVRLVDLRRSALCDHSDRENRPQPSTFFSEIISCITDLKFTGDGEHLLTRDYMNLKLWDLRVETSPVATYKVHEFLRPKLSELYTDDYIFDRFGCCASNDGAYFATGSYSKTFRVFSRAAAQTCGATLEASTNPYRIQLHAPTKIPALLSNFSLGVHRKGQDGHPRSDGKEQVSCNMASKSANHRTAFVAN

SEQ ID NO: 45820 - protein, 603 aa, Zea mays
  Coding DNA Sequence Number=SeqID_4041
  Gene Ontology: Mol. function=polyribonucleotide nucleotidyltransferase activity; Cellular component=membrane fraction; Biological process =mRNA catabolic process
  Homolog annotation: Hit_ID=Q6KAI0; Match level="QueryCoverage=93%, HitCoverage=57%, E-value=0.0, Identity=78%"; Hit description =Putative polyribonucleotide nucleotidyltransferase
  Pfam annotation: Domain name=RNase_PH; Domain location=15-141; Score =67.9; E_value=3.2e-17; Accession=PF01138.11; Description=3' exoribonuclease family, domain 1
  Pfam annotation: Domain name=RNase_PH_C; Domain location=144-221; Score=63.1; E_value=9.1e-16; Accession=PF03725.5; Description=3' exoribonuclease family, domain 2
  Pfam annotation: Domain name=S1; Domain location=306-378; Score=51.9; E_value=2.1e-12; Accession=PF00575.13; Description=S1 RNA binding domain
  Pfam module annotation: Pfam domain module=RNase_PH::RNase_PH_C::S1; Domain location=15-141::144-221::306-378
MAGNLPTEPLCKNAGARLASVIPSVDPTRVGGWEQPAPVTLGAPGDAQRLDSIVGPPTKRFMLHYSFPPFSIDEVAKRGGLNRREVGHGTLAEKALLAVLPPESDFPYTVRVNAEVMASDGSTSMASVCGGSMALMDAGIPVREHVAGVSVGLVSQVDPATGDISNYRILTDILGLEDHLGDMDFKIAGTRKGITAIQLDIKPAGIPLDIICESLEPARKARNQILDRMDQEISTARGINDGSSPRLATLSFSNESLRKLLFHRKKIEQETGARVSISDGTVTIVAKTQEIMDKAIEKVEFLVGREIEVGRTYKGIVSSIKEYGAFVEFNGGQQGLLHISELSHQPVTKVSDVVTLGQSLSLRCIGQDMRGNIKLSLKATLPQPRIKKDLKNKDPLPSEVTGWAAVENMSSVDVDAQLSSTEHENGTTEEAAAFSTPSVIIRSAADCDAQDDANGSKKRAKVAKSSPRPNKPASECHDVRKATAKKATGATTKKTKKVKIEESVSNGLETSGSDVPEQSADNTSDQNQSPTKFQSGAMKLGDVVTAKVYQIRAYGLVLELSDGVRGMHKFEANGLKEFEVGQELVVKCSSFNAKGIPLFSLLD

SEQ ID NO: 45821 - protein, 245 aa, Zea mays
  Coding DNA Sequence Number=SeqID_4042
  Homolog annotation: Hit_ID=Q6QP51; Match level="QueryCoverage=89%, HitCoverage=92%, E-value=1e-29, Identity=46%"; Hit description =Putative growth-regulating factor 1
RYFGTGGYEIDDSGYDYGAAASEHSGYVPTTDQGFEGWPPEGFDSRPRTRRARDDSGYVRYMDEARATLPSQQDRSDRSHFAPPLTDLTGKQRRLPCSDCCATRLGEADSSRVQPQAPQEAPPRPTPGLGPRLGLGRWSPLRLTPRLGLNLDLGRRSPPRPTLRLGLNLDLGRRSPPRPTPRLGLNLDLGRRSPPRPTPGLGLNLDLGRNHVLTRPRPRPQEESPPRPTLGSDRPRRGGTSLPYP

SEQ ID NO: 45822 - protein, 966 aa, Zea mays
  Coding DNA Sequence Number=SeqID_4043
  Homolog annotation: Hit_ID=Q10RW7; Match level="QueryCoverage=87%, HitCoverage=92%, E-value=3e-93, Identity=30%"; Hit description =Expressed protein
MHGTARASKAKINGFTGPVYLEKEIQGADKSSRENLEPLRMALVQTAEIPLSPLSHLSVQSKSKTFEICALDWVSCSKWTVLSWGDDDNSSSRKCNTSSLKMLLEKEMSKEAESKRRHPSVIARLMGLEEDLPTKEPTVHHTVSDLSRDLNATNNTLQGKEHHHFIMSKTQNYQSCHEKIEYNDVFEVSEGQPGTDCFHDRTSQKGWSSENKSEQFNIARDKIMEPEQLAIEEKLLCTKELPEALVFPCSNRDLFLEFPEEHNPTFSRQSSGLHANQAPPQTKRITVLKPIRSVDSDGIRRPRAEIGKQNVLKMRRFHQIPSSKEEIPSQPSRIILLRPTPGKPGISKAKLTSRATSFQLPNRNSLNGSLDDNQASIGSAGLVHGMMQCRQDGCHQRDDSLLSSAYSNGYGGDESSFSDSEVDYTSGSEINYIEDCDTLSDSEGGSPLSRHSWNYIRRYEGQCSSSSFSKISHFSESSVVTEAKKQISERWSMVTCNEMSQVQLSRRKCTLGEMLSIKEAKEDEATTGMFYVSSNQSCGLENELTTRSTNVTTSRKNGDNGERSSKLPRSKSVPVISSTSDNMTVNMQASNPESCKLKVAVVSNKGKSAFKGRVSDFFLSKSKRPRRQMPAYHQSDCIAEGLEGCITHNRQDCNHKMDAIEKAMHYDDEFNSFSTRISTSIPDRTTSGASVSLGSSTGNLDKLGVNKCLNGNRDQPSPTSVLDAPSEDSSCNEPETLGTTTSKNAISRSSAIETVARFLSLDDTASESQSLCNPRPSSLLPDADDDESECHVLVQNIMSSAGLGTSQSRMVFAGWHLPDHPLDPVLRNKVSQLQEKSSYRRLLFDCVNVALIEIGENALLSALPWSKRSSRTWRGTSSPDLGVEVWSILKDWIHGARMFVVSKRDNAGIILDRIVKQEVEARGWVKLMMAQVVVITEELEGGVMEELVEEAVLDFYSLFSVVRYRL

SEQ ID NO: 45823 - protein, 468 aa, Zea mays
  Coding DNA Sequence Number=SeqID_4044
MSMGSAELFQRRSEFIVGILQRLGTNNIMRKQEGSMSHRKMDCRHALAIPEGHFDNLIDYKRSNFNPLAKLRNGKIPSSYASDEACEFMALPSGYNQGPGSIVDQKNDLSHGGSGASECMALPWACVNDTLSSDRKGDIVHNQVSNLLLEDVDRYVHGRHASANELSLNGQTDSYGQHRWDPMLSVTFLKSFHDRLYFPCQNEERHAVPYGISNTSEQPELCSSIELCTCSSIGLEIEDPKEAGLCGNSDAGFPSWLAQLVGKPTISSIFDSGNEILDHNDFRCISNFHSNMFSSNSSCLNSMSTPEQSYKVGAKGLLDSSFGLSCLAGLEEYSTDAELPDDSDRFLQVLDQLPVKFISSGFSNNDSRIWDHRSSNAEPPFNQDWGTTQPWSSVHQLQPHSDSGTVLGFMPNGSAYSDLVERHHSLMLVQGNLSTDVLGATDLSFFGSCSSLDNITEAPTLSSDGITW

SEQ ID NO: 45824 - protein, 133 aa, Zea mays
  Coding DNA Sequence Number=SeqID_4045
  Homolog annotation: Hit_ID=Q6ZH85; Match level="QueryCoverage=33%, HitCoverage=8%, E-value=8e-07, Identity=66%"; Hit description =Putative leucine-rich protein
  Subcellular localization annotation: CTP_CleavageSite=40; ConfidenceScore=5.43e-01
MWYEYLTLSWSRETSSARRPQIRTTGFGSRRSCRVARFTRSTTFPSSPYLRTRGDWGGIGGGRCAQRAQSQARWAATSRGLGAIAGEGARAGEIRGRGRVSGRRRGVRGGVKRECGRKRGHDEGIGKVTVRGW

SEQ ID NO: 45825 - protein, 87 aa, Zea mays
  Coding DNA Sequence Number=SeqID_4046
  Homolog annotation: Hit_ID=Q6QP51; Match level="QueryCoverage=55%, HitCoverage=22%, E-value=3e-10, Identity=70%"; Hit description =Putative growth-regulating factor 1
MQVACNCTTGAHPFDFDASSMEAQAHTSWTGKGIFRKGSFFAKEAGPEPPTDQGFEGWPLGRVRQPPQSTRASGSLLIRGSKAGVTP

SEQ ID NO: 45826 - protein, 171 aa, Zea mays
  Coding DNA Sequence Number=SeqID_4047
MSTVRKRLEAEKLCQKYGSTNAKRGKRSASTHVTNRGGTNRWASGPAHRGSSSLMLHLNEKKERLINSADPKMVAVNLGSEARVACSSHLTQSSFFGPCAVLDACCLVVAVDLDSEGGQQIWDDAQLSTDHLLGVIYCGIELTQLDAIAYDAEFHFKKWTPTSATSSLAPR

SEQ ID NO: 45827 - protein, 75 aa, Zea mays
  Coding DNA Sequence Number=SeqID_4048
MAWADDGGPSDVVGDGWHGRAAGTCPWELIANAQRQQRNKRKVYFAKRERFVGFRMNVLVGICALVHQIRCRFVF

SEQ ID NO: 45828 - protein, 329 aa, Zea mays
  Coding DNA Sequence Number=SeqID_4049
  Gene Ontology: Mol. function=protein binding; Biological process =protein modification process
  Homolog annotation: Hit_ID=Q1S0J6; Match level="QueryCoverage=56%, HitCoverage=54%, E-value=1e-34, Identity=42%"; Hit description =Ubiquitin; Apoptosis regulator Bcl-2 protein, BAG
  Pfam annotation: Domain name=ubiquitin; Domain location=71-138; Score= 7.9; E_value=0.041; Accession=PF00240.13; Description=Ubiquitin family
MAWVMHRSSSDGGSSSGWSDAAAAVVAAAEERAGWEVRPSGMVVQARDDAAGSGGAPPRPPPPPEIKVRVKYGGARHEVSVSPIATFGQLKKLLAPRTGLQPADQQLSYRGRARGNAEYLDACGVKNKSKVALAEDPASVERRYIERQRNATAESANRAIGAVALEVDKLADQVTSIEKSISRGNKVPEVQITTLIELLMRHAVKLESIPAAGDSSSQKNIQVHTPTLHYCTPGACCQLNGIPAWALFGPVPDFHQGHRSISYATAASATSSVSDDDISSLQRAKRVQKCVETLDVLKVSNARLQAVVVTTKWETFDAAATTTKWELFD

SEQ ID NO: 45829 - protein, 110 aa, Zea mays
  Coding DNA Sequence Number=SeqID_4050
MVALGERGTGAGAGAGGARAVLGRCSRAELAAGLGGAGAGGGGQPELGQAAAASRSWGRRRRRPDGRRRRRDFVGGGEFLGAKICGAELGATRDGHVTKLGAIGYGAELC

SEQ ID NO: 45830 - protein, 258 aa, Zea mays
  Coding DNA Sequence Number=SeqID_4051
  Pfam annotation: Domain name=DUF584; Domain location=37-165; Score =51.5; E_value=2.8e-12; Accession=PF04520.4; Description=Protein of unknown function, DUF584
MARTTRSAATERAYLHFAPAPHGGGVVVVPTSPLAGTGEDFDESDIWGAFAPSAAAAPAAEAPPPRARPFVLAAAGKATTKPAAPAHGSLPVKIPDWSKILGDEYRPAGYHHGWDWEVDDADDDGSVDALVPPHELACRRRAASLSVNGVVGRTLKVRDAVVVQEVDGCCLLSSLPHAAQSAAAVTSIIGDLILVVGSPGWQLQEDGGGGICCFSLSSLPAPTVCEETIGSALGSAQKVSPITALAYQGNIALAGVSS

SEQ ID NO: 45831 - protein, 133 aa, Zea mays
  Coding DNA Sequence Number=SeqID_4052
  Gene Ontology: Mol. function=DNA binding; Cellular component=nucleus
  Homolog annotation: Hit_ID=Q9SM14; Match level="QueryCoverage=75%, HitCoverage=27%, E-value=1e-27, Identity=86%"; Hit description=SBP -domain protein 6
MAWRPDEGRQCCYKDQFIALVVEWLKVPPPEPPWSMRGRCGGPPLPAGRARARRRSGPPRSLGGPGAEHSRDAARSWRCRQQGLLSPSRRSTPRRCSPCVTDTMEDAAEKPINKEKEQLHVSGSTEVIRAFGE

SEQ ID NO: 45832 - protein, 75 aa, Zea mays
  Coding DNA Sequence Number=SeqID_4053
MWRREHDIIYNQNKSETKNLVAPLPAVTPEEIGERYKDLEESIRGFIKDLDEAEKEEEEDGGTSEAASPSSVDDE

SEQ ID NO: 45833 - protein, 827 aa, Zea mays
  Coding DNA Sequence Number=SeqID_4054
  Gene Ontology: Mol. function=protein dimerization activity; Cellular component=nucleus; Biological process=regulation of transcription, DNA-dependent
  Homolog annotation: Hit_ID=Q8S976; Match level="QueryCoverage=82%, HitCoverage=96%, E-value=0.0, Identity=52%"; Hit description=Auxin response factor 10
  Pfam annotation: Domain name=Auxin_resp; Domain location=334-417; Score=172.2; E_value=1.3e-48; Accession=PF06507.4; Description=Auxin response factor
  Pfam annotation: Domain name=B3; Domain location=181-286; Score =108.7; E_value=1.8e-29; Accession=PF02362.12; Description=B3 DNA binding domain
  Pfam module annotation: Pfam domain module=Auxin_resp::B3; Domain location=334-417::181-286
  Subcellular localization annotation: CTP_CleavageSite=71; ConfidenceScore=5.06e-01
MTHTEIHGPQTSTQLHAYVDPLLRSSVTHDTRSSSSVRLLHLCIPLTPPAAGPRIGAFPMITFADLTEPAAAGAERCVDRQLWLACAGSMCTVPLVGASVCYFPQGHAEHALGLDGAADLSAARVPALVPCRVTAVRYMADPDTDEVFARIRLVPLRGGEAHAGGLDDDVAAADEQEKPASFAKTLTQSDANNGGGFSVPRYCAETIFPRLDYAADPPVQNVVAKDVHGTAWKFRHIYRGTPRRHLLTTGWSTFVNQKKLIAGDSIVFLRGDSGDLHVGIRRAKRGFCGAGGGGGDEAPTPGWHHYAGLIRGNVSPCAAAKARGKVRPEDVAEAARLAAAGQSFEVVYYPRASTPEFCVRAAAVRAAMRVQWSPGMRFKMAFETEDSSRISWFMGTVAGVQVTDPIRWPQSPWRLLQVTWDEPDLLQNVKRVSPWLVELVSSMPAIHLASFSPPRKKPRIPAYPEFPFEGQLLNPAFPPSPLPHGQQHHHNFLHAHPPSFFPFPDGSAPAAIQGARHAQFVPSLSDLHLIHLQSSLLYPGLRRPDHVGPTIPIPSGISTDLTIGGAPARDGVPCALSVGASKQNPDAVKPAGLVLFGRTILTEHQMSLSSSGGATSPAATGNSSLCWTAEKGPNVSEGSGSGSGSGVIQNSPTGKNTSSERLPWFGDGSSQQASEPGLEPGQCKVFVESDTVGRNLDLSALGSFDELYGRLSEMFGVEGAEMRSRVLYRGATGEVRHAGDEPFRGDSNRSEGGEKVAVGEVEWPHGGASAPRRAGDLRLAATRASVGGAWALLPRGQPLAVWPTPTIAQGERGGTPAVKPPAALLVA

SEQ ID NO: 45834 - protein, 97 aa, Zea mays
  Coding DNA Sequence Number=SeqID_4055
MTPAEIGERYKDLADTVKGFLKDLDEAEKEIVAGTSQAATPPASVEDHLLIIWMLGDNLAVLIILTDDVLTAEWRNKVQPGEDHAAYASLASYCTNG

SEQ ID NO: 45835 - protein, 146 aa, Zea mays
  Coding DNA Sequence Number=SeqID_4056
MAGVEEKGGALGARDDGGGASDWQDGRLMRIGRSWLINCRKLRKLSRVFDSSCWRRIWKVTNPTLSEKIMFIAGMRGAEDLAGKEVENGGSNGVKEGSSGPVLYRSGRFQTNCNGIFHSLLGARVDLGKHCLDAHGGKCVEVAAGV

SEQ ID NO: 45836 - protein, 250 aa, Zea mays
  Coding DNA Sequence Number=SeqID_4057
  Gene Ontology: Mol. function=sequence-specific DNA binding; Cellular component=nucleus; Biological process=regulation of transcription, DNA-dependent
  Homolog annotation: Hit_ID=Q6YW48; Match level="QueryCoverage=83%, HitCoverage=55%, E-value=4e-59, Identity=63%"; Hit description=Zinc finger protein-like
  Pfam annotation: Domain name=GATA; Domain location=213-241; Score =30.1; E_value=7.8e-06; Accession=PF00320.17; Description=GATA zinc finger
MVDWMDMVVVDMVEVEEVEEEYMSTVFMTQLPRTLRLMEGEQDQGLFPASTFHVAKDPPILFPFMITSPVHVDQLQGQSSYGDQHLGQHVLSESTQQFTDRTMISGSEVFPRRPSPFGQTIQSIDGDMIQPSAYDPYDIVENQRTEGLSGGGWTVSSSSSSPPAKMKIMRKATSEYPEGGAARKPRRRAQAHQDESQLLTMQQQAMGVVVRVCSDCNTTKTPLWRSGPRGPKVNYQVIGKRPDLRVRLRF

SEQ ID NO: 45837 - protein, 523 aa, Zea mays
  Coding DNA Sequence Number=SeqID_4058
  Gene Ontology: Mol. function=protein-tyrosine kinase activity; Cellular component=cytoplasm; Biological process=protein amino acid phosphorylation
  Homolog annotation: Hit_ID=Q6K1X9; Match level="QueryCoverage=92%, HitCoverage=98%, E-value=0.0, Identity=77%"; Hit description =Putative ankyrin-kinase
  Pfam annotation: Domain name=Ank; Domain location=117-149; Score =46.8; E_value=7.4e-11; Accession=PF00023.20; Description=Ankyrin repeat
  Pfam annotation: Domain name=Ank; Domain location=84-116; Score=4.2; E_value=7.7; Accession=PF00023.20; Description=Ankyrin repeat
  Pfam annotation: Domain name=Pkinase; Domain location=205-468; Score =109.4; E_value=1e-29; Accession=PF00069.15; Description=Protein kinase domain
  Pfam annotation: Domain name=Pkinase_Tyr; Domain location=203-468; Score=87.8; E_value=3.4e-23; Accession=PF07714.7; Description =Protein tyrosine kinase
  Pfam module annotation: Pfam domain module=Ank::Ank::Pkinase::Pkinase_ Tyr; Domain location=117-149::84-116::205-468::203-468
  Subcellular localization annotation: CTP_CleavageSite=43; ConfidenceScore=5.27e-01
MDAAAKKMTRSISRQLSSGAARLWRQLSLDPHTPRRGGPGPVPAAGAGQTRFAIARQSSLDPTPRGGPDGSSAHQQLAVPENLDATMRLLFAACQGDAAGVEELLRSGVDVDSIDLDGRTALHIAACEGQGEVVRLLLDWKANINARDRWGSTPAADAKHYGHFEVYNTLRARGAKVPKTRKTPMAVSNPKQVPEYELNPLELEFRRGEEGTYLAKWYGSKVFVKILDKDSFSDAESMSLNSLVVQSRNAFKHELTLLEKARHPNLVQFVGAVTQNVPMMIVSEYHQKGDLASYIEMKGRLKPHKAIRFALDIARGLNYLHECKPEPIIHGNLSPKNIIRDDEGQLKVAGFGSLSLSKVSEDKVQMAQPVTKFDNVYIAPEVYKNEPFDRSVDVFAFGLILYEMIEGAPAFHPKPQEEAAKMICLEGLRPPFKNKPKYYPSDVKELIQECWDPMPSVRPTFAEIIVRLNKIHANCAKQGSWRDTFKLPWYISYHLSIISCQSPVQLLFKVLPVWPFPTIASPF

SEQ ID NO: 45838 - protein, 719 aa, Zea mays
  Coding DNA Sequence Number=SeqID_4059
  Homolog annotation: Hit_ID=Q2RBQ3; Match level="QueryCoverage=96%, HitCoverage=99%, E-value=1e-103, Identity=42%"; Hit description =Expressed protein
MASPRRIPSVPARSGNKENISQDGEAPLDFATLPKEGPATTRRKKKLAGFNLRKSIAWNPAFLTEEGLIVTSKNFVGVLDNSELSVLTGSQPMANRSPGSGMSRIPKQLRPSLPKVPRSTSSVTNNLESHKKIAPVKAELVHRVTGFPARLKINPVSSGPSIEKAVVPAVTAIHEEATVKCKKNPAHPQISPSTPFDSTVSKLAKPSALRLPSPSLGFFTQEKAHVPHGDAAKRNVGRCFSSNTSALDRPPRYRQSEESRLHLAKQLSTNGTVASNLVLPVTREGHLKSLVVPENESSSKVIITYLEKSGNVNNQAMPKADFLLAGTGATDTTQPMNLEKKDDAGNSETLLVEGMDDIKEIEPLDNFYAPEAICSSTIRPVEDSFSLEASYSSTKPIVESKLSLSCISSKVHSSSELSCQGKSVSDPSAAMDMENSNVGDTALSASLSKGRSCTPALDLLQGFYSFDRQNIECPMLMESVSTICADQLPHCDSLSDETPALAGSHSDLNDSLCDEAKPALSKEPNTEGEMELQTNSTIAVKETPLLDVGCGHIHNYRTTDCSTRLEAPTPCVERRHALLVEPNMEEKMVLDTNRLSAIQYTPHIEKNKALERSPANTIRKDHLKNLIPFTEEWLAVMESCGQEVLEQKTGAVQNSPPDKTPPEPSPWSPVKRKAQDVGPFDCTKYSKSIRTSGQLKQLETEQLEQPRPVALFCPSNSDE

SEQ ID NO: 45839 - protein, 207 aa, Zea mays
  Coding DNA Sequence Number=SeqID_4060
MSSSSSMGGSLALAAATAVALSGSLVIFSLCRAHLAHGAEPEPEPEHALRPCLSSSERRTRGGGKAKARRRKGERRVRFAADVVDNEGATRPVRFSPPAPSSSAATCGDAARSEDPMMPANREALYRGMLRDRSTHRGLDFGSGASPSLTGHDRDFAWADYVLIDSPSSLHRVTPVWVGYCILGRRITLRPRELTGILGGSVVLGPG

SEQ ID NO: 45840 - protein, 575 aa, Zea mays
  Coding DNA Sequence Number=SeqID_4061
  Gene Ontology: Mol. function=protein binding; Cellular component =nucleus; Biological process=ethylene mediated signaling pathway
  Homolog annotation: Hit_ID=Q6Z796; Match level="QueryCoverage=81%, HitCoverage=99%, E-value=0.0, Identity=46%"; Hit description =Putative F-box protein
  Pfam annotation: Domain name=F-box; Domain location=166-214; Score =18.8; E_value=0.02; Accession=PF00646.23; Description=F-box domain
  Subcellular localization annotation: CTP_CleavageSite=70; ConfidenceScore=5.19e-01
MRCHAPGLLVRLGNGDGCNGRGRSVVSSTIPTEVPLLLPSFASFFSPVAGGDRVPFFLLRRAVNASGPLRRSRSGGDRAPVRSPGLDSIGRGRGSFGLGKFEDMPALYAYYGDGGCLVSAPAELAGLFCRGAVQQRKRTLVTASAVAAAAAEFVRAAKKQRQLPLPSLDALPDECLFEILRRVPGGRGRGASACVSRRWLALLGSIRASELGQAAAAAADTPSLPDLNEEFVMEEDNEESPADRCVDRVLEGKEATDVRLAAMAVVAGSRGGLEKLAVRGSHPTRGVTDQGLSAVARGSPNLSSLALWDVPLITDAGLAEIAAGCPSLERLDICRCPLITDKGLVAVAQGCPNLVSLTIEACPGVANEGLRAIGRSCVKLQAVNIKNCPLVGDQGISSLVCSATAALTKIRLQGLNITDASLAVIGYYGKAITDLTLTRLAAVGERGFWVMANAAGLQNLRCMSVTSCPGVTDLALASIAKFCPNLKQLYLRKCGYVSDAGLKAFTESAKVFENLHLEECNRVSLVGILAFLLNCREKFRALSLVKCMGIKDICSAPAQLPLCRSLRFLTIKDCP

SEQ ID NO: 45841 - protein, 236 aa, Zea mays
  Coding DNA Sequence Number=SeqID_4062
  Homolog annotation: Hit_ID=Q6Z6H0; Match level="QueryCoverage=39%, HitCoverage=55%, E-value=8e-43, Identity=90%"; Hit description=S -adenosylmethionine:2-demethylmenaquinone methyltransferase-like
MSQPLISILIHVLDAAVDQDTSPPVVLRMLDGVAAKDGAAHAAATVNHEDPTVAFLLEELADQDVVLLDLERDDGAGEDLAPSVDLEDGLERAELAVHDQVRGNQRLDTRRLIPRHSVSGVHSILGPEEHGTGFGNGQEGKWPVGGVKTGGRPRQLGLGLGGLAAWEAGTAGLAGSRLLVRRARVRVCALPRARGAREFVTAAVQPPAAWSEDATRCWEDWPSGTLGVRRRPPGKT

SEQ ID NO: 45842 - protein, 61 aa, Zea mays
  Coding DNA Sequence Number=SeqID_4063
MAGGDRDGPYAGRGKKDNEVADNWGPQYHNYPNDSGINKVFLTVWTVPQFPEKPGPTRKFS

SEQ ID NO: 45843 - protein, 137 aa, Zea mays
  Coding DNA Sequence Number=SeqID_4064
MDVQWWIKETDDVLLDLALLNGQQYRPVGSNDDAVIQMTSMETRSSSVTIDVVMTSSRQEVTIVWIVTSPKCVAPVKPRSTDSTPLEAVSPSSAMTGNLDWKRAEQHEILEALIDKKTVGPGGSGTMYKIELAAASW

SEQ ID NO: 45844 - protein, 158 aa, Zea mays
  Coding DNA Sequence Number=SeqID_4065
  Gene Ontology: Mol. function=oxidoreductase activity; Cellular component=integral to membrane; Biological process=electron transport
  Homolog annotation: Hit_ID=Q8S7V0; Match level="QueryCoverage=46%, HitCoverage=10%, E-value=2e-17, Identity=60%"; Hit description =Putative plant cytochrome P-450 protein
MEVDTLDIHDEAVKKRRCTTKKPYFRSTVGASLEVIQKNRAEKPDVRGTIREVAVTLHVDKITSLLALFYQGVEDYLVNVEHVLKTNFTNYPKVNMSKSVMFSLARCCAKGDMYRSYMDLLLGEDIFNTDGELWRKQRKTTIFKFTSKTLRSSVGQRW

SEQ ID NO: 45845 - protein, 449 aa, Zea mays
  Coding DNA Sequence Number=SeqID_4066
  Gene Ontology: Mol. function=protein dimerization activity; Cellular component=nucleus; Biological process=regulation of transcription, DNA-dependent
  Homolog annotation: Hit_ID=Q2QRD1; Match level="QueryCoverage=72%, HitCoverage=70%, E-value=3e-53, Identity=56%"; Hit description=HAT family dimerisation domain containing protein
  Pfam annotation: Domain name=hATC; Domain location=323-407; Score =88.6; E_value=1.9e-23; Accession=PF05699.5; Description=hAT family dimerisation domain
  Pfam annotation: Domain name=zf-BED; Domain location=145-195; Score =30.0; E_value=8.3e-06; Accession=PF02892.5; Description=BED zinc finger
  Pfam module annotation: Pfam domain module=hATC::zf-BED; Domain location=323-407::145-195
  Subcellular localization annotation: CTP_CleavageSite=102; ConfidenceScore=5.49e-01
METREPVGSGSLPPRAQASTAQQRERVRRSLVSPAALRPTPPAPASIRAATPPLSPSTTSPLDDPNGSAATPSPLIRMLFCRLGLSTNDDGRVPGLSSDDCNAEGEAAVLGSTPSCPASLDGEGASLESTAGGDNKRMRTRASTSEVWKDLKPLFKILNGKQVRYAAVCKICNVELSAKSTGGTGHLLRHVAACTRKAEAAGSLSQTHLHYTADGHVHHFEYDPVNARTQLCRLIARLDLPLNIGATDAFEEYIRFAHNPRFQRVSRQSTTRDLETYFHAKVSEVKNLLAKATCVCLTSDIWSGNAKEDYLSVVVHFVNDAWELEKRIIDSDPLTEFDDSFSVLSWWRDHKRTYPILSILAKDVLTVPVSTISSESAFSLCGRLIEERRRSLTPEHVEMLSLALDWEQAAVRQQHCVENKDLEELMANMYLDAQEEGSTCVGGGDGHDH

SEQ ID NO: 45846 - protein, 357 aa, Zea mays
  Coding DNA Sequence Number=SeqID_4067
  Gene Ontology: Biological process=cell adhesion
  Homolog annotation: Hit_ID=Q06I72; Match level="QueryCoverage=73%, HitCoverage=85%, E-value=4e-38, Identity=38%"; Hit description =Fasciclin-like protein FLA34
  Pfam annotation: Domain name=Fasciclin; Domain location=103-231; Score=-5.9; E_value=0.011; Accession=PF02469.12; Description =Fasciclin domain
  Subcellular localization annotation: CTP_CleavageSite=7; ConfidenceScore=5.05e-01
MNWSPVRHPTIQTPLLTPFPPPQQASLPIHGYIYAELSFTSLSPLLTATTFVRIRALCHRMAPFLLALLAVLLPAAPPSLGAGYGEGGAGTINITKTLAGFPEFSVFSAMLTETSVALAINSRDRATVLAPNNTAVAAAFGGLPHIPRSFLADLLALHVVLDYVDEPRLGALERGRTGRGSVVTTLLQVMRAVPRGTGFLRVYAGRDGRATVSSAAPAGLRNATVERVVAAQPYSLAVLQVSGFVVPPGIRVPKPFPPPRARHMAAPPGQAPVAAPGPQQEPFVGSGPLVPSPIRPVPTPNLTNTPPALGETGIIPIPSVHGGMAAKVPSPAGRSATSWWNGVAVAFGIMTCLNLHL

SEQ ID NO: 45847 - protein, 420 aa, Zea mays
  Coding DNA Sequence Number=SeqID_4068
  Gene Ontology: Mol. function=DNA binding; Cellular component=nucleus
  Homolog annotation: Hit_ID=Q9SM18; Match level="QueryCoverage=99%, HitCoverage=96%, E-value=1e-111, Identity=60%"; Hit description=SBP -domain protein 2
  Pfam annotation: Domain name=SBP; Domain location=193-290; Score =153.6; E_value=5.2e-43; Accession=PF03110.5; Description=SBP domain
MSPPSTDVVVDDFSLGAMHQPYVVGFHADAGMRIMPSVVVDRPLLQQNTDLLEEYDSFDFAATGLLPLPFQELPGLLPPANYLPLPTPSMAMSPPSLRLLTLPGVPVPTAAADVVYGGLGGGGAGGPSFLKREHGVGSGGGRIGGLNLGRRTYFTPAAVDRLLGGGLGGVGLGMSVLGLGVGAAHHHQQQPPRCQAEGCKADLSAAKHYHRRHKVCEFHTKASAVAAAGKQQRFCQQCSRTQMTRVTSDMASLDENDSGFHVLAEFDEAKRSCRKRLTEHNRRRRKPISAQGNNDHSSPPPPAPKKADTCITTSYNDDPKNNEQRDGGGTDGAISGSAAPAAASRAASREGREPGLRADAAAGSLLVHGRRRDDDDEEHRCFITSLVTQTQQQQQHGGNVLSCSSIGVRSAQNGGQQRFL

SEQ ID NO: 45848 - protein, 601 aa, Zea mays
  Coding DNA Sequence Number=SeqID_4069
  Gene Ontology: Mol. function=RNA-directed DNA polymerase activity; Biological process=RNA-dependent DNA replication
  Homolog annotation: Hit_ID=Q6Z6S7; Match level="QueryCoverage=28%, HitCoverage=30%, E-value=3e-43, Identity=55%"; Hit description =Putative negative regulator of systemic acquired resistance
MPTTVGGTFGDLTTTPLKKLTDFLWARCRFTLSTDSYGKANAFVERKWKLEIILQYFSKYCGKLMLVSCRLIGISCRSGSEPVAFILIVDSIGAVRTRRSDNSQEDLKLENVLNFFVTATSAKAIVRKMSAEIAQLLLTHAYQACLSAEDANSNSADTPEKVGATLQEISSNFIAAFQNIRKVSPDIQISPFEKEALFTAATLVRKLKSKERLYVQVSLKRLGQSLNPPWGFLVASEIFVINGDDDIAMQYANLFNCQIGSFPMMYLGVPVSPNRLHIADWRKLEEKLEKRLDSWKGSSLSVAGRITLINACLSNSPIYHMSMYLLPKTTIDNLDKRRKKFLWQGGGDKKKYHLVRWDKWWWKLENEKGIWQEIMNSKYIHGNSILNIGPRVGDSQILVIDVIKKNVQLDFRRWFSDDDRKKWDEILEKFQMFEFQELGDDVKWKWGNKKEFTVKTLYVNIDSNCFCPDFESANHLFFTCHTARSVWGCVAKCFNSDHVPNNIEQCWMWLNRNLFDGKEIGIVGAAAICWALWKARNKACFENIVINSPMEIVCHACALIMKWAGLSKRELQDLLHDGAKLLLKAANAKINPQTPSEDGGH

SEQ ID NO: 45849 - protein, 79 aa, Zea mays
  Coding DNA Sequence Number=SeqID_4070
  Homolog annotation: Hit_ID=Q4U0Z7; Match level="QueryCoverage=90%, HitCoverage=6%, E-value=1e-34, Identity=95%"; Hit description =Cellulose synthase BoCesA4a
MKREYEEFKVRVNGLVAKAQKVPEEGWIMQDGTPWLGNNTRDHPRMIQVFLGHNGGLDTEGNELPRLVYVSRYANRNTV

SEQ ID NO: 45850 - protein, 301 aa, Zea mays
  Coding DNA Sequence Number=SeqID_4071
  Gene Ontology: Mol. function=monooxygenase activity; Cellular component=integral to membrane; Biological process=electron transport
  Homolog annotation: Hit_ID=Q6EP96; Match level="QueryCoverage=99%, HitCoverage=64%, E-value=1e-148, Identity=81%"; Hit description =Putative cytochrome P450
  Pfam annotation: Domain name=p450; Domain location=1-297; Score= -67.3; E_value=6.6e-08; Accession=PF00067.12; Description=Cytochrome P450
MQMIFDLTAKKLISYEPSKSSEDLRKNFVAFIRGLISFPVDIPGTAYHECMQGRKKAMKVLRTMMRERMPHPGRQNEDFFDVLIEELRREKPVMTEAIALDLMFVLLFASFETTALALTLGIKLLAQNPRVLRALTEEHEAIVSSRKDRDAGLTWAEYKSMTFTSQVTLEIVRLANIVPGIFRKALQDIEFKGYTIPAGWGVMVCPPAVHLNPEIYEDPLAFNPWRWQDKVEITGGTKHFMAFGGGLRFCVGTDLSKVLMATFIHCLVTKYSWRTIRGGNIVRTPGLSFPDGFHVQLFPKN

SEQ ID NO: 45851 - protein, 186 aa, Zea mays
  Coding DNA Sequence Number=SeqID_4072
  Gene Ontology: Mol. function=monooxygenase activity; Cellular component=integral to membrane; Biological process=electron transport
  Homolog annotation: Hit_ID=Q6EP96; Match level="QueryCoverage=93%, HitCoverage=35%, E-value=3e-70, Identity=74%"; Hit description =Putative cytochrome P450
MEPLLCAAVWAVTLAVAMAWAYRWWSHPKANGQLPPGSLGFPLLGETLQFFAPNPTCDVSPFVKDRLDRYGNIFKTSIVGRSVVVSADLLNYYVFQQEGKLFESWYPDTFTEIFGRDNVGSLHGFLYKYLKTLVLRLYGQENLRAVLLAETHRACRASLASWATRPSVELKDAISTEGLLQITSLL

SEQ ID NO: 45852 - protein, 130 aa, Zea mays
  Coding DNA Sequence Number=SeqID_4073
  Gene Ontology: Mol. function=transferase activity
  Homolog annotation: Hit_ID=Q6EP89; Match level="QueryCoverage=62%, HitCoverage=18%, E-value=5e-25, Identity=70%"; Hit description =Membrane bound O-acyl transferase-like
MTSYLYHGQGRGTVIYRWQQAASSSLLSGILAFLNFAYTLLVLNYSCIGFQVLSFKETLASYRSVYYVGTIVPIVCLLLGNVIKPARKAKARKTDFSFDVVRMEMEVMGAFRVVILLGTDEPDVRFLWVI

SEQ ID NO: 45853 - protein, 212 aa, Zea mays
  Coding DNA Sequence Number=SeqID_4074
  Gene Ontology: Mol. function=transferase activity; Cellular component= endoplasmic reticulum
  Homolog annotation: Hit_ID=Q6EP89; Match level="QueryCoverage=80%, HitCoverage=51%, E-value=2e-38, Identity=85%"; Hit description =Membrane bound O-acyl transferase-like
  Pfam annotation: Domain name=MBOAT; Domain location=16-212; Score =32.5; E_value=2.9e-08; Accession=PF03062.9; Description=MBOAT family
MGTQIKSMSGFELETSDFYTMLEWTSSNQKLKLMKEGALMVLTLKVISCSINYSDGILKEEGLRDAQKKNRLTKLPSLIEYFGYCLCCGSHFAGPVYEMKDYLEWTERKGIWASPTPSPLLPTLRALVQAGFTGWSESSPPKAKWDRAKNVDVLGVELAGSSVQLPLVWNIQVSTWLRYYVYERLIQKGKKPGFLQLLGTQTVSAIWHSNRC

SEQ ID NO: 45854 - protein, 303 aa, Zea mays
  Coding DNA Sequence Number=SeqID_4075
MTALDADEDDELMHQEYRSMIGYLLGCGRVVIDEIEHQRALMVDLHDLILPILDPCSRQAKHVQQLFQDISSSSSKVISFVLELADDNSKKQQASKVVKDRRKAGGKNVVESHMLLEEAKEIGKNRRSVAVSSTSHHGSKMSNAVASLLALAVVRATCRGRPPSSLLLDFPPLAPCAYHSPPAVSGRRSVVVSSMCYHGSKMSKAPSSQTKADPRAPALALSSTTNLANLLPTGVLLAFNLLALKSPFDGCVYYVVTSCTGLRLLNYLPDASPLPEGVTRRSPPQGTGTRHRDTHRRQHRRKV

SEQ ID NO: 45855 - protein, 160 aa, Zea mays
  Coding DNA Sequence Number=SeqID_4076
  Gene Ontology: Mol. function=sequence-specific DNA binding; Cellular component=nucleus; Biological process=regulation of transcription
  Homolog annotation: Hit_ID=Q2QYJ7; Match level="QueryCoverage=69%, HitCoverage=40%, E-value=7e-29, Identity=55%"; Hit description=WRKY DNA binding domain containing protein, expressed
  Pfam annotation: Domain name=WRKY; Domain location=2-55; Score=-0.1; E_value=0.00073; Accession=PF03106.6; Description=WRKY DNA -binding domain
MTNYLHRPKKNYYRCANSKDQGCPATKTVQQKETDGSGAVKLFDVDYYGQHTCNKDGVIHPYVVDTAHDSVPTVDHNQSCSTPTSSAHNNGVHGILQDDESFENLFMVPSIPEHLTDESFENLVMVSSIPEYYLADFTDVEMAEGALEVASMMISEDIWA

SEQ ID NO: 45856 - protein, 92 aa, Zea mays
  Coding DNA Sequence Number=SeqID_4077
MDHHYPVSGNGHMKGDKVHCRAIAPSRRHPPLGLRSLCSARQLPGVDDVDADHSRTPTIGGDSIETLLDVNNIFVQKVAQWCKLAPVLDNLG

SEQ ID NO: 45857 - protein, 335 aa, Zea mays
  Coding DNA Sequence Number=SeqID_4078
  Gene Ontology: Mol. function=isomerase activity
  Homolog annotation: Hit_ID=Q2QYK6; Match level="QueryCoverage=63%, HitCoverage=94%, E-value=4e-53, Identity=55%"; Hit description =Chalcone-flavanone isomerase family protein, expressed
  Pfam annotation: Domain name=Chalcone; Domain location=24-245; Score =77.0; E_value=5.8e-20; Accession=PF02431.6; Description=Chalcone -flavanone isomerase
FCMHGLFHRMDDCDEEQRRCAVGSETETVNVEGIPFPAEITVGNPLSLLGTGITDIEIHFLQIKYNAIGVYLHNAGGGDSTTPTLLGHLGAWKGKTAEELLADAAFWAALVAAPVEKLFRVVVIKEIKGSQYGVQLESSVRDRLAAADLYEDDEEEALEKVADFFQSKYFKPGSVVTFHFPAPASASPGPAAEITFATEGKGDARIAVENGNVAGMIQTWYLGGDSAVSPSTVRSLANRFAALLAVAAPPETPSPQTFAIAMSATNIVAAKRPPTRLPPLRLPATAHAPRIPHARLRETLAYHTNVARHEAPARSTPAAANPATTRRLRFNMRGR

SEQ ID NO: 45858 - protein, 157 aa, Zea mays
  Coding DNA Sequence Number=SeqID_4079
  Gene Ontology: Mol. function=lipid binding; Cellular component =cellular_component; Biological process=lipid transport
  Homolog annotation: Hit_ID=Q8W533; Match level="QueryCoverage=56%, HitCoverage=74%, E-value=9e-37, Identity=80%"; Hit description=Lipid transfer protein
  Pfam annotation: Domain name=Tryp_alpha_amyl; Domain location=34-119; Score=108.7; E_value=1.7e-29; Accession=PF00234.12; Description =Protease inhibitorseed storageLTP f
  Subcellular localization annotation: CTP_CleavageSite=15; ConfidenceScore=5.36e-01
MAAVLNSRKTPQAVVAVLVAAALLASSASAAITCGQVGSSLAPCIPYATGRASALPASCCSGVKSLNSAARTSADRQAACRCLKSLANSVKSVNMGTVATIPGKCGVSVGFPISMSTDCNKYVIQLACLFAVIIHAYAYASPSFIFSILLGHACRIS

SEQ ID NO: 45859 - protein, 124 aa, Zea mays
  Coding DNA Sequence Number=SeqID_4080
  Gene Ontology: Biological process=transport
  Homolog annotation: Hit_ID=Q75IP8; Match level="QueryCoverage=80%, HitCoverage=17%, E-value=4e-15, Identity=35%"; Hit description =Putative chloroplastic RNA-binding protein, with alternative splicing isoforms
MACWLQSTASSIAGVGRFTKVIEWFKRMYAVDNVLPDEVTYTVVLDFYMQLDMKRELKALGKTSKLGLTRNLFEEMVDRNIDPNVHILTTLAKVYNWTHSGHDALQLWDKMRELKLPIQQDQRH

SEQ ID NO: 45860 - protein, 77 aa, Zea mays
  Coding DNA Sequence Number=SeqID_4081
MANFRAGPRPFIPQEFVIDDGGNDRSSSGWYVGDCEFGDHPKSLWGTQFKVYMIVGGSPYLSDIESTHRKNLVLHGS

SEQ ID NO: 45861 - protein, 66 aa, Zea mays
  Coding DNA Sequence Number=SeqID_4082
MATVKDARCESRRDVFEVWQGRFWVLVPGQTGGSLSIRVPIDVFKGIIDEDATKVVDGVALKSTDR

SEQ ID NO: 45862 - protein, 51 aa, Zea mays
  Coding DNA Sequence Number=SeqID_4083
MESWNIDRSGAAAATNVSLEQSGFDKMQINLVEDLLFNIDKKKQRKRGWFT

SEQ ID NO: 45863 - protein, 324 aa, Zea mays
  Coding DNA Sequence Number=SeqID_4084
  Gene Ontology: Mol. function=oxidoreductase activity; Cellular component=vacuole; Biological process=response to oxidative stress
  Homolog annotation: Hit_ID=Q5Z9B5; Match level="QueryCoverage=97%, HitCoverage=96%, E-value=6e-98, Identity=59%"; Hit description =Putative bacterial-induced peroxidase
  Pfam annotation: Domain name=peroxidase; Domain location=43-287; Score=377.1; E_value=2.7e-110; Accession=PF00141.13; Description =Peroxidase
MSPSRTCSWLIVLSVLLVCTTANGDRLKVGYYDKTCPDVQQIVQSVMAFRVGRDQSVAPAVLRLFFHDCFVDGCDGSVLLDETPFFESEKDATPNANSLHGFDVIDEIKSYVEHACPATVSCADILALASRDAVALLGGPSWKVQLGRKDSRVANRTGAEYGLPAPNSTLAELINLFKQYDLDARDMAALSGAHTIGTARCHHYRDRVYGYNGEGGADIDPSFAELRRQTCQSAYDAPAPFDEQTPMRFDNAYYRDLVGRRGLLTSDQALYGYGGPLDHLVKMYSTNGEAFAKDFAKAIVKMGKIPPPHGMQGEIRLSCSKINR

SEQ ID NO: 45864 - protein, 149 aa, Zea mays
  Coding DNA Sequence Number=SeqID_4085
  Subcellular localization annotation: CTP_CleavageSite=34; ConfidenceScore=5.47e-01
MANLAGSVEVTRKPTSGYHKRSRARSLPPFFFVNAQTTTPGPTFPIAAKRKIGIGAAVGEIPSVPLPTSKYGIRLLPKQRRRCPRLSLILIWPCAAQIVRRSGRTLRRRTSSWTGDCATQNSDEQATADSEVQQVEVAEQELIEDKLCP

SEQ ID NO: 45865 - protein, 129 aa, Zea mays
  Coding DNA Sequence Number=SeqID_4086
  Gene Ontology: Mol. function=sequence-specific DNA binding; Cellular component=nucleus; Biological process=regulation of transcription, DNA-dependent
  Homolog annotation: Hit_ID=Q43353; Match level="QueryCoverage=56%, HitCoverage=23%, E-value=3e-19, Identity=73%"; Hit description=ZAG2 protein
  Pfam annotation: Domain name=K-box; Domain location=1-78; Score=-8.0; E_value=0.0021; Accession=PF01486.8; Description=K-box region
MPRHLVGDSVGNLSLKELKQLESHLEKGISKIRLFICQTLIAEFLFQSELSAAEINFMAKRETELQNDHMNLRTKDPRTCPTGRSSASPAAQDSSAQDCLDAPHPLVRNSPSWADCLDAPHPLVRNSPS

SEQ ID NO: 45866 - protein, 131 aa, Zea mays
  Coding DNA Sequence Number=SeqID_4087
  Homolog annotation: Hit_ID=Q10ML2; Match level="QueryCoverage=24%, HitCoverage=37%, E-value=4e-07, Identity=75%"; Hit description =Negatively light-regulated protein, putative, expressed
  Subcellular localization annotation: CTP_CleavageSite=52; ConfidenceScore=5.76e-01
MQAQGAGQASSAASRQAGVAQAAGQASSATSRRMGPGATRDQQPASSAGVARQSMRGTQDIRLIVDSKRLGFLNQSCMEKYRGIAPKKSLVSKDHEHAYFDSADWVDLSMIIKRKKTICTNQFIMPVGHCG

SEQ ID NO: 45867 - protein, 81 aa, Zea mays
  Coding DNA Sequence Number=SeqID_4088
MTPRGSKGQQDRAARPVGVHPGNLPGKDLPPRCGLPQVFPSRAAKGGAARLDPYCCTGMGIGKMLFTARPDMSAFLNISPK

SEQ ID NO: 45868 - protein, 441 aa, Zea mays
  Coding DNA Sequence Number=SeqID_4089
  Pfam annotation: Domain name=WRKY; Domain location=117-164; Score =6.2; E_value=0.00013; Accession=PF03106.6; Description=WRKY DNA -binding domain
MAALAGRGEELLEQLRALLFLPAASSATPAANKVESAAVGPGGGAVAAPSSCGRRRRRQGQEGGKRDRDDDGVRDGEHAADDDGARPQHPPPPRCCKRRKKKKQESKSTVTSVLDFDGYRWRKYGQKQIEGAMYPRLRSHASRAEKPREVESRTLLLDEEACEKNEVEAEVRENMAGDRGGGGWLQRGSGRGQPHTWRSEARCSGGRKRRRWWKGRSYYRCIRSAEQGCPAKRTVQRNDDHGGGAAVAPEYTVVYMAEHTCTADDDYLQAAPVILDTATVVVPSAAAAAASSAGATANEGRRRPQDDNDSTYTDISIVIPTTSAGSCSTTSTTITTGTESRATSSDDVTCWSSSSGTSSDYNRAHYNNKTDDFYYGGLFAAAAHDGGGWTIGPADDSASLQEIWDLTGPIRSPVHVPALGWNWNMDQQLLLQLVNEPGCHF

SEQ ID NO: 45869 - protein, 817 aa, Zea mays
  Coding DNA Sequence Number=SeqID_4090
  Gene Ontology: Mol. function=nucleic acid binding; Cellular component= intracellular; Biological process=DNA integration
  Homolog annotation: Hit_ID=Q8H6I0; Match level="QueryCoverage=99%, HitCoverage=48%, E-value=0.0, Identity=83%"; Hit description =Putative gag-pol polyprotein
  Pfam annotation: Domain name=RVT_2; Domain location=713-817; Score =18.6; E_value=2.6e-17; Accession=PF07727.4; Description=Reverse transcriptase (RNA-dependent
  Pfam annotation: Domain name=rve; Domain location=322-485; Score =201.9; E_value=1.5e-57; Accession=PF00665.16; Description=Integrase core domain
  Pfam module annotation: Pfam domain module=RVT_2::rve; Domain location=713-817::322-485
MTLIKQQNDHIAKLDAKIAEHELKNENFKFARSMLYSGRRPGIKDGVDFQQGGNVKLNAPPKKLSNFVKGKAPMPQDNEGYILYPAGYPESKIRRIHSRKSHSGPNHAFMYKGETSSSRQPTCAKLPKKKTPSASNDHDISFKTFDASYVLTNKSGKIVAKFVGGKHKGSKTCVWVYASGGSSWILDSGCTNHMTGEKKMFSSYEKNQDPQRAITFGDENQGVTVFRRSDDSIAFKGVLEGQLYLVDFDRAELDTCLIAKTNMGWLWHRRLAHVGMKNLHKLIKGEHILRLTNVHFEKDRICSACQARKQVGTHHPHKNIMTTDRPLELLHMDLFGPIAYISIGGSKYCLVIVDDYSRFTWVFFLQEKSHTQETLKGFLRRAQNEFDLRIKKIRSDNGTEFKNSQIEGFLEEEGIKHEFSSPYTPQQNGVVERKNRTLLDMARTMLDEYKTSDRFWAEAVNTACYAINQLYLHRILKKTSYELLTGKKPNISYFRVFGSKCFILVKRGRKSKFAPKTVEGFLLGYDSNTRAYRVFNKSSGQVEVSCDVVFDETNGSQVEQVDLDEIGDEEAPCIALRNMSIGDVCPKESEEPPNAQDQPSSSTQASPPTQNEDEAQIDEEADQANKPPQDDGNDQGGDAHTQDKEDEEQRLPHPRVHQAIQRDHPVDTILSDNHKAVTTRSRVAHFCEHYSFVSSIEPHRIEEALQNSDWVVAMQEELNNFTRNEVWHLVPRPNQNVVGTKWVFRNKQDEHGVVTRNKARLVAKGYSQVEGSDFGETYAPVARLESIRILLAYATYHGFKLYQMDVKSAFLNGPIKE

SEQ ID NO: 45870 - protein, 290 aa, Zea mays
  Coding DNA Sequence Number=SeqID_4091
  Homolog annotation: Hit_ID=Q84YE8; Match level="QueryCoverage=98%, HitCoverage=63%, E-value=1e-126, Identity=83%"; Hit description =Expressed protein-like protein
APNSRWSFENHWKAGDAASRIRPEALSASVNQLSGKIKNALEEGLTIVDNKTSSIIEETKKIQIRRKPAGSSPHVPNSAVDKHTLSTPDLSLRQPESAAQETGLKASRDVANAMAAKAKLVLRELKSVKADLAFAKQRCAQLEEENRLLRETKQKGSKTEEDDDLIRVQLETLLSEKSRLAQENSTYARENRFLREIVDFHQFTTHDVVSLDDGDMEGTEPEEDDDNDNGLICAENVLPAVEENPVDEEHCPVPSKLESPVASLGEPSSSPRSSDCHSASKPDASASDVA

SEQ ID NO: 45871 - protein, 84 aa, Zea mays
  Coding DNA Sequence Number=SeqID_4092
  Subcellular localization annotation: CTP_CleavageSite=38; ConfidenceScore=5.45e-01
MEPLPSAARSTWQRGLVALGKALAECSTKSTPQRSRCRCTVRQDFFTESHTRQRVRRVFSRLCRVPEALGKAVVSDSDYGDLLV

SEQ ID NO: 45872 - protein, 111 aa, Zea mays
  Coding DNA Sequence Number=SeqID_4093
MPHMLGVRLHCSMHRRRRGPRHGSIGNGPRRGGVGAGLVSAAGACPLAWARAPGMAAQALTLDADDCCSAEPVGAPDTVRCTPDSPVPLPTVGAGHASPADCAANRCGGGR

SEQ ID NO: 45873 - protein, 199 aa, Zea mays
  Coding DNA Sequence Number=SeqID_4094
SEPCSGEAEVFPRHLVEPSLDVCHNRWSGRPRDSRWSRWPRLSSGEAEKSPEAELNVGRDREITQGTDSASDEAEIAPEGRLGETDRAVVTSGEAKVCVRWKALVERPRFRRRRRRAVPQDMSVAATVTTQGTSVDTSCCGGNRPTPSGGVSVYGDNCPKPSETMVAVTSRGSIRTMISSVPALLGRPSMKTTYNLVAS

SEQ ID NO: 45874 - protein, 74 aa, Zea mays
  Coding DNA Sequence Number=SeqID_4095
MASTVLEATRAAHEDLDRLDSLLVEIYEDKDNARKDEINTHLTAPTQSGLFSKYYERLKEVPYLSACLDVTKVK

SEQ ID NO: 45875 - protein, 99 aa, Zea mays
  Coding DNA Sequence Number=SeqID_4096
  Subcellular localization annotation: CTP_CleavageSite=28; ConfidenceScore=5.35e-01
MSTAKSAQCRHDHPTASPRKPKVTTSVRQSKVTRSLRAAAQDYPGGGESWSGCQAIEVKDTGRRAQGRYLYTHDAESVAEPSTPTTRDPWSSPAARLGP

SEQ ID NO: 45876 - protein, 437 aa, Zea mays
  Coding DNA Sequence Number=SeqID_4097
  Gene Ontology: Mol. function=protein-tyrosine kinase activity; Cellular component=membrane; Biological process=protein amino acid phosphorylation
  Homolog annotation: Hit_ID=Q10A72; Match level="QueryCoverage=77%, HitCoverage=40%, E-value=5e-89, Identity=52%"; Hit description =Protein kinase domain containing protein, expressed
  Pfam annotation: Domain name=Pkinase; Domain location=86-351; Score =90.0; E_value=7.1e-24; Accession=PF00069.15; Description=Protein kinase domain
  Pfam annotation: Domain name=Pkinase_Tyr; Domain location=84-352; Score=56.2; E_value=6.5e-16; Accession=PF07714.7; Description =Protein tyrosine kinase
  Pfam module annotation: Pfam domain module=Pkinase::Pkinase_Tyr; Domain location=86-351::84-352
CRAGYESDGDPKEKPCRPKLSTSAKLIIGITVGASVLFFIILGTGVCYMLKRIELEAIERKNGSEKLKNVRTLQIFRKEELDKITMNNSVPLGKGGFGEVHKGVLPDKTEVAVKASIEVTKGTLDKFVEEVEIQSGMMHKNILKLLGCCLRVDVPLLVYEYAAKGSLKDLLHGKNDDGQPREPLTLRSRLDIAIGCAQGLAYMHSYTENGIQHADVKPDNILLDGGLVPKISDFGLSKVSVVGKDYTKNVVGCLPYMDPVYKETGRLTPKSDVYSFGIVLLELISRRPAVDGSESSIVRQFKSVYEQADDNNTGKELFDKDIAAEEDIPMLDEIAKLAMSTRSMAAALQVFVAVVLMASALVSAEIGKKECTDVNYDCNRFPGSRKCGDSCRDKARAEGSSNYASACEPAVAPFKCCCTVKDPHHPWPPSSSSKTNA

SEQ ID NO: 45877 - protein, 79 aa, Zea mays
  Coding DNA Sequence Number=SeqID_4098
MDSQVSPATMSSREQTPSLRMALVLSPEPLDSRPKSLDFVLLRGVGEEGLVMGRHLIFEVLVPLLQPTVPLQVLDIIYY

SEQ ID NO: 45878 - protein, 55 aa, Zea mays
  Coding DNA Sequence Number=SeqID_4099
MGNCFGSNVAEVGAVKAMAQAHHAHPQVALAKHVVMSAAPSSGAHSQHDWARHHG

SEQ ID NO: 45879 - protein, 135 aa, Zea mays
  Coding DNA Sequence Number=SeqID_4100
  Gene Ontology: Mol. function=nucleic acid binding; Biological process= DNA integration
  Homolog annotation: Hit_ID=O24587; Match level="QueryCoverage=66%, HitCoverage=8%, E-value=6e-45, Identity=93%"; Hit description=Pol
MGASCLTLRALRSSSVHNLQRPPVGPVGSEGEVMATVADDLRGEQDFGYNLSKVSLLCDNESAIRMADNPVEHSRTKHIDIRHHFLRDHQQKGDIEVFYISTENQLADIFTKPLDEKTFCRLRSELNILDSRNLD

SEQ ID NO: 45880 - protein, 75 aa, Zea mays
  Coding DNA Sequence Number=SeqID_4101
MGSNRLTAIVPYYNMKQIITGRFQAFSIKLLLKWWELGKRKLGWASGQVKWATGPKFQSPLFSGTAGTTTRSPMN

SEQ ID NO: 45881 - protein, 100 aa, Zea mays
  Coding DNA Sequence Number=SeqID_4102
  Gene Ontology: Mol. function=zinc ion binding
  Homolog annotation: Hit_ID=Q2QQX2; Match level="QueryCoverage=78%, HitCoverage=23%, E-value=3e-34, Identity=81%"; Hit description=DHHC zinc finger domain containing protein, expressed
MTPTSWAQMVVDLYPPGSNSRYIAVTNQTTYEVARRKRIFYLRGVPERVHPFSRGICRNLYDFCCSSQKGYILEAVPPREELEARAARYTCRDVICCRCC

SEQ ID NO: 45882 - protein, 144 aa, Zea mays
  Coding DNA Sequence Number=SeqID_4103
MATAPMNPCLRAIPASQGDFPDRDVHAKITKDPDEAPSPWVRVQPTVLPDSAITALPLLSCSTAEGLLLPTELVTLKSRHGLGSNGGGSAFIARQPSLLRIQLRFGGGNRSEVRALCVAAGKTVGSVSPVRANRREPTLTQRSH

SEQ ID NO: 45883 - protein, 94 aa, Zea mays
  Coding DNA Sequence Number=SeqID_4104
MPYLAMAATPEAQQRRHIQLGSWICELHRGSLIAGHGSAMGAVRAAAFPDWGDEQGGLRLAVGYGVGGYYVNWNMENHTGKQCYDKGLWTPLAD

SEQ ID NO: 45884 - protein, 76 aa, Zea mays
  Coding DNA Sequence Number=SeqID_4105
MAQSTVGSLRAIGAPDMSGAHRTVRCPLLAVGSATAGRICEEELGRHDGSRGAPHLAGCQGAVVELAWLGRQATWD

SEQ ID NO: 45885 - protein, 424 aa, Zea mays
  Coding DNA Sequence Number=SeqID_4106
  Gene Ontology: Mol. function=nucleic acid binding; Cellular component= intracellular; Biological process=DNA integration
  Homolog annotation: Hit_ID=Q7XBC6; Match level="QueryCoverage=99%, HitCoverage=24%, E-value=1e-159, Identity=70%"; Hit description =Putative copia-type pol polyprotein
  Pfam annotation: Domain name=zf-CCHC; Domain location=330-347; Score =30.5; E_value=5.9e-06; Accession=PF00098.13; Description=Zinc knuckle
MSGDHAKKEMETGEKPTTSHGSTSSEESRTKRREKKKSSSNKGKEKKSSSHHKEKKEKSSSHKPHRSGDKQKRMRKVVYYETDTSSTSTSGSDAPSVTSKRQERDKDYDEDEVAQIEHFNSQATTILLASLSREEYNKVQGLKSAKEVWDVLKTAHEGDELTKITKRETIEGELGRFRLRKGEEPQHMYNRLKTLVNQVRNLGSVKWDDHEVVKVILRSLIFLNPTQVQLIRGNPRYTKMTPEEVIGHFVSFECMIEGSRKINELDDPSTSEAQPVAFKATEEKKEEATPSRQPIDASKLDNEEMALVIKSFRQILKQRRGKDYKSHSKKVCYKCGKPGHFIAKCPISSDNDRGDDKKGRRKEKKRYYKKKGGDAHVCREWDSDESSSDSSDDEDAANIAVTKGLLFPNVGHKCLMAKDDKKKM

SEQ ID NO: 45886 - protein, 479 aa, Zea mays
  Coding DNA Sequence Number=SeqID_4107
  Gene Ontology: Cellular component=nucleolus; Biological process =transcription
  Homolog annotation: Hit_ID=Q5JJP8; Match level="QueryCoverage=98%, HitCoverage=100%, E-value=1e-154, Identity=59%"; Hit description =Beta transducin-like protein HET-E2C-like
  Pfam annotation: Domain name=WD40; Domain location=251-290; Score =35.0; E_value=2.6e-07; Accession=PF00400.22; Description=WD domain, G-beta repeat
  Pfam annotation: Domain name=WD40; Domain location=315-353; Score =10.6; E_value=2.1; Accession=PF00400.22; Description=WD domain, G -beta repeat
  Pfam annotation: Domain name=WD40; Domain location=365-403; Score =4.8; E_value=10; Accession=PF00400.22; Description=WD domain, G-beta repeat
  Pfam annotation: Domain name=WD40; Domain location=413-466; Score =35.4; E_value=1.9e-07; Accession=PF00400.22; Description=WD domain, G-beta repeat
  Pfam module annotation: Pfam domain module=WD40::WD40::WD40::WD40; Domain location=251-290::315-353::365-403::413-466
MEEDSIKGMISAISWVPRGAAKSVPVVADPPTQEEIAEAMKTFDLGRDSGSDADEDDDAATMELDGAAETVEEVDEAARAKAVAKALCKGSSKADDVADELRELNMDAYDDEDEEVDIFGSGLGDLYYPSNAMDPYLKKNNEDDEEDDDDDEEIEDKMIMPTDFVIVNILEETNDGEQNIFVHHDVPLADFPLCTAWMDFNLKGGEKGNFVAVGTMDPAIEIWDLDMVDEVQPHMVLGGLSKKKKKTKGKKGKKYKKGSHRSSVLGLAWNKEVRNVLASASADTTVKIWDIAVGKCAVTLEHHDDKARIDTYFLCHSGLILWNYVTVQAVAWSPQSPEVLLSGSFDKTVAMGQHFNLQNDMKDGGQNCHKWSVEADVESLAWNPHNEHSFVVSLENGMVQAFDKRTASSSSSGQSMYTLHAHDKAVSSISFNPSAPNGAIFSVSFSNDSPFLLACGGSKGKLKVWDTLTEPAVANKFSK

SEQ ID NO: 45887 - protein, 880 aa, Zea mays
  Coding DNA Sequence Number=SeqID_4108
  Gene Ontology: Mol. function=nucleic acid binding; Cellular component= oxygen evolving complex; Biological process=DNA integration
  Homolog annotation: Hit_ID=Q7XBC6; Match level="QueryCoverage=95%, HitCoverage=51%, E-value=0.0, Identity=84%"; Hit description =Putative copia-type pol polyprotein
  Pfam annotation: Domain name=RVT_2; Domain location=575-830; Score =532.0; E_value=6.6e-157; Accession=PF07727.4; Description=Reverse transcriptase (RNA-dependent
  Pfam annotation: Domain name=rve; Domain location=200-346; Score =104.3; E_value=3.6e-28; Accession=PF00665.16; Description=Integrase core domain
  Pfam module annotation: Pfam domain module=RVT_2::rve; Domain location=575-830::200-346
MSLIKQQNDHIAKLDDKIAEHNLENEKFKFARSMLYNGRRPGIKDGIGFQRGDNVKLNAPPKNLSNFVKGKAPMPQDNEGYILYPAGYPESKIRRIHSRKSHSGPNHAFMYKGETSSSRQPTRAKLPRKKTPNASNDHAISFKTFDASYVLTNKSGKVYASGGSSWILDSGCTNHMTGEKRMFSSYEKNQDPQRAITFGDGNQGVTVFRRNDDSIAFKGVLEGQLYLEKSHTQETLKGFLRRAQNEFGLRIKKIRSDNGTDFKNSQIEGFLEEEGIKHEFSSPYTPQQNGVVERKNRTLLDMARTMFDEYKTSDRFWAEAVNTACYAINRLYLHRILKKTSYELLTGKKPNISYFRVFGSKCFILVKRGRKSKFAPKTVEGFLLGYDSNTRAYRVFNKSTGLVEVSCDVMFDETNGSQVEQVDLDEIGIEGAPCIALRNMSIGDVFPKESEEPPNAQDQPSSSTQASPPTQNEDKAQVDEGQDQEDEPPQDDGNNQGGDANDQEKEDEQEPRPPHPRVHQAIQRDHPVDTILGDIHKGVTTRSRVAHFCEHYSFVSSIEPHRVEEALQDSDWVVAMQEELNNFTRNEVWHLVPRPNQNVVGTKWVFRNKQDEHGVVTRNKARLVAKGYSQVEGLDFGETYAPVARLESIRILLAYATYHGFKLYQMDVKSAFLNGPIKEEVYVEQPPGFEDSEYPNHVYKLSKALYGLKQAPRAWYECLRDFLIANGFKVGKADPTLFTKTLENDLFVCQIYVDDIIFGSTNESTCEEFSRIMTQKFEMSMMGELKYFLGFQVKQLQEGTFISQTKYTQDILNKFGMKDAQPIKTPMGTNGHLDLDTGGKSVDQKGPPRSKSPWNLVREFLGKPPRDQRVLIGVGGNISQ

SEQ ID NO: 45888 - protein, 68 aa, Zea mays
  Coding DNA Sequence Number=SeqID_4109
MESLRVNSQLKKIFLAADVSSTVIRAQRRDSRKAKDGIRVAMWPSGGHFGGCRLPRLRHAREQFTMLA

SEQ ID NO: 45889 - protein, 251 aa, Zea mays
  Coding DNA Sequence Number=SeqID_4110
  Homolog annotation: Hit_ID=Q6QP51; Match level="QueryCoverage=54%, HitCoverage=60%, E-value=3e-07, Identity=38%"; Hit description =Putative growth-regulating factor 1
MVPPHYQSRLVELASQELTISPAMTGCDSSTTSCGDAHQHGQLNSTQLISGNTISPSLDAAEDHLHVDPLLQLFTRFLGRRSSLLNGHQSLGSTVVVGRSGEAEAPPRSRSSPSSEVEAESEHWGRARRSPSSEVEVESEPWVGRGGDRLPRPRLCPSPRVGRGGVRRPVSRLSPSPGSVEAETVFRGRGCVRALGSGEAELPMAPEARLSCCQPHSVEWHSSRSDAGGTVFLSGRSVDRRSDCGHFGSVD

SEQ ID NO: 45890 - protein, 174 aa, Zea mays
  Coding DNA Sequence Number=SeqID_4111
MGGIDKEENIVNNDDDGWDAWPVQQAQPPEPVHLEQSIPDPAYEDYLARKCLNSWADIFPCNSDLVTVPKVWAAFFMGLLLRSNSFDWAKKFLTSGAISALVEPSMETVSLKIPPKCLPPPSQELHVEPQSPTAAEAVSKHKQPIMVELKLEGVPDFGRRLGASRTAQGLEKCS

SEQ ID NO: 45891 - protein, 1578 aa, Zea mays
  Coding DNA Sequence Number=SeqID_4112
  Gene Ontology: Mol. function=RNA-directed DNA polymerase activity; Cellular component=chromatin; Biological process=RNA-dependent DNA replication
  Homolog annotation: Hit_ID=Q53L90; Match level="QueryCoverage=66%, HitCoverage=73%, E-value=0.0, Identity=48%"; Hit description =Retrotransposon protein, putative, unclassified
  Pfam annotation: Domain name=Chromo; Domain location=1477-1531; Score= 55.3; E_value=2e-13; Accession=PF00385.14; Description='chromo' (CHRromatin Organisation MOd
  Pfam annotation: Domain name=DUF1375; Domain location=1144-1208; Score=-9.7; E_value=0.063; Accession=PF07119.2; Description=Protein of unknown function (DUF1375)
  Pfam annotation: Domain name=RVP_2; Domain location=524-645; Score= -51.4; E_value=0.01; Accession=PF08284.2; Description=Retroviral aspartyl protease
  Pfam annotation: Domain name=Retrotrans_gag; Domain location=294-388; Score=56.9; E_value=6.5e-14; Accession=PF03732.7; Description =Retrotransposon gag protein
  Pfam annotation: Domain name=RnaseH; Domain location=925-1041; Score=- 11.8; E_value=0.00072; Accession=PF00075.14; Description=RNase H
  Pfam annotation: Domain name=rve; Domain location=1176-1332; Score =118.5; E_value=1.9e-32; Accession=PF00665.16; Description=Integrase core domain
  Pfam module annotation: Pfam domain module=Chromo::DUF1375::RVP _2::Retrotrans_gag::RnaseH::rve; Domain location=1477-1531::1144 -1208::524-645::294-388::925-1041::1176-1332
SVLAAHPHFTRRARMAGAEDPSVAAAIAAQSKSIETQSKTIATQSKLLQQLCDRLETQDARWTQLEKAVSANTNNISAISTKLDTSEGHPSFLTTQVDAQVAAIETVAMERLDAMAAAASTRVTALENATQAFESWKPRIESSVDAMRSELTKLTRLLERGAFEDRGTKPGILGHYSSTQDRPPPVQQVGTHGEAHRHRDQGGGTSIGPNHHQAPGMNDWISSHDHPSFDTFAAHNHPPPRDVGRSFESSSSQYLGNLPKLQVPSFDGEHPKLWQSRCQAYFRMYDVDYSMWIKVSSMQFTGPAARWLQSIEPKLPYLSWEEFGTLIQERFAKNQHQFLLRQLFHIRQLSSVSAYVEEFSQLVDQLTAYQNQSDPLYYTLKFIDGLKDDIKAVVMLQRPQDFDSAAVLAQLQEEAADLLRKRDSRRAYSGVSSAARDSKPPLNSKQEDQKPGNTSTEAKLASLYAYRKAQGLCYKCGLQYSRGHKCADTVQLHLVEELWNMVPVAEPELITSDDEQEAKLCMLTLSQTAVENGNSPRTMRFMGHIAGMEILALLDSGSSHSFLSEAVAAQLAGVTLMDKPVNVQVANGSKLSCAYELVNAKWSISGVSFSSTLKVLPLPTYDLIIGMDWLEAHSPMVVHWSQKWLRISLPTSMVTLSGLASSVLHSSVIQVCSLLELPDKEQLILQGLPADIQDLIQHYAPVFELPTGMPPARDCDHQIELLPGASPVQMRPYRYAPALKDEIEKQISEMLQSGIVQPSKSAFASSVILVKKKDNTYRFCVDYRHLNALTVKTKFPVPVIDEFLDELHGATCSGNVSRGNEFHIGTTIEEITQGVATDPAKVKAVQAWPVPTNCKELRGFLGLAGYYRKFVRNFGLIAKPLTNLLKKGELFVWTHIHEQAFSALKQSLTTAPVLALPNFDKPFAIEADASGTGIGAVLLQQEHPLAFVSKALGPRNQGLSTYEKEYLAIILAVDQWRQYLQHSEFVIYSDHRSLSHLTEQKLSTPWQQRMFSKLLGLQYRVVYKKGVENGAADALSRRPPASDDILFSLSSCKPQWLLQVVDSYTNDDQAQKLLAQLALHKSSTGPYTLHSGLLRYKGRVWIGADSRLQTTIVSSLHDSPMGGHSGFPVTYRRIKQLFAWSGMKAQIKSYVACCSVCQQAKADRSRYPGLLQPLPVPEQSWQVIGLDFIEGLPKSANVDTILVVIDTFSKYAHFLPLSHPFTAFKVAQLFLDSVYKLHGMPTSIISDRDRVFTSHLWQDLFRLSGTTLKMSSSYHPQTDGQTERINQCLETFLRSFVHACPSKWSSWLSLAEYWYNTSFHSSLGRSPFEVLYGHPPRHFGITVADASVSVDLQTWLTDRELMVKVIRQHLLRAQQRIKHQADKGRSEREFQVGDSVFLKLQPYVQTSVATRANHKLSFKYFGPYTVVQHIGKVAYKLQLPATAAIHPVFHVSQLKRALGVPPPLVSGTLPDDLGHLQVPVQILNRRVVFRGGRQVPQVHVRWSQSDEALATWEDEDSLHARFPAAAAWGQAASQGRGTVSDPVRRSTEDEAALQESRQPLGRRVRRPNIRVTGKEWAA

SEQ ID NO: 45892 - protein, 272 aa, Zea mays
  Coding DNA Sequence Number=SeqID_4113
MPVTDALRALTIGHLYVTPALVHGLPKSSFGGPRRYWASTLCLWRLLGRRSFDSFLSKFENAIWVSSQRLWFRSPSLSLASGPSSPPCYNCFGEFAQAVLSRSASSPSTELALFTKPSPISLLWKSPSHPRSLLRVKRLSPLRVARQEVCEEMVFHRVDLVSFLPHDFVAQQVDHWEIMVRTVTRPQPTTHDWGIVLVQPLLEHEVNFHIFDDIIREYLVGFRNVQVRSIQRSHLGQALVRFRFASDRDNSVAMGPQQALGFSFTVIRHNEA

SEQ ID NO: 45893 - protein, 448 aa, Zea mays
  Coding DNA Sequence Number=SeqID_4114
  Gene Ontology: Mol. function=monooxygenase activity; Biological process=electron transport
  Pfam annotation: Domain name=F-box; Domain location=36-83; Score =23.2; E_value=0.00092; Accession=PF00646.23; Description=F-box domain
  Pfam annotation: Domain name=FBD; Domain location=370-416; Score=8.5; E_value=0.03; Accession=PF08387.1; Description=FBD
  Pfam module annotation: Pfam domain module=F-box::FBD; Domain location=36-83::370-416
MRTKHLIPNNAAGLTYAARDYSAGEDHGGGDGVGGDPFEGFPDAVLGLIVSKLPLRSAVAASAISRRWRGAVAAAPALDLDFAAAFPAAPRRRAAFAAAVTAALGSSAPPHRHPLRRLRLALEGFFDQAFAASAADHLASWLTAAAARGVERLELHLPRSRLAVLPPSLLACTSLTSLTLRLDRYALPLPSFTTFTRLSRLHIACVSLNAEDDFFGDLFLHCKEVRYLILEKCRVGALRLTGPSRLCSLAITDCSWTEESALAVFEMPELRILHYSGAIAARHIIDGEVSLEDVLLNIEKPLVKPREAALRELLTLVGNARRLALSPWCIEVYRISQLLFDRNVEELCVSVVPSQGKWRRNSGDGGSHGVLGGKRVSVKHLKVVRMKYIDESRSGFKLVKVLLKNASALETMTIVPSMDGLEQAKFRRRVLKLRKSSQNASVQFCTAG

SEQ ID NO: 45894 - protein, 86 aa, Zea mays
  Coding DNA Sequence Number=SeqID_4115
MRELSTVSYQAAAEMLGSVKVCSRWHLLNRICSLTFAATARGCRRLRPTAGGSSNGRWAALQIKLSTIECPCEVHSKVEEHPGLPA

SEQ ID NO: 45895 - protein, 97 aa, Zea mays
  Coding DNA Sequence Number=SeqID_4116
MWVFQVDDVPFKQSVGALFDRMWGSHSRSVARERVAWAMEQAQKDEETKYLDCLEGSLATLDDVGVETGSEEQSSRAGVDIGEPSATETSHRSAGEV

SEQ ID NO: 45896 - protein, 668 aa, Zea mays
  Coding DNA Sequence Number=SeqID_4117
  Gene Ontology: Mol. function=beta-galactosidase activity; Cellular component=beta-galactosidase complex; Biological process =carbohydrate metabolic process
  Homolog annotation: Hit_ID=Q5Z7L0; Match level="QueryCoverage=99%, HitCoverage=96%, E-value=0.0, Identity=78%"; Hit description =Putative beta-galactosidase
  Pfam annotation: Domain name=Glyco_hydro_35; Domain location=1-304; Score=567.9; E_value=1e-167; Accession=PF01301.10; Description =Glycosyl hydrolases family 35
AVVINGQRRILISGSIHYPRSTPEMWPGLLQKAKDGGLDVVQTYVFWNGHEPVRGQYYFGDRYDLVRFVKLAKQAGLYVHLRIGPYVCAEWNFGGFPVWLKYVPGISFRTDNGPFKAAMQAFVEKIVSMMKSEGLFEWQGGPIILAQVENEYGPMESVIGAGAKPYANWAAKMAVATGAGVPWVMCKQDDAPDPVINTCNGFYCDYFSPNSNSKPTMWTEAWTGWFTAFGGAVPHRPVEDMAFAVARFIQKGGSFVNYYMAPTSTAPPVGPFIATSYDYDAPIDEYGLLRQPKWGHLRDLHKAIKQAEPALVSGDPTIQSLGNYEKAYVFKSSGGACAAFLSNYHTSAAARVVFNGRRYDLPAWSISVLPDCKAAVFNTATVSEPSAPARMSPAGGFSWQSYSEATNSLDGRAFTKDGAGGAAQHDVGQVGLPVWPQLTIYSAGHSLQVFVNGQSYGAVYGGYDSPKLTYSGYVKMWQGSNKISILSAAVGLPNQGTHYETWNVGVLGPVTLSGLNEGKRDLSDQKWTYQIGLHGESLGVQSVAGSSSVEWGSAAGKQPLTWHKAYFSAPSGDAPVALDMGSMGKGQAWVNGRHIGRYWSYKASSSGCGGCSYAGTYSETKCQTGCGDVSQRYYHVPRSWLNPSGNLLVMLEEFGGDLSGVKLVTRTA

SEQ ID NO: 45897 - protein, 114 aa, Zea mays
  Coding DNA Sequence Number=SeqID_4118
MGWPSGGNYASPEAGLGLGTNFASPEPSLGYLLPTNPARGHSFKHFMHIYESQSGLDHGLGQTSASPEHGFGIDIINERAPDVTRNSRADSKIQIQEPNVSTEHKSTTGTKAIP

SEQ ID NO: 45898 - protein, 140 aa, Zea mays
  Coding DNA Sequence Number=SeqID_4119
  Gene Ontology: Mol. function=kinase activity
  Homolog annotation: Hit_ID=Q6QP54; Match level="QueryCoverage=77%, HitCoverage=38%, E-value=7e-22, Identity=57%"; Hit description =Putative kinase
MFPASPEALSSPRSNPDQIATPTDQVAGAFNAKGSDLGSAPEDDELRSARPQGSDYALTSAGGLRLARPRGSDSTSATEDRLDLGFGGASTSPNLGRRPATSTGGTIITLPRAHSGHGDKTGVPSGSLRQIGDDGAPHTL

SEQ ID NO: 45899 - protein, 524 aa, Zea mays
  Coding DNA Sequence Number=SeqID_4120
  Gene Ontology: Mol. function=monooxygenase activity; Cellular component=integral to membrane; Biological process=electron transport
  Homolog annotation: Hit_ID=Q10S17; Match level="QueryCoverage=98%, HitCoverage=98%, E-value=1e-137, Identity=51%"; Hit description =Cytochrome P450 family protein, expressed
  Pfam annotation: Domain name=p450; Domain location=33-515; Score =110.1; E_value=6.4e-30; Accession=PF00067.12; Description=Cytochrome P450
MALPIFLYLFISTLALTVSSYLYIRSRGSSDNSLLRKNWPIARILPFLANLRNFHDYLTAILAASGCNSSVQVGLTSRPFILTSDPSNVQHMFTTNHANYVKGEIFPEIFDIVSDTILTVDGEAWRQQRAKGKTMLCSQKMTSWVASCCHGKVAKGLLPFLARMASTRAPFNMQELMGRLVFDQTATLVFGVDPGCLSLLDEMPSMRVADAMDTVMEVAFFRQIVFNHLWKLMRWLNISFEWKLAAAHVVLHAFVTEMVEKRNFARHHHQDIDGDKVTCVDVLSYYITDPECRSDGNLLRKMLLVYMIGGRDTVGTALPWVFYNLAKNPGVVSSIRKELAPLASRKGGTTVVSTDDAGNQMVVFESEETKPLVYLQATLFESLRLYPPAPVEGKAVVNDDVLPSGHQVRRGEVILISIYAMGRMESVWGKDCHEFRPERWLSEDGTKLQYVPSCKFLAFNSGPRLCLGKDIAIMEMKTIVAAVVWNFDVEVLEGQSVKPKLSFLLQMENGLMVTVKKREECSKL

SEQ ID NO: 45900 - protein, 48 aa, Zea mays
  Coding DNA Sequence Number=SeqID_4121
MNGKSRSLDKWVTRLVGKDAQSLQSVKLKVTCILTPEDLHSNLGTRFF

SEQ ID NO: 45901 - protein, 800 aa, Zea mays
  Coding DNA Sequence Number=SeqID_4122
  Gene Ontology: Mol. function=RNA binding; Cellular component=voltage -gated potassium channel complex; Biological process=potassium ion transport
  Homolog annotation: Hit_ID=Q6K9R1; Match level="QueryCoverage=63%, HitCoverage=52%, E-value=1e-121, Identity=47%"; Hit description =Pumilio-like
  Pfam annotation: Domain name=PUF; Domain location=453-487; Score =14.0; E_value=0.096; Accession=PF00806.9; Description=Pumilio-family RNA binding repeat
  Pfam annotation: Domain name=PUF; Domain location=489-523; Score =37.8; E_value=3.8e-08; Accession=PF00806.9; Description=Pumilio -family RNA binding repeat
  Pfam annotation: Domain name=PUF; Domain location=525-559; Score =31.5; E_value=3e-06; Accession=PF00806.9; Description=Pumilio-family RNA binding repeat
  Pfam annotation: Domain name=PUF; Domain location=561-594; Score =36.0; E_value=1.3e-07; Accession=PF00806.9; Description=Pumilio -family RNA binding repeat
  Pfam annotation: Domain name=PUF; Domain location=597-632; Score =37.8; E_value=3.7e-08; Accession=PF00806.9; Description=Pumilio -family RNA binding repeat
  Pfam annotation: Domain name=PUF; Domain location=634-668; Score =29.1; E_value=1.6e-05; Accession=PF00806.9; Description=Pumilio -family RNA binding repeat
  Pfam annotation: Domain name=PUF; Domain location=670-704; Score =42.0; E_value=2.1e-09; Accession=PF00806.9; Description=Pumilio -family RNA binding repeat
  Pfam annotation: Domain name=PUF; Domain location=709-743; Score =38.4; E_value=2.5e-08; Accession=PF00806.9; Description=Pumilio -family RNA binding repeat
  Pfam module annotation: Pfam domain module=PUF::PUF::PUF::PUF::PUF::PU F::PUF::PUF; Domain location=453-487::489-523::525-559::561-594::597 -632::634-668::670-704::709-743
MAPFGDGGWGGDGGEALLGRDPLRSGSAPPTMEAGAEAAVAAERVFGSVGGGASFFSGIDGRGLGARMDEVTMRHGAAGVQVRGVAALELIDGFGLVDVVWIGTTFSVFIRHIPSDRMEHFGNSASLSVRPHGQQFNGTGDLDEQQFGLSRVHSGGVMANYSASDMGPLWTDMNPDNVDYCRNIQNRSMSNIGKMNAYGNRDLSASYMFDSNLLDALSGLRLSNSLVMDQWNHGEGQLDEILECQRDFSKIGDENRSPLVGNVFRASRSDVHPLPIYGHGISQRQTSALDGSNVSRFSRHHIKGVDHLSLAAERVAAMQSGNLRRGTNLSRNAYMTNMVNPMSNRYYSNTDLDLVSSRRAFLDDLLAQQYLQEDNLSYDDSRIYHGEPRFSSSRMQRPGSHFYPNSRNILSHGDRQSRFFSLNRKAMGRNIGSQVYHDNALANYLDVPSLDNADRNGADSVDMDQYGSRFIQQKLEIASPDDREKIFPEILSNVIVLTTDVFGNYVIQKFFEFATESQLIQLADQLKGRILELSLQMYGCRVVQKVLEVVGMDQKVDIVHELKNYILKCIGDQNGNHVIQKCIECVPEDRIPFVIDPILSQILVLCTHQYGCRVIQRVLEHCHDPVTQSAIMNEIMQQTFHLTDDKFGNYVVQHVLEHGKPEERSVIIQKLSGQVVTLSKQKFASNVIEKCLEFGTPEERDSLIGEIISSGQTFQELMKDQFGNYVVQKVLETCDDKYLEMILSSIKLHLNELKNYTYGKHIVARVEKLIVTGENRARMASMSGQHQQQQPNNCTAVDEH

SEQ ID NO: 45902 - protein, 104 aa, Zea mays
  Coding DNA Sequence Number=SeqID_4123
MGWGRCCARLGGWSAQREGIGGESQGGKELAAAINGAGRFHLERMGEKEWGRRRGEGGRYSARRAERSRRGRHGLGTEVEETRGSADVGAAAERGRGRVGPAWK

SEQ ID NO: 45903 - protein, 132 aa, Zea mays
  Coding DNA Sequence Number=SeqID_4124
ASSEEAREGVGAAGTTASRRGAAQRGEVGRAAAVSRREEELELSSLFAASRGQQREEERPGCCCAREKEQGNRGALRRGGEVGHGGCCPCAREAKEEGDWRSWGEEPSSMLAAVGKKGCCVREEDREEESGG

SEQ ID NO: 45904 - protein, 43 aa, Zea mays
  Coding DNA Sequence Number=SeqID_4125
MIHKKKDYQIKVKGKVSLSKLKVVRMGVFLWAKQATIFIGNKG

SEQ ID NO: 45905 - protein, 83 aa, Zea mays
  Coding DNA Sequence Number=SeqID_4126
  Subcellular localization annotation: CTP_CleavageSite=5; ConfidenceScore=5.11e-01
MGRISEASVSSPSRSTLAENSANSNECCGNFTPSLSSSVYIVLQVFKGEAQKIQRLTQRRSCEAGKLRHVRRKGNRLKDEKAI

SEQ ID NO: 45906 - protein, 164 aa, Zea mays
  Coding DNA Sequence Number=SeqID_4127
MVRTLQTTHVNTCVPPPQQAPSYLVAAKEIPMELHHLAVRNGVILEESSKEILVTPTPLTDSHAFAAGLSSSALPVLVAQAPTPRGDDPDDFGNDGGHNTDLDSATLDLSRIHEEPEDAHARIAPLEAQLDGKNPPEAEDPTIAVSSPRKRIRYGAPGSITRLL

SEQ ID NO: 45907 - protein, 420 aa, Zea mays
  Coding DNA Sequence Number=SeqID_4128
  Homolog annotation: Hit_ID=O80506; Match level="QueryCoverage=13%, HitCoverage=61%, E-value=3e-08, Identity=50%"; Hit description =Expressed protein
  Pfam annotation: Domain name=DUF581; Domain location=328-386; Score =63.5; E_value=6.9e-16; Accession=PF04570.5; Description=Protein of unknown function (DUF581)
  Subcellular localization annotation: CTP_CleavageSite=88; ConfidenceScore=5.25e-01
MADRKGADLQGGPGGPWHTLSQAHQGPHPATWFACSADARRSLPSVRLMGFLFPVPGECTVRGCSSVPGGWRMATSILLSRLQSLHPSGPAKVASLQRILLGLQDFKQLHLATASCKACMQRLLPALTNARAELLPLSDAHCPQLAPDTAQHRCKQQNLQPEAVNRGLKVTDGGPFRAPDGSIQEILSGATNRSVQTRSQIPCVALLRSSAPPPFYAPLLRKTPPPPHGRTHQSPSPLRHHLSKSRPSRTTARGGPRTGEEGGMEPAERIESGTALGKRPRSRALPRTPSMVTVPSAAKQGRQERRAASLPAAGTGTGAAGAMPVGYCYYYGGSFAAVETAAFLKACGRCSRRLGPGHDTFIYRGEVAFCSQECREKRIEYDERMEKTCCSLTSIKEAPSVSGASGSDQSGSGGETVAAA

SEQ ID NO: 45908 - protein, 447 aa, Zea mays
  Coding DNA Sequence Number=SeqID_4129
  Gene Ontology: Mol. function=transporter activity; Cellular component= intracellular; Biological process=transport
  Homolog annotation: Hit_ID=Q6Z8I8; Match level="QueryCoverage=67%, HitCoverage=80%, E-value=1e-133, Identity=76%"; Hit description =Putative polyphosphoinositide binding protein Ssh2
  Pfam annotation: Domain name=CRAL_TRIO; Domain location=191-360; Score=46.0; E_value=1.3e-10; Accession=PF00650.10; Description =CRALTRIO domain
  Pfam annotation: Domain name=CRAL_TRIO_N; Domain location=109-178; Score=23.1; E_value=9.7e-05; Accession=PF03765.5; Description =CRALTRIO, N-terminus
  Pfam module annotation: Pfam domain module=CRAL_TRIO::CRAL_TRIO_N; Domain location=191-360::109-178
MGVGRAVPPFHPRSLLPQHPARKEEEEEGGEGTVRESCLAFAAFLRSSGSPSDLVTARGTPDHAAAEQSTVTVAVTQRCSVLDLGFCYSGLCSFTQMELEANGTTNVHGKEAAPYEEQLFKIGKVRTDLGQLSGKSALYCSDASIARYLIARNWDIRKATKMLKKTLKWRSEYKPDEIRWDDISDEAVTGKTYRTDYFDKIGRSILVMRPGCQNTKNANGQVKYLVYCMENAILNLPHGQDQMVWLIDFAGFNLGNLSIQVTKMTADVLQGHYPERLGVAILFNAPKFFEPFWKMASPLLEKKTRNKVKFVYSDRPDTMKIMEDLFNMDELECAFGGKNPATFNINDYAARMREDDKKMPSFWSPENSALASEPYQMSSQKALGSVSGAKTEDAGSGKMDDMETAPEKSEESGTESGEEVQTRTESSTVEQKNLPGEDNAPADKSGL

SEQ ID NO: 45909 - protein, 413 aa, Zea mays
  Coding DNA Sequence Number=SeqID_4130
  Gene Ontology: Mol. function=inositol or phosphatidylinositol phosphatase activity; Biological process=abscisic acid mediated signaling
  Homolog annotation: Hit_ID=Q6Z8I9; Match level="QueryCoverage=84%, HitCoverage=60%, E-value=1e-128, Identity=68%"; Hit description =Putative inositol polyphosphate 5-phosphatase I
MGCVDRHERKIQNSRFSRAQIVQLNWMSNSNHNTPCDIPKPASVDEFLARNGKKKKSFMSGLFRKKGRGVDRKLLSRRDIIFDLEGKGGDRMDLLETSAAVRKSFSDRHCTARIENLTLSCLDSPGRPNVDTREYRVFVGTWNVGGKPPDSSVNLEEFLQIEGLPDIYVLGFQEIVPLNAGNVLVVEDNEPAGKWMELIYQALNRPPAHQDGESSGDELSPPASTSSSRYPQPSQGRQVGRDPSNNAAIPKSSSGGVLFAQRPPPPPLRMVNKSYRVDNALAKTCTCMSDPPGMQRRAREMREFLYRVEAAAASPGRGADEETLASIEGGGMNYCLIARKQMVGIFLSVWVRRELVQYVGHLRVDCVGRGIMGRLGNKVSERAFLLSCFVHAEPYDRASERLTDPEITRDASP

SEQ ID NO: 45910 - protein, 131 aa, Zea mays
  Coding DNA Sequence Number=SeqID_4131
  Gene Ontology: Mol. function=peptidase activity; Biological process =proteolysis
  Homolog annotation: Hit_ID=Q6Z8K1; Match level="QueryCoverage=52%, HitCoverage=14%, E-value=9e-20, Identity=68%"; Hit description =Aspartyl protease-like
MRFPFLFALQLVALAAAASAAEVAVTRSSRMVHRLSDEARLEVGPRVGWWPQRGSGEYYRALVRSDIQRQKRRLAVLSLSKGGSTFSPGNDLGWCASYPAAPLDLTLLDFLTVLLHCECYNVTFCIHTTRQ

SEQ ID NO: 45911 - protein, 159 aa, Zea mays
  Coding DNA Sequence Number=SeqID_4132
MAAPPQGEDERRRCGGAWCGTVELRVRMNCEREVKNAFSGMHERWTRSWCCGLRRAQPTGKKAAEPWTGPHNTAGCYAPAAVALYRVGPAQLQAHDGRWADPYLVSVRSVEADIGAEHISRLFSDGNRNACSQWVSSVKIVENYVTADHQIRSLFSRQQ

SEQ ID NO: 45912 - protein, 451 aa, Zea mays
  Coding DNA Sequence Number=SeqID_4133
  Gene Ontology: Mol. function=RNA-directed DNA polymerase activity; Cellular component=mitochondrion; Biological process=RNA-dependent DNA replication
  Homolog annotation: Hit_ID=Q8S463; Match level="QueryCoverage=99%, HitCoverage=24%, E-value=0.0, Identity=85%"; Hit description =Putative prpol
  Pfam annotation: Domain name=RnaseH; Domain location=37-164; Score =9.1; E_value=8.3e-06; Accession=PF00075.14; Description=RNase H
  Pfam annotation: Domain name=rve; Domain location=348-451; Score =21.0; E_value=0.00011; Accession=PF00665.16; Description=Integrase core domain
  Pfam module annotation: Pfam domain module=RnaseH::rve; Domain location=37-164::348-451
MGETISFAPRKAIKSQVLADFVAEWVDTQLPAAPIQPELWTMFFDGSLMKTGAGVGLLFISPLGKHLRYVLRLHFPASNNVAEYEALVNGLRIAIELGVRRLDARGDSQLVIDQVMKNSHCRDPKMEAYCDEVRRLEDKFYGLELNHIARRYNETADELAKIASGRTTVSPDVFSRDLHQPSVKTDGTPEPEEASAQPEAPSAPEGEALRVEEERNGVTPNRNWQTPYLQYLHRGELPLDRAEARRLARRAKSFVLLGDRKELYHHIPSGILQRCISIAEGQVLLQEIHSGACGHHAASRALVGNAFLHGFYWPTAVADATRIVRTCQGCQFYAKQTHLPAQALQTIPITWPFAVWGLDLVGPLQKAPGGYTHLLVPIDKFSKWIEVRPLNSIRSEQTVAFFTNIIHRFGVPNSIITDNGTQFTGRRFLDFCEDHHIRVDLAAVAHPMTNG

SEQ ID NO: 45913 - protein, 332 aa, Zea mays
  Coding DNA Sequence Number=SeqID_4134
MAPATGEGRRVRRCCASARAGRGGRRGGGTTGHEPGLWQRLARAWLAATGHPWLHARTCTGRWGRGKACRCRSTGATAAGERPCLGAADGAVGGVLAACVRAAAREATREVAGGGCRGLGRRLEKGGRPAANDRDAGGEGPMAGTGPGQRRGGAEDPPRGRCGASLTWPWRTQSEPRRPRRDMVWPSTASARARAAPPGREATRPGKEGHGRARSSRGGAGAVGGGPWLVAACARPGREGWRLGWGQQPPEPKGGEGLRREGEGSPTTTLLAVDPLSRNFPQRERLETEPAWTRSTASALHGPAGRRTGWGKDRKREASAARGECRRLGARG

SEQ ID NO: 45914 - protein, 62 aa, Zea mays
  Coding DNA Sequence Number=SeqID_4135
MAHGRILLFRFPSLIPGIEAGVRSNRPAGLNCSCHRSLFSAVVLRKDCRGDVGWDESKRWSH

SEQ ID NO: 45915 - protein, 118 aa, Zea mays
  Coding DNA Sequence Number=SeqID_4136
MAIMWRRPISPTAFASYNEPRYEVLTLEEVLGKFLSHEMMVRNPRMLRTWFKDEGKKEKKKMEKKKIFHKKGGKSHVGKEWDFDKSSSDSDYEDITTVTINKGIPFPQCRPQVLNGKG

SEQ ID NO: 45916 - protein, 105 aa, Zea mays
  Coding DNA Sequence Number=SeqID_4137
MDAHLWWVSLGLGKGSIRVVFLQFSWPPYLALPSSTAGSVPQGSYEGGCFQIRHFLPPPADRWALVARGLFPAPSLVDAPKDQGSCPRHSLTLIVIIVVLTPNHG

SEQ ID NO: 45917 - protein, 795 aa, Zea mays
  Coding DNA Sequence Number=SeqID_4138
  Gene Ontology: Mol. function=cellulose synthase (UDP-forming) activity; Cellular component=membrane; Biological process=cellulose biosynthetic process
  Homolog annotation: Hit_ID=Q7PC72; Match level="QueryCoverage=99%, HitCoverage=99%, E-value=0.0, Identity=56%"; Hit description =Cellulose synthase-like H1
  Pfam annotation: Domain name=Cellulose_synt; Domain location=10-795; Score=377.6; E_value=2e-110; Accession=PF03552.5; Description =Cellulose synthase
MTSANKAKLQLQERVPLPRTAWKLADLAVLSLLLALLARRASSLVSSGGTAAACTWCWVAALICEAWFTVVWLLNMNAKWNPVRFVTHPERLAGYWAGDDELLPAVDMFVTTADPKLEPAVVTVNTVLSLLALDYPAGKLSCYVSDDGCSAVTCYALREAAEFAKLWVPFTRKHGAKVRAPFAYFSSSSGGGAAERGGGGGAADADAEFLRAWTSMKNEYEELVRRIESAEEKSLVRRGDGAFAEFVGADRGNHPTIIKVLWDNDSSKSESDEQAAGDGVPSLIYVSREKSRTQPHHFKAGAMNVLTRVSAVLTNAPIMLNVDCDMFANNPQAALHAMCLLLGFDDEVHSGFVQAPQRFYGGLADDPFGNQMQVIFEKVGHGIAGLQGIFYCGTGCFHRRKVMYGVPPGSGTGATKGESMNLTGCAIQALAAADSPSYKELQKKFGSSKELIESARSIITSKEAPAAVADLTSRVEVAKQVSACSYETGTSWGQEVGWVYGSMTEDVLTGQRIHAAGWRSALLSPDPPAFLGGAPTGGPASLTQYKRWATGLLEIVLSRHNPFLLSASKRLRFRQCLAYLVIDVWPVRAPFELCYALLGPYCLIANRSFLPKASEPGFVVPLALFLAYNAYNLGEYVDCRLSARAWWNNQRMQRITSSSAWLLAFLTVVLKTVGLSETVFEVTRKEQQQQQGSPDGDGADADPGRFTFDSSPVFVPPAALAMLSVVAVAVGAWRAVTGGGGGPGVGEFVCCAWLLLCFWPFVRGLVGGRGSYGIPWSVRIKAALLVAAFVHLSTR

SEQ ID NO: 45918 - protein, 102 aa, Zea mays
  Coding DNA Sequence Number=SeqID_4139
MVEALAAMAGGIELAGAKERGLAGEVAGQNMQIHCTSPPVISALRSVLSAAIRVRLRQDITVDVKRSEGEWIEPASPYPLAPATCPRDHRRRAAVYLGHDTP

SEQ ID NO: 45919 - protein, 78 aa, Zea mays
  Coding DNA Sequence Number=SeqID_4140
  Subcellular localization annotation: CTP_CleavageSite=37; ConfidenceScore=5.42e-01
MRFSQNTLNTKQPAKVSKLVWRPSGRGGAEVDNPAAKASDSANAVGIGRSSFELSSKMTPFSTRRQGRSTGISSTTTG

SEQ ID NO: 45920 - protein, 197 aa, Zea mays
  Coding DNA Sequence Number=SeqID_4141
  Gene Ontology: Mol. function=nucleic acid binding; Cellular component= intracellular; Biological process=chromatin modification
  Homolog annotation: Hit_ID=Q7EZ27; Match level="QueryCoverage=83%, HitCoverage=65%, E-value=7e-16, Identity=43%"; Hit description =Putative zinc finger transcription factor ZFP2
  Pfam annotation: Domain name=zf-C2H2; Domain location=60-82; Score =18.3; E_value=0.027; Accession=PF00096.16; Description=Zinc finger, C2H2 type
MALSKSLVNKAGQHHRHGYKCSVCDKVMTSHWKLSSPLAATPRDKVLSGGTAHAKEEKLHQCSLCHRTFPSGQALGRHKTSHWKPPSAVPRDEDEASFGDTAHTKEEKLHQCSLCHRTFPSGQALGAWAGTSGCTTRRTRTRTPPGTKEASVAAVATAVVRDFDLNLSAEADGVPPDAKRACTDDSAAMMAVLRDFD

SEQ ID NO: 45921 - protein, 133 aa, Zea mays
  Coding DNA Sequence Number=SeqID_4142
MDRAFAHKRRCREYDVVNRGCGAHWSAGRVQDEPLEAATIGLRPWPWQCQETRCHPTSPHTRRRKAAPVLALPSHVPGQALGGHKRLHYEKDKDKGAARTNQANTAVVAIAMLRDFDLNLSADDAPPDANSSS

SEQ ID NO: 45922 - protein, 46 aa, Zea mays
  Coding DNA Sequence Number=SeqID_4143
MAMMGSTSEKMYLCQVKKRQTFVASVLRWYQRKSTKSEAIGGKDTP

SEQ ID NO: 45923 - protein, 235 aa, Zea mays
  Coding DNA Sequence Number=SeqID_4144
  Gene Ontology: Mol. function=nucleic acid binding; Cellular component= intracellular; Biological process=chromatin modification
  Homolog annotation: Hit_ID=Q7EZ27; Match level="QueryCoverage=88%, HitCoverage=77%, E-value=7e-33, Identity=44%"; Hit description =Putative zinc finger transcription factor ZFP2
  Pfam annotation: Domain name=zf-C2H2; Domain location=109-131; Score =14.9; E_value=0.26; Accession=PF00096.16; Description=Zinc finger, C2H2 type
  Pfam annotation: Domain name=zf-C2H2; Domain location=60-82; Score =16.7; E_value=0.083; Accession=PF00096.16; Description=Zinc finger, C2H2 type
  Pfam module annotation: Pfam domain module=zf-C2H2::zf-C2H2; Domain location=109-131::60-82
MALSKPPATDDDQAEREYLASCLMPLSRGLCDGGATDAKRAGAAPTASNKADGQHHPHGYECSMCSKVYASYQALGGHKTSHQKPPAAAAPRDEASSSGTAHEKEEKLHQCSLCLRTFLSGQALGEHMTSHRKPPPAAAPGDEASSGGSAHAKEENTFTSGQALGGHKRLHCEAKDKGKDAARTNKASVAATAVLRDFDLNLSAEAESATPEAKRARTMLLVADDPALFPTAARC

SEQ ID NO: 45924 - protein, 68 aa, Zea mays
  Coding DNA Sequence Number=SeqID_4145
MVSLIYIWEVIASPRGDGYFVVCYLLFFVFVLMLQLGLDRPSITKLFTCKDIVRVLVFEILEIREVSG

SEQ ID NO: 45925 - protein, 111 aa, Zea mays
  Coding DNA Sequence Number=SeqID_4146
  Gene Ontology: Mol. function=nucleoside-triphosphatase activity; Cellular component=membrane; Biological process=DNA replication
  Homolog annotation: Hit_ID=Q9CAM7; Match level="QueryCoverage=79%, HitCoverage=30%, E-value=3e-28, Identity=61%"; Hit description =Replication factor, putative; 74998-73295
MAAAAPDADVYDIPWLEKYRPTRVADVVGNSDAVTRLEGPPGTGKMTSILVLAHELLRPNYRDAVLELNASDDRGLDVVRNNIKMFAQKKWRFYEHAWSRIGYKLGLVNLT

SEQ ID NO: 45926 - protein, 124 aa, Zea mays
  Coding DNA Sequence Number=SeqID_4147
  Subcellular localization annotation: CTP_CleavageSite=84; ConfidenceScore=5.14e-01
MPCMRRVRLLPIRPPCGWLALPGWQPNGRARPVTQGNGMEPNRSGSKRNVARNMLAAARAFRPLPGAFRGGGQCPCGRVALAVQAASPSITIISGLRLPPWWATEFWGTHARTRCQRQKPTGFQ

SEQ ID NO: 45927 - protein, 145 aa, Zea mays
  Coding DNA Sequence Number=SeqID_4148
MTRFLEEISVLLPRSAYLRRPRVHHHHRVGEAVTTRPRPTPSGRVSYDSPEAKPKRDRQPRLFQGHSRAGDTVMTRLRPSPGGTGSNDSPEVIRGRDRQSLLARGQPPSGIHSYDSPKANPSGIQSYNSSEAKPRQNRQSARGNP

SEQ ID NO: 45928 - protein, 140 aa, Zea mays
  Coding DNA Sequence Number=SeqID_4149
MSRAFDDYYIEDCGVILASEVTQRRTDNNNQFEFVILATIGISGHTLWRVSHQSPAVARLTMVHGGLATICNFEKKFFRTLVLYGLESVAHSFYCSENSLGPLVEGYSTIPLDFDEGDVKSITLSSLCSLGNVEIQTILA

SEQ ID NO: 45929 - protein, 60 aa, Zea mays
  Coding DNA Sequence Number=SeqID_4150
MDKVQIKDKGELVALGNSSATYGYNSPDCPVCTGLSGEPTVDRANGRPRDLRGTRGRANG

SEQ ID NO: 45930 - protein, 626 aa, Zea mays
  Coding DNA Sequence Number=SeqID_4151
  Gene Ontology: Mol. function=oxidoreductase activity, acting on CH-OH group of donors; Biological process=electron transport
  Homolog annotation: Hit_ID=Q6K9N5; Match level="QueryCoverage=92%, HitCoverage=74%, E-value=0.0, Identity=68%"; Hit description =Putative alcohol oxidase
  Pfam annotation: Domain name=DAO; Domain location=113-511; Score= -36.1; E_value=0.0014; Accession=PF01266.14; Description=FAD dependent oxidoreductase
  Pfam annotation: Domain name=GMC_oxred_C; Domain location=456-613; Score=-40.6; E_value=0.0023; Accession=PF05199.4; Description=GMC oxidoreductase
  Pfam annotation: Domain name=GMC_oxred_N; Domain location=159-393; Score=350.4; E_value=2.9e-102; Accession=PF00732.10; Description=GMC oxidoreductase
  Pfam module annotation: Pfam domain module=DAO::GMC_oxred_C::GMC _oxred_N; Domain location=113-511::456-613::159-393
MTTICCESATLAALHLHVHDKGPQTGWISKYMKDFSTDENSKNPHWRAIGYSPPPADDEPAPAESERPEKRPLDDGIVETNKENDASLPALLAEKGLRVADDAARNVCRVECDVVIVGSGCGGGVAAAVLAAAGHKVVVIEKGNYFTARDYTAIEAPSMEHLYEGGGFVSTLSASALLLAGSTVGGGTAVNWSACIKTPDDVRGEWARDRGLPLFATGEYAAAMDKVFERLGVTAGCAEEGLQNKVLRKGCERLGYKVESVSRNSSEGHYCGSCGYGCRTGDKRGTDSTWLVDAVSRGAVILTGCKAEKLLLEPGSAADGRAKRCVGVVARSTNPAITRTLEVTARVTVSACGSLLTPVLLRGSGLRNRHIGKNLHLHPTALVWGYFPDTVPDLRGRMYEGGIITSLHKVEGGGPGAPARAILEAPAMGLAGAGTQFPWVSGRDMKERMLRYGRTVHLFSMVRDRGSGTVHGERRVAYHLDATDRENMRDGMRRALRVLAAAGAAEIGTHRSDGQRFACGGATEAALEEFLDGVDVVRGPQSKAEAWTLCCTAHQMGSCRMGATARDGAVDARGESWEAGSLYVCDGSVLPGAVGVNPMVTIQSVAYCLATGIAESLRRGPVSRKD

SEQ ID NO: 45931 - protein, 144 aa, Zea mays
  Coding DNA Sequence Number=SeqID_4152
  Gene Ontology: Mol. function=kinase activity; Cellular component =ornithine carbamoyltransferase complex; Biological process=amino acid metabolic process
  Homolog annotation: Hit_ID=Q6QP54; Match level="QueryCoverage=77%, HitCoverage=33%, E-value=5e-16, Identity=49%"; Hit description =Putative kinase
MGRREAEREGGKRQSETGVREVEIPRPSCSSRAQVGRKERIQPESAWGREMMAPPVDVVGPRPRLGDVEAPPRSRSSLSSVAKVESEPLGRARRRPSAEARAESEPWGWAKRSSSSSGAEPESEPRGQADRSSPSSRAEPKSEP

SEQ ID NO: 45932 - protein, 126 aa, Zea mays
  Coding DNA Sequence Number=SeqID_4153
MAPVMGELVGREKGKRQPLTAQHQGADVVPARGVAGRGQSAAGEGVRRGSCAGWSASGRGLLGALGAGLAARVAAPVPDVGAWRGWGSVLRAGESRGKGREGRRESRVGEEYTGQRRLPGRLEAAG

SEQ ID NO: 45933 - protein, 46 aa, Zea mays
  Coding DNA Sequence Number=SeqID_4154
MAVLMWHTLDSEQCLSDHAKREIVTGDKAMGSERTLSREFGDKYKE

SEQ ID NO: 45934 - protein, 640 aa, Zea mays
  Coding DNA Sequence Number=SeqID_4155
  Gene Ontology: Mol. function=protein serine/threonine kinase activity; Cellular component=flagellin-based flagellum; Biological process=protein amino acid phosphorylation
  Homolog annotation: Hit_ID=P93520; Match level="QueryCoverage=96%, HitCoverage=93%, E-value=0.0, Identity=85%"; Hit description =Calcium/calmodulin-dependent protein kinase homolog|CaM kinase homolog|MCK1 protein
  Pfam annotation: Domain name=APH; Domain location=76-402; Score= -13.6; E_value=0.053; Accession=PF01636.13; Description =Phosphotransferase enzyme family
  Pfam annotation: Domain name=Kdo; Domain location=214-384; Score= -87.2; E_value=0.088; Accession=PF06293.4; Description=Lipopolysacchar ide kinase (Kdo)
  Pfam annotation: Domain name=Pkinase; Domain location=172-465; Score =281.9; E_value=1.2e-81; Accession=PF00069.15; Description=Protein kinase domain
  Pfam annotation: Domain name=Pkinase_Tyr; Domain location=172-481; Score=-3.7; E_value=3e-12; Accession=PF07714.7; Description=Protein tyrosine kinase
  Pfam module annotation: Pfam domain module=APH::Kdo::Pkinase::Pkinase_ Tyr; Domain location=76-402::214-384::172-465::172-481
  Subcellular localization annotation: CTP_CleavageSite=63; ConfidenceScore=5.01e-01
MGQCYGKARGASSRADHDADPSGAGSVAPPSPLPANGAPLPATPRRHKSGSTTPVHHHQAATPGAAAWPSPYPAGGASPLPAGVSPSPARSTPRRFFKRPFPPPSPAKHIKATLAKRLGGGKPKEGTIPEEGGAGAGAGAGAGAAVGAADSAEADRPLDKTFGFAKNFGAKYDLGKEVGRGHFGHTCSAVVKKGEHKGHTVAVKIISKAKVRGDHGSRERGMLLMSNSTYGKFQIVALAVQMTTAISIEDVRREVKILKALSGHDNLVRFYDACEDALNVYIVMELCEGGELLDRILARGGRYTEEDAKAIIVQILSVVAFCHLQGVVHRDLKPENFLFTTRDESAPMKLIDFGLSDFIRPDERLNDIVGSAYYVAPEVLHRSYSMEADIWSIGVITYILLCGSRPFWARTESGIFRSVLRADPNFDDSPWPSVSAEAKDFVKRFLNKDYRKRMTAVQALTHPWLRDEQRQIPLDILIFRLVKQYLRATPLKTFGIKGTALSKALSEDELLYLRLQFKLLEPRDGFVSLDNFRAALTRYSTDAMRESRVLEFQHALEPLAYRKMDFEEFCAAAISPYQLEALERWEEIAGTAFQHFEQEGNRVISVEELAQVFGIGSTFSALALGAMWKIITLFDIVRCA

SEQ ID NO: 45935 - protein, 225 aa, Zea mays
  Coding DNA Sequence Number=SeqID_4156
MTVHSRVQRKSFSYGGKVNHQVDPHPLNGGPLGAWKPTAGGGSRGGETTDEATQCDKGGENGALGPWGGGEAQELTQLDPRLLERGGSTHWSGGRARWRGSIELGGGCGEAEAGVGSWGSSGQSFYRRPGRGEERWRAPATLAAAAMMAHSGDGTAQTGGGDGTAREQCAGTQGAKRAGERVNGEAMGRVVADGERTDSLITGAVDGADKQGSPARERAVARERG

SEQ ID NO: 45936 - protein, 460 aa, Zea mays
  Coding DNA Sequence Number=SeqID_4157
  Gene Ontology: Mol. function=protein binding; Biological process=tRNA aminoacylation for protein translation
  Homolog annotation: Hit_ID=Q5Z7T5; Match level="QueryCoverage=95%, HitCoverage=95%, E-value=0.0, Identity=86%"; Hit description =Putative lin-10 protein
  Pfam annotation: Domain name=UPF0183; Domain location=46-460; Score =674.9; E_value=6e-200; Accession=PF03676.5; Description =Uncharacterised protein family (UPF0183)
  Subcellular localization annotation: CTP_CleavageSite=21; ConfidenceScore=5.20e-01
MAGGGGAATAVAAGAAVGMPSQATLPVRRRCEGTAMGAITLDLRPGLGVGPFTLGMPISDAFTQIERQPNIYDVVHVKYFDEEPLKLDFVISFPDHGFHLRFDPWSQRLRLVEIYDVKRLQLRYATSLIGGPSTLATFAAVYALFGPTFPGIYDKERGIYTLFYPGLSFAFPIPSQYTNLFTNGEVADLPLEFPDGTTPVTCRVCIYDSSTDSKVGVGSLMDKAMVPALPAGSLYMEEVHAKLGEELWFTIGGQHIPFGASPQDVWTDLGRPCGIHQKQVLFGKDQYKKNDILSGIVGAFSAGKLTMFVLPSCKVDQMVIHSASEARPRTTLCGDYFYNYFSRGIDILFNGQTHRIKKFVLHTNFPGHSDFNSYKKCNFVIYDAEAEGTCQPNNASKNCITPSTKWEQVKEILGDCGRAAIQTQGSMNNPFGSTFVYGYQNIAFEVMKNGYIATVTLFQS

SEQ ID NO: 45937 - protein, 112 aa, Zea mays
  Coding DNA Sequence Number=SeqID_4158
MVAVDGEVSLEVPTTISENNHTPIHGSLIEKQKASYSMGAVIITCKLASRKESVHKSGGARKREGGIRAEAETREGKRRGRKKGTKNKGSAEVIKKLGDATLLFAEEKFNEV

SEQ ID NO: 45938 - protein, 131 aa, Zea mays
  Coding DNA Sequence Number=SeqID_4159
MASTTFGTLWLGKRRPREIQGRALWARASPRQGSRGRGNTGERGPIVGGTSTGIGLMQRREGDGRVMGERKWAENKKQQSCALVPEIARETARARARAIGEGSDSRKYAGGRVTNSRCESFGKKMNKMLEA

SEQ ID NO: 45939 - protein, 71 aa, Zea mays
  Coding DNA Sequence Number=SeqID_4160
MAQKCPETLLIFIHRCLEGPKGKLGGLLEEDVVDDAALSKAVMRVYNEDICYTICRWKSTIIIFKSPTSLV

SEQ ID NO: 45940 - protein, 488 aa, Zea mays
  Coding DNA Sequence Number=SeqID_4161
  Gene Ontology: Mol. function=DNA binding
  Pfam annotation: Domain name=MBD; Domain location=64-131; Score=24.1; E_value=0.00012; Accession=PF01429.10; Description=Methyl-CpG binding domain
METKPIVEHKSLYELLTVNPYDFPAVTKDDSGMRTLPNGSLSEDMPSRTRSGLVRRSPTVKTVSKDKRAVEGLPDGWRKEYRPRKNGSFLDVYYIDPVSGYEFRSFKDVHRYLETGDIRQCAVRPKKSTICEVHIIESQTHASASPQHTRPGTADKGIQCEILTSDGIMVPLGELIAPYNGNDTEHTVLPEPENLKAIQGSDNKLETSEHVSVQPVSARNGSRQTKSVKRKERNAEVKSKKRKTSSAVTAVRASPRLAALKVQLEVSIKHEDAMVSINHVDQVQTIEESAIDQAHKSQSGSVDEIHGNLESTFSQLQLSQADTANGMQAMQENTTIHSQPSQLDTLNPTHRSQENSGNQLQSVLTDSSIPKRTTQECTIDEPSQPGINHIHTDQEFTGNQFRSNLPDDTVISLRDIEECTAHSKPSNTDSTGQIQANEENTANQVQSSLTDTVIPVPVIQEYATGYSQLSKANTSNKKQANQEYIADQ

SEQ ID NO: 45941 - protein, 818 aa, Zea mays
  Coding DNA Sequence Number=SeqID_4162
  Gene Ontology: Mol. function=zinc ion binding
  Homolog annotation: Hit_ID=Q2QPI8; Match level="QueryCoverage=83%, HitCoverage=100%, E-value=0.0, Identity=76%"; Hit description=PHD -finger family protein, expressed
  Pfam annotation: Domain name=C1_3; Domain location=190-219; Score =8.8; E_value=0.047; Accession=PF07649.3; Description=C1-like domain
  Pfam annotation: Domain name=PHD; Domain location=136-192; Score =10.0; E_value=0.0057; Accession=PF00628.19; Description=PHD-finger
  Pfam annotation: Domain name=PHD; Domain location=193-239; Score =11.5; E_value=0.0041; Accession=PF00628.19; Description=PHD-finger
  Pfam annotation: Domain name=PHD; Domain location=274-331; Score =30.0; E_value=8.2e-06; Accession=PF00628.19; Description=PHD-finger
  Pfam annotation: Domain name=zf-C3HC4; Domain location=137-189; Score= 19.0; E_value=0.0017; Accession=PF00097.15; Description=Zinc finger, C3HC4 type (RING finger)
  Pfam module annotation: Pfam domain module=C1_3::PHD::PHD::PHD::zf -C3HC4; Domain location=190-219::136-192::193-239::274-331::137-189
MAFHVACPITCRRVCDCELGFGAAAARKGGGGGAAAAVWAGTAAVLEGFLVDPWLLRPAGAVDEDAATVQVEVPPLEPDPEDGEDEARRAAAQRGAAAAEDLARRFESGAYGSPEAGEDEDEWDREDQGNAAVKVMCRLCFSGENEGSTKAAKMLPCKLCSKRYHRNCLKSWGEHRDLFHWSSWVCPSCRSCEVCRRPGDPNKLMFCKRCDGAYHCYCQQPSHKNVTHGPYLCPKHTRCHSCGSGVPGSGHSTRWFLGYTCCDACGRLFVKGNYCPICLKVYRDSEVIPMVCCDVCEKWVHIECDGISEEKYQQFQADQNLQYTCAACRGECSQIRDTEDAIRELWKRRDVADHELMATLRAAAALPSLEDVSPPYQNSDDEKLGAYALKNESRNTLKFSLKSNSSKPPPDTPEQEKIVFKSSGSNKKPSKKKSGQANKTVDGHDEIFLERRHAVKSSNSCLGDQTINENHDRSPFKNDDNVYVSSSTRSLEKNLKSPSMKAVANNADMIPKVKIKGSKVSSLHYKDGEENTPKNDTGKATKLVIHLGSRHKTRSGSPKSELSNSQREQDLGSIHGGKIDVTSQLKSSRNEVKERSVMKLVRDTGVQQRNSLLGDLGTSKKHATGKRSNALISGMENANETGTRNRSFAQKQSHSSQVENHGTADSPDSLKPSLLKLKFKRPHFEQLNTQASQPEEPTSWVSQQEEQLNVAKGQRSKRKRPSMEKADGLDGITPAKRHQQSTDEVMDANWILRKLGKDAIGKRIEVHLTSDGKWHQGMVSNVMGGTLCIRLDNGRSENVELGKQAIRLIASRSKGGKR

SEQ ID NO: 45942 - protein, 218 aa, Zea mays
  Coding DNA Sequence Number=SeqID_4163
MANGRGRRVRTRGGIRATMPTDEGRVRRRGGDPGRRARGEGDGGRRPGRVRRGCAKPPLTATGTCGLWRRALSLMEASTMVSAAVRVVLSCSNLPLVARTTPRARNDAAEIQHIANWASGARETTRACRRGSDTENGRGRREVAGGEQVRLSRRRFGQHARAGRGKGAVSGRDAAVGKGISVRAARRGFWDERCWWGGSRAWEDKRGHAWVWTPSLST

SEQ ID NO: 45943 - protein, 89 aa, Zea mays
  Coding DNA Sequence Number=SeqID_4164
MAARRPPGPARPRRPSLLTPVATRLMVLGIDSGNASPLQPNRTLAEYVDVYSPLIYTPNPPGCPHCNHCSGEDEAVEGDFQEFQDYDEF

SEQ ID NO: 45944 - protein, 199 aa, Zea mays
  Coding DNA Sequence Number=SeqID_4165
  Subcellular localization annotation: CTP_CleavageSite=34; ConfidenceScore=5.20e-01
MPTYAMQPLDFALPAPMLSPPPPPHFPVGFETPPASVVAPRDVSGQDDASTSWVNNIFNIQSPAGGSGYNSNQPDLELYVDVKDLLQCVCECEVMFENVNAHKQQNFHSRHLKRMRSWAMLLIPGREKDVLNKTNSKNKMMGVDQDMEKIIISDDCSKVEAKKKVHTTSLEKERKKKLHNASTGKNMQRDDDEEGEEYE

SEQ ID NO: 45945 - protein, 560 aa, Zea mays
  Coding DNA Sequence Number=SeqID_4166
  Gene Ontology: Mol. function=nucleoside-triphosphatase activity; Cellular component=membrane
  Homolog annotation: Hit_ID=Q6Z8F7; Match level="QueryCoverage=90%, HitCoverage=78%, E-value=0.0, Identity=76%"; Hit description=26S proteosome regulatory subunit-like
  Pfam annotation: Domain name=AAA; Domain location=317-525; Score =144.4; E_value=3.1e-40; Accession=PF00004.19; Description=ATPase family associated with various cellular activities (AAA)
  Pfam annotation: Domain name=AAA_3; Domain location=317-454; Score= -21.4; E_value=0.071; Accession=PF07726.2; Description=ATPase family associated with various
  Pfam annotation: Domain name=AAA_5; Domain location=317-445; Score= -17.8; E_value=0.041; Accession=PF07728.4; Description=ATPase family associated with various cel
  Pfam annotation: Domain name=Mg_chelatase; Domain location=295-451; Score=-147.7; E_value=0.016; Accession=PF01078.11; Description =Magnesium chelatase, subunit ChlI
  Pfam module annotation: Pfam domain module=AAA::AAA_3::AAA_5::Mg _chelatase; Domain location=317-525::317-454::317-445::295-451
MLEATLVVVDLDTRRRDLALSDDYQQPHWLAVSKCEHSACPAGDELQLYSRGAISQEQKRVDFEERKKLDQQRAKFKSQTAQYEDELKRKRLQAEHEAQRLRNQELVKMQEESGIRLEQIRRATEEQIQEQRRQTERQRADLEQATLSKKAMAEAEGRILVTKQTEDVKRRLLLEEINADREKWIQVINTTFEHIGGGLRTILTDQNKLVVAVGGVTALAAGIYTTREGARVVWGYVDRILGQPSLIRESSRGKYPWSGSLSRATSTLTSKLKSGSNLGKDGNGFGDVILNPSLQKRVKQLANATANTKLHQAPFRNMLFYGPPGTGKTMAARELARNSGLDYALMTGGDVAPLGSQAVTKIHQLFDWAKKSNRGLLLFIDEADAFLCERNKTYMSEAQRSALNALLFRTGDQSKDIVLALATNRPGDLDSAVADRIDEVLEFPLPGEDERFKLLKLYLDKYVIRAGDKREKSWLRFFRRQPQKIVVKGVTDDLIREAAAKTQGFSGREIAKMMASVQAAVYGSKDCELTPGLFREVVDYKVAEHQQRRRLAGEEPKQDA

SEQ ID NO: 45946 - protein, 132 aa, Zea mays
  Coding DNA Sequence Number=SeqID_4167
MFQLMIKWETYWALPVVVMLNMYHNLLRVNIQNTIRKKDVNAENNLEIGSKNNLEQICSLRPQESNNNLKRKVNQELEELDESKKEQYWKILVLSPQVGVGRLEDSITVGDGAISGGRGCNVLADNGLKNTG

SEQ ID NO: 45947 - protein, 161 aa, Zea mays
  Coding DNA Sequence Number=SeqID_4168
  Subcellular localization annotation: CTP_CleavageSite=12; ConfidenceScore=5.25e-01
MWRSRFVRRHSLAAVVPSRGQDARRRSSIFLGQRTRTENSPDAQRTTQAERPGLPARPHRRRDFLPPGTTTTPSSPDSFGFGLDGGARRTAVGFYTCIFPNRMRRDQRMRPPGSAKSVAPSTFRGGHIGRSLKRKKLSTGTHMAAGTGRQVRTLEQSRPSA

SEQ ID NO: 45948 - protein, 84 aa, Zea mays
  Coding DNA Sequence Number=SeqID_4169
MSSSATLDPVLGVVGFAGGVARCLFPGYSLIVGPRRPEIIIPDRETHQNVSGDSMLPRDVPGGLPIPEHPRTLLPDGVPLEDEL

SEQ ID NO: 45949 - protein, 115 aa, Zea mays
  Coding DNA Sequence Number=SeqID_4170
MAASCRSRVALRRLPLAEACGSRPVARQFPVPKSTRPLFLDPDTQTADAEYAKEDFAIVVLCQRLSSPPTKPGRAFRSIVVFLLYAGYSRLPTEQEYVVWTVAREVELFTEANKK

SEQ ID NO: 45950 - protein, 256 aa, Zea mays
  Coding DNA Sequence Number=SeqID_4171
  Homolog annotation: Hit_ID=Q8GSM4; Match level="QueryCoverage=25%, HitCoverage=18%, E-value=4e-12, Identity=53%"; Hit description=Ovate protein
  Pfam annotation: Domain name=DUF623; Domain location=195-254; Score =116.9; E_value=5.8e-32; Accession=PF04844.4; Description=Protein of unknown function, DUF623
  Subcellular localization annotation: CTP_CleavageSite=47; ConfidenceScore=5.07e-01
MWGPTIQLSAPYRSQAPPPEAVRRQAAAPTLGPAAAAAWRPRRPPPPAAAAAGPSSCSDDDEYVKKPTAAVRAHDKLYAQVITSATDIVIDLRTKRRPEKTLPPIMTKTRPAKPDVFRLEDKHVDVLAHAARRASPVPEQGKLRPRRSVSSARRLKTRANTPRLASSMKCKSPTTATPPTKPPPLAESFAVVKSSRDPRRDFRESMEEMIVENGIRTATDLEDLLACYLALNAAEYHDLIVEVFEHIWVTLSDAKL

SEQ ID NO: 45951 - protein, 63 aa, Zea mays
  Coding DNA Sequence Number=SeqID_4172
MCIVYLARGDFDGTVEKVALELRITYQNFVLYCVQIFFQSNTYDGEKGLKYMVFYFVVLKLEV

SEQ ID NO: 45952 - protein, 94 aa, Zea mays
  Coding DNA Sequence Number=SeqID_4173
MTTAVLSPYGSKETSARSRQPRIVLIGEITACLQHPSPHGSAKFHADMDNTLKTTEKKGSSNNFGPNGKAISERDPMPVGKQSLNAREAERNDR

SEQ ID NO: 45953 - protein, 52 aa, Zea mays
  Coding DNA Sequence Number=SeqID_4174
MMLRGDIFNEGAPWPILHGILLRDKPIVKVEVLRKNKKRRLRRFSSMCVCSV

SEQ ID NO: 45954 - protein, 106 aa, Zea mays
  Coding DNA Sequence Number=SeqID_4175
  Subcellular localization annotation: CTP_CleavageSite=96; ConfidenceScore=5.47e-01
MGPRHKFRLSDMIPNAWFFKLRDMRARGGGGAAASPRVAAQAASRTPPTTPRTATERSRRRRRSGSHTGRPTTTVGGGTRPGLALARGLRSRFSFRSFALDVQEGK

SEQ ID NO: 45955 - protein, 91 aa, Zea mays
  Coding DNA Sequence Number=SeqID_4176
  Subcellular localization annotation: CTP_CleavageSite=20; ConfidenceScore=5.10e-01
MAGTDAWSSNGSISVAPRTPASSVELPSLAFLALGPAIDPTAAHLRSAPPCPAVAGEPWPGRLADPFLCPLVRKKKTPFWVYGRWAQVGMF

SEQ ID NO: 45956 - protein, 71 aa, Zea mays
  Coding DNA Sequence Number=SeqID_4177
MDPLRCSLRPTNVPPSMGGNRGLPGHVEYRHDIDWPEGPLGHYELLTGLTPSPWSASYRDRLCTCRFCPKG

SEQ ID NO: 45957 - protein, 42 aa, Zea mays
  Coding DNA Sequence Number=SeqID_4178
MARTTLTTTDRHPTIDEFARTPPISVTTSPELDRRILRKSIT

SEQ ID NO: 45958 - protein, 1320 aa, Zea mays
  Coding DNA Sequence Number=SeqID_4179
  Gene Ontology: Mol. function=protein serine/threonine kinase activity; Cellular component=cytoplasm; Biological process=protein amino acid phosphorylation
  Homolog annotation: Hit_ID=Q2QSC9; Match level="QueryCoverage=99%, HitCoverage=99%, E-value=0.0, Identity=81%"; Hit description=Protein kinase domain containing protein, expressed
  Pfam annotation: Domain name=Arm; Domain location=1100-1140; Score =21.5; E_value=0.0031; Accession=PF00514.13; Description =Armadillobeta-catenin-like repeat
  Pfam annotation: Domain name=Arm; Domain location=1184-1223; Score =19.4; E_value=0.013; Accession=PF00514.13; Description=Armadillobeta- catenin-like repeat
  Pfam annotation: Domain name=Arm; Domain location=1279-1319; Score =3.6; E_value=4.3; Accession=PF00514.13; Description=Armadillobeta -catenin-like repeat
  Pfam annotation: Domain name=HEAT; Domain location=1105-1142; Score =15.2; E_value=0.24; Accession=PF02985.12; Description=HEAT repeat
  Pfam annotation: Domain name=HEAT; Domain location=1148-1184; Score =17.0; E_value=0.066; Accession=PF02985.12; Description=HEAT repeat
  Pfam annotation: Domain name=HEAT; Domain location=1189-1225; Score =0.1; E_value=42; Accession=PF02985.12; Description=HEAT repeat
  Pfam annotation: Domain name=Pkinase; Domain location=6-256; Score =366.1; E_value=5.7e-107; Accession=PF00069.15; Description=Protein kinase domain
  Pfam annotation: Domain name=Pkinase_Tyr; Domain location=6-256; Score=121.6; E_value=2.3e-33; Accession=PF07714.7; Description =Protein tyrosine kinase
  Pfam module annotation: Pfam domain module=Arm::Arm::Arm::HEAT::HEAT:: HEAT::Pkinase::Pkinase_Tyr; Domain location=1100-1140::1184 -1223::1279-1319::1105-1142::1148-1184::1189-1225::6-256::6-256
MGIEDYHVIDLVGEGSFGKVYKGRRKYTRQTVAMKFILKHGKTDKDIHNLRQEIEILRKLKHENIIEMIDAFETPQEFCVVTEFAQGELFEVLEDDKCLPEEQVQAIAKQLVKALYYLHSNRIIHRDMKPQNILIGKGSIVKLCDFGFARAMSANTVVLRSIKGTPLYMAPELVREQPYNHTADLWSLGVILYELFVGQPPFYTNSVYALIRHIVKDPVKYPDNMSTNFKSFLKGLLNKVPQSRLTWPALLEHPFVKDDSMGSAAESRPAPFEARGSEDTQKAEETQSRNQPSPAGPQSRITATNRENASDKPKGNRKLDDPMQATQDRHGSPTECTALDKLEKASQTVEGASSIVQDIEALSTILTPIKIWLTNTPSSTRELNIDGANQSLRIIKNLIDAGSCQSYAAIDISLLLEFTNLIIKTKLSNAYGLVVKCLAIARKLLDTSDEVILNSYDRHWLSLYELYSQILVSTVDSSGRISRESTACLALMLSRVISGLKASMSSEDPKPVEESLLKIIDHARTSQLLELLCECLMASGSDTLSGSTNMVPAACEACKAIWYLAHAVDIMSIGAHHFSFPLANSWRQIHSMQEQSSKADSNSTNLINIFVKSFLASRPIQVAVYHCLHNGLESAIHACLQLISRACLQNVTFCAIMCRPWNSPSDVDVVEYGGDGTIVSDMFSLLSLCGSYLNKESRQNSNQKCKLSNPHALVVHCCLALATIAACLKSEGGSSASLVLTSSQKKQRSRLSVLAHLSSVDDTVKSCLQPHCASAMLALSSLVSLENGGQTRSSLCETALALFPRMATLHTLLKLWLSDGSEALCRYNAGLLNLFGLRDGSIGLLETRLKWGGPLAIEQACSVGIPQLLIRLLTDGFIKEVSDGKDGSTSRSGLSPLGVVWTLSALSQCLPGGVFREILYRREQLKLLTDLLSDTHLKALAAWTGLGGGKRGVRELINSVVDILAFPFVAVQSSPNMPSASASINSGFLLNVASPGGRIGTENKEMLKTIEQNMPQYIQVLLEVGIPGCMLRCLDYVDMEDLGRPLAIVAKMAGYRPLALQLHKEGLLDPSRVAALLEGPIAKETLLDFLMIISDLARMSKDFYVPIDKAGLVVLLKNFLSNGDPDIRAKACSAIGNMCRHSSYFYGPLAANKVIQLVVDRCSDPDKRTRKFACFAVGNAAYHNDMLYEELRRSIPQLTTLLLGPEEDKTKGNAAGALSNLVRNSDMLCEDIVSQGAIQALLKMVGSYSTVALSPSRRDALTESPLRIVLFALRKMCDHAICRNFLRSSELLPVIVHLRQSPDPTISEYASAIATRVSQA

SEQ ID NO: 45959 - protein, 417 aa, Zea mays
  Coding DNA Sequence Number=SeqID_4180
  Gene Ontology: Mol. function=sequence-specific DNA binding; Cellular component=intracellular; Biological process=DNA metabolic process
  Homolog annotation: Hit_ID=Q8GT06; Match level="QueryCoverage=96%, HitCoverage=99%, E-value=1e-106, Identity=64%"; Hit description =Endonuclease-like
  Pfam annotation: Domain name=ERCC4; Domain location=163-265; Score =88.0; E_value=2.9e-23; Accession=PF02732.6; Description=ERCC4 domain
MAAPAPALMQLKVRIPENEEVARCLHEKRLSMREQPAGFKEHLDRTFAKAYRNVCAANEPIRTLKEFSKINGVGPWLIRCMKGFFAESKQDSPAKGKGPPSNLNCQNAQFSSSQGTLELQPSGKTGSTDFNMLDKDVVSMNNCILAMPPRQSSEEFLEAYEVVLILDDRENFGYCSRKVASKKVADNIGSQFNVPVEVKRLPVGDGIWIARHKKNFTEYVLDFIVERKNVADLGSSIRDNRYKDQKTRLQRCGLRKLMYLVEGDPNTSKGSAASIKTACFTTEIFEGFDVLRTNGYTDTMRTYGYLTLSIMDYYSTNFCRLDKSACICPTYDEFERHCHCLQKRTVPQVTEKVALTVIEFYPTLFSLARAYSMLEGDIHAQEEMLKNKSKMINAGASRNIFRLVWGDGCQSSGLILD

SEQ ID NO: 45960 - protein, 84 aa, Zea mays
  Coding DNA Sequence Number=SeqID_4181
  Homolog annotation: Hit_ID=Q2PXN5; Match level="QueryCoverage=64%, HitCoverage=100%, E-value=1e-13, Identity=54%"; Hit description=RW1 -like protein
MGFIMEFAENLILRLMEDPDKRDQVRREHVYKTKERFPLRPNGFWTFDRFNSQLSWDPQINQAAGHRDPYDDLITRHSGSPPSS

SEQ ID NO: 45961 - protein, 149 aa, Zea mays
  Coding DNA Sequence Number=SeqID_4182
MGKSNKRKREPTPPSEDFGDSEYSEEEFSSESKGSPAPVSPPASSDDSDDSQGFAAEVWTYIRVVERSGLEGSDESEYSSGEEDSSDSSEEGGGGDGGDDDDDDGGDGDDDDDGGDGGSRGGNGGSKGGNDDSRGGNGGNSKGSNRASG

SEQ ID NO: 45962 - protein, 71 aa, Zea mays
  Coding DNA Sequence Number=SeqID_4183
MARAITVVSCPHPSPMTRDGNGHEISACPRILNPMGTDTDVADERFNSFWSCLEDNEEEMKESCITMADSD

SEQ ID NO: 45963 - protein, 165 aa, Zea mays
  Coding DNA Sequence Number=SeqID_4184
MENVPNRLVTAPVLHAKIRPSLDTLGLKKLRLARPQGSAPVSASAPEDDELRLARPRARTRPWLQKTTNSASPDPRARTRPRLQKTTNSASPDPRARTRPRLQKTTDSASPDPGLRLGLGSGRQRTPPRPTPRLGLNLDLGGIATSPQLGFGPATSPGGPSLPYP

SEQ ID NO: 45964 - protein, 113 aa, Zea mays
  Coding DNA Sequence Number=SeqID_4185
MATAVSGRWTRVRTLGRGASGAVVSLAADAASGALFAVKSAPAWAAGAAAARGEHPVVPPVPEGVPCLGHRPAATAGGAAPRDRARGSLADVAARARRLIDDILPSRDRMDIY

SEQ ID NO: 45965 - protein, 100 aa, Zea mays
  Coding DNA Sequence Number=SeqID_4186
MAWEWESRIQPLGPTEMIEEVNSSNVFNSAMPMLLLETRMLRASFISIISILHEHEAMTLKAPHSVRTDSWPKFCSTNYMHVFTQVKPNVALKRNLRRST

SEQ ID NO: 45966 - protein, 292 aa, Zea mays
  Coding DNA Sequence Number=SeqID_4187
  Gene Ontology: Mol. function=protein serine/threonine kinase activity; Cellular component=plasma membrane; Biological process =protein amino acid phosphorylation
  Homolog annotation: Hit_ID=Q8L594; Match level="QueryCoverage=59%, HitCoverage=34%, E-value=2e-46, Identity=57%"; Hit description =Putative NPK1-related protein kinase
  Pfam annotation: Domain name=APH; Domain location=119-288; Score= -4.6; E_value=0.012; Accession=PF01636.13; Description=Phosphotransfer ase enzyme family
  Pfam annotation: Domain name=Pkinase; Domain location=117-292; Score=- 0.3; E_value=1.5e-08; Accession=PF00069.15; Description=Protein kinase domain
  Pfam annotation: Domain name=Pkinase_Tyr; Domain location=117-288; Score=-50.4; E_value=2.2e-09; Accession=PF07714.7; Description =Protein tyrosine kinase
  Pfam module annotation: Pfam domain module=APH::Pkinase::Pkinase_Tyr; Domain location=119-288::117-292::117-288
MERRAVRLPVKKARALLVCGRRGFRSEAAAPRAQKQTLTHAAISLRHPSVSARVPRPRAARRNRPSPPGLPSPPQCQTHASTPHALTTRIHRASSTPHREPQAEAEPMTTTTTAKQLRRVRTLGRGASGAVVWLASDEASGELVAVKSARAAGAAAQLQREGRVLRGLSSPHIVPCLGSRAAAGGEYQLLLEFAPGGSLADEAARSGGGRLAERAIGAYAGDVARGLAYLHGRSLVHGDVKARNVVIGGDGRARLTDFGCSRPAGGSTPPVGGTLSFLRPRWRAARSRAPPP

SEQ ID NO: 45967 - protein, 198 aa, Zea mays
  Coding DNA Sequence Number=SeqID_4188
MAQKLARCLDLPTVFRGQRSTSGLRPRRRDDKGEDHDASELDVEQRTKEKRHSTQLQMSGAHGSTTQQLVMMTNLDDGNGFPASRTEGAHEQRARRDFRRRERRAYVELAASNMRCKKEKRAGDMARLRWGKKTVILHFIQQREVRASRKEIAAAINGVQEKKKSDDRGNKYWKDKRNSRTREVDLKRGRLFASNSVV

SEQ ID NO: 45968 - protein, 87 aa, Zea mays
  Coding DNA Sequence Number=SeqID_4189
MGVGGLRWRLRPLDPASQRLRPCLDLVIATQLLLQLGDHLPTIFTSIEFEYDDKVLLSIDNEVLKVVVTQFLTGVGLAQLHHAPVPA

SEQ ID NO: 45969 - protein, 160 aa, Zea mays
  Coding DNA Sequence Number=SeqID_4190
MTAAAPSRRCHHRRVFQERFPAPNSNPKAHAQSGDEGEHARHGLTGCDAAWRSDRGKKRSAAALESMARNYSRTAGPCARLGPCTRYTLLLGRLEPHYRAWGAAMVVHQRSNGSFTQRSAAKAADSVNSEEQCVQKSEQSPEAHRTVNTTCSEGILQDRW

SEQ ID NO: 45970 - protein, 36 aa, Zea mays
  Coding DNA Sequence Number=SeqID_4191
MAHSGGDGIAWADGGDGMARHRRKAPIWLLANRNQT

SEQ ID NO: 45971 - protein, 144 aa, Zea mays
  Coding DNA Sequence Number=SeqID_4192
MDILDQGRIAQRTITPTPPPSKGDKKKHTAALAPFFPNILFIQGRLESSPISDDEPTVLGRFQTMRNRIPEVVEAAVIEDFYQGSNDPIFAQAILQKAPATSEQLFWEVDVYITADERAQDLIGGTKLVPLAPRRDTNQQPDKR

SEQ ID NO: 45972 - protein, 248 aa, Zea mays
  Coding DNA Sequence Number=SeqID_4193
  Homolog annotation: Hit_ID=Q10L85; Match level="QueryCoverage=52%, HitCoverage=53%, E-value=4e-15, Identity=41%"; Hit description =Expressed protein
MSPGEELLPGRTYFVLPAARLPCLKALTPATLAALSQSHGRKKQQPIFAVAGCPFEHVKGAHGGAPLIRVLPEFIEKLITACDAGANASANKDTAAKQAAELCSTPELKRHYAQLVGAGRSRPWSPRLETIAERGRMTKDEQQNAAKRGHGRRRVRETRKWSHTRGREELGASSAVSSSSPVDRTASASRRLTSLGVVGLGWSASGKETARKESIGQVGWAILCGRMVWSTGRERTLALAHGSGRPQL

SEQ ID NO: 45973 - protein, 158 aa, Zea mays
  Coding DNA Sequence Number=SeqID_4194
  Subcellular localization annotation: CTP_CleavageSite=37; ConfidenceScore=5.35e-01
MSGAPEDSNSNSSPSGNSRRNSAINHRTVRCTPDSVRCSKEERPPELASLGNSLRLLRYNSPDMSGVTAGQRLLLAPTATCGALNARQRAQRSGTPMLAHRTLYSTCPVRHRTSRRAQKTELQRSEPNSFGDVAGAPDCPVCTGLSGAPYDSQPAPNG

SEQ ID NO: 45974 - protein, 302 aa, Zea mays
  Coding DNA Sequence Number=SeqID_4195
  Gene Ontology: Mol. function=transcription regulator activity; Cellular component=nucleus; Biological process=regulation of transcription
  Homolog annotation: Hit_ID=Q941Z7; Match level="QueryCoverage=72%, HitCoverage=89%, E-value=8e-65, Identity=63%"; Hit description=BHLH transcription factor-like
  Pfam annotation: Domain name=HLH; Domain location=72-124; Score=59.9; E_value=8.5e-15; Accession=PF00010.16; Description=Helix-loop-helix DNA-binding domain
MDHQMFDDPFGSSGISSLEADIFSAAAGSQLPSPPWPDFDDDYDIPDLSALPANAATSSGGGYGSGGSGGHRKLSHNAYERDRRKQLNDLYSSLRSLLPDADHTKKLSIPTTVSRVLKYIPELQKQVDNLERRKRELTNANCKPGVLNTSEIVTTPIVSATCLNDTEIMVQVSLHSNVAATALPLSKCIKVLEDAGLHLISSSTYSTFGNKTFYSLHLQVRTLLQCIVDRYIAWGVLQQVCSCGKKEGTLHFYISRPYSCYGVIRYSGSCSEFVADVPAMAPRRPSVHMDLPAQYGTPSCRF

SEQ ID NO: 45975 - protein, 169 aa, Zea mays
  Coding DNA Sequence Number=SeqID_4196
MARGRRKAPIGLVASNGEGMWRSGGQRSVTENRKRDIRQNARPDESEEEEEEEEVGTDESTTNPGEGGCADDNDPSHREGGGDVATYGARDEQVTEEPGAQQVENTEQELVKGKLDRESISLLTHLLLRRELHSSHPMGDVTLMGASTDQDTSFSNKQAKLLKTQKFAS

SEQ ID NO: 45976 - protein, 107 aa, Zea mays
  Coding DNA Sequence Number=SeqID_4197
MRALQVSRARVLSPLRRPLGPACQPLAIVCAHCLCSDWLAARWGSRASDHGRSHVYLLANGFAERSRRENPLRIERPRSLYLETAPSGRRGDCSSMVVGVTGGEGRF

SEQ ID NO: 45977 - protein, 254 aa, Zea mays
  Coding DNA Sequence Number=SeqID_4198
  Gene Ontology: Mol. function=carboxyl- and carbamoyltransferase activity; Cellular component=ornithine carbamoyltransferase complex; Biological process=amino acid metabolic process
  Homolog annotation: Hit_ID=Q8SA97; Match level="QueryCoverage=51%, HitCoverage=21%, E-value=4e-10, Identity=56%"; Hit description =Ornithine carbamoyltransferase
MAPPIVVAGLRPRLGEVEAPPKPRSSLSSVAEAESEPLVGRGGGRRLRPGRSPSPGVGRSGVRRLLGLSPSPSPGSGGAEFAVFRDLARVRALGRAERSSPSSGAEPEFEPWIGRSGVRRLPGLSPSPSPRSGGAEFPVVPSAGPDCLSASLCQVALQSARRRRRCPSVSGLSGVPPDCLVHQRSNDSFAQRSTAKAADSVNIEEQCAQSQSAEVRGAPDTEQCLFDVTPDCPVPLEDKASNNHLLLNPNSWVT

SEQ ID NO: 45978 - protein, 126 aa, Zea mays
  Coding DNA Sequence Number=SeqID_4199
  Gene Ontology: Mol. function=zinc ion binding; Cellular component =nucleus; Biological process=ubiquitin cycle
  Homolog annotation: Hit_ID=A0ELV2; Match level="QueryCoverage=65%, HitCoverage=75%, E-value=2e-43, Identity=96%"; Hit description=RBX1 -like protein
  Pfam annotation: Domain name=zf-C3HC4; Domain location=43-95; Score =1.8; E_value=0.1; Accession=PF00097.15; Description=Zinc finger, C3HC4 type (RING finger)
MDKGSVVVPPAPAAAAAKKAKRFEIKKWNAVSLWAWDIVVDNCAICRNHIMDLCIECQANQASATSEECTVAWGICNHAFHFHCISRWLKTRQTTVSGSSRSMVTRENGFGVELLHRFSSFSSSGY

SEQ ID NO: 45979 - protein, 99 aa, Zea mays
  Coding DNA Sequence Number=SeqID_4200
  Homolog annotation: Hit_ID=Q6YV21; Match level="QueryCoverage=44%, HitCoverage=9%, E-value=3e-09, Identity=57%"; Hit description =Uridine kinase-like protein
MEYNVLAILILRRVYRAHEEQQIVRKGIRGVLEKSSGVVPHSIAACSPCIVEFAVKLLAQHNETVFNEKVVNFMPDVTVISMDNYNDTTCIVDGNFDGS

SEQ ID NO: 45980 - protein, 181 aa, Zea mays
  Coding DNA Sequence Number=SeqID_4201
MGRTEAQGCSRPWLELACGGGECEAMPGGHGHGGVATGTTCHKGKEEGRRPRRGTRERMGAWLTWASMSRELWMVLRVPGDGCCACEEGKEQRRWAGWLATWARWVGEGGLEKMNRRWGDLVGGAHTQAAALGGSLARACGAQLEHWVARGRTGRRGRPGWGAWEGIFTTTDAILEGLLDL

SEQ ID NO: 45981 - protein, 411 aa, Zea mays
  Coding DNA Sequence Number=SeqID_4202
  Gene Ontology: Mol. function=carboxylic ester hydrolase activity; Cellular component=cellular_component; Biological process=lipid metabolic process
  Homolog annotation: Hit_ID=Q6ZIA4; Match level="QueryCoverage=89%, HitCoverage=86%, E-value=1e-156, Identity=70%"; Hit description =Putative gastric lipase
  Pfam annotation: Domain name=Abhydro_lipase; Domain location=44-119; Score=57.2; E_value=5.5e-14; Accession=PF04083.6; Description=ab -hydrolase associated lipase region
  Pfam annotation: Domain name=Abhydrolase_1; Domain location=122-402; Score=14.9; E_value=0.00055; Accession=PF00561.10; Description =alphabeta hydrolase fold
  Pfam module annotation: Pfam domain module=Abhydro_lipase::Abhydrolase _1; Domain location=44-119::122-402
MGTTAAHRRRPGSIVVLSPSAVALALLFLSTTLRLAAAVQPYGGGGPCALAVAPLGYPCEEHQVTTADGYILSLQRIPSGGRGGHGGGAGAGASSSRAGQPVLLQHGVLVESLPFILADRGFDVWIANNRGTRWSRRHVSLDPSSRLYWNWSWDDLVVNDLPAMVDFVVKQTGQKPHYVGHSMGTLVALAAFSEGRVVSQLKSAALLTPVAYLAHITTPIGILLAKAFVGEVLSDFLGMAEFDPLAPPVTNLIRAFCRRPGMSCYDLVGSITGKNYCLNSSAVDVFLKYEPQPTSTKTMVHFAQTVRDGVLTKYDYVLPERNIASYGQAEPPVYRMSGIPPSFPLFLSYGGRDSLADPADVRLLLQDLRGHDQDKLTVQYLDKFAHLDFIIGVCAKDYVYKDMIDFLNRFN

SEQ ID NO: 45982 - protein, 230 aa, Zea mays
  Coding DNA Sequence Number=SeqID_4203
  Gene Ontology: Mol. function=transferase activity; Cellular component= membrane
  Homolog annotation: Hit_ID=Q10SX7; Match level="QueryCoverage=51%, HitCoverage=27%, E-value=4e-42, Identity=76%"; Hit description =Exostosin family protein, putative, expressed
  Subcellular localization annotation: CTP_CleavageSite=45; ConfidenceScore=5.43e-01
MVQVHATHRGTGGHHDTARPAIRPSPSARPAPRSRLQAHGTAPPSARPGAGRTAAPRLLSLLLLLLWFALSLALFLSAMPPSTAPLRRSSSFLRSKPRALAATTTDAAAVAPRVRIYVYDLPARFNREWAAADARCSRHLFAAEVAVHEALLAYVGRAARPEDADLFFVPVYVSCNFSTPNGFPCCRTPEVCSPTPSTSSGPGCRTGTASRGPTTSSSRPTTSAPASIPW

SEQ ID NO: 45983 - protein, 104 aa, Zea mays
  Coding DNA Sequence Number=SeqID_4204
MPVAKEKGERGEWAQEPAWAAFGDSGASEGALPARPPLGHASAHAVGRAEAQGCSRPWLELACGGVMVVAHVRRGRGGEGAKALGGVVGIVGEMGGRRRFGEDE

SEQ ID NO: 45984 - protein, 231 aa, Zea mays
  Coding DNA Sequence Number=SeqID_4205
  Homolog annotation: Hit_ID=Q6QP51; Match level="QueryCoverage=70%, HitCoverage=94%, E-value=7e-14, Identity=41%"; Hit description =Putative growth-regulating factor 1
MQAACNRTKGVHPFDFDASSMEAQAHTSWTRKGDIPKGILLREGNGPRAPLLIRGSKAGPSEGFNSRLRALGLRAHFWSEVQRSAPRKGSTAASDHLGSAPITDQGFVGWPPKGAKGSHLANKKTKNRVQQREQGITEERATLELASFGNLLRYNSPDMSGTREVAHRTLYSACPVCHRTSRRAQKSELQRSEPNGLVTWLAHRTLSGDRWRRIAVAPLAHRTVRCTPDMS

SEQ ID NO: 45985 - protein, 117 aa, Zea mays
  Coding DNA Sequence Number=SeqID_4206
MDSVDALVACLKARTLVGQLATAWLMHRRRLELRHRSRLNNQVAYRVLSNHRCQCVAAAGPCTHYHEVGSSAPTTAHEVVSAPVTTEATIQVCIAVHVESAAPVITIISDDEDEKID

SEQ ID NO: 45986 - protein, 108 aa, Zea mays
  Coding DNA Sequence Number=SeqID_4207
MNAIGSQASVNRRSRLGDPEIKLFEFYKIEDPRHLFGEVFTCLDNLRQKGSWLMGKVCDLCRGMKLIYQSCSLLRAALGSSLIRDTDGSRYYGSIFGFCYDDDNDILW

SEQ ID NO: 45987 - protein, 266 aa, Zea mays
  Coding DNA Sequence Number=SeqID_4208
MTKVIKMELIEGELGRFATKRGEGPHEMYNRLKSFMNQASPANRRRPAPLFPFSLSLFSGVALSALQPVVRSRVYAAVPWAPLASPSPSFNRSHARTAHTHAEIAASTSPSSSKPAPDPLYKSPHTPLPPASLISPLPTHPSCARPFFKLAGASPSPDPLHLNSSPVELGHSPRSCSGHSPRSCSATVRPSHAIVPAPPKVYFPARPSLLSPPFSRFRRLVTGHRRYQSHAVKLRPPCQPRPPRAFFARTESPAPAMALAPCALPR

SEQ ID NO: 45988 - protein, 157 aa, Zea mays
  Coding DNA Sequence Number=SeqID_4209
  Gene Ontology: Mol. function=RNA binding; Biological process=response to stress
  Homolog annotation: Hit_ID=Q9AWW1; Match level="QueryCoverage=76%, HitCoverage=36%, E-value=8e-41, Identity=71%"; Hit description =Esterase/lipase/thioesterase family protein-like
MAEQLASQDAPNPPAPAQRVLMTNTHGEKLVGLLHHMGSDKVVVLCHGFTGSKDYSLITDLAAALTKQGISVFRFDFSGNGESEGEFQYGNYKKEAADLHSVVLYLRQEKYDVAAIVGHSKVFHWIHVIGFMSLVDIIMEFISPIVLEFHAYINPMT

SEQ ID NO: 45989 - protein, 139 aa, Zea mays
  Coding DNA Sequence Number=SeqID_4210
MRCLYRSPVPATPRANPPFLLPATKPKRRSGDQPQPEAVEPQNDASSSAAGSKKIKKSKARGKVHSGLGVKLVNLDAGNKDLLLSRVGEQQRHNRKGARPRFRLFGKDIFGDYLLHLLIVKKDDQPQQCRYYRPIMMSS

SEQ ID NO: 45990 - protein, 916 aa, Zea mays
  Coding DNA Sequence Number=SeqID_4211
  Gene Ontology: Mol. function=beta-galactosidase activity; Cellular component=beta-galactosidase complex; Biological process =carbohydrate metabolic process
  Homolog annotation: Hit_ID=Q8W0A1; Match level="QueryCoverage=96%, HitCoverage=93%, E-value=0.0, Identity=81%"; Hit description =Putative beta-galactosidase
  Pfam annotation: Domain name=Gal_Lectin; Domain location=865-916; Score=45.8; E_value=1.4e-10; Accession=PF02140.8; Description =Galactose binding lectin domain
  Pfam annotation: Domain name=Glyco_hydro_35; Domain location=35-347; Score=328.6; E_value=1.1e-95; Accession=PF01301.10; Description =Glycosyl hydrolases family 35
  Pfam module annotation: Pfam domain module=Gal_Lectin::Glyco_hydro _35; Domain location=865-916::35-347
  Subcellular localization annotation: CTP_CleavageSite=21; ConfidenceScore=5.13e-01
MAPAAPAGLASVAVAVAVAVLAAAASAAVTYDRKAVVVNGQRRILMSGSIHYPRSVPEMWPDLIQKAKDGGLDVVQTYVFWNGHEPSRRQVVTDAATLYYFEGRYDLVHFIKLVKQAGLYVHLRIGPYVCAEWNFGRNVLADIDVLASCCDHWFLVVNLEQAEMQNFTTKIVDMMKSEGLFEWQGGPIILSQIENEFGPLEWDQGEPAKAYASWAANMAVALNTSVPWVMCKEDDAPDPIINTCNGFYCDWFSPNKPHKPTMWTEAWTSWYTGFGIPVPHRPVEDLAYGVAKFIQKGGSFVNYYMGSAVFSFAEHQIHAPPCQICGYQGSGTPSPSWAPLSSMWPTVVVLCCCFRVRVRGLLDVGCSRVWWALGGGCTVTSASAGTRPCGSSLWGLVLCGAVAPNQVPASAAQLWDTSTLAGGCGRCSWPTVAALQLAAAGDDGILDIMFLPSGADVQMPYRLDHILVADGLLREPKWGHLKELHKAIKLCEPALVAGDPIVTSLGNAQQASVFRSSTDACVAFLENKDKVSYARVGSQISQMKMEWAGGFTWQSYNEDINSLGDESFATVGLLEQINVTRDNTDYLCVDIAQDEQFLSNGKNPMLTVMSAGHALHIFVNGQLTGTVYGSVEDPKLTYSGNVKLWSGSNTISCLSIAVGLPNVGEHFETWNAGILGPVTLDGLNEGRRDLTWQKWTYKVGLKGEALSLHSLSGSSSVEWGEPVQKQPLSWYKAFFNAPDGDEPLALDMSSMGKGQIWINGQGIGRYWPGYKASGTCGICDYRGEYDEKKCQTNCGDSSQRWYHVPRSWLNPTGNLLVIFEEWGGDPTGISMVKRIAGSICADVSEWQPSMANWRTKGYEKAKVHLQCDHGRKMTHIKFASFGTPQGSCGSYSEGGCHAHKSYDIFWKSCIGQERCG

SEQ ID NO: 45991 - protein, 701 aa, Zea mays
  Coding DNA Sequence Number=SeqID_4212
  Homolog annotation: Hit_ID=Q6XPW9; Match level="QueryCoverage=51%, HitCoverage=100%, E-value=1e-140, Identity=73%"; Hit description =Submergence induced protein SI397
  Pfam annotation: Domain name=TolA; Domain location=105-464; Score= -146.0; E_value=0.036; Accession=PF06519.2; Description=TolA protein
MEGGEAGGLRFLLRFDPARPGLDRALLGFSFSALFSRLVVGWSKHGQTGGGGGGGFPAIAAEGEGGEGSGNAAVSVAALAAAAAAASLCLAAMYASDQRRPRHARARRLPALASAPRSRALHAPHDGLRILSSDDPNDESPDKVIHGASIGAGDDEPDIVARVEMDATPPAVPVPNADDDDDDDETETEAEEEEEEEERQELQRLRELWLSLEEREQRLELRLQELEGLRSQEAAARELEARVAAADAEVRILQLSVSALQEENGRLRARAEDLDAARAELARAKEKLRAVKARVQGEQEAAAAALRRKVEELESGGRERVGALVAEVAELRKANAALEADNMELALRLQDAEQQAASGASASNLAPEEGMIQEMTYLRESNERLTRQIEQLHNDHCAHVEELVYLKWVNACLRHELRDHDGQPTAEQQGPSAGSRDLSALELSKSMSFRSSERAKQLMLRYGSPGLDRFDPALFSPLHESVDGDGYGYERSPAHSYEPERSPCARPATATASSSPAAAPGKKAGPRRLKLLGNIKKLLPAVGKRSHSNHGHGHAGHDGRKAPAPAPARRDEYLDKAMQWLSAHDVLDGDHSYVSTPLSSCERTPLSSATTSTTADSRARCGDGGGGRSERGEATRPEAEPTLARSKSDAGGAYGREASRYHALRPEHPGREADEPDGFRAPEKREARRQSAEELRTPAVA

SEQ ID NO: 45992 - protein, 38 aa, Zea mays
  Coding DNA Sequence Number=SeqID_4213
MEGSRTLSPWPPIVLLLSPARCCRGASCDAWFGEAPKP

SEQ ID NO: 45993 - protein, 792 aa, Zea mays
  Coding DNA Sequence Number=SeqID_4214
  Gene Ontology: Mol. function=hydrolase activity, acting on glycosyl bonds; Cellular component=membrane; Biological process=metabolic process
  Homolog annotation: Hit_ID=Q69T31; Match level="QueryCoverage=79%, HitCoverage=98%, E-value=1e-161, Identity=93%"; Hit description =Putative alkaline/neutral invertase
  Pfam annotation: Domain name=Invertase_neut; Domain location=84-630; Score=1081.0; E_value=0; Accession=PF04853.3; Description=Plant neutral invertase
  Pfam annotation: Domain name=Tubulin_C; Domain location=249-382; Score=72.6; E_value=1.2e-18; Accession=PF03953.7; Description =TubulinFtsZ family, C-terminal domain
  Pfam module annotation: Pfam domain module=Invertase_neut::Tubulin_C; Domain location=84-630::249-382
MELAVGGGMRRSASHTSLSESDDFELTRLLSKPRINVERQRSFDDHSLSDVSHSGGYGRGGFDGMYSPGGGLRSLVGTPASSALHSFEPHPIVGDAWEALRRSLVFFRGQPLGTVAAVDHASEEVLNYDQVFVRDFVPSALAFLMNGEPDIVKNFLLKTLLLQGWEKKVDRFKLGEGAMPASFKVMHDAKKGVETLHADFGESAIGRVAPVDSGFWWIILLRAYTKSTGDLTLAETPECQKGMRLILSLCLSEGFDTFPTLLCADGCCMIDRRMAEAAEVLANMASQELTQQMWDSKNMMCAADPRHGRYLTASAMFCGKMSTKEVDEQMLNMQNKNSSYFVEWIPNNVKSSGVYGYPIEIQALFFMALRCALQMLKHDNEGKEFVEKIATRLHALSYHMRSYFWLDFQQLNDIYRYKTEEYSHTAVNKFNVIPDSIPDWLFDFMPCQGGFFVGNVSPARMDFRWFALGNMIAILSSLATPEQSNAIMDLIEERWEELIGEMPLKICYPAIENHEWRIVTGCDPKNTRWSYHNGGSWPVLLWLLTAACIKTGRPQIARRAIDLAERRLLKDGWPEYYDGKLGRYVGKQARKFQTWSITGYLVAKMLLEDPSHLGMIALEEDKAMLKPVLKRGVLGGLLIPRQTLGSLLPDGVPPAGKIQVTFGERFHPTHARTVQPPGVDHSARAQGTLLLLSRLWTFRATAESPTSEKFPIFGVRIGANTLFGNYVLETEIGFTRSTHMAGLKDNFNVSPSNIIKSTMDNLSVEEYQRLEDAGTKMQAELDELFLVDFKVD

SEQ ID NO: 45994 - protein, 234 aa, Zea mays
  Coding DNA Sequence Number=SeqID_4215
MESDYYTRVRESPYDYKYVSVDTYERDHNFSTSCVRKPWRIATLFSGVLYGWHQFGVGIVSGVGSCRLLGLCSRWRLGACHDHLAQPRAGCSGHMGTDSKHLDTFLIRGALFRENAPIPEGTTEDCPALEGVTKDNLAPEGATEDDPAPEGPEAGSSSAVSMNVHVVSPLVRSKEVVVMSPSFPAVPAGLATLEVGDPGTKGPISATTAEIPLGITLSMDYNLPLVFKPTPDTA

SEQ ID NO: 45995 - protein, 118 aa, Zea mays
  Coding DNA Sequence Number=SeqID_4216
MVLATESGDHTGSVEIAPKLRERGEWGKGELLSVGSHMTDVGRVYIQNSNLNLDSVMKFTLDKKCINSNINGRCSIENKGTSCFSYLVNLLLGSDLGTIGRGVKYHYPSWGNNCGYMG

SEQ ID NO: 45996 - protein, 538 aa, Zea mays
  Coding DNA Sequence Number=SeqID_4217
  Gene Ontology: Mol. function=catalytic activity; Cellular component =intracellular; Biological process=metabolic process
  Homolog annotation: Hit_ID=Q6ZKI7; Match level="QueryCoverage=99%, HitCoverage=77%, E-value=0.0, Identity=56%"; Hit description =Putative pentatricopeptide (PPR) repeat-containing protein
  Pfam annotation: Domain name=PPR; Domain location=132-166; Score =34.3; E_value=4.3e-07; Accession=PF01535.11; Description=PPR repeat
  Pfam annotation: Domain name=PPR; Domain location=167-201; Score =19.9; E_value=0.0091; Accession=PF01535.11; Description=PPR repeat
  Pfam annotation: Domain name=PPR; Domain location=233-267; Score =40.9; E_value=4.3e-09; Accession=PF01535.11; Description=PPR repeat
  Pfam annotation: Domain name=PPR; Domain location=24-57; Score=17.3; E_value=0.057; Accession=PF01535.11; Description=PPR repeat
  Pfam annotation: Domain name=PPR; Domain location=268-302; Score=8.9; E_value=0.66; Accession=PF01535.11; Description=PPR repeat
  Pfam annotation: Domain name=PPR; Domain location=370-404; Score=6.8; E_value=1.2; Accession=PF01535.11; Description=PPR repeat
  Pfam annotation: Domain name=PPR; Domain location=98-131; Score=3.4; E_value=3; Accession=PF01535.11; Description=PPR repeat
  Pfam module annotation: Pfam domain module=PPR::PPR::PPR::PPR::PPR::PP R::PPR; Domain location=132-166::167-201::233-267::24-57::268 -302::370-404::98-131
MYLECGMLAEARQAFDGMPDRNGVTWGIMMGGLVDRGRPRAALALFREMWAEAGGDAPPRSLVVAVRAAASSGSARAGRQLHCCVVKAGACGDVADRYLTCALLDMYSKCGRIDEARRVFDGLPRPHRTTVVAWNSMLAAYVLHGHSEEALELYQKMCSTHVAMDQFTFSTMLGVFSRLGLLEHAKQAHAGLIQRGLPLDIVGNTALVDLYCKWGRMEDARNVFERMPRRNLISWNALIAGYGYHGMGDKAIEMFERLIAEGAVPNHVTFLAVLNACRFSGLVDEGKRIFQLMTENLRIKPRAMHYACVIELFGREGLLDESYSMIRRAPFTPTANMWGALLTASRIHKSMHLAKFSAEQLLAMEPEKINSYVVLLNLYVSSGRQDSACKVVETLKRKGLYIGNACSWITVKKTDHRFFFKDTLHPQSAEIYRRLDTLMKEVREAGFVAEENELLPDIHPDEQKISRAYHSERLAIAFGLISTAPQTPLRISQSHRLCSDCHNLIKFVSRVTKREIIVRDGSRFHHFKLGVCSCGDYW

SEQ ID NO: 45997 - protein, 170 aa, Zea mays
  Coding DNA Sequence Number=SeqID_4218
  Pfam annotation: Domain name=DUF1218; Domain location=45-159; Score =67.2; E_value=5.5e-17; Accession=PF06749.3; Description=Protein of unknown function (DUF1218)
MARMGVAILVCVVVLALDVTAGILGIEAQAAQNKTKKVTILFIQCEKPVYRAYQLGLAAAVLLVVAHAVANFLGGCACICSQLEFIKAIPLERTSANDCACACAATWGRIALIAGFSLLLAGAMSNSKSKTSCGFTHGHTLALGGIMCFVHGGITVAYYVTATAAAHEVP

SEQ ID NO: 45998 - protein, 1034 aa, Zea mays
  Coding DNA Sequence Number=SeqID_4219
  Gene Ontology: Mol. function=nucleic acid binding; Cellular component= nucleus; Biological process=regulation of transcription, DNA-dependent
  Homolog annotation: Hit_ID=Q6Z0U0; Match level="QueryCoverage=60%, HitCoverage=80%, E-value=0.0, Identity=65%"; Hit description =Putative SNF2 domain/helicase domain-containing protein
  Pfam annotation: Domain name=DEAD; Domain location=495-677; Score= -40.4; E_value=0.014; Accession=PF00270.19; Description=DEADDEAH box helicase
  Pfam annotation: Domain name=Helicase_C; Domain location=880-958; Score=53.6; E_value=6.4e-13; Accession=PF00271.21; Description =Helicase conserved C-terminal domain
  Pfam annotation: Domain name=ResIII; Domain location=491-671; Score= -31.4; E_value=0.02; Accession=PF04851.6; Description=Type III restriction enzyme, res subunit
  Pfam annotation: Domain name=SNF2_N; Domain location=497-808; Score =16.1; E_value=5.5e-09; Accession=PF00176.13; Description=SNF2 family N-terminal domain
  Pfam module annotation: Pfam domain module=DEAD::Helicase _C::ResIII::SNF2_N; Domain location=495-677::880-958::491-671::497-808
MAGIYYSRQRKPERNGSVFTPIAAMYSSGHALPVANRSHGLVFGSLSKDWDDIRQRKDQLVNFLASLERASGDSAAAGKIEDSKLASPVEPTEQKEKAAIIVLDSDDEDGNGSGNSKLASETNKELGTSGLINNIAERMTFNGSQAFGTVHTYGDKNTQIVPYGQCSALVNQFPLQTSWQPSIQFERVVLQKRPEEQRMQDLVAASIAEKRAETQVFLSLPTEKKRRRSDPSLHASDDTATVPKQRKSKGATVVAAANLSLVSQQTATSPEPDMVIEEEEKHKNESDGLDDYWKDFALAVESTKGGESYMLAGGGLCPVEVQWLICTTVVVGIGVHVVEYDIVGKQCTLAACGALDLVGTGHALLGLGAGMSRAHCGFSSADRISEVVLLISGLDEVDEAAIEKEDNGKMEDIDCNHDIRIHEDLGHVCRVCGMIVRRADSIIDYQWKKASRRRTNGYGGHSKDADEIDCGTVKLSEDFIVADIAIHPRHARIMKPHQLEGFNFLVKNLIGDKPGGCILAHAPGTGKTFMLISFIQSFMARYPSARPLVVLPKGILGIWKTEIKRWQVQDIPVYDFYSVKAEKRVEQLQILKSWEDKMSILFLGYKQFSTIVTDDGGSNVTAACRDRLLKVPNLLILDEGHTPRNRETNVLESLNRVETPRKVVLSGTLFQNHVEEVFNILNLVRPKFLRMESSRPTARRIMSQVEIVGRSSKGLADGAFTKAVEETLLNDENFKRKAHVIRGLRELTKDVLHYYKGDILDELPGLVDFSVFLKLTPKQKDIIYKLEAHDRFKRNAVGSALYIHPCLSELSEVNAEHRANTFRDDLVDSLVDSITVRDGVKANFFMNILSLANSAGEKVLAFSQYISPMIFFERLLVKKKGWHVGKEIFMISGDTSQEDRELATDHFNNSADAKIMFGSIKACGEGISLVGASRVVILDVHLNPSVTRQAIGRAFRPGQQKKVFVYRLVAADSDEVKVHETAFKKEVIPKLWFEWSEHCTTEDFKLGQIDIDDSGDELLDTKAIRKDIKALYRR

SEQ ID NO: 45999 - protein, 520 aa, Zea mays
  Coding DNA Sequence Number=SeqID_4220
  Gene Ontology: Mol. function=transferase activity, transferring glycosyl groups; Cellular component=membrane
  Homolog annotation: Hit_ID=Q6ZJW6; Match level="QueryCoverage=73%, HitCoverage=73%, E-value=1e-129, Identity=62%"; Hit description =Putative fringe-related protein
  Pfam annotation: Domain name=DUF604; Domain location=218-493; Score =338.9; E_value=8.5e-99; Accession=PF04646.3; Description=Protein of unknown function, DUF604
  Pfam annotation: Domain name=Fringe; Domain location=80-331; Score= -63.7; E_value=0.00024; Accession=PF02434.7; Description=Fringe-like
  Pfam module annotation: Pfam domain module=DUF604::Fringe; Domain location=218-493::80-331
MATPSHGIPLRALLLLALSLLSIPIVFQLLHRPTPSPMPPPLLRITCADAASQSPRANPPPLASDVHVPPPAPKPEEASEPTSLRHVVFGIASSRRTLPLRLPLLRLWLRAPARAFLFLDAPAPDARDLPPGLALRVSADASRFPYTHRRGLPSAVRVARIAGELVSALNQQEEEDVRWLVLADDDTAFVLPNLLHTLRRYDHGEPWYLGARSESAAQNALHGFAMAYGGAGIAVSWPLARRLAPALDSCVLRYPHLYGSDGRIYACLAELGVELTHEPGFHQPLHVGSIRLLPIDLHGDISGLLRSHPLSPLVSLHHLDHVHPLYPGTDRAGSAQRLFRAADADPARVLQQTVCYDRARSLTASVSWGYAVQVLSGNVPLPDLLAAQRTFAPWRRSGGRGRGRNATDVLYMFDTRRYPGDECRRGALFFLESVAVAPAGEEGGTATVTTYGRLAPRKCPPGLVPLKSLRLVKVTSEPLQLAPGKALRRHCCDIAPSSSDASMDINIRRCKDDELIAMHS

SEQ ID NO: 46000 - protein, 84 aa, Zea mays
  Coding DNA Sequence Number=SeqID_4221
  Subcellular localization annotation: CTP_CleavageSite=42; ConfidenceScore=5.39e-01
MAHHLGCPSGSQGLGLDRCRRSSITISTTDFTNGSVGARLTRASSQVPKLAVVTPNLPEELSTPYHNIILVIIIFFTCTRNTLD

SEQ ID NO: 46001 - protein, 224 aa, Zea mays
  Coding DNA Sequence Number=SeqID_4222
  Gene Ontology: Cellular component=cellulose and pectin-containing cell wall
  Homolog annotation: Hit_ID=Q6ER87; Match level="QueryCoverage=91%, HitCoverage=99%, E-value=3e-91, Identity=75%"; Hit description =Harpin-induced protein-like
  Pfam annotation: Domain name=Hin1; Domain location=39-177; Score =155.5; E_value=1.4e-43; Accession=PF07320.4; Description=Harpin -induced protein 1 (Hin1)
MSKDKHHKHEHHLRRCCGCMASCLLALVLIVAFVSLVVYLALRPSKPSFYLQDLQLRRPISLGDPSLTASAQVTLASRNPNDRVGIFYKRLDVFVTYRDEAVTVPVSLPPQYQGHRDFTVWSPVLSAESVPVAAYVADAMKQDVAAGFVALQVKVDGRVKWKVGSWVSGSYHLFVSCPAVLSAGYPGVNNTVTSLKFAQPTGCSVEDDVNVILMIVSVHVSNNR

SEQ ID NO: 46002 - protein, 300 aa, Zea mays
  Coding DNA Sequence Number=SeqID_4223
  Homolog annotation: Hit_ID=Q6ER85; Match level="QueryCoverage=44%, HitCoverage=42%, E-value=2e-41, Identity=68%"; Hit description=BZIP protein-like
  Pfam annotation: Domain name=bZIP_1; Domain location=12-71; Score =11.7; E_value=0.0081; Accession=PF00170.11; Description=bZIP transcription factor
MACPLRFNIDAYSAIQHFCRRSGQRSRVRKLQYIAELERTVDSLQNIGADLAVRVSSLFQLHNALSMENKQLRIQISSLQRAKLIKDGQTQALKNEAERLKRMSARRSRSATASCYDPGSFSFGADASSVSWQMPDMARLSLNGGSPRGSYGLSSALPFSATAQSRMPASRTSTIDPIGKRCPLLIRYLRSPLPCLQDVNPLIPADKGVSPSIPAARKEMKMDETEERQEWRGPVYLLCSCMPRSVEPNSVLCSCMPNPTTFRILSNRLHGSTGLCSMGSGSMDRGWREQLQSAKKDLFD

SEQ ID NO: 46003 - protein, 322 aa, Zea mays
  Coding DNA Sequence Number=SeqID_4224
  Homolog annotation: Hit_ID=Q53M47; Match level="QueryCoverage=24%, HitCoverage=7%, E-value=3e-12, Identity=43%"; Hit description=HAT family dimerisation domain, putative
MTLPVDVSGLCPRRGDVGAPPKPRLSLSSVAEAESEPWGRARRSFVVFRVLARVRALGSGGAEFAVFRVLARVRALGSGGAEFTVFRVLARVRALGSGGAEFAVFRVLARVRALGSGGAEFAVFRVLARVRALGSGGAEFAVAPLARPDCLSDSPCRVAPQSEWRRRRCPSVRLLYADGGYQLRIRRLEGLSMMKENVIERFLRIKHVFDNTPHFTKKKHWVLCLEGKISGMIFYKGPKAFVQMKIYIPDMEDMILVRDRSKCRGAKLMSYYHHFHYGMFIVMIYKVLNEFNTQFLETSAELFICIACLNPKESFANFENIN

SEQ ID NO: 46004 - protein, 146 aa, Zea mays
  Coding DNA Sequence Number=SeqID_4225
MTKTERLENRISSRVKRRARARATLTMTKTERLENHIEAGQDQQDRKPQLTVCVVGEGKVVETNEIVCEGEYAMLDKPVQAVETNRADEETGCTLVSDAAVVSAADGSPLSGPLGDDTEEETAPVDEKSNICWGRSTLGIRYDVIG

SEQ ID NO: 46005 - protein, 387 aa, Zea mays
  Coding DNA Sequence Number=SeqID_4226
  Homolog annotation: Hit_ID=Q9LK13; Match level="QueryCoverage=72%, HitCoverage=86%, E-value=1e-73, Identity=55%"; Hit description =Arabidopsis thaliana genomic DNA, chromosome 3, TAC clone:K7M2
  Pfam annotation: Domain name=Sec20; Domain location=252-343; Score =128.9; E_value=1.4e-35; Accession=PF03908.4; Description=Sec20
MPRWTALHVGQVMQVLPPLVVAGREVKPFRREAAPPLAIRPTAGKQGPRLQASYRKSLRPSQRTKVTDNMQLQNSRKYMFACFNEFNICSLNLRSMIHGVTYCCYDIRMDEVTQAVENLKKEWSQAVSQLEESIAAIESCGKTGKGTEEATSLPRLNGSAQDALQLLKSLQFRLDLLAQQLPTFDEVQSGQATLGSWDEQYKKLRASLRNANLQAKENIRKAAQEERELLLGGGEESTIRRRNLQTKVGMTSAAESITESLRRSRQMMVQEVERSASTLATFDESTSVLRKAEGEYQGHRSLLMRTRGLLSTMQQQDVLDRIILTIGFIIFSLAVLYVVSRRIGLLTLQRKLADAIRSGSLSADDIVANAQRGPAPANVPAPIYDEL

SEQ ID NO: 46006 - protein, 61 aa, Zea mays
  Coding DNA Sequence Number=SeqID_4227
MDFVVTVNPPLIVGLLPHLDITAPVVTKFRVGVTGSGLLRREPALPRASAGCHGVMCTVES

SEQ ID NO: 46007 - protein, 43 aa, Zea mays
  Coding DNA Sequence Number=SeqID_4228
MARPPTRLETSPFTHNGSGEDPKARTTTGFDYEREIHQRFPNV

SEQ ID NO: 46008 - protein, 87 aa, Zea mays
  Coding DNA Sequence Number=SeqID_4229
MVNTPKHHNSNLTDGEYVLIPEQGVAQEEVQESAPEPATEGLPTASAFEGKPGTLQDMVDGVTWPSTLPPGWTVEWDAASIGEDQEE

SEQ ID NO: 46009 - protein, 88 aa, Zea mays
  Coding DNA Sequence Number=SeqID_4230
MGLCMSCCKGARQGAGGAMASFEEEEDLLTGLGEKSIAEPDQGDDDRMWGRRTLLLRHGARRRELCVWERRKKRVAAGKSGGVGMQND

SEQ ID NO: 46010 - protein, 131 aa, Zea mays
  Coding DNA Sequence Number=SeqID_4231
  Subcellular localization annotation: CTP_CleavageSite=25; ConfidenceScore=5.76e-01
MATQTPAEVVTTTSAPSLLSARSPSSMNKSPSSRLCVERIGAGGGALVRRFIVLRRANQWSSRHPLPVAAGRRETILWPSDPERAGMIRSLVYPLVWTPQVRGSAVERTGSNQGDTSSICGAITVEMCINE

SEQ ID NO: 46011 - protein, 108 aa, Zea mays
  Coding DNA Sequence Number=SeqID_4232
  Homolog annotation: Hit_ID=Q6QP51; Match level="QueryCoverage=61%, HitCoverage=30%, E-value=4e-08, Identity=49%"; Hit description =Putative growth-regulating factor 1
MQREVVEEEAGLIGVLTPGWFRSAALFAGERIRAGPHEPRLDRKASASASASGEGLCLARPQASPSASASGGVMSSPDLGLGLRRSLYLARPQPRTDYATGDTSLPYF

SEQ ID NO: 46012 - protein, 135 aa, Zea mays
  Coding DNA Sequence Number=SeqID_4233
  Gene Ontology: Mol. function=galactosyltransferase activity; Cellular component=membrane; Biological process=protein amino acid glycosylation
  Homolog annotation: Hit_ID=Q8LEJ9; Match level="QueryCoverage=98%, HitCoverage=47%, E-value=2e-43, Identity=47%"; Hit description=Avr9 elicitor response-like protein
MLRGYHELSAKTKIFFSTALGIWDADLYVKVDDDVHVNLGELMMPVIFIRPILHKYANEDVSLGSWFIGLEVNHIDERNMCCGTPPDCEWKGQAGNVCVASFDWSCSGICKSVERIKDVHARCGEGDSAVWSALF

SEQ ID NO: 46013 - protein, 106 aa, Zea mays
  Coding DNA Sequence Number=SeqID_4234
  Gene Ontology: Mol. function=transporter activity; Cellular component= integral to membrane; Biological process=transport
  Homolog annotation: Hit_ID=Q9ATL5; Match level="QueryCoverage=87%, HitCoverage=36%, E-value=1e-47, Identity=97%"; Hit description =Tonoplast membrane integral protein ZmTIP4-2
  Pfam annotation: Domain name=BTP; Domain location=1-45; Score=-19.1; E_value=0.055; Accession=PF05232.2; Description=Bacterial Transmembrane Pair family
  Pfam annotation: Domain name=MIP; Domain location=1-97; Score=-76.6; E_value=8.3e-05; Accession=PF00230.10; Description=Major intrinsic protein
  Pfam module annotation: Pfam domain module=BTP::MIP; Domain location =1-45::1-97
  Subcellular localization annotation: CTP_CleavageSite=81; ConfidenceScore=5.02e-01
MQVTPVHALGAGISPMQGLVMAVILTFSLLFVTYAMILDPRSQVRTIGPLLTGLIVGANSLAGGNFTGASMNPARSFGPAMATGVWTNHWVYWIGPFRFSRGLDAP

SEQ ID NO: 46014 - protein, 77 aa, Zea mays
  Coding DNA Sequence Number=SeqID_4235
MASRVHPEHFQSKGALNLMRNLLGWSALAFAGSIRANATPLGDLAAGEFVLFISYLSCGLALPISPFFLLLLEELGL

SEQ ID NO: 46015 - protein, 107 aa, Zea mays
  Coding DNA Sequence Number=SeqID_4236
  Subcellular localization annotation: CTP_CleavageSite=87; ConfidenceScore=5.68e-01
MSASVHRIVPHRGGIARQSTLRSARDPPPSSARPRSRSRDLSSAIVLVRFSPTALACPDRPRTPRSLAFLVSGGYATTGTSGAALGRSETVKSLDARSWPPTLVPMA

SEQ ID NO: 46016 - protein, 136 aa, Zea mays
  Coding DNA Sequence Number=SeqID_4237
MRRPNKERLRQTEIHRGETKISAKQALGEVPYLEAVLGAACHDAGRLQLTGQQGNATAATSGLRRGGVRRGRGRGDGERGNQSGFLVHCAQAKLIVAKAMAKARRGRHNVGGRAASWERARGRGRVNEGQGRAKGV

SEQ ID NO: 46017 - protein, 360 aa, Zea mays
  Coding DNA Sequence Number=SeqID_4238
MASAGDIGEAEATLTTNRMTIYDCLGEGEEASPPSPETPPQLRLPRFTCARIRFGRLGRKRGGRGGRKEVAAAEKSEDASVGSSGARARDHSLFVQSCRRSVPACSRALIPATIYIAGWKQAAAGSSGGGGSSVATGQTGMGLSMLFLLARTCVELNRMAEVRAQMETLLKEIRDEASRVKAGSADHVVLVAPKTCNNLRPSSTSTVSSSCVSDTSTNCLEIRRGEDGEWTSEPEWKCTTERETPDQCWVQSPSDGEFIELEGGRFGTGGGNSQRGAAVDESDDDDGESCGRRHEVGVSATELERRLHELQHRRDRERIEALESALRRAQRKLTEKEMEARLWQDTATLALGQPTPRDGQ

SEQ ID NO: 46018 - protein, 135 aa, Zea mays
  Coding DNA Sequence Number=SeqID_4239
MNRGRLGHLQVGPTGADGGWATAQRAHARRKRGKPFGRLGREPAGLWAARVNLADGEYVLVPEQGAAQEVAPDPAPEPAPEDMPATALEGKPRNPVEMNTSSLEDMVAGVTWPSILPPGWTVEWDPTSVEEEHEE

SEQ ID NO: 46019 - protein, 125 aa, Zea mays
  Coding DNA Sequence Number=SeqID_4240
  Subcellular localization annotation: CTP_CleavageSite=22; ConfidenceScore=5.15e-01
MAAGAWPWRPARPPGVLRRPALAAGARPWPRRGFGAPARLARGGLRGAWHPACDMFAAATRSQNDLVEEPEELAREALEQQSVGGGKDVRITGGNEIDGFGIDPGNGEDEAVEGDFQEFQDYDEL

SEQ ID NO: 46020 - protein, 91 aa, Zea mays
  Coding DNA Sequence Number=SeqID_4241
MERGSAARHRPRARLLLPAVAQLDPTTKQTGWCATEIPPMSTARSHGTPRSCASSPRTNRQRGNLSVPNLLSIAPCGGLFGSRQQKPLAAC

SEQ ID NO: 46021 - protein, 136 aa, Zea mays
  Coding DNA Sequence Number=SeqID_4242
MTQDGGAAGQPRRQPHRCTPTRQNRDLIDTLTSAIRRVESNRGDEVLLTGDLAVKQAGHGARGSAAELGLLTRNSTCAETPTEKLATAKVSRGHSATLECPTDIPEPVVYVFDGGDLVLSRRAHGVLAARGLTQGG

SEQ ID NO: 46022 - protein, 284 aa, Zea mays
  Coding DNA Sequence Number=SeqID_4243
  Gene Ontology: Mol. function=RNA-directed DNA polymerase activity; Cellular component=intracellular; Biological process=RNA-dependent DNA replication
  Homolog annotation: Hit_ID=UPI00004C1732; Match level="QueryCoverage =99%, HitCoverage=21%, E-value=1e-124, Identity=72%"; Hit description= UPI00004C1732 related cluster
MPGIPRDVTEHSLDIQAGARPVKQHLCRFDEEKRRAIGEEVHKLLLQGSSKRYSILNGATYQRCMNHVFGEHIGQTVEAYVDDIVVKTKKASDLLSDLETMFKCLRAKGVKLNPEKCVFRVPRGMLLGFVVSERGIEANPEKIAAITNMGPIKDLNGVQRVMGCLAALSHFISRLGEKGLPLYRLLRKSERFTWTPVAEEALRNLKALLTNALILVPPAAGEALLIYVAATTQVVSATIVVERREEGHALLIQRPIYFISEVLSETKICYPQIQKLLYAVILTR

SEQ ID NO: 46023 - protein, 136 aa, Zea mays
  Coding DNA Sequence Number=SeqID_4244
MAAPLGFLTVGDAKAIVCIDGWKKRRSGRRARHYMPKVGERADDWAHMKVKRERAMRMASGSHWTARGLAERAIGSETCQRGPQCRSRDDGVRTLAWRPGPHFSDPSGVHAERATGIPGPPVGTVTWSWAMRRGNC

SEQ ID NO: 46024 - protein, 121 aa, Zea mays
  Coding DNA Sequence Number=SeqID_4245
MAVARRVEPDHGAARREEALRRGVDGREHDEWQRQARNRCARCADVGAHAGGGGGLHAGERLRAGARYARLGVRPGLWSRLGCLAGCLRAWAGAGSLGGPSAELGWRAGCLRARGEEGLAR

SEQ ID NO: 46025 - protein, 215 aa, Zea mays
  Coding DNA Sequence Number=SeqID_4246
MAAWVRSYSYVQLRCGRRDQVGERADDWAHMEVKRERAMRMNRPSRSLFRQTHSFSSRVPSSLASDLASDLVVLTTIDAPAQRLFAPSSTVVGLHSPRNRHRRPPFAGLATPCPYRRRRGELVLPFLSLPLASSPLTRHGRGSAEPTRTPMSLSIPSVRNRLAGQPLRDLRPVRSPAPSRAAGLPAVAARNAQQARRPDVQTPRAFASSLRAAAE

SEQ ID NO: 46026 - protein, 124 aa, Zea mays
  Coding DNA Sequence Number=SeqID_4247
MGGLPVSDPSLTYPRTHRGLYGLGPSGNRCGTLMMPVVFPPWELDHKPHNLSLSNRCRRGAVTFRGQGLGTTYLFVPGNHDHRIQWERCRLVNGWGKPQPWIQNQAGVSAYLFIAHSDLIVTTD

SEQ ID NO: 46027 - protein, 104 aa, Zea mays
  Coding DNA Sequence Number=SeqID_4248
MPNDGVMWRVAPVVVIVEGAGHQPHQSVKKPTHPIPHGGQKNGGDQAFENEVGSGLTAAAVVLGGEHGSPDGECGGLLAPQARDSVTANEIRASGTMEEGGRGR

SEQ ID NO: 46028 - protein, 285 aa, Zea mays
  Coding DNA Sequence Number=SeqID_4249
  Gene Ontology: Mol. function=protein binding; Cellular component=GPI -anchor transamidase complex; Biological process=attachment of GPI anchor to protein
  Homolog annotation: Hit_ID=Q2R4C3; Match level="QueryCoverage=98%, HitCoverage=51%, E-value=1e-103, Identity=60%"; Hit description =Gpi16 subunit, GPI transamidase component family protein, expressed
  Pfam annotation: Domain name=Gpi16; Domain location=14-283; Score= -104.3; E_value=1.9e-10; Accession=PF04113.4; Description=Gpi16 subunit, GPI transamidase component
MAPPRPPTGPILFLPLVFLFLFTTAVASAAAPEDEKFTEELLLRSLPDRKALAHFHFRSSAPPAASVGRHHHLFPKAISQLVKKYHISELELSFTQGRWNYEQWGGFDPMSTNNAKPPVSAPRWGFKLNEGNLRYGALPREAVCTENLTPWLKLLPCRDKARITSLLYRPSIYKGYYHSQKLKLRSSQSLGIILDQTLTVVLQPNNVHGEQLHSNHGQLQPNWSMRHLFNRKLSGKCLVSKSSRVFIEVDKGIADKVNISRSVHSWSNEFFVLSNSPDKLIKGKV

SEQ ID NO: 46029 - protein, 40 aa, Zea mays
  Coding DNA Sequence Number=SeqID_4250
MDLSATCGQPAETARIGATNKLLSSCGHMDMFSFDYMLDI

SEQ ID NO: 46030 - protein, 155 aa, Zea mays
  Coding DNA Sequence Number=SeqID_4251
MVGASATTARRRPRSVGALDAKAVYLARLETRFESSASRRYMVQLYEEHRVPRSLQSDAMTNLTRLTQTAKTTLDDREDFMVDLPSELVEKDLQVEQMSNRIQELEQQVEIWDNTIEVLENQLHDVQEELDEANTHIEMHHQDMNAMEAGRPTLT

SEQ ID NO: 46031 - protein, 866 aa, Zea mays
  Coding DNA Sequence Number=SeqID_4252
  Gene Ontology: Mol. function=transcription regulator activity; Cellular component=nucleus; Biological process=regulation of transcription
  Homolog annotation: Hit_ID=Q2RAA8; Match level="QueryCoverage=99%, HitCoverage=100%, E-value=0.0, Identity=66%"; Hit description =Expressed protein
MAVGDALRRLCEEIGWSYAVFWKAIGAADPVHLVQEDGYCGHTSCPVGSEPSESLPSDAGCSVPAANTICSLVHSVMASQVHVVGQGTVGRAAFSGNHQWIVRGTANGHGLSSEVAAEMNNQFRVGIQTIAIIPVLPRGVLQLGSAGLVMENINFVMFAKKLCSQLNNRSSMAASASAKNALSQHGQSRPDTATVSTRTPPNALLNASLLKVAQQSGHPVREHVVYAEPDLRFRQQASFCENQFGSNLQSVVMNSSLTSPSLASVKKQPLLMNSIGQLQFSNYVHSSADLARDVILKSLVRQDSSVCETTNMNMHRGRYMVSNDINGSGDFDFLPVGAKASRANLSTSVSSQILDHTTRTLQQKQSLVPFKVTQSSEFNKKMENPENGSFQTPSVPTSESGGQVSNSFNMDQENQLIMSNNVRQVQKINRFSDPSANVSTQRMKNRDVCESGMPIERGSSLLVEPGADNDLFDMLGSEFHQFSHNVGSDLVTWSGTESQNSDRDGPESSIYLNSSPLFSSLDNELHYSGILSLTDTDQLLDAVISNVNPSSKQCPDDSASCKTALTDVPSTSHLGSIDLKRCESSGVPSVLIKHELAQLVKQPCIFDKSENCLSQNNGMHKSQIRLWIESGQNMKCESTSASNSKGLDTPSKANRKRSRPGESAKPRPKDRQLIQDRIKELRELVPNGAKCSIDGLLEKTVKHMLFLQSVTKNADKLKDSTESKILGSENGPLWKDYFEGGATWAFDVGSQSMTCPIIVEDLDRPRQMLVEMLCEDRGIFLEIADFIKGLGLTILRGVMEMRKSKIWARFTVEANRDVTRMEIFLSLVRLLEPNCDGSAAAENASNMNMPLGLVHQPVIPATGSIQ

SEQ ID NO: 46032 - protein, 63 aa, Zea mays
  Coding DNA Sequence Number=SeqID_4253
MDGFGGRKATGKLRNNRKLSCMYPGIDCYSKELKMKHMSFLPRAEQQQQQQQKERDVNVVLAC

SEQ ID NO: 46033 - protein, 143 aa, Zea mays
  Coding DNA Sequence Number=SeqID_4254
MALGLGWVNRALQRENEEEVSVEEEKTAPPTETPPAGNCFYFDIWGTKPESPTIQGKPRWNGMFSKIKLDGGSIMAVMGSTSEKMYLYQTNTRKANAQWEWRDGESSVYPPWQEVGRWCICALGWREPGLVLRTRLQVDICKV

SEQ ID NO: 46034 - protein, 256 aa, Zea mays
  Coding DNA Sequence Number=SeqID_4255
MSEAGLGCCQPHSVGWLISQSGTGGAVLLSDRSVERRSDCGHFDSVDWRACVRIKLRVDGGYQLRFRGLEAVHMNGALQPYASFNRRRRSPPASPLLPTHVENAGDLYGSESPPLPAHTEPNGEVVDEARMTAASASPILIRVAPTFCPYHPRVEPNSEDVDEARVTMAPTAPICLCVALAPRPYRAQVGQGRGGQCQQCGRDGLNTFMFIYNVFTVTDPKCDGRDSHPNSSPPSARAPTGHCHSAKDREERNRFL

SEQ ID NO: 46035 - protein, 70 aa, Zea mays
  Coding DNA Sequence Number=SeqID_4256
MEKPRSSGKTNGGKTPSKEAGDKHKEDKEESVSSIKSHKMGDKKKKKMKKVFYYKTDSSTPSTSDAELTS

SEQ ID NO: 46036 - protein, 167 aa, Zea mays
  Coding DNA Sequence Number=SeqID_4257
MAAFGLTLLLLFEPFLGLCIEGWNDESISLGKRASVDVQRTGKLMMEKSGKKAKNEELGTEENDMIIEYHSGSTSKMIGTLITTDKSDKLSDVAKDVGEKEGSEGDVEFNESEDDLLSSQELDVLVKDMGMDITNSQDEMLNEKVDSEKQDGNAKEKTRKTREKELI

SEQ ID NO: 46037 - protein, 98 aa, Zea mays
  Coding DNA Sequence Number=SeqID_4258
MNTAQQGAQAPGHGGQRSDKNQSTGEVHDSGNRAQVSVRPINHDRGAIGLASRLPVPADGNDPSAEYIPWTGMHGMGGGHESESDVNQRSIPGVSQYV

SEQ ID NO: 46038 - protein, 213 aa, Zea mays
  Coding DNA Sequence Number=SeqID_4259
  Subcellular localization annotation: CTP_CleavageSite=18; ConfidenceScore=5.18e-01
ARRCRTSATIPYREKQSSSSTDSTCYTLQRPSLTAHKRARTRDPASAPRRPAPVPAYTGRPHSDPGPGRRSPTASRDRPPSPSSAPAPATPAARLGRSGEPALASPRRASRRHARPPPASRPARPPPAQPRPAAPAALTRPRPRLGRPRLPRPRRAPRPRRPRLAALRRAALARPRSAPPSRPPPGKLGAPPGKEEGVEVDLLEFQDVDEFED

SEQ ID NO: 46039 - protein, 155 aa, Zea mays
  Coding DNA Sequence Number=SeqID_4260
  Gene Ontology: Cellular component=integral to membrane; Biological process=cell death
  Homolog annotation: Hit_ID=Q9FI00; Match level="QueryCoverage=29%, HitCoverage=8%, E-value=2e-08, Identity=56%"; Hit description=MLO -like protein 11
MMLLGFISLLLAAMSRIISGICIDSKYYNSRFSPCTKEEVQESINAEHAIAHARKHLPEFILHHSPWRNLNTSYHNHEGCRELKAEHGNGEEEKGRRRRREEEKDGSAASNGRGRPPGGSLVRSVMDKRDSVHVLNKPDGAKSLLDNIRLSHNVL

SEQ ID NO: 46040 - protein, 125 aa, Zea mays
  Coding DNA Sequence Number=SeqID_4261
MSWDGATAVATQEGQAHHGEAAGGHGKRWSSERRLKVRVPWQACCRGGRRAAARRDGHGRWGELPGREERALTSHPERRRPWGKSRATSCRRWGGLVAGGLERMRLRERAACVLPAREDVGKYPR

SEQ ID NO: 46041 - protein, 126 aa, Zea mays
  Coding DNA Sequence Number=SeqID_4262
MDTKVGGIQGSMRCKLQIPVRDGRHRVTSRAEHRTYEVNGGGADGFPRVFYSGKQLPPNTTSSGPAWSPWSVLRETRTFPPPGGRPTATAMIHNSGSPDLIIGGGDYKRRLDSQSRQRPRKRTPRG

SEQ ID NO: 46042 - protein, 260 aa, Zea mays
  Coding DNA Sequence Number=SeqID_4263
  Subcellular localization annotation: CTP_CleavageSite=22; ConfidenceScore=5.62e-01
MAPRTLYDDGGSQPPYGSKRTSARTRQPRQLSFRQAPALLRRPQHHMNRPSPPMFFLSLPYSLSSLPRFSLSRASRQELTGPAPTEQRPKHRRTRPRSGAPRAPVSFPAATPTDALHRPATPPRPRHPLPRRSSRARASKPTVVTRRVRADPATRPRPFFVSELMEHQSIRFFFPPLPPLMAMKILATSLPPPADLPSPSLSSIKTELLLSPFTLPELAPISLTLSSPLEPPSSSPEFATPSLEPVELAGATPPSYRAFT

SEQ ID NO: 46043 - protein, 543 aa, Zea mays
  Coding DNA Sequence Number=SeqID_4264
  Gene Ontology: Mol. function=oxidoreductase activity; Cellular component=integral to membrane; Biological process=electron transport
  Homolog annotation: Hit_ID=Q8LL72; Match level="QueryCoverage=79%, HitCoverage=100%, E-value=0.0, Identity=93%"; Hit description =Cytochrome P450 monooxygenase CYP72A28
  Pfam annotation: Domain name=p450; Domain location=89-539; Score =238.0; E_value=2e-68; Accession=PF00067.12; Description=Cytochrome P450
MASSGEAALLGGSVGDARAPPLPWKLLALLCAALAVAWCAVRALEWAWWRPRRLARALRSQGLCGTSYRSLAGDAPLTEELNREARSRPLPLGCHDVAPRAMPLFHQTMKEHGKTSITWFGPVPRVTITKPELVREVLSNKFGHYEKLKLRKLQRMLHNGLGSHEGDKWAKHRRIINPAFHLEKLKRMLPAFAACCTDLVERWEGLVADGQQPCEVDVWPEMQNLTGDVISRAAFGSSYLEGRRIFQLQGEQVQLVVQAMHKLHIPGYLYLPTKTNRRMKRIASEIQELLKGIIAKRENALRTGGGAASDDLLGLLLESNMEHCRGDGGKSKASGITTDDVIGECKLFYFAGMETTSVLLTWTMVVLSMHPEWQDRAREEVLHVFGDRTTPDYDGLSRLRIVTMVLYEVLRLYTPLTALQRQTYKPMELGGVRYPAGVMLMLPLLCIHHDKDVWGPDASEFRPQRFAEGVSRASRDAPAFFPFGWGPRTCIGQSFALLEAKMGLSMILQRFAFELSPAYTHAPFAHGMLQPEHGAQVMLRRLP

SEQ ID NO: 46044 - protein, 518 aa, Zea mays
  Coding DNA Sequence Number=SeqID_4265
  Gene Ontology: Mol. function=oxidoreductase activity; Cellular component=integral to membrane; Biological process=electron transport
  Homolog annotation: Hit_ID=Q5ZE52; Match level="QueryCoverage=91%, HitCoverage=92%, E-value=0.0, Identity=71%"; Hit description =Cytochrome P450-like
  Pfam annotation: Domain name=p450; Domain location=91-514; Score =237.3; E_value=3.2e-68; Accession=PF00067.12; Description=Cytochrome P450
  Subcellular localization annotation: CTP_CleavageSite=7; ConfidenceScore=5.39e-01
MDDDVVVAAAAAAAAAAASSSPSPPWSLLQGLLALLVAWGAYRAAQTFWLRPRRLGRALRAQGLTGTAYRFPAGDLKENARLNDEARSRPMQPPCSHDVVPRVMPHLFNTVKDHGNICITWFGPIPRVVITEAELVRDILSNKFGHFEKFTNKSLGKMIALGVASYDGEKWAKHRRILNPAFHLEKLKRMQPAFLTCCTELIDRWDKEVAGGSDGSFELDVWPEFQSLTGDVISRTAFGSSFMEGRRIFQLQAEQAERVIKAFQYIYIPGFVFFPTPNNRRMKEINREIEGTLRGMIEKRERAIENGEASGDDLLGLLLQSNMESGKGGLRMSTEDVVEECKLFYFAGMETTSVLLTWTLVILGMHPEWQDRAREEVTMILYEVLRLYPPAVTLNRRTFKDMQIGGITYPAGVILELPVIVVHHDPDVWGKDAHEFRPERFAEGISKATKDQQPAFFPFGWGPRICIGQNFALLEAKMALSMILQRFQFRLSPSYTHAPYTVLLLHPQHGAPIIFDRI

SEQ ID NO: 46045 - protein, 477 aa, Zea mays
  Coding DNA Sequence Number=SeqID_4266
  Gene Ontology: Mol. function=oxidoreductase activity; Cellular component=integral to membrane; Biological process=electron transport
  Homolog annotation: Hit_ID=Q8LGN4; Match level="QueryCoverage=99%, HitCoverage=95%, E-value=0.0, Identity=70%"; Hit description =Cytochrome P450 monooxygenase CYP72A26
  Pfam annotation: Domain name=p450; Domain location=60-474; Score =104.9; E_value=2.3e-28; Accession=PF00067.12; Description=Cytochrome P450
MALQVLLWQAGRLLRQLWWQPRRLERALRAQGIRGTAYRFPAGDLREYGRLANKEAWSKPLPPRCHDIAHRVTPFLHRLVLEHGKTSMSWFGSTPRVTIVDPALGAGQGRAVQQVRALGEAQLPGAGQELVSRWAECLGPDGSCELDVWPELQNLTGDVISRTAFGSSYHQGRRIFQLQTEQASLVMTNIQNIVIPGYRYLPTANNRKLRKNNREVESILRGIIGKRIRAMERGESSEDDLLGVLLETTSTRDDADDDGNNNSQSTAGMGLTIQDVIEECKLFYFAGMETTSVLLTWTMVVLSAHPEWQDRAREEVLGLFGRDKPEHHGLSRLKTVTMVLYEVLRLYPPATTLVRRTDKEMEVGGVTYPAGVLLDLPVLLIHHDPDIWGDDAHEFRPERFSEGVSRASSRDPGAFLPFGRGPRVCIGQNFALLEAKMALCMILQRFQFELAPSYAHAPHTVITLHPMHGAQLKLRAI

SEQ ID NO: 46046 - protein, 210 aa, Zea mays
  Coding DNA Sequence Number=SeqID_4267
  Gene Ontology: Mol. function=protein homodimerization activity; Cellular component=chloroplast inner membrane; Biological process =protein import into chloroplast stroma
  Homolog annotation: Hit_ID=Q09S70; Match level="QueryCoverage=70%, HitCoverage=58%, E-value=4e-47, Identity=69%"; Hit description=Tic21
MEPDCPTLPGLPPPIRCRQLHLLWGPRKRSAAPHSGGGGGPALAFVLTFVGTALPDASTHRAGGGEGQARAGYEETRENSKVFQEFGYPGVLVPIVVTGKVTSPFTFYATAAGIAAAFISVFWSFGYIRLSERLRKTSKEPAKAPPRADVVKSLKNGIVVNILGMGAAVLGMQATVGALVAKALTTSAVPYYQAAGQSPVLALDVFLVQR

SEQ ID NO: 46047 - protein, 377 aa, Zea mays
  Coding DNA Sequence Number=SeqID_4268
  Gene Ontology: Mol. function=RNA-directed DNA polymerase activity; Cellular component=mitochondrion; Biological process=RNA-dependent DNA replication
  Homolog annotation: Hit_ID=UPI00004C1733; Match level="QueryCoverage =97%, HitCoverage=29%, E-value=0.0, Identity=87%"; Hit description =UPI00004C1733 related cluster
  Pfam annotation: Domain name=RnaseH; Domain location=37-164; Score =8.2; E_value=1e-05; Accession=PF00075.14; Description=RNase H
  Pfam annotation: Domain name=rve; Domain location=230-377; Score =85.9; E_value=1.3e-22; Accession=PF00665.16; Description=Integrase core domain
  Pfam module annotation: Pfam domain module=RnaseH::rve; Domain location=37-164::230-377
MGETISFAPRKAIKSQVLADFVAEWVDTQLPTAPIQPELWTMFFDGSLMKTGAGAGLLFVSPLGKHLRYVLRLHFPASNNVAEYEALVSGLRIAIELGVRRLDARGDSQLVIDQVMKNSHCRDPKMEAYCDEVPRLEDKFYGLELNHIARRYNETADELAKIASGRTTVPPDVFSRDLHQPSVKIDGTPEPEAPSAQPEVPSTQIVRTCEGCQFYARQTHLPAQALRTIPITWPFAVWGLDLVGPLQKAPGGYTHLLVAIDKFSKWIEVRPLNSIRSEQAVAFFTNIIHRFGVPNSIITDNGTQFTGRKFLDFCEDHHIRVDWVVVAHPMSNGQVERANDMILQGLKPRIYNDLNKFSKRWIKELPSVVWSLRTTPS

SEQ ID NO: 46048 - protein, 189 aa, Zea mays
  Coding DNA Sequence Number=SeqID_4269
MKSTRLWCKRTLLPKPQVALHPALDFSAAESTLNTLSAGFGYSGLGLGYQAGRLEQKYGLSFEAQCNQNQAYVPTLSCLRKSDKQARGAKPRRVMSSAHPGYACAVQSALQQVARRSRLCVTVHTRAQEADLYPFYCKSGRWALAAPSLLFCARVRDLCCFLQLLPPSRVVGCYSGDRSLTVTARSALT

SEQ ID NO: 46049 - protein, 105 aa, Zea mays
  Coding DNA Sequence Number=SeqID_4270
MALRARRQCAQNLAWFGATMPQVWQTDVNAAAPAACCSVRAMNRLNNNNNKKDIDLPQLIAPDLLMGRKGADLLIHGNVVLNTLSVRSISTLLRDHICINSLSRR

SEQ ID NO: 46050 - protein, 123 aa, Zea mays
  Coding DNA Sequence Number=SeqID_4271
  Homolog annotation: Hit_ID=Q336P7; Match level="QueryCoverage=84%, HitCoverage=18%, E-value=2e-07, Identity=37%"; Hit description=NMD3 family protein, expressed
MAEYDQYRFEPLLSSRRLVEYVVLNMELELEHRVLGVLGPMDPIALWAQVARASDFGKNDTVFSAKARPRVSAGSWSLGTMWHVLGYDLCSVSSCNNHDLESYGQRHEDDAGAGRQRQRPKLR

SEQ ID NO: 46051 - protein, 342 aa, Zea mays
  Coding DNA Sequence Number=SeqID_4272
  Gene Ontology: Mol. function=ferredoxin-NADP+ reductase activity; Cellular component=thylakoid membrane; Biological process=electron transport
  Homolog annotation: Hit_ID=Q9SLP5; Match level="QueryCoverage=89%, HitCoverage=90%, E-value=1e-159, Identity=85%"; Hit description =Ferredoxin
  Pfam annotation: Domain name=NAD_binding_1; Domain location=201-311; Score=77.2; E_value=5.3e-20; Accession=PF00175.11; Description =Oxidoreductase NAD-binding domain
  Subcellular localization annotation: CTP_CleavageSite=63; ConfidenceScore=5.79e-01
MAAVTAAAVSLPSSSSSPAAAKAKASASASPSSPCGHLQFPRRHGGPRAVRLRVQVSTTETAEAEPVKKLEKVSKKQEEGLVTNKYKPKEPYVGRCLLNTRITGDQAPGETWHMVFSTEGEVPYREGQSIGVIADGEDKNGKPHKLRLYSIASSALGDFGDSKTVSLCVKRLVYTNDQGEVVKGVCSNFLCDLKPGAEVKITGPVGKEMLMPKDPNATIIMYTGLAWLFLGVPTSDTLLYKEELEKMKEMAPDNFRLDFAVSREQTNAAGEKMYIQTRMAEYKEELWELLKKDNTYVYMCGLKGMEKGIDDIMLDLAAKDGINWLDYKKQLKKSEQWNVEVY

SEQ ID NO: 46052 - protein, 210 aa, Zea mays
  Coding DNA Sequence Number=SeqID_4273
MLLRLKIVVGVHSVVLPVPVRGGFGHGACYAALEPCWRRSRRPALAAAGGLVTRRPRSATVVMALKEEPEGSRRGFVGSGSSWDPGLEIQVPSDPFLLWIRKESLNVGDHIYSWKATCFLSFQVVDAKVIHLGYNNSCIFLSLKDVKVMVETTLGKEELKEAVLMCTNRVSQAEGMKVDISTRFSYEELSGAINNFSMDHKIGHDDFGFV

SEQ ID NO: 46053 - protein, 101 aa, Zea mays
  Coding DNA Sequence Number=SeqID_4274
MGHWRCGPGLPAHLRRAHSKLSPPSGTLKEGAGGLGVRDWLVETPELLTIVHHLRNVVVRDPQVPVVSHRQPCRTFLLDLSLEAEGNRYSKRCTRYITNLN

SEQ ID NO: 46054 - protein, 171 aa, Zea mays
  Coding DNA Sequence Number=SeqID_4275
  Gene Ontology: Mol. function=kinase activity
  Homolog annotation: Hit_ID=Q6QP54; Match level="QueryCoverage=59%, HitCoverage=29%, E-value=4e-23, Identity=62%"; Hit description =Putative kinase
MAPPVDVAGLRPRLGDVEAPPKPRSSLSSVAEPESEPWVGRSGVRRLLGLSPSPSPGSGGAEFAVFQGLARVRALGRAERSSPSSGAEPKSEPWVGRSGVRRLPGLSPSPSPGSGGVELPMTGQWSGEVKAVTSALSARGARVRIKLYVDGGYQLRIRSLEAYIQRILQPS

SEQ ID NO: 46055 - protein, 126 aa, Zea mays
  Coding DNA Sequence Number=SeqID_4276
MKLWKETSRSSKTTTSSRCGLAATPSRLPVKAAIIYVSFPHFDLFCWGPSSSKGPQKHDLTTSSKCDIHEQRRSYAQGSFGVIAGKGTDLKGKRLFRPRWITLGPLANIKGMDVISHGLQPVPINR

SEQ ID NO: 46056 - protein, 105 aa, Zea mays
  Coding DNA Sequence Number=SeqID_4277
MQSSSAISPLPQAAWLTCGLWGGSRKARQRGEGEHDATHRPNLDVALLVSRRRVRSGSIVWVDDTCGVVRLRNYRALRLTLVGPYDTEADHARCRKRVTPKRGVN

SEQ ID NO: 46057 - protein, 191 aa, Zea mays
  Coding DNA Sequence Number=SeqID_4278
MAHAKAVAVLGVVIASLLLAAESRHIARKDLGVGLGGGGSGGGGGSLGVGTGGGVGVGTGGGLGVGTGGGLGVGSGIGAGAGVGGGGSGSGSYSGSGSGSWSGSGSGSGAPGSSAGSYAESGSGSNAGPGGAGAGSYAGSRAGSYAGSSSGGAGSDAGSDAGSYAGPHGGSGAGSYAGSHAGSYAGSGHGK

SEQ ID NO: 46058 - protein, 280 aa, Zea mays
  Coding DNA Sequence Number=SeqID_4279
  Gene Ontology: Mol. function=binding
  Homolog annotation: Hit_ID=Q5QNE5; Match level="QueryCoverage=53%, HitCoverage=25%, E-value=2e-26, Identity=47%"; Hit description =Tetratricopeptide repeat protein-like
MVLVDVKTTDASTSTVPVVPAVEHLFLVVLDAHASLVPPLGLDSHGGRATAMDGRARWGRRGLRLGRGGGGTYCGSGAVGYATLPLIIALPVGNIYPSSHLAKPLPTSYFAATPRPLPPPHASRHDVLSSRTVNYNHESIIRSHATAATDDDIVLSRTMSITDPEKLKREALGLYNYAIAGNAACWGNRAATLIGLCRLDETVECEEILPPGWRGLSTRRIAFVAGHCKDGPAMNRDAPTRAAKSSATAHKAVATCAARASSLSAKRATVGRSTARMHRH

SEQ ID NO: 46059 - protein, 37 aa, Zea mays
  Coding DNA Sequence Number=SeqID_4280
  Homolog annotation: Hit_ID=O80504; Match level="QueryCoverage=84%, HitCoverage=23%, E-value=5e-07, Identity=71%"; Hit description =Expressed protein
MVIFSDINAYEVDLDTDEKHCFCRELDLLAVVEGILP

SEQ ID NO: 46060 - protein, 199 aa, Zea mays
  Coding DNA Sequence Number=SeqID_4281
  Gene Ontology: Mol. function=polygalacturonase activity; Biological process=carbohydrate metabolic process
  Homolog annotation: Hit_ID=Q6ZD71; Match level="QueryCoverage=42%, HitCoverage=16%, E-value=5e-22, Identity=67%"; Hit description =Putative exo-poly-alpha-D-galacturonosidase
  Subcellular localization annotation: CTP_CleavageSite=48; ConfidenceScore=5.44e-01
MPPPLPSPRQSRIGARPSPVEVASVSLFPTTVPPSPPTGDRALPLFPTAAWRRLTHQRLIPPTPSQPSALLKFLEHRSRGGFHQAEAPYQCALAARVVAWAFDFSFSFLPSHHRVRGPRTTRSLASPVWASVEEFEAVGDGATPNAAVFRHAVIELGVRSPSGGGARLDVPPRRWLTGSFNLTSRFTLFLHHGAVIIGS

SEQ ID NO: 46061 - protein, 89 aa, Zea mays
  Coding DNA Sequence Number=SeqID_4282
MEHGASHEYGRLSWSLVKRGDGSVLRQLIAMADLPSRGPQGAMAGGLSCMIRWIGYPTTGTLFTGELHAAVGGAFLRRCRELGVGSKGG

SEQ ID NO: 46062 - protein, 86 aa, Zea mays
  Coding DNA Sequence Number=SeqID_4283
MAAPRRGRGPVLQQPPKAHNYREKQGSHPYLWFPQENLQEMGVEHLLDPRTGTLSCTRSWESAPTDHRESGIAAGCSLSGAVASSP

SEQ ID NO: 46063 - protein, 64 aa, Zea mays
  Coding DNA Sequence Number=SeqID_4284
MGEERKECRRGVWRVWLFRVQSQSCELRRASRGKFVAAPRVKIDGLVKNFLSSCKLCHGTLLNS

SEQ ID NO: 46064 - protein, 59 aa, Zea mays
  Coding DNA Sequence Number=SeqID_4285
GAECSPTPCTIRGRGQGRRATLGRQGIPRGRDRGGTPLPPTHNTDPLLAEPPPGISVGK

SEQ ID NO: 46065 - protein, 67 aa, Zea mays
  Coding DNA Sequence Number=SeqID_4286
MDALSPELTTQKHLSSDGVVTYSLAPAFARFTTVLAQTDGEGVAGVFMGHAGRTTEPQASAIRAIGA

SEQ ID NO: 46066 - protein, 180 aa, Zea mays
  Coding DNA Sequence Number=SeqID_4287
MRFATNDRYTRDNLSRRLDDQRPDFHATKSGANSSPQYQRYTLRRKKTNYMDVLSPQLTTQTHLGSNGVVTDSLAPAFARFTTVLAQTDGERTKRRGRGRGVRVLVREDYRGRAASVKIVLKRKDAEALVARLNALSERERKARMAELKGEFRAGDCAGGASPRPCRDAWKPRLVPIREN

SEQ ID NO: 46067 - protein, 140 aa, Zea mays
  Coding DNA Sequence Number=SeqID_4288
  Gene Ontology: Mol. function=hydrolase activity
  Homolog annotation: Hit_ID=Q6Z4P2; Match level="QueryCoverage=85%, HitCoverage=23%, E-value=5e-25, Identity=53%"; Hit description =Putative nucleoside-triphosphatase
MRRYSGAGAWQQQQTEAVADCVHRYRRVLMVLLSPVLLISFVLLLMPRTPTTASGGVLLVVGGRRWGPRAVEDGLNKYAVILDVGSSGSRVHVYCFDENLDLVPIGKEIELFKQRYPGVAIAHNEIIDASCLVFYYIKPN

SEQ ID NO: 46068 - protein, 148 aa, Zea mays
  Coding DNA Sequence Number=SeqID_4289
  Subcellular localization annotation: CTP_CleavageSite=47; ConfidenceScore=5.04e-01
MGNTVPPRVSREATGGRRGAGTARRRRRSENVAVTEAAPPATPSRVVGTARKQDGDVEEETTRAGRALRAGGGDGAAASSKVLAVRIVMERKDAEALVARLMEAQSARVRKARMAELRSELRAGSCSGAAARAETLGLGGNRMLPPID

SEQ ID NO: 46069 - protein, 173 aa, Zea mays
  Coding DNA Sequence Number=SeqID_4290
  Gene Ontology: Mol. function=carboxyl- and carbamoyltransferase activity; Cellular component=ornithine carbamoyltransferase complex; Biological process=amino acid metabolic process
  Homolog annotation: Hit_ID=Q6QP54; Match level="QueryCoverage=41%, HitCoverage=38%, E-value=2e-15, Identity=75%"; Hit description =Putative kinase
MEREGGKKPEGDMRKKGKPVAFVLIPRPGRGNDGPSYDVVGPSPGLGEVEAPPRSRSSLSSKAEVESEPLGRARRRPSVEARAESEPWGRAMRSSSSSGAEPESEPWGRAKRSSSSSGAEPESEPWGRAKRSSSSSGAEPESEPWGQAKRSSSSSGAEPESEPIGRCRVSYGA

SEQ ID NO: 46070 - protein, 350 aa, Zea mays
  Coding DNA Sequence Number=SeqID_4291
  Gene Ontology: Mol. function=DNA-dependent ATPase activity; Cellular component=nucleus; Biological process=DNA metabolic process
  Homolog annotation: Hit_ID=Q9AWX8; Match level="QueryCoverage=70%, HitCoverage=65%, E-value=1e-93, Identity=73%"; Hit description=DNA repair protein radA (RadA)-like
  Pfam annotation: Domain name=Rad51; Domain location=69-321; Score= -49.7; E_value=5.1e-07; Accession=PF08423.2; Description=Rad51
MGVRLVPGAPKAAVSRSPETTARRDSPLSDSGGVDATTGMQAVLLCKRASKLSDPLDYDPTTGSRNGPQQKYVSGAQNAWDMFSDELSQKHITTGSGDLNDILGGGIHCKEVTEIGGVPGVGKTQLGIQLAINVQIPVECGGLGGKAVYIDTEGSFMVERVYQIAEGCIRDILEHFPHSHEKSSSVQKQLQPERFLADIYYFRICSYTEQIAVINYMEKFLREHKDDIIMHASFVISQFFGFQCTTTDLVFKSKDLAIYFADFEDLALRTRVLSGLSLKLMKIAKTYNLAVVLLNQVTTKFTEGSFQLTLALEQQEVSTKNFLAFVTKVAFLFWFWAHVSSDQVKMASIY

SEQ ID NO: 46071 - protein, 180 aa, Zea mays
  Coding DNA Sequence Number=SeqID_4292
MATFQELSSSKVIVKHDTVKHNIYQLKSYYSLLYRDSGGKLSAIHRWGVSDLGLSFSSCVKREKVQDSKTVRRLTDGPRRSYMSQASTVPLIPSSISTEQKKNEDQTLDLGCPVSMERCRFGLIGRLKGAGIGGLEDGGIESQGGGKADLGRALRPLLPCIAWASLGGTAIHDHKVILLF

SEQ ID NO: 46072 - protein, 768 aa, Zea mays
  Coding DNA Sequence Number=SeqID_4293
  Gene Ontology: Mol. function=DNA binding; Cellular component=nucleus
  Homolog annotation: Hit_ID=Q9LRX3; Match level="QueryCoverage=84%, HitCoverage=35%, E-value=4e-46, Identity=27%"; Hit description =Arabidopsis thaliana genomic DNA, chromosome 3, TAC clone:K7P8
MWVPSRKAAAGLLWTGRRGGGDGRQDADRQSGLERSADRCWGGSARQLFQRLQGPFEEGTLKTHFEKIILLGQKLHQTRRKDEIHELRQKNPLHTSHGFALSQACPGNLSGVILTPLDLCDGPSNSDALTGSNTSGLGLSNNNCSVGPTLPTSNMNLRLPGSPGMVLGSNSPLPLNAPSRDVQRYGVPRPTSIQGDEQSRIHYNQMVNGRNLQQPGVPVPGVLPSGVDRGARMMPPAHGVGIMAGLNRGTPITRPGFPRLGSLGNMSPTDGQGLKNTVNVHPGAILGPGSTMLRPRDPMQMFRPGQNSEEHRQMMMPEFQLQVSQGNNHAVHFSGPPYSNTGASSPVQSLPAQQSQPHQMPQQSHMYGNTHLLHTQGTNQSNPQQQQAYAMRLAKERHMQQMMPQQQRPLSVASAVSAVQNGSPMQQQSQGSATCVIPATQTQHKQQYPAQNAQDNSMLPHQPSATTTHKQKKQQGQQQPRQNQQQRNQGSQQAKLMKSLGRGNMMQQSPVDVIQASGISTSCKDQVPDKNMMQQGPGHFVVSKGSIPLIPQPGNQPNVYTSQMPPSPMQTPDISNQGAVKGSSNHALLTSQQGSLHTPSQLAQQQQQQLRFMNPSQNNMQRLIMQQNRHVNTDGRIELPADQVQHNQVMSSASLARSTDSGSPGISSISQRKQESSHDPSAITSTSQLASSPQDTFVGSDRVLPSSSQSMPQRQMSGGVPVHGYGIGGQVQLQQSRQQLQSQQQQQQQQRPVVQGGVYAHPSNSGQG

SEQ ID NO: 46073 - protein, 78 aa, Zea mays
  Coding DNA Sequence Number=SeqID_4294
MEQVPRDMGRGAVAGDDGGGGCAAKGVWAAVVVRMEAGLFQASRVSFLVSSWVRYFSLEGSGQSEEKLHYPIHVEDWA

SEQ ID NO: 46074 - protein, 121 aa, Zea mays
  Coding DNA Sequence Number=SeqID_4295
MAPHMLGVIDLSTVVNGLHAAKKPKLLNQAPDISLEALKPIGPMASLAASQMSNMANPTRVIKISTRGRKSKGLKVLLSFDNRRGSKENTITCNRATFNGITRLTSTYRLNNYATMQVASQ

SEQ ID NO: 46075 - protein, 192 aa, Zea mays
  Coding DNA Sequence Number=SeqID_4296
  Gene Ontology: Mol. function=nucleic acid binding
  Pfam annotation: Domain name=zf-CCHC; Domain location=42-59; Score =9.6; E_value=0.026; Accession=PF00098.13; Description=Zinc knuckle
MARVLSGLFAEETRLKSMSSITGVGSHSVLVTAQMPKSTSSQPCEHCKKTTHRSENCFAKFPEKLADFRARRVTRGRCTGPSPRGSFVVATSSADALPSSWVLSCGASFHVTSEQSWLTSTTHVTKGAPIQTVDGLAHKGCEYVIGTDRRRKSSLLYILDTLCLPSYHTFTLLFQTTCHPDLHSSFLLYFHG

SEQ ID NO: 46076 - protein, 58 aa, Zea mays
  Coding DNA Sequence Number=SeqID_4297
  Homolog annotation: Hit_ID=Q9LRX3; Match level="QueryCoverage=71%, HitCoverage=2%, E-value=1e-11, Identity=71%"; Hit description =Arabidopsis thaliana genomic DNA, chromosome 3, TAC clone:K7P8
MPITREPPNMRAGHSGPGSPWSSFEDQALVVLVHDMGENWELVSDALNSIIQLKGFGS

SEQ ID NO: 46077 - protein, 208 aa, Zea mays
  Coding DNA Sequence Number=SeqID_4298
  Gene Ontology: Mol. function=nutrient reservoir activity; Cellular component=apoplast; Biological process=auxin mediated signaling pathway
  Homolog annotation: Hit_ID=Q7XZY1; Match level="QueryCoverage=88%, HitCoverage=89%, E-value=5e-63, Identity=59%"; Hit description =Germin-like protein
  Pfam annotation: Domain name=Cupin_1; Domain location=66-199; Score =81.2; E_value=3.2e-21; Accession=PF00190.13; Description=Cupin
  Pfam annotation: Domain name=Cupin_2; Domain location=101-161; Score =5.5; E_value=0.074; Accession=PF07883.2; Description=Cupin domain
  Pfam module annotation: Pfam domain module=Cupin_1::Cupin_2; Domain location=66-199::101-161
MANKLATTSLLAAVLLALAAPSLAGDPDMLQDICVADYKSLQGPLRLNGFPCKRPENVTADDFFSNALASPGSTCNALGSAVTPADVRTLPGLNTLGVSVSRIDYAPWGVNPPHVHPRATEVIFVLQGSLDVGFVAATATGGSRRPPRNSGGSPAAVLSAFDSQLPGTQPVAEALFGASPPVPTDVLARSFQVDGGLVEAIRSNFPPK

SEQ ID NO: 46078 - protein, 102 aa, Zea mays
  Coding DNA Sequence Number=SeqID_4299
MGYFGEQRGAKVIVAVRWQGSDTRRKAVRRRFTGELICASHMGYGVFAHRPLGFGLRVFQGSNGGFWYLRGINVIQVHSWEHFVTIPLKLLGFLNLGYVLPL

SEQ ID NO: 46079 - protein, 59 aa, Zea mays
  Coding DNA Sequence Number=SeqID_4300
MAHRTVRCATGAPTVRHRCANGAPPGPRCFQFAIGNQMPLKGQILLKLYLLEELQSEDM

SEQ ID NO: 46080 - protein, 78 aa, Zea mays
  Coding DNA Sequence Number=SeqID_4301
MRTTARWRKFYLLRAWLGILPCTACCGNGGWGGGIAWAGVGGHGGGVNLAGGHSGWLVHGEVVGSRDGEVAGEAYKAG

SEQ ID NO: 46081 - protein, 61 aa, Zea mays
  Coding DNA Sequence Number=SeqID_4302
MAIGRFGRRDSFGRGDFSPISKKYHRATDFHGQCASENHWRKASGGLPYPKGARAVGEWSV

SEQ ID NO: 46082 - protein, 238 aa, Zea mays
  Coding DNA Sequence Number=SeqID_4303
  Subcellular localization annotation: CTP_CleavageSite=69; ConfidenceScore=5.16e-01
TVRDSKTRRDRPATGAASTRLTSDAKNADPCPTRTHKKTLPPHSPRRRPARPPLGPSAWRLGTLPTHPRRSSDRPLDPSPRRRSAPALGTETGLPPRRRPPGLPPRRRSAPSPSLPGGLARPTSLGAAALSLRSALPAAALGYPPPARPSGPGGARPRPLPIPGPCARPRPSARPAVVARRPPAARRAPLARTPPSLAGSTALWAGGNEIDGFSYDYGAGEDEAVEGDFQEFQDYDEF

SEQ ID NO: 46083 - protein, 109 aa, Zea mays
  Coding DNA Sequence Number=SeqID_4304
MMRPRQRPRAQHFSTGLLPTGKDSMVLGGEIHGYGGGRHWVWVVARERGAWPRVLYPRLGATTPLNSTGIPAGIQRIAVGVVRQTREDDALDQRIPRLEKKLHAQCYSV

SEQ ID NO: 46084 - protein, 147 aa, Zea mays
  Coding DNA Sequence Number=SeqID_4305
MVDPYPDSMDLLVALTEVNTGKGSVPGITCAGELSTGRGSSAPDSHSGEEFTSIRNSRLDSGARTDFTSAGETHPTTRRGRNTGADGFHWRRDCGDSTSPRFHGNEAGLRGIEETGPSSTSYSLGESVPGARNVLHDRRRELRVPRI

SEQ ID NO: 46085 - protein, 195 aa, Zea mays
  Coding DNA Sequence Number=SeqID_4306
MEEQGAGTLVLETRHRVAEFEASWASSTTREQDVTADPRVRKAEDQIELGPSTGHGKRTVGHRKLGDRCTGTGRRRNSRRGARGMGASSELDAAAMEMGADRAGETGGWGATTGEMKLHGEQRRGRTGSSGELQMAGGASTESLGASCNGEQGAGRAQQEARTRGARAQRAAARRAPRGLGEGDPRAGSRAEGGR

SEQ ID NO: 46086 - protein, 152 aa, Zea mays
  Coding DNA Sequence Number=SeqID_4307
MVARRASRVFELIDGNLDLVMKTRSFGVQHRPQTSQKEQNGEEGRSSQELKSSGEELDNLALSGPLRAVTRDTLGRVRDAFMRIVSGSGKSEMLSAESCLAQVGLGARRDCLGARRGYLGRVVASGKLWPRASHGVGRLALGEMWPRANRGL

SEQ ID NO: 46087 - protein, 292 aa, Zea mays
  Coding DNA Sequence Number=SeqID_4308
  Gene Ontology: Mol. function=protein serine/threonine kinase activity; Cellular component=membrane; Biological process=protein amino acid phosphorylation
  Homolog annotation: Hit_ID=Q9MAY6; Match level="QueryCoverage=36%, HitCoverage=24%, E-value=8e-17, Identity=45%"; Hit description =Protein kinase 1
  Pfam annotation: Domain name=Pkinase; Domain location=75-292; Score= -96.5; E_value=0.0082; Accession=PF00069.15; Description=Protein kinase domain
  Pfam annotation: Domain name=Pkinase_Tyr; Domain location=75-262; Score=-123.9; E_value=7.2e-05; Accession=PF07714.7; Description =Protein tyrosine kinase
  Pfam module annotation: Pfam domain module=Pkinase::Pkinase_Tyr; Domain location=75-292::75-262
  Subcellular localization annotation: CTP_CleavageSite=39; ConfidenceScore=5.35e-01
MATLHLGAPSCVTSAPQPVAPSIGSKLANKISGGPNLTRCFVEAGPTGSEDDDISFTLTVETFSFEELSAATDNFSSTLRIGSGGQATVYEGHIPHIGQFPGCVNQVAVKRLRTNDFPSKQRAFLMEVYVLNSTNHPHIVKLLGCCSEGTERLLVYEYVKGGTLRHRLKVETGVCPKKMIAPRCRGSRNRGGRGQETRSRSLFFWKGRRSSVNGQQGDTAKEHQHADLLASSIVRTSRSPAREADGSARISAGHGGRARDRIEGVMADVAGKATTATNPTGKTRSSQRSHQL

SEQ ID NO: 46088 - protein, 67 aa, Zea mays
  Coding DNA Sequence Number=SeqID_4309
MVDHPDLWPKGVRCCHVLDNTEGDETSPELNPDPKPRAVRTCHKEGRSQSLLPTQDKDRCCYVFYDM

SEQ ID NO: 46089 - protein, 582 aa, Zea mays
  Coding DNA Sequence Number=SeqID_4310
  Gene Ontology: Mol. function=RNA-directed DNA polymerase activity; Cellular component=mitochondrion; Biological process=RNA-dependent DNA replication
  Homolog annotation: Hit_ID=UPI00004C1733; Match level="QueryCoverage =74%, HitCoverage=29%, E-value=0.0, Identity=94%"; Hit description =UPI00004C1733 related cluster
  Pfam annotation: Domain name=RnaseH; Domain location=37-164; Score =11.5; E_value=4.9e-06; Accession=PF00075.14; Description=RNase H
  Pfam annotation: Domain name=rve; Domain location=294-453; Score =122.9; E_value=8.7e-34; Accession=PF00665.16; Description=Integrase core domain
  Pfam module annotation: Pfam domain module=RnaseH::rve; Domain location=37-164::294-453
MGETISFAPRKAIKSQVLADFVAEWVDTQLPTAPIQPELWTMFFDGSLMKTGAGAGLLFISPLGKHLRYVLRLHFPASNNVAEYEALVNGLRIAIELGVRRLDARGDSQLVIDQVMKNSHCRDPKMEAYCDEVRRLEDKFYGLKLNHIARRYNETADELAKIASGRTTVPPDVFSRDLHQPSVKTDDMPEPEAPSARPEAPRHPRLGPRHPRPPRVRHCASRGSGAGSRLIETGRLRTCNISTEESYPSTEPKLGGFYWPTAVADATRIVRTCEGCQFYARQTHLPAQALQTIPITWPFAVWGLDLVGPLQKAPGGYTHLLVAIDKFSKWIEVRPLNSIRSEQAVAFFTNIIHRCGVPNSIITDNGTQFTGKKFLDFCEDHHIQVDWAAVAHPMTNGQVERANGMILQGLKPRIYNDLNKFGKRWMKELPSVVWSLRTTPSRATGFTPFFLVYGAEAILPTDLEYGSPRTRAYADQSNQANQEDSLDQLEEARDMALLHSARYQQSLRRYHARGVRSRDLHVGDLVLRLRQDARGRHKLTPPWEGPFVVAKVLKPGTYKLANSQGEVYSNAWNIQQLRRFYP

SEQ ID NO: 46090 - protein, 39 aa, Zea mays
  Coding DNA Sequence Number=SeqID_4311
MEVAGCLSGGSKFGREVLAAEEKRSVLERVTVVVTVARP

SEQ ID NO: 46091 - protein, 89 aa, Zea mays
  Coding DNA Sequence Number=SeqID_4312
  Subcellular localization annotation: CTP_CleavageSite=50; ConfidenceScore=5.45e-01
MALMAAGRLSLSLAPSPLPLILYKGQLSTPLFLSLPRALSSVSLAPAHCRSHALVGAVPDRLPPPSVLYPAMPKLAEPLPASPDRPSPA

SEQ ID NO: 46092 - protein, 201 aa, Zea mays
  Coding DNA Sequence Number=SeqID_4313
MKKTLQKILTNTKSNNVPVIFLWKSVHVLSIFQATLEASRLQFGFYRPAPKDTTLAPVDPLAPDLRVEDEAIRQFEDQGAAADTSSDDDEDLGFPPPPHVPPRSHDHKAGGSSGAPPAHPPAIDPALATTLQSLTQQQTHMAAEQARQEVEQAKQTIQDHQDTLQQQLLADRAKHQAFMTHILQHTGVSIPPMQSAPPLAL

SEQ ID NO: 46093 - protein, 94 aa, Zea mays
  Coding DNA Sequence Number=SeqID_4314
MGLKTLCTECTFASLTRQRKKTLKDMLAFGNQGKQGMVTNFPRKEMHQLFITQFLSPNASYKVIKILKQQGKRIMHRGFLCVGGGSVSTPQISK

SEQ ID NO: 46094 - protein, 145 aa, Zea mays
  Coding DNA Sequence Number=SeqID_4315
MELCHGSRERVCDSRRIAELSAEVDRLQREIVERDRAIDWAVNSQSIVWDCEVNARARVEELSVALENLQAYNNTLHEEVHVLYDQLHPNVPPKVAAMGARTSGAASEGPYGELDLFGAPPSMIIADDHSPKASSGAGAAKDVDN

SEQ ID NO: 46095 - protein, 44 aa, Zea mays
  Coding DNA Sequence Number=SeqID_4316
  Homolog annotation: Hit_ID=Q8LMN8; Match level="QueryCoverage=87%, HitCoverage=7%, E-value=3e-16, Identity=97%"; Hit description =Putative transcription initiation factor
DDWEHEETFTDDDEAVDIDPEERADLAPEIPAPPEIKQVDIHHY

SEQ ID NO: 46096 - protein, 297 aa, Zea mays
  Coding DNA Sequence Number=SeqID_4317
  Gene Ontology: Mol. function=protein dimerization activity; Biological process=electron transport
  Homolog annotation: Hit_ID=Q2QMZ1; Match level="QueryCoverage=82%, HitCoverage=25%, E-value=8e-27, Identity=33%"; Hit description=HAT family dimerisation domain containing protein
  Pfam annotation: Domain name=UIM; Domain location=141-158; Score =17.9; E_value=0.036; Accession=PF02809.10; Description=Ubiquitin interaction motif
MEKKRQGAEPGSRRAGHPPFHMGLEAGSWTRRSDPTVSTMLYAANRSASWDVGAARSGLGTRGQHIYRIQVQLLQENNGRVWYYTFQATPCIAWGNVQGCRNVPSDNYFRRELDKVHDKRKARIAEEAQKLQVAGSHRVSDDDDDELQAAIRASREEEELRRRARASGALYETGGGSSQGGLYAAFGRICSRKEKPHMVQTRIDVGPFSKAGKNVVHCFGQQWAKWFHAEAIPGHKANIPYFINAFRETQKHGECGSKVYHCQSMSYISLIHIVPDNQYLDENEKELQVDFTKFKED

SEQ ID NO: 46097 - protein, 80 aa, Zea mays
  Coding DNA Sequence Number=SeqID_4318
MGQTFRKNVEELRASKKKCYEKSIECVKKIRTSFASVGAFSTALSPPSEPAEPSVDPHVKGTTKLEKWPKLSWIKLLISY

SEQ ID NO: 46098 - protein, 157 aa, Zea mays
  Coding DNA Sequence Number=SeqID_4319
MGVAPELRVDFGKIIHSKGNKRKREPTPPSEDFGDSEYSEEEFSSESEGSPAPVSPPASSDDSDDSQGIAAEVWTYIQAVERSGLEGSDESEYSSDEEDSPEENGDGDDDDDDGGDGDDDGDGGGRGGSGDDKGGDGGSSRGSNGGGSSKGSNKASG

SEQ ID NO: 46099 - protein, 1033 aa, Zea mays
  Coding DNA Sequence Number=SeqID_4320
  Gene Ontology: Mol. function=RNA-directed DNA polymerase activity; Cellular component=mitochondrion; Biological process=RNA-dependent DNA replication
  Homolog annotation: Hit_ID=Q8S463; Match level="QueryCoverage=88%, HitCoverage=48%, E-value=0.0, Identity=92%"; Hit description =Putative prpol
  Pfam annotation: Domain name=RVT_1; Domain location=18-190; Score =79.6; E_value=9.4e-21; Accession=PF00078.17; Description=Reverse transcriptase (RNA-dependent
  Pfam annotation: Domain name=RnaseH; Domain location=420-547; Score =7.8; E_value=1.1e-05; Accession=PF00075.14; Description=RNase H
  Pfam annotation: Domain name=rve; Domain location=745-904; Score =118.2; E_value=2.4e-32; Accession=PF00665.16; Description=Integrase core domain
  Pfam module annotation: Pfam domain module=RVT_1::RnaseH::rve; Domain location=18-190::420-547::745-904
MPGIPRDVAEHSLDIRAGARPVRQPLRRFDEEKRRVIGEEIHKLMAAGFIKEVPYPLPRIDQIVDSTAGCETLSFLDAYSGYHQIRMKESDQLATSFITPFGMYCYVPMPFGLRNAGATYQRCMNHVFGEHIGRTVEAYVDDIVVKTRKASDLLSDLEATFRCLKAKGVKLNPEKCVFGVPRGMLLGFIVSEQGIEANPEKITAITSMGPIKDLKGVQRVMGCLAALSRFISRLGERGLPLYRLLRKAESFAWTPEAEEALGNLKALLTKAPILVPPADGEALLVYIAATTQVVSAAIVVERQEEGHALPVQRPVYFVSEVLSETKIRYPQVQKLLYAVILTRRKLRHYFESHPVTVVSSFPLGEIIQCREASGRIAKWAVEIMGETISFTPRKAIKSQVLADFVAEWVDTQLPTAPIQPELWTMFFDGSLMKTGAGAGLLFISPLGKHLHYVLRLHFPASNNVAEYEALVNGLQIAIELGVRRLDARGDSQLVIDQVMKNSHCRDPKMEAYCDEVRRLEDKFFGLELNHIARRYNETADELAKIASGRTTVPPDVFSRDLHQPSVKIDDTPEPEAPSAQPEAPSAQPEAPSVRPEVPSAPGAEALHVEEEQNGASPDRNWQTPYLQYLRQGELPLDQAEARRVARRAKSFVLLGDEEELYHRSPSGILQRCISIAEGQELLREIHSGACGHHAAPRALVGNAFRQGFYWPTAVADASRIVRTYEGCQFYAKQTHLPAQALQMIPITWPFAVWGLDLVGPLQKAPGGYTHLLVAIDKFSKWIEVRPLNSIRSEQAVAFFTNIIHRFGVPNSIITDNGTQFTDKKFLDFCEDHHIRVDWAAVAHPMSNGQVEHANGMILQGLKPRIYNGLNKFGKRWMKELPSVVWSLRTTPSRATGFTPFFLVYEAEAILPTDLEYGSPGTRAYNDQSNQASREESLDQLGEARDKALLHSARYQQSLRRYHARGVRPRDLQVGDLVLRLRQDARGRHKLTPPWEGPFVIAKVLKPGTYKLANNQGEIYGNAWNIKQLRRFYP

SEQ ID NO: 46100 - protein, 101 aa, Zea mays
  Coding DNA Sequence Number=SeqID_4321
MVNNHLFAKSINGDTSVNELQAATAESLVMLRLLSAARDATLLMLVVVGPCRFPLDGADAGHQHQQPGEVKTRLLAVEYGQLLDEHEQQSGDHGGLLICYR

SEQ ID NO: 46101 - protein, 57 aa, Zea mays
  Coding DNA Sequence Number=SeqID_4322
MGSVLAEIDTKTSIKDLTIRVLFCTFPGEIFGFCIFSNKADNSHVLFITVMQGDIKV

SEQ ID NO: 46102 - protein, 240 aa, Zea mays
  Coding DNA Sequence Number=SeqID_4323
  Homolog annotation: Hit_ID=Q9M0X9; Match level="QueryCoverage=26%, HitCoverage=9%, E-value=1e-11, Identity=60%"; Hit description=4 -coumarate--CoA ligase-like protein
MVRALRLGGHATSAARWFTCRRTAVALCMANLVAALLVARTLYAPDSFAFAPKRGELKYSREQMRWVEESIRIRGAAEPVELIEAVIAVLQSSCVWNSICSEAIEAWRVGKLKDMRSTSFRNLSNFGLSSEDSNEEIIPGPPLPPECNTELHTDYGGTTFALANIRTPFFILNSAYDVYQIAPAELEGLLLSHPEILDAVVIPNMFFDVPYRNMCLFLRLPDAEAGEVPIAYVVRSPDSS

SEQ ID NO: 46103 - protein, 385 aa, Zea mays
  Coding DNA Sequence Number=SeqID_4324
  Gene Ontology: Mol. function=hydrolase activity, acting on ester bonds; Biological process=lipid metabolic process
  Homolog annotation: Hit_ID=Q5Z983; Match level="QueryCoverage=96%, HitCoverage=95%, E-value=2e-97, Identity=50%"; Hit description=GDSL -lipase-like
  Pfam annotation: Domain name=Lipase_GDSL; Domain location=34-365; Score=129.1; E_value=1.3e-35; Accession=PF00657.12; Description=GDSL- like LipaseAcylhydrolase
MAEHFVLCPVMAVLLLSMDVLGAAAGVFKPPPAMYVFGDSTLDVGNNNYLPGAGVPRANRPYYGVDFPGGLPTGRFSNGYNTADFIAKCIGFVSSPPPYLSLLGAASCGGGLLVPTALTIGVSYASGGAGILDSTNAGNTIPLSKQVQYFNATRSEMIAAAGSSDAVDALINRSFVLILVGGNDLSAFANAERARNRSGADLESHDAAAFYGGLVSNYSAAIRGLHALGVRRLAVVNVGLAGCLPVARVLDATGACAEDRNRLAAGFNAALRSLLAGLASPSSRSGLPGLSYSLADSLGLMADTFAHPLASGFTDVANACCGGGRLGAEAPCAPNATLCADRGLYYFWDSVHPSERAAALRAQAFCDGPAQYTTPINFKQLVHMA

SEQ ID NO: 46104 - protein, 85 aa, Zea mays
  Coding DNA Sequence Number=SeqID_4325
  Subcellular localization annotation: CTP_CleavageSite=77; ConfidenceScore=5.51e-01
MSLTEPQVTKAGVSVARMMAPRTHTAHAVCNTPGVTLSNFTFAPKSVLRHPKPNLTATSRTPGSTDRREHMDLWFIRALTVARPH

SEQ ID NO: 46105 - protein, 162 aa, Zea mays
  Coding DNA Sequence Number=SeqID_4326
MAMMDSTSEKMYLYQDRLDVGLMIEDPLTGHMPRHGSTPPSEDNEIRQHIMIHMGPNPSYDDLSAFFASYAELSASYDAKMSPNYGEFISGSGAFEPLLRLASTVIAALVAHNHLPNSDHLEFVGMADDSGDPVIEEICMDSDSYLVSSGSSGEEPPGGEEK

SEQ ID NO: 46106 - protein, 97 aa, Zea mays
  Coding DNA Sequence Number=SeqID_4327
MMHHAWVDDGVLELEDDDREGDRIREACISMGITGDRGGAMSGTGLAEGRALVAIVGWAAPLDWTAGVDGWVIDIAMQCKQLASGSQTSQLTGTADQ

SEQ ID NO: 46107 - protein, 49 aa, Zea mays
  Coding DNA Sequence Number=SeqID_4328
MDDDDDAEARGAWGVYNVSAPVWMGQRLRRKPATAIPSRRIASWAGLSE

SEQ ID NO: 46108 - protein, 140 aa, Zea mays
  Coding DNA Sequence Number=SeqID_4329
MDPDFELEFEMVGVLRAYKTTWDDGDSAAAAASTDVDLLKRAWLNEKEEVLDDFVDGGVDDLVVSLYQMDLDRTLFLLRSYLLLEKAFWRAVTTGMTKSLAYSSRVDDVESPVLQRVGMCPRRQRHRPANSSLQIQTALG

SEQ ID NO: 46109 - protein, 204 aa, Zea mays
  Coding DNA Sequence Number=SeqID_4330
  Gene Ontology: Mol. function=helicase activity; Cellular component =membrane
  Homolog annotation: Hit_ID=Q69V29; Match level="QueryCoverage=88%, HitCoverage=93%, E-value=2e-71, Identity=74%"; Hit description =Helicase-like protein
  Pfam annotation: Domain name=DUF889; Domain location=1-118; Score= -0.5; E_value=1.8e-11; Accession=PF05970.5; Description=Eukaryotic protein of unknown function (DUF889)
MNVCELTLAVSHPPQVKNRYRKMRRVEDAVMSSNNYPIEFLNSITPNGLPPHVLKVKINSPVILLRNLDPNNGLCNGTRLMVRALQDNAIDAEIVGGHNAGTRVFIPQIPMCPSDDISLPFKLKRKQFPIRLSFAMTINKAQGQTIPNVGIYLPEPVFSHGQLYVALSRGVSRQTTRILARPKKELDPTGKSTKNIVYKDVLNC

SEQ ID NO: 46110 - protein, 558 aa, Zea mays
  Coding DNA Sequence Number=SeqID_4331
  Gene Ontology: Mol. function=RNA-directed DNA polymerase activity; Cellular component=intracellular; Biological process=RNA-dependent DNA replication
  Homolog annotation: Hit_ID=Q1T0S0; Match level="QueryCoverage=75%, HitCoverage=84%, E-value=1e-108, Identity=45%"; Hit description =Pentatricopeptide repeat
  Pfam annotation: Domain name=PPR; Domain location=120-153; Score =11.5; E_value=0.32; Accession=PF01535.11; Description=PPR repeat
  Pfam annotation: Domain name=PPR; Domain location=154-188; Score=2.4; E_value=3.8; Accession=PF01535.11; Description=PPR repeat
  Pfam annotation: Domain name=PPR; Domain location=189-222; Score =10.1; E_value=0.47; Accession=PF01535.11; Description=PPR repeat
  Pfam annotation: Domain name=PPR; Domain location=223-257; Score =34.0; E_value=5.1e-07; Accession=PF01535.11; Description=PPR repeat
  Pfam annotation: Domain name=PPR; Domain location=258-292; Score =37.2; E_value=5.8e-08; Accession=PF01535.11; Description=PPR repeat
  Pfam annotation: Domain name=PPR; Domain location=293-327; Score =37.5; E_value=4.7e-08; Accession=PF01535.11; Description=PPR repeat
  Pfam annotation: Domain name=PPR; Domain location=328-363; Score=5.8; E_value=1.5; Accession=PF01535.11; Description=PPR repeat
  Pfam annotation: Domain name=PPR; Domain location=364-398; Score =42.1; E_value=2e-09; Accession=PF01535.11; Description=PPR repeat
  Pfam annotation: Domain name=PPR; Domain location=436-470; Score =35.2; E_value=2.3e-07; Accession=PF01535.11; Description=PPR repeat
  Pfam module annotation: Pfam domain module=PPR::PPR::PPR::PPR::PPR::PP R::PPR::PPR::PPR; Domain location=120-153::154-188::189-222::223 -257::258-292::293-327::328-363::364-398::436-470
MPLRGLRRRGRCCDDGRTLLRLSLRRSSSCAAPSSQSSNSAALTAEEEAAAAQIKSSLLRARKGSVEDLVRALAAECSEVRLTSGVADSLLRGCGDCWKPALGFFLWAQSRGGGYSHTPYACSRMVDLLGKTRQIDRMWDLLSEMHCRGLVTVDTVAKSIRRLAAARKWRDAILLFDQLEDLGLERNTETMNVLLDALCKEKKVELAREVFVMLSPHIAPDAYTFNIFVHGWCSVRRIDEALWTIEEMKTRGFPPIVITYTAVLEAYCKQRNFRRVYEVLDSMGSQGCHPNVITYTMIMTSLTKCERFEEALSVSDRMKSSGCKPDTLFYNALINLLGRAGHLFEANQVFRVEMPRNGVLRNVATYNTMISILCQYGRDDDALGVLKEMEAQSCKPDLQTYQPLLRLLLGRRGQAAAVHRLLSELRDRNGLGLDLDTYTLLIHGLCKVGETDWAYLLYDEMVGSEIVPRPRTCELLLSEMQRQNMEASKFLEQGVVCPSACSALFFARSGSSAGGVGCWLRTLAVRHRAVAERALGVGPTGHSAWGGSRVSTRSVKSW

SEQ ID NO: 46111 - protein, 179 aa, Zea mays
  Coding DNA Sequence Number=SeqID_4332
MEREPRELREKEAGRGAGRSGEPRGRLRAVGAGAARDTENRRARRLGARPPWASAGKNATRQGRAEVGGELGTARAQEEALGSEQGAAKGETPAVPRANSARRPWTRWASSKAPSRGARARRERERQGAEQNRAPWVQEDVTAHRKGEPRSRGWGTPWKMGGGRLRAAGFVSRAGRVRR

SEQ ID NO: 46112 - protein, 106 aa, Zea mays
  Coding DNA Sequence Number=SeqID_4333
MAKVKTVLGRGDNDGLGLWSQHRRHLRAGPRAAREKTRRLERRRCSAAATCFGAGPRAADLRAAGEETSRGEMEIEENGDGRKRLDGREKNLAERRVRRKNGSGRQ

SEQ ID NO: 46113 - protein, 94 aa, Zea mays
  Coding DNA Sequence Number=SeqID_4334
  Subcellular localization annotation: CTP_CleavageSite=54; ConfidenceScore=5.05e-01
MSQNPLIIDAALRVSCARRKSQACGQHTHKPTRGLQNRACVINDVNWKLSSCLRLSRRISQGTLINRALRKTNQVDPKHGLIRKMKLMDQLEDG

SEQ ID NO: 46114 - protein, 97 aa, Zea mays
  Coding DNA Sequence Number=SeqID_4335
MAWLARAERRDGLRKAARSHSRVDACIPYCKRTRLRRGANTKAAGSALLRLPPSGCSLSPLRVPPRVDPSGLGHAATIHSSVQGPPGFRNTDKYALG

SEQ ID NO: 46115 - protein, 263 aa, Zea mays
  Coding DNA Sequence Number=SeqID_4336
  Gene Ontology: Mol. function=DNA photolyase activity; Biological process=DNA repair
  Homolog annotation: Hit_ID=Q6YXC2; Match level="QueryCoverage=65%, HitCoverage=28%, E-value=8e-79, Identity=72%"; Hit description =Cryptochrome 1a
  Pfam annotation: Domain name=FAD_binding_7; Domain location=144-263; Score=-68.2; E_value=6.2e-05; Accession=PF03441.4; Description=FAD binding domain of DNA photolyase
  Subcellular localization annotation: CTP_CleavageSite=40; ConfidenceScore=5.32e-01
MPAPTRPRRRPPRPAPTALANAGSLSRVPLPPQRRLPPWLCDARSAPLPLRTPPEIAQTRQIEESTPQIEESASAVEGDRLRPSAVPQISVGIIVRSFNADLLYESWEVLDEDRRPFTMCPWEELVFEDESERGSNALLARAWSPGWQNADKALTAFLNGPLMDYSVNHKKADSASTSLLSPYLHFDELSVRKVFHQVRMKRLMWSNDGNHAGEESCTMFLCSIGLWEYSRYLTFNHPCSHEKPLLSHLRFIPWVVNEVYFKV

SEQ ID NO: 46116 - protein, 89 aa, Zea mays
  Coding DNA Sequence Number=SeqID_4337
  Homolog annotation: Hit_ID=Q6QP51; Match level="QueryCoverage=32%, HitCoverage=13%, E-value=4e-07, Identity=86%"; Hit description =Putative growth-regulating factor 1
MGVPDFCARWRAINALQELGVSLIPFQKFSLGRDRELCLARPPTSVSASASGGVTSSPDPGLGLGKSLRLARPWAQTDRAAGDTSLPYS

SEQ ID NO: 46117 - protein, 88 aa, Zea mays
  Coding DNA Sequence Number=SeqID_4338
MAIARKSKEPNLMLLPGVKVSTPIGANELAIRVKTIHFGTVAVPYPRASPCSMLYASTAVPDGSRRMCSRILLAKLIDVLLDKWLHYR

SEQ ID NO: 46118 - protein, 250 aa, Zea mays
  Coding DNA Sequence Number=SeqID_4339
  Homolog annotation: Hit_ID=Q6H4Z9; Match level="QueryCoverage=71%, HitCoverage=37%, E-value=2e-42, Identity=46%"; Hit description =Leucine zipper protein-like
  Pfam annotation: Domain name=DUF632; Domain location=1-217; Score= -109.3; E_value=0.00063; Accession=PF04782.3; Description=Protein of unknown function (DUF632)
MGDAMWDIQGHFMKILDTARWVSMPLEVSPTREDDANGAEPFAIEKTRAAFRDLGTKLDISLTSVDAVSRRIAAVRDDELRPQLVQLVRGLARMPRVIADAHRVMKRIADDSIALLTVPPPPPSAAAGAGAGAGELGAELRGWRAAMEAWAESQRAYVAALWGRARSCAMDGEVIMPRLIVGWARAGGEEWFNEEEGKKNKFCVALPAALPLSDTTSWCWSLEMEMGASSEGTRAGDRRQGRTRNQSIHN

SEQ ID NO: 46119 - protein, 443 aa, Zea mays
  Coding DNA Sequence Number=SeqID_4340
  Gene Ontology: Mol. function=protein dimerization activity; Cellular component=nucleus; Biological process=regulation of transcription, DNA-dependent
  Homolog annotation: Hit_ID=Q9AVD0; Match level="QueryCoverage=59%, HitCoverage=85%, E-value=4e-62, Identity=55%"; Hit description=RISBZ4
  Pfam annotation: Domain name=bZIP_1; Domain location=258-319; Score =64.4; E_value=3.6e-16; Accession=PF00170.11; Description=bZIP transcription factor
  Pfam annotation: Domain name=bZIP_2; Domain location=258-312; Score =43.6; E_value=6.5e-10; Accession=PF07716.5; Description=Basic region leucine zipper
  Pfam module annotation: Pfam domain module=bZIP_1::bZIP_2; Domain location=258-319::258-312
MEEGQSTAERRSRPAPNSDIFTITLWSHPSTARLGGGRVRLHEVRRREVETRSLPPVESRGGGNRVGCAPKEARCRVARKTVTSPVGPAYQRRQQIMRVGVSDKMGQELWNSAQKCPSELELEAFLRGREDATAAAAAAVAEQKPTHDIAALAPFGAGGVFPSSDLSAFSFADSNTLNGTGNIHNHLWSHNHNVRHPAVSTTIESQSSICAAAAASPTSATNLYLKESQALGGTSGSDSDSDSLLDIEGGPCEQSTNPQDVKRMRRMVSNRESARRSRKRKQAHLADLETQVDQLRGENASLFKQLTDANQQFTTAVTDNRILKSDVEALRVKVKLAEDMVARGALSCGLGSLGLSPALNPRQACRGPDVLSVSGLDFPGADDACFTGLSPAEQLQLQSSPLQSIAASLESLDNRMASEVTSCGGPGVDVWPWDHHSNGGLSK

SEQ ID NO: 46120 - protein, 401 aa, Zea mays
  Coding DNA Sequence Number=SeqID_4341
  Gene Ontology: Mol. function=protein dimerization activity; Cellular component=nucleus; Biological process=regulation of transcription, DNA-dependent
  Homolog annotation: Hit_ID=Q2QRD1; Match level="QueryCoverage=54%, HitCoverage=21%, E-value=2e-69, Identity=58%"; Hit description=HAT family dimerisation domain containing protein
  Pfam annotation: Domain name=zf-BED; Domain location=185-235; Score =33.4; E_value=8e-07; Accession=PF02892.5; Description=BED zinc finger
RSPESRPPLREREHDHRGADQSRDLPYASASVTADRSRGLPCAAARARLRDRRGASAPCVPAAERNRSRGRLCALRCVPAAERQGVSLPPRPPLRPCVPAPAAAIDDQLESATISMDGNSNRIDNNNSQSFSVADPLTLSSTGREIALDADTGTGTAATPSTATTTASTASTDTICHKRGRKSTSDVWNDFEQLFKDINGKKVRYAAKCLYCKSQLTASSTAGTGHLKRHRSTCASKAQRAAKTQSLIQFNADGSVRSWDYNLDIARTELCRLICTLDLPLGIGSTAAFERYIKHAHNPRFTVVCRQTTTRDFVKFYNQSRTSLIDVLKSSVSCVALTSDIWSGNAKEDYISVVAHYVNADWVLEKRVIGMRLIDVSHNGANIADRVKTIIAHFGLTDKVD

SEQ ID NO: 46121 - protein, 214 aa, Zea mays
  Coding DNA Sequence Number=SeqID_4342
  Homolog annotation: Hit_ID=Q9AVP1; Match level="QueryCoverage=29%, HitCoverage=30%, E-value=2e-09, Identity=52%"; Hit description=TMV response-related gene product
  Subcellular localization annotation: CTP_CleavageSite=39; ConfidenceScore=5.20e-01
MGLKLSCIHQGSLSRQAHQPASPAPARVIAADASLKELPASSSSSSVSDVLGRSGGDDMAVASSSFFMCNSDALYFNEPPPALPTGEVLRPGQIYFVLPAAMLGRPLSTADMAALAVRATTALSSSCKPRRHGRRRARGGGKKKKAVRVVPVREQMEDGGEDAFFNEKLNQQTLGDFGMLLLSQAKKDDKLAVAAAAATARLKRALSIIQEDAE

SEQ ID NO: 46122 - protein, 217 aa, Zea mays
  Coding DNA Sequence Number=SeqID_4343
  Gene Ontology: Mol. function=DNA binding; Biological process=DNA integration
  Homolog annotation: Hit_ID=O24587; Match level="QueryCoverage=99%, HitCoverage=44%, E-value=2e-57, Identity=55%"; Hit description=Pol
MTEEKQMFSSYVKNKDSHDTIIFRDGNQGKVNGLDVIVFRGSDGSLAFKGVLDDKLYLVDFTKENADLHACLLAKTNLGWLWHRCLAHARMKNPHKLIKGKHVLVLTNVCFEKDRHCAACQVEKQVGTSHPSKNIMTTSRPLEFINKDFFGLVAYLSIGGNENEVSTAALRTMTIRDIRSHEPQEQDQPSCSTMMQPPTQGEEQIPQDDSHGSSGSA

SEQ ID NO: 46123 - protein, 220 aa, Zea mays
  Coding DNA Sequence Number=SeqID_4344
  Gene Ontology: Mol. function=zinc ion binding; Cellular component =intracellular
  Homolog annotation: Hit_ID=Q69TZ2; Match level="QueryCoverage=73%, HitCoverage=59%, E-value=7e-26, Identity=43%"; Hit description =Putative zinc-binding protein
  Pfam annotation: Domain name=PLATZ; Domain location=32-152; Score =127.8; E_value=3.1e-35; Accession=PF04640.4; Description=PLATZ transcription factor
MVSLREMARSDAERAPPAWLRALLETRFFDACPEHQANDAGRANRKRTSGCNFLCTHCADRALCSGCLGNHEGHGLIQIRRSSGNNVVKVDDVQNRLSVSLVQTYVYNGDYAVFLNRRPMSGHGKHGASHCEQCGRGLQDEDCRFCSLECKAKGIEDRLDFSVSFAVDPNNFSSSGDDTESDDDEDSSYPSKFQKLETIPASSSKPVASGGQHSIGKKQY

SEQ ID NO: 46124 - protein, 107 aa, Zea mays
  Coding DNA Sequence Number=SeqID_4345
MSLTEAKTVVVLESVLRLEKWAAYKKALADRKRALESRKIIFTRSKQYAQEYGTEEKSNWKCLGSSSQESTESGSTGLSGGAPDSVRCARLTRRELGALGNSPTAYG

SEQ ID NO: 46125 - protein, 231 aa, Zea mays
  Coding DNA Sequence Number=SeqID_4346
  Gene Ontology: Mol. function=protein dimerization activity; Cellular component=nucleus; Biological process=regulation of transcription, DNA-dependent
  Homolog annotation: Hit_ID=Q2QRD1; Match level="QueryCoverage=71%, HitCoverage=15%, E-value=5e-38, Identity=51%"; Hit description=HAT family dimerisation domain containing protein
  Pfam annotation: Domain name=zf-BED; Domain location=77-127; Score =36.8; E_value=7.5e-08; Accession=PF02892.5; Description=BED zinc finger
MAVSDDETVEIDCNEERRLCGLAGDDDEDDLREDATTLFGHSSEHPVHVGDEQQVGGQDNEGEWDEHSAKRCRPSTSAVWLDFEKLFKIVNGKKVRFAAKCIHCSKQYSALSSGGTGHLTRHRDRCPRRREKTRMSQSQISFNPDDSMRNWEYCPMVARNELVRLLARLEIPISLGENAAFEHYIRTAHNPKFVPVSRQTTTRDMVKYFTDKKAKLVETLSSSDVRAPRGG

SEQ ID NO: 46126 - protein, 264 aa, Zea mays
  Coding DNA Sequence Number=SeqID_4347
  Homolog annotation: Hit_ID=Q1SXU5; Match level="QueryCoverage=33%, HitCoverage=53%, E-value=2e-18, Identity=40%"; Hit description=RNA -binding region RNP-1
  Pfam annotation: Domain name=RRM_1; Domain location=162-232; Score =15.5; E_value=0.0053; Accession=PF00076.12; Description=RNA recognition motif. (a.k.a. RRM, RBD, or
MDPYLGAVIIGAEGGRHQDLWRRPPRTCHIGCHVGKVGVNYVGATMCYLGANDDGAEGNDNPLAAASASLPFHLSHPPIHSLARPRLQPPLNPLAPSEEAGSQRAKIPSESSPPKTSDPLTMATQQQHAGPASGSASASSSSSGLHLPASPSAFGDTTHTKVFVGGLAWETNSGRLRRFYERFGDILEAVVITDRHSGRSKGYGFVGGYGHHRPFPLGYYQGFPVPQYSYPSYGTEYISPQVEVLKAISFYILVLHKTVTQTFA

SEQ ID NO: 46127 - protein, 120 aa, Zea mays
  Coding DNA Sequence Number=SeqID_4348
MSGAPEDSDFKLFTFGKFQRRLRYNSPDCPRGNGYFGANGYLRRIKCARCARKGQAPPMLAHRKIYSACPVRPRDIKAGPEVRTPTVGTQRLLVTWLSAPDMSEAVEAEELAACSRAVAE

SEQ ID NO: 46128 - protein, 75 aa, Zea mays
  Coding DNA Sequence Number=SeqID_4349
MGEMRVCGVRGFFFIQPGRAEVDDRLSLLLGTIIRIRIEVSGIGMSVKFYTKRNRCLVTLVLRNTMEILLHGRQR

SEQ ID NO: 46129 - protein, 131 aa, Zea mays
  Coding DNA Sequence Number=SeqID_4350
MASTKDFSSVSAFRLPFVIKFFRDVKLSRLPIASFVFRKLLGDHLVLIQLTYGLLLQKHASDKAFYNTKASWLSLVHTLILQFSWVVAHEHQLETKMEKAYQNEALFCFSQQSARSCMGCTDRWIPGRIRS

SEQ ID NO: 46130 - protein, 144 aa, Zea mays
  Coding DNA Sequence Number=SeqID_4351
MRQKKKKKKNNEEANNKQEDNFVGMWPVTEYYTSMFESGHFPNLLQNALHALGTYVRPLYDTRRVSEPPRACHYMTHVHIKVMDAGDRGFRTLSAHESLTLLCTYSALVSDAARRALWSLSHTYRQHLYNMVYRHLPLRPRGES

SEQ ID NO: 46131 - protein, 148 aa, Zea mays
  Coding DNA Sequence Number=SeqID_4352
  Gene Ontology: Mol. function=metal ion binding; Cellular component =nucleus; Biological process=regulation of transcription
  Homolog annotation: Hit_ID=Q6SRZ8; Match level="QueryCoverage=83%, HitCoverage=76%, E-value=3e-20, Identity=42%"; Hit description =YABBY2-like transcription factor YAB2
  Pfam annotation: Domain name=YABBY; Domain location=1-111; Score =121.5; E_value=2.4e-33; Accession=PF04690.4; Description=YABBY protein
MVSVPGNSMLNIVTVRCGHCANLLSVNLRALMHSLPEQDHQLQENIKVHGINGTLHDDHQYCGHLDQLGSSSSSREEIRRIKANNPDINHREAFSTAAKNWAHYPNIHFGLDDSGREGKKKLVDHEAAASVVAVAAAPTAAKKIQGFY

SEQ ID NO: 46132 - protein, 73 aa, Zea mays
  Coding DNA Sequence Number=SeqID_4353
MTFCAASLRMKGFSNHDSDTEENIKLLLIAFEQVSSLKVNYHKGEVLLRRTIGSGYEPSFRKVKRKTDELLVL

SEQ ID NO: 46133 - protein, 173 aa, Zea mays
  Coding DNA Sequence Number=SeqID_4354
MDSRGSAFAAQHHLPKVECSLQPYVLRMAYAQFKASTAWGKLTNAEAQTRSDEDDAKLSPHDTSSTRTVTGDQPKRPSRTSVDWSRLKVVTQGLSEVTNRGRVSRSKAWSTAMAEESVSLAMTSWGEKMTCGSHIVGTRSLMHGTRVTGPSGPHVGADAELVPYVRGSEGLLG

SEQ ID NO: 46134 - protein, 204 aa, Zea mays
  Coding DNA Sequence Number=SeqID_4355
  Gene Ontology: Mol. function=nucleic acid binding; Biological process= DNA integration
  Homolog annotation: Hit_ID=Q53MZ6; Match level="QueryCoverage=72%, HitCoverage=10%, E-value=3e-21, Identity=38%"; Hit description =Integrase core domain, putative
MWWSCLAEWVLVVCHLGKDPMPVALVPPSLADHGILLVVIAIPPWNRGSLDGGLENTWLIDLGCLHHMIGSSKWFSSLDPVIGKKYITFEDKSRSKVVSRGIIRVNEVTKVITSHPCELLHMDSVGPTQVCSFGGEWYVLVVVVVDDFYCYSWVFFMMANDEAFTHARDLILLLLNEFPKNAMGAIHSDNGSKFKITQFATFCA

SEQ ID NO: 46135 - protein, 322 aa, Zea mays
  Coding DNA Sequence Number=SeqID_4356
  Gene Ontology: Mol. function=oxidoreductase activity; Biological process=electron transport
  Homolog annotation: Hit_ID=Q6YW66; Match level="QueryCoverage=98%, HitCoverage=98%, E-value=1e-159, Identity=85%"; Hit description =Putative Signal peptidase I
  Pfam annotation: Domain name=TauD; Domain location=30-319; Score= -32.0; E_value=7.1e-05; Accession=PF02668.6; Description=Taurine catabolism dioxygenase TauD, TfdA family
MAATDFFFVSECKGQKTIDGEQVPLVLAPSGDDGKSNGYEALVEALKANREWVEAKVVANSGLLLRGFDVRDAAEFNAVVEALGWPDIRYVGPAPRTHVHGRVWTANEGPLEEFIYYHHEMVLIKEFPGKVILFCEVPPPSGGETPFVPSFRVTERALEEFPEMVEELDDKGLRYTFTALSKNDTKSMRGRGWEDAFATSDKAEAERRARALGMDVEWLPDGGVRTILGPRKLTRVFPGRRNRRMWFNTVVGMHGKELSSATLADGSEIPADFVRRCGEIIEEESIQFRWEKGDILILDNLATLHGRRPSLPPRKVLVATCK

SEQ ID NO: 46136 - protein, 129 aa, Zea mays
  Coding DNA Sequence Number=SeqID_4357
MANPIHLYRGGEAGAGIPRLTAIAAKSTQGPPHTDHSPTALAPFRGHRVFRPRRKAEDPNFVDDSEQLPRAPMLALGRDGRERISGWLERATMVAAITANDDHGRSHICAGGNGAAQGEVEEVAELWLT

SEQ ID NO: 46137 - protein, 237 aa, Zea mays
  Coding DNA Sequence Number=SeqID_4358
  Homolog annotation: Hit_ID=Q8W0W9; Match level="QueryCoverage=27%, HitCoverage=22%, E-value=2e-10, Identity=54%"; Hit description =Repressor protein
  Subcellular localization annotation: CTP_CleavageSite=73; ConfidenceScore=5.46e-01
MAMVACAFLVMASASALLHSLQCSYCFANSDAPRTAVAAAKGRRATFLAAATRVSDLVRFAPVSATDPAVRLAAALVSAPVIVVVPEVAVGRFAGLMIATALLGAALRAAGGPALVGVAAAADGPAIVGATAAEGADALGVAAAAESAAALVGAVVADGGAAVEVGGSVVFANATELEIAWVAVVQYAAEVGVVLVVAVAVLVLAPLAWGLRYSSLLEPQQTSFVAQQQLLPLSSQS

SEQ ID NO: 46138 - protein, 775 aa, Zea mays
  Coding DNA Sequence Number=SeqID_4359
  Gene Ontology: Biological process=ripening
  Homolog annotation: Hit_ID=Q6ZA27; Match level="QueryCoverage=76%, HitCoverage=93%, E-value=0.0, Identity=73%"; Hit description =Putative polygalacturonase isoenzyme 1 beta subunit homolog
  Pfam annotation: Domain name=BURP; Domain location=426-639; Score =251.0; E_value=2.5e-72; Accession=PF03181.6; Description=BURP domain
  Subcellular localization annotation: CTP_CleavageSite=28; ConfidenceScore=5.10e-01
MASSPPQPLTRTVLAATLLLLLHNAAARADGASPAVNPFTAKAAFIRYWNRKVPNNRPHPAFFVAKLSPLPAADSASFPSALPDIRASLPALCTKAALLCPGPATTDAASLTSGRRGGGPFKGYNNANFSNYGTGGVAGTDSFQKYSPDLNIAADSFRRYGRDSSGRADSFTSYEADGNVVTANFTSYAGGATGGSGSFAAYAAETNVPDSTFTNYDAAANGRGRSFASYSQEANHGENGFSGYGKNGNGVRETFKSYGNESNVLASGFANYGQSANGATDTFTGYGVEGNVPENRFRSYGAGGNAGVDTFKNYRDDGNVGDDRFTSYAKGANGGAAEFQSYGNSANPGSTIFKGYGEGTNPNHHIGFKEYAGENNTFKGYAKSGVDFKGYHNTTVSSSTAAVLTVSAEAAASMHHEHLKWSPEPGKFFRERELVAGNRMPMPDIRDKMPPRAFLPRAIAARIPFEPNAVSEAFGLPLDTALGKAVASTVAECERAPSKGETKRCATSAEDVVDFAVEVLGDDIVVRSTASTAGGGGRVQLGAVAGVDGGRVTRSVSCHQSLFPYLVYYCHSVPKVRVYEADILAADGSGSGEKINRGVAICHLDTSDWSPAHGAFVALGGKPGEVERISQKQIVPSTASSQRKSEQLVVNHGPWTDDAPVSGGGQEESDAAKKARVRKKRSTAQVPFRMACQFQQWVRFRSRSCHWRGSRKRQVRMIWPSLTTHGMVVGLRTASVCCNVTFGEDLDSSWIGLLELDLEVNALLPSVRIVSTVLV

SEQ ID NO: 46139 - protein, 86 aa, Zea mays
  Coding DNA Sequence Number=SeqID_4360
  Gene Ontology: Mol. function=sequence-specific DNA binding; Cellular component=intracellular; Biological process=transcription
  Homolog annotation: Hit_ID=Q8W0W9; Match level="QueryCoverage=90%, HitCoverage=26%, E-value=3e-36, Identity=94%"; Hit description =Repressor protein
  Pfam annotation: Domain name=CBFD_NFYB_HMF; Domain location=14-79; Score=98.7; E_value=1.7e-26; Accession=PF00808.13; Description =Histone-like transcription factor (CBFNF-Y) and archaeal histone
MDPMDIVGKSKEDVSLPKSTMVKIIKEMLPPDVRVARDAQDLLVECCVEFINLLSSESNEVCSREEKKTIAPEHVIKALSVSIFSS

SEQ ID NO: 46140 - protein, 214 aa, Zea mays
  Coding DNA Sequence Number=SeqID_4361
MNEKVRLHVCTGCNKNSGFKESRVHSVHVAARLDYPLHVHGVEKLRQTTTAGACQWRRCHVAAALERGDQQVAAATATTFSEGTTTWVLALACDDNRYCNLADGEYVLIQEQEAQQEEAQEPALEPVAEEPSATPTFEGKPGFMHNRHICYFTPLNVCSYGGYKCGHCTTAAKVNGALYAKTVYFKTWLMVRLGQPPGWTIEWDATSVGEDQEE

SEQ ID NO: 46141 - protein, 84 aa, Zea mays
  Coding DNA Sequence Number=SeqID_4362
MIVRELDTLWRADKIRARGKQGKSELSVRRELDNPQQGLAGRELRNAEQRLEQGPSSTQGVSRRGGHVWDQGRDDGNWGKKMEL

SEQ ID NO: 46142 - protein, 63 aa, Zea mays
  Coding DNA Sequence Number=SeqID_4363
  Homolog annotation: Hit_ID=Q1RVD4; Match level="QueryCoverage=43%, HitCoverage=7%, E-value=4e-08, Identity=92%"; Hit description =Isocitrate dehydrogenase, NAD-dependent
MRPLTYRRHNEALDVLPPPLWRKPRLCNKLHTTVVHNDFIIFNSRVLLCNLTEWPPLELNMQL

SEQ ID NO: 46143 - protein, 83 aa, Zea mays
  Coding DNA Sequence Number=SeqID_4364
  Homolog annotation: Hit_ID=Q6K988; Match level="QueryCoverage=80%, HitCoverage=8%, E-value=8e-07, Identity=45%"; Hit description =Putative casein kinase I
MGLGLGALLKSGGSRKAGERTSGAAGPSMDKMEKAPGLPYSCKKMRNKSVVQTRHIFVPDLRVGEAFGRRNPSGPVNQTDSYA

SEQ ID NO: 46144 - protein, 176 aa, Zea mays
  Coding DNA Sequence Number=SeqID_4365
MTAPRQRYYESERGDVLLLPTSLDEQQAPALSNARRSLKARRDASAVLEGVSAHEQRDLIDFAPELLDGAEAAATEAMAVASVAESGKERFGLRSLLREGTAEPWSAARSRRELGLGFGEQRRSSERPRDLEREVAMRLMVLGFDSGNGCQHCNHCSGEDEVVEGDFQEFQDYDEF

SEQ ID NO: 46145 - protein, 132 aa, Zea mays
  Coding DNA Sequence Number=SeqID_4366
MTTRRRCADRRREARSSEHDATEGVAAAAALALHRARRGHDARETQVAVAASAGARTGGGAREEELGELCPGAGTRMARAEQRGTASSGTGTVVADRHLCASRENREGARPGISSPSRGCSEGAEGGDKRRI

SEQ ID NO: 46146 - protein, 131 aa, Zea mays
  Coding DNA Sequence Number=SeqID_4367
  Homolog annotation: Hit_ID=Q6YYK5; Match level="QueryCoverage=42%, HitCoverage=4%, E-value=1e-17, Identity=75%"; Hit description =Putative DNA-dependent RNA polymerase II
MAKFWSWVLERQRQTAAPDEKTTSTHQNMFRTLHFKSYKAQVENKEITRRLKHRENINFGKVQSKRGKVDSLDSDGLPYTDNWQLTYTYTDNWPLTYTYTDNWALSLFLGFCFWNSGHYFCFWEHIHNSGH

SEQ ID NO: 46147 - protein, 76 aa, Zea mays
  Coding DNA Sequence Number=SeqID_4368
MASSKDRTDVSPNNIVKLTLENLSTEDHQKFENYKRQLIEEVQARAKFAKSIGYKWALTNPAIIRHANELVHDRTI

SEQ ID NO: 46148 - protein, 54 aa, Zea mays
  Coding DNA Sequence Number=SeqID_4369
MTHGGSRIINPMTADLIMTHTHRVQGEVVAEKTPDDKETLKITIKSDDARGKRR

SEQ ID NO: 46149 - protein, 375 aa, Zea mays
  Coding DNA Sequence Number=SeqID_4370
MGECFEVFAADLAETCDPDGSAHDIVAETAEYSVDLVTEDKLGKDLIPMKVGTGSTKQWVVWEASAVCDCEDVELALMAWVLLIFPYSHNVTPEFKGISIVSLPQKADDGTDPAAAEGSGEPISFRDKAPRAILRASTRITKQMRIVRGEGSAWLARPRRLRHAHNGLDEDNVDFRRVADKRDPHRSDIGCARDAFGFDTGPSVGAEARGSNLGRLGVEWAEGALVADFVLLHLATIIDALAPLAEMWEAVAAVRAECLAVKDELKQKKRQATEFEQRAKSAKAELGFLKKQLDETTIELSAEHLGSEGFTLSVRCMHKIFSMISAEYRDHMALGYNQRAKTFSALVTYESGFESLIHEGCDHMSRLTSAEFEDR

SEQ ID NO: 46150 - protein, 123 aa, Zea mays
  Coding DNA Sequence Number=SeqID_4371
  Subcellular localization annotation: CTP_CleavageSite=57; ConfidenceScore=5.05e-01
MQPTVTLSNCKEAPTWIRGFKGVYEFITLRRSSSRRWRSSSRLDWLQQTADTTRPVSSTTLPAGLVTLELMAEEGVAGGRFYTPVRVESEAALIGRTDQSGEFRAFRWDRREEEDIPDRWAHM

SEQ ID NO: 46151 - protein, 568 aa, Zea mays
  Coding DNA Sequence Number=SeqID_4372
  Gene Ontology: Mol. function=translation elongation factor activity; Cellular component=intracellular; Biological process=translation
  Homolog annotation: Hit_ID=Q6KA61; Match level="QueryCoverage=97%, HitCoverage=89%, E-value=0.0, Identity=87%"; Hit description =Putative GTP-binding protein typA
  Pfam annotation: Domain name=Dynamin_N; Domain location=9-148; Score=- 41.6; E_value=0.04; Accession=PF00350.13; Description=Dynamin family
  Pfam annotation: Domain name=EFG_C; Domain location=413-502; Score =98.6; E_value=1.9e-26; Accession=PF00679.14; Description=Elongation factor G C-terminus
  Pfam annotation: Domain name=GTP_EFTU; Domain location=21-216; Score =228.4; E_value=1.6e-65; Accession=PF00009.17; Description=Elongation factor Tu GTP binding domain
  Pfam annotation: Domain name=GTP_EFTU_D2; Domain location=237-307; Score=48.6; E_value=2.1e-11; Accession=PF03144.15; Description =Elongation factor Tu domain 2
  Pfam annotation: Domain name=MMR_HSR1; Domain location=24-149; Score =19.1; E_value=1.8e-05; Accession=PF01926.13; Description=GTPase of unknown function
  Pfam annotation: Domain name=Miro; Domain location=25-149; Score= -8.8; E_value=0.039; Accession=PF08477.3; Description=Miro-like protein
  Pfam module annotation: Pfam domain module=Dynamin_N::EFG_C::GTP _EFTU::GTP_EFTU_D2::MMR_HSR1::Miro; Domain location=9-148::413 -502::21-216::237-307::24-149::25-149
MAGTTFGSDTKSGKSSQATRRDVRNIAIVAHVDHGKTTLVDSMLRQAKVFRDNQVVQERIMDSNDLERERGITILSKNTSITYKGTKINIIDTPGHSDFGGEVERVLNMVEGVLLVVDSVEGPMPQTRFVLKKALEFGHAVVVVVNKIDRPTARPEFVVNSTFELFIELNATDEQCDFQTVYASGIKGKASLSPDNLADDLGPLFEAILRCIPEPRVEKDGALQMLVSNTEYDEHKGRIAIGRLHAGELQRGMEVKVCTPDDACRVGKVSELFVYQNFSRAPVESVSAGDICAVCGIDDIMIGETIADKVTGTPLPTIKVEEPTVRMSFSINTSPFVGREGKYVTSRNLRDRLYRELERNLAMKVEDGETADTFLVSGRGTLHLTILIENMRREGYEFMIGPPKVINKTVDGKLLEPYEIAAVEVPEESMGSVVELLGKRRGQMVDMEANGTEGTTLLKYKIPTRGLIGLRNAILTASRGRAILNTIFDSYGPWAGDLSSRDQGSLVAFEDGSTTSYALLNAQERVVLDEPLSYSLDDCIEFIQEDEIVEVTPASIRMCKNPKVSKKK

SEQ ID NO: 46152 - protein, 102 aa, Zea mays
  Coding DNA Sequence Number=SeqID_4373
MESSAKNKASTPTLTVHKVQYKPMNIQVRDPIQKEQKGLECVVVWRTGLSGVPPDTVRCTRTVQGPTSHSRENSGALHYNSPDCPVCQRATAIQHATVDSDG

SEQ ID NO: 46153 - protein, 90 aa, Zea mays
  Coding DNA Sequence Number=SeqID_4374
MVAGSIWSPSARYGRPTAGGGFRGGEVTGEATQCDGGGKNGVSGPWGGGEAHELTQLNPRLLERGGRLSGAQEGSSGVGSIELGGGVRGG

SEQ ID NO: 46154 - protein, 489 aa, Zea mays
  Coding DNA Sequence Number=SeqID_4375
  Gene Ontology: Mol. function=protein serine/threonine kinase activity; Cellular component=membrane; Biological process=protein amino acid phosphorylation
  Homolog annotation: Hit_ID=Q5NAH9; Match level="QueryCoverage=78%, HitCoverage=56%, E-value=1e-174, Identity=77%"; Hit description =Protein kinase CDG1-like
  Pfam annotation: Domain name=Pkinase; Domain location=64-309; Score =96.2; E_value=1e-25; Accession=PF00069.15; Description=Protein kinase domain
  Pfam annotation: Domain name=Pkinase_Tyr; Domain location=64-309; Score=62.5; E_value=2.6e-16; Accession=PF07714.7; Description =Protein tyrosine kinase
  Pfam module annotation: Pfam domain module=Pkinase::Pkinase_Tyr; Domain location=64-309::64-309
  Subcellular localization annotation: CTP_CleavageSite=33; ConfidenceScore=5.49e-01
MMLFVSPPFNDCIGNAGPVSAMVGNRLESRPISASPSFSSSLVAYKGSAKTFNLVEMERATLGFDESRIIGEGGFGRVYEGILEDGERVAIKVLKRDDQQEGHSRCLVYELVPNGSVESHLHGSDKGAAQFDWNARLKIALGAARALAYLHEDSSPRVIHRDFKSSNILLEHDFTPKVSDFGLARTALGEGNEHISTRVMGTFGYLAPEYAMTGHLLVKSDVYSYGVVLLELLTGRKPVDMLRPPGQENLVAWAGSLLTSRDGLESIIDHSLGRSIPFDSIAKVAAIASMCVQPEVDQRPFMGEVVQALKLVCNEGGEFNESTFSQDLHIQDVEVMSRASTDVDVDPTLSAELFTSSARYDAIDAPGSFRRYSSSGPLRVGRTGLNKERGLSTGSSSMTVGADGGSSVECTHRASIRFGSLDFTIGRESNTVRVLVRPAPSESLDAILAALSTLSLATRMRCMRPRSTSPSEADKKGDRLRFTCAKSLI

SEQ ID NO: 46155 - protein, 92 aa, Zea mays
  Coding DNA Sequence Number=SeqID_4376
  Subcellular localization annotation: CTP_CleavageSite=34; ConfidenceScore=5.45e-01
MSTPIAAPRWMLRSTTFRTRLGMSSRRYTRVAPRAQMLWVTESTSQHSSANLVSCHVQKTKRNISFDAPERQKGIQKQGEWHTRRTGLHDGQ

SEQ ID NO: 46156 - protein, 55 aa, Zea mays
  Coding DNA Sequence Number=SeqID_4377
MARKYSILVVTHLKIEFDFSPSLDEVDLFSSGLGLIDSWIRWIHKDKIESFEMQL

SEQ ID NO: 46157 - protein, 117 aa, Zea mays
  Coding DNA Sequence Number=SeqID_4378
MTAWNHITILPACLGTITMTRVEHARFTKLAEPGAKPAVNRPEPAINRDWHKLVILFATNVLYTCIIFATFVGDMLDLDRDTEREREKYRIWIHGEKVGAGFKCKYCRETKSGGGGT

SEQ ID NO: 46158 - protein, 172 aa, Zea mays
  Coding DNA Sequence Number=SeqID_4379
MEALNASWNGLLALVLNVEGGNEIDGSGYDYGAGKWYSFRLERVVSIATTAQEKMKLWKETSRSSKTTTSSRRGLAATPSRLPVKAVVIYVSFSHFDLLWLVLDTLHESLSSPSYPPALLSVRFVVPWPDSPATWSGCTTACMRSRSVDGRSRSVDGRSRSSRALLSRSTRR

SEQ ID NO: 46159 - protein, 56 aa, Zea mays
  Coding DNA Sequence Number=SeqID_4380
MRFVQNAVTGSSHIDRSNHRLSDEANGPLRKNAQSGRERPARCRFSPMFVGRAGWF

SEQ ID NO: 46160 - protein, 519 aa, Zea mays
  Coding DNA Sequence Number=SeqID_4381
  Gene Ontology: Mol. function=DNA binding; Cellular component=nucleus
  Homolog annotation: Hit_ID=Q23DH5; Match level="QueryCoverage=22%, HitCoverage=25%, E-value=1e-08, Identity=29%"; Hit description=Myb -like DNA-binding domain containing protein
MSVNFLVFLGSSKEATERVSRTEYTEGKAVMSNKEEKECQMTKEEKRRKKREKHKDMGQSGDYEGKAVMSNKEEKDCQVTEEEKKRKKGKKHKDKGQGSNSDSSCARNHSIEMEQADVSAKMAEDSCLEHAEAVTSKSSAKKHRKKKRKDKEVETIGQKQILDADENVGSEDTKRNSREREHDRKSKKHKRKHQDDETASNGSSGNQIVLGEDKRTEKEYLVTLDLEEDNKSDMSKIGKKTDSKKKRRKERNDGVDLRQNTLVGEGKNGKNNKEKKMCEDENGGGEREKENMGKQKDKCRRVSFTDHVEVFNIGGSDDVEGDGSGETELVHGRRFSPEEDAKLMEAILKYAELKQLGEKGLQMIGESNKHPETRGCWAEIGKALPHRPKKAKYARGKVLLQRSAERKWTAEEYEIIRRFVEKNGRNWKVLAKELGKSEIHDPDSCRNILDPYFLKKCFRGKGQTQCWMLLHKWGLRRDKSVQVFPRKCGEAALNPRFGDSVKQLSTLHHACTSYTKKDK

SEQ ID NO: 46161 - protein, 57 aa, Zea mays
  Coding DNA Sequence Number=SeqID_4382
MAHQRCPACALLRLVLVQAAARPHSSVHYFRLLDDEEEEPEAEREEEKDEDEIEESD

SEQ ID NO: 46162 - protein, 504 aa, Zea mays
  Coding DNA Sequence Number=SeqID_4383
  Gene Ontology: Mol. function=transcription factor activity; Cellular component=plastid; Biological process=regulation of transcription, DNA-dependent
  Homolog annotation: Hit_ID=Q9ZTI3; Match level="QueryCoverage=78%, HitCoverage=98%, E-value=1e-178, Identity=81%"; Hit description=RNA polymerase sigma factor 1
  Pfam annotation: Domain name=Sigma70_r1_2; Domain location=190-222; Score=10.1; E_value=0.039; Accession=PF00140.10; Description=Sigma -70 factor, region 1.2
  Pfam annotation: Domain name=Sigma70_r2; Domain location=265-335; Score=74.1; E_value=4.5e-19; Accession=PF04542.4; Description=Sigma -70 region 2
  Pfam annotation: Domain name=Sigma70_r3; Domain location=339-419; Score=67.3; E_value=5e-17; Accession=PF04539.6; Description=Sigma-70 region 3
  Pfam annotation: Domain name=Sigma70_r4; Domain location=438-490; Score=35.6; E_value=1.8e-07; Accession=PF04545.6; Description=Sigma -70, region 4
  Pfam module annotation: Pfam domain module=Sigma70_r1_2::Sigma70 _r2::Sigma70_r3::Sigma70_r4; Domain location=190-222::265-335::339 -419::438-490
  Subcellular localization annotation: CTP_CleavageSite=74; ConfidenceScore=5.29e-01
MTATPAVIGLSAGHRLLATSFGSPDLASPDAHSSLQFAAAAPKLTVVAHRAPASSSSSSPPNVGRGSSAAGHARARAIRALRNHSAPALATPPPPPLPADPTPDLDSEFESSLEAIVLLQRSMLEKQWELPFEDDIISTDDEQDDRVSKATVVAARSGVSARQRRMSGRRRGAGRKSVAISPELMQSRNRIYLRGTVSKDLLTHKQVIQLSRKIKDGIWLQHQRSKLKEKLGNEPSYKQLAQSLRISAPELRARMRESFLAREMLTMSNIRLVISIAHKYDNLGVDLADLIQGGLIGLLRGIEKFDASRGFRISTYVYWWIRQGVSRALADNSKTFRLPTYLHERLIAIRGAKYALEDQGIAPTIENIAESLNISEKKVHNATEAVNKVLSLDQQAFPSLNGLPGDTLHSYIEDQNVANDPWHGFEEMYLKEEVNNLINSNLNERERDIIRLYHGIGKQCHTWEDISRQFGLSRERVRQVGLVAMEKLKHAARRKHLDALLEDY

SEQ ID NO: 46163 - protein, 237 aa, Zea mays
  Coding DNA Sequence Number=SeqID_4384
  Gene Ontology: Mol. function=kinase activity; Cellular component =nucleus; Biological process=protein amino acid autophosphorylation
  Homolog annotation: Hit_ID=Q9FHI1; Match level="QueryCoverage=86%, HitCoverage=96%, E-value=1e-112, Identity=93%"; Hit description =Arabidopsis thaliana genomic DNA, chromosome 5, P1 clone:MFC19
  Pfam annotation: Domain name=Mob1_phocein; Domain location=51-227; Score=397.5; E_value=1.9e-116; Accession=PF03637.7; Description =Mob1phocein family
MDHGFQPGARLHPPRVLPRLAVPAHAASDENQKTFRPKKSAPSGSKGAQLRKHIDATLGSGNLREAVRLPPGEDINEWLAVNTVDFFNQVNMLYGTLTEFCTPESCPTMTAGPKYEYRWADGVQIKKPIEVSAPKYMEYLMDWIEGQLDDESIFPQKLGTPFPPNFKEVVKTIFKRLFRVYAHIYHSHFQKIVSLKEEAHLNTCFKHFILFTNEFGLIDKKELAPLQELIESIIVPY

SEQ ID NO: 46164 - protein, 51 aa, Zea mays
  Coding DNA Sequence Number=SeqID_4385
MHLEEEIEVEVEAKPTPQSEVSPAEGLSEGPPEGAPFGFAANYDILVVGVE

SEQ ID NO: 46165 - protein, 226 aa, Zea mays
  Coding DNA Sequence Number=SeqID_4386
  Gene Ontology: Mol. function=RNA-directed DNA polymerase activity; Cellular component=integral to membrane; Biological process=RNA -dependent DNA replication
  Homolog annotation: Hit_ID=Q1ENY0; Match level="QueryCoverage=40%, HitCoverage=31%, E-value=2e-37, Identity=77%"; Hit description =Oxidoreductase, 2OG-Fe(II) oxygenase family protein
  Pfam annotation: Domain name=2OG-FeII_Oxy; Domain location=78-185; Score=27.2; E_value=5.9e-05; Accession=PF03171.10; Description=2OG -Fe(II) oxygenase superfamily
MAFNWSTLDYIPYYLSHLEAPFTDQEITDLIKALPASRSPGPDGFIGIFYKNCWEIIKVDLIKALQDFHNHKTSKLHLANEAHIVLLPKKEGATEFSEFRPISLINSLAKIITKVLADRLAPMLDKLVQNRSGEWIYATPIPGTFVCNIGDMLKVWTNGIYQPTLHRVVNNSQHYRVSVAFFYESNFDAAVEPVEFCREKTGGAAKYEKVVYGEHLVQKVLTNFVM

SEQ ID NO: 46166 - protein, 322 aa, Zea mays
  Coding DNA Sequence Number=SeqID_4387
MARTLRRRCHGTAADYTIKNLRLVYRKDVAMECRYVDEFIALANATKLELAPHMGAESFSSSLVADAAGDWSVELPPATVELEVQPFCFAVRPPRIHGPGVNVLRSLTLHGHTVVRKDFPLAVTVFPSLEDLHIGNCTLAASMTISSDTMPRLKHLRFTEVSVSADDTKAAITVLADDLRTLRMSCRRCSYTVSPSEPLMFTCGGHGSALFTKYSLFHLRAPKLAVFEWRCCYADEVRVDAVGRLSDVAIEIAAGRTRTRVPIGMEPKFVTVQQRDKLMTDILQELMPGLQPRTWKDITRQCMQRDERWLCFEVTDGYPATE

SEQ ID NO: 46167 - protein, 63 aa, Zea mays
  Coding DNA Sequence Number=SeqID_4388
MTRVGRRFVVGFAGLRIPAVGGRALSVIGVDELGGGERRQDEAHMRERTTNPEKAGLDPHLEA

SEQ ID NO: 46168 - protein, 646 aa, Zea mays
  Coding DNA Sequence Number=SeqID_4389
  Gene Ontology: Mol. function=translation initiation factor activity; Cellular component=nucleus; Biological process=regulation of transcription, DNA-dependent
  Homolog annotation: Hit_ID=Q1PEV9; Match level="QueryCoverage=75%, HitCoverage=76%, E-value=1e-50, Identity=32%"; Hit description=RNA polymerase I specific transcription initiation factor RRN3 family protein
  Pfam annotation: Domain name=RRN3; Domain location=4-494; Score =198.4; E_value=1.7e-56; Accession=PF05327.2; Description=RNA polymerase I specific transcription initiation factor RRN3
MGAEQGYEDMQGTFRDSEVFEFVGKVLQSVRMDPFLIDIRDKDYYDYMLGIIDPTKKRSTDDEAMFVAAVADQYLRECLQMLVNNFTPPGPLIRYIEEPRWLPKKEKIYSQLQESLKMISDTVPLAPRMLKDIIDRSMPKLFDSKAKMVSFVKCMLGLDAVVWDIIGSSLLEKVVYLLTELDVNITWEDILQDEHNKGIFDMELEDLAEDEDNLGQEGTKVHFGGNMCAEKLDGLMVVVCEHLKSRVEEPERLIKWKLSGPPGQPKPQGNVRGTVLSGSQGLNQEFVTLKAIFKSHVLRVHKSKFAQFIMFYACSLHPEIGDGFANFLTDIFIDKDKNEDAITRLVDWCDYYCGHQLDNGVTANPIKHQLFYASCQAVMYVLCFRLRSIMDYPNLKQQLFRMRIRDILVHPLQPLKVCLPSIVNEFLRQATAASLFHAPAISMHEDAVESDLSKAFGGLNRLDMFFPFDPYLLKESDRYIRPNFEFWSLVKTTYSNDNSDEDDEELGDIDAPGMNVGSLDDHFEIDFNSDDDIEYKMNKMSITPQRTFYHPLATNSKTTLCCPVHAEVSSNLANTSTHLHRMPFLYLERLSKHATNMVDRCDRCRGLTHYGSRHRIGTHLGNSDLQGPVIVYGFQCNIALKAMVMI

SEQ ID NO: 46169 - protein, 154 aa, Zea mays
  Coding DNA Sequence Number=SeqID_4390
  Homolog annotation: Hit_ID=Q1S124; Match level="QueryCoverage=40%, HitCoverage=8%, E-value=2e-13, Identity=53%"; Hit description =Trimeric LpxA-like
MAYCDGKCNLLRLIAWYCDILKAEDCDYVVVYGFSLPAAESDYIRGVAASHQSPTSAEPFASTVATPEKKPYPPATVAEEIKANIITLVIEVFTYSLYMQKVKSENRWHTLRLYTSHWAPERWQEYEPLWNYCRDNGIKLVACGTPLEAYWSHE

SEQ ID NO: 46170 - protein, 219 aa, Zea mays
  Coding DNA Sequence Number=SeqID_4391
  Homolog annotation: Hit_ID=Q6QP51; Match level="QueryCoverage=38%, HitCoverage=43%, E-value=5e-09, Identity=48%"; Hit description =Putative growth-regulating factor 1
MAPPCDVVGPSPGSGEAVAPLRSRSSLSSEVEVEFELRVGRGGDHRLRPRLSPSPGVRRGGVRRLPESRPSPSPGGRVRRSSSSSGAKAESEPWVGRGGVRRLPEPRLSPSPGSGEAEFVVRGRDGSRALGSGEAELPMAPEAGLGCCQPHSVEWHSSRSDAGDAVLLSGRSVKRRSYCGHFGSVDWRARVRIRCQAILPHNVLRYGRRVRSGQVLCKD

SEQ ID NO: 46171 - protein, 296 aa, Zea mays
  Coding DNA Sequence Number=SeqID_4392
  Homolog annotation: Hit_ID=Q6QP51; Match level="QueryCoverage=60%, HitCoverage=98%, E-value=1e-18, Identity=40%"; Hit description =Putative growth-regulating factor 1
MTASKKVRHVVRFRIFSLFLFLSLATGTGKGDTPKGILLREGNGPRAPLLIRGLKAGPSEGFNSRLRALRLCAHYWSEVRRLAPRKGSMAASDHSGSAPTTDQGFVGWPPKGSTAASDAERGMTLEDSAACAAPTAVPLDRVRQTAAKSGFGRHRKLRLARPQGSAPVSASDDELRLARPRARTQPRLQKTTNSASPDPGLGLSLGSGRRRTPPRPTPRAQTRPRLRKTTNSASPDPRAWTQPWPQTMVSASPDPGLGLDLDLGRQTRPRPRRSHRLARPGARTDHVTGGPSLSYA

SEQ ID NO: 46172 - protein, 105 aa, Zea mays
  Coding DNA Sequence Number=SeqID_4393
  Subcellular localization annotation: CTP_CleavageSite=32; ConfidenceScore=5.40e-01
MAAFSRTTGSDIVGNCAIAKRLTRPSTASTLRSSLRSDQCYSNRIRVQSEECATFVIENIVGDYFQPKKPTDSTFWHTTFTLRKTSFISINFNLIYSNVRRMSMS

SEQ ID NO: 46173 - protein, 432 aa, Zea mays
  Coding DNA Sequence Number=SeqID_4394
  Homolog annotation: Hit_ID=Q94EG1; Match level="QueryCoverage=15%, HitCoverage=17%, E-value=4e-22, Identity=75%"; Hit description =Putative aspartate aminotransferase
MGSFVKLARRAVETDAPVMVKIQELLPGAMDVMSLAQGVVYWQPPASAMAKVEKIIREPTLSKYGSDDGLPELREALLEKLRLQERDTKIISCIIQHLALVMITLANNYSYLFVYNSNQRGIQKYAFNHYLQPSDRKHMESVGEEMEQRRRELRLFANTAFMLCDFEAFKALTSNYLGLKDHKLYSQVEEGFHAAGARLSPAELGEIMLANRASPSRASPQLDHQAPAHLELMPAIINASEVQMSNSDGLTLVRQFNSYRQIRTLRKKLQQIEILEAKQLASHHLDNQQKRHHGASVRPNTRTSSFSIPPHGGALEVNGDAKDNVPNRWFRPEIDAPCPRSPPTLSRIPDLGAGYERLHALLQQREQLVSIPSSSLEIVPVPPVNELVPSVECAAELVSTLSPPRKLRRAVKKITPKEKIQAMYNCNLVPEI

SEQ ID NO: 46174 - protein, 120 aa, Zea mays
  Coding DNA Sequence Number=SeqID_4395
MEEVRILKRGEEPPTPAPSPAPMLVIAAPPVAQTAVVDQRAICSTGRIGPQTPAVVPTKKIVSPPAASPAEVEAGGGICGIRVRVDGGGGRLTGWRERLSWRRFWRANGTNPKTTKLSKG

SEQ ID NO: 46175 - protein, 75 aa, Zea mays
  Coding DNA Sequence Number=SeqID_4396
  Homolog annotation: Hit_ID=Q6YWH9; Match level="QueryCoverage=47%, HitCoverage=2%, E-value=8e-10, Identity=88%"; Hit description =Putative myosin XI
MEERRLLKIRRLRRPPCPSVVYLQGMLITSYAGSHRIQDAIFRVVDAILHLGNVEFSEGSEANSSVPKDDKSQIT

SEQ ID NO: 46176 - protein, 910 aa, Zea mays
  Coding DNA Sequence Number=SeqID_4397
  Gene Ontology: Mol. function=nucleic acid binding; Cellular component= nucleus; Biological process=mRNA processing
  Homolog annotation: Hit_ID=Q6ZA70; Match level="QueryCoverage=82%, HitCoverage=85%, E-value=0.0, Identity=58%"; Hit description =Putative RNA-binding region RNP-1 and Splicing factor PWI family member protein
  Pfam annotation: Domain name=MAP7; Domain location=385-544; Score= -84.8; E_value=0.1; Accession=PF05672.2; Description=MAP7 (E-MAP-115) family
  Pfam annotation: Domain name=PWI; Domain location=804-875; Score =123.0; E_value=8.6e-34; Accession=PF01480.8; Description=PWI domain
  Pfam annotation: Domain name=RRM_1; Domain location=218-289; Score =47.1; E_value=5.9e-11; Accession=PF00076.12; Description=RNA recognition motif. (a.k.a. RRM, RBD, or
  Pfam module annotation: Pfam domain module=MAP7::PWI::RRM_1; Domain location=385-544::804-875::218-289
  Subcellular localization annotation: CTP_CleavageSite=58; ConfidenceScore=5.51e-01
MAAVAPPPDNMDPPPATPPAATPAATLTPPPAATSTPPNPATPGPAAPSPNPNLPPAPASAPPAAFAPPMPPAPVSFAATFRPLGAPAPPPPHQVPQYGALPPNPGYPMPPPMQPPGVPVVMPPGSVRPPVMYGPPQPGAYMPQQGAAVPHPGMPRYPAPYPMVRPGFVPRPMPPPGVVTIQRPPIISGIRAIPPLVALTARPPPPAVMLADKPPTAVYVGKIAPTVDNGFLLSLLQLCGPVKSWKRAEDPSNGKPKGFGFCEFESAEGILRATRLLNKLSLDGQELVININDATKEYLKKHVEEKKRAQVKSKDASGDGTTAVAENESSKSVPDESDKETGDAGDKDSDESTKKFGIVTDEDSQADKDVAEKISSMIEQWLKTRPPPPPPPVQPSADSSGVDKAKNDSADKTDADTVKRAVNETERSETASPDRRKDREHDKDKRDKDIERHDRERERERIRRDREKDHKHREVDRLYRDRLKEWESREREKEYQRYSEKEKEKDREHNRRREILKQEDESDEEDNRKRKRRSSSSLEDRKRRRQREKEEDLADKIREEEEIAEARRRAVELQQQADEAAAAAAAAAEESATLMEVDADDEKETDAQNEPSVVEADNIPSFANSVGAGGLGKENNSEEISMVPSHTKQNNNVPVKKLGFGLIGLGKRTSVPSVFAEEDDENNVDKSIRPLVPIDYNEELQAVQANSSTGANVAAAAEFAKRISVSNSKEEKADTEKDRNRRSSEGRPSDERREKLHDREKDKSKSENKKILDAKQLIDMIPRTKEELFAYDINWVIYDKNELHERMRPWISKKIIEFLGEEESTLVDYIVSCTKDHVQAEKMLELLQSILDVEAEMFVLKMWRMLIFEIKKVESGLSGRANSHASTAYSCSLVNDEECRRLAVVASINP

SEQ ID NO: 46177 - protein, 235 aa, Zea mays
  Coding DNA Sequence Number=SeqID_4398
MTNLKMKSIVKDINVILRRLHPVPINRYNLRGILFVAFIRSSLNPWGYNASANEGQHLEDAVVRSSLHAGTSYTIVSADSCTRAGTLRYDAHYALLLLPFLLWLDRRVEEKQASTANGQKEKGGDIASVADPKVSAQMPVRLLAQLAIYSGSVTMYPTFVIKTFSSRMTVSACFEKERTYITQLNVRFPLGQLDLHQLSLLTDADKGNGDKYTDFSYEIHMVVRTKSLFTHNLTS

SEQ ID NO: 46178 - protein, 118 aa, Zea mays
  Coding DNA Sequence Number=SeqID_4399
MAVEEGCAKGHARRERLAATVATCPEGSTPPSIAESKSRRSQGSDLWAKASRAFRGARLHPTTVLSSRHTSQPKGPNTSYKKASTWESQLKTNSNYEPVGHLFSNVVSQEPGNTFVKY

SEQ ID NO: 46179 - protein, 317 aa, Zea mays
  Coding DNA Sequence Number=SeqID_4400
  Gene Ontology: Mol. function=oxidoreductase activity, acting on single donors with incorporation of molecular oxygen, incorporation of two atoms of oxygen; Cellular component=cytoplasm; Biological process=gibberellic acid mediated
  Homolog annotation: Hit_ID=Q7EYC9; Match level="QueryCoverage=91%, HitCoverage=93%, E-value=6e-79, Identity=52%"; Hit description =Putative 2-oxoglutarate-dependent dioxygenase
  Pfam annotation: Domain name=2OG-FeII_Oxy; Domain location=157-256; Score=62.6; E_value=1.3e-15; Accession=PF03171.10; Description=2OG -Fe(II) oxygenase superfamily
MEIATVDLRGVVPGGAGWEAARAAVTASMVAHGCVVVAHDAVGADLRQALFSRALPELFALPLEAKQRTVSPNGEFRGYIGQRPGMDWESLRVGKPTDAASVSGFAETLWPEGNPEFCDTIVAFAENMMELEGTVETLVLEGLGARGQSIRAHFGSLDHAVRLSHYGVPPDTESSMSMQPHYDDSVVTAIVQHEVEGLEMHAGDGRWVAVPAEVGTLTFVAGEQFRVVTNGRVPACLHRVRTPSNRERFSVLFGRRQKDGVAVRAMEDLVDAEHPLAYNPLRHEEYSRWRVTPGFRRQTECEPCTCQDQLFTYTAVT

SEQ ID NO: 46180 - protein, 82 aa, Zea mays
  Coding DNA Sequence Number=SeqID_4401
MAAPEPSHGRAIAGGARQCPRGCRGHGFILRGELGQTARQVREILRGFRGGLVKHPRRISVIQRRQQRSSVSFAREEDGDDR

SEQ ID NO: 46181 - protein, 82 aa, Zea mays
  Coding DNA Sequence Number=SeqID_4402
MAAPEPSHGRAIAGGARQCPRGCRGHGFILRGELGQTARQVWEILHGFRGGLVKHPRRISVIQRRQQRSSVSFAREEDGDDR

SEQ ID NO: 46182 - protein, 124 aa, Zea mays
  Coding DNA Sequence Number=SeqID_4403
  Subcellular localization annotation: CTP_CleavageSite=40; ConfidenceScore=5.60e-01
MAHRDGFSPSVSPDPRRQFPTAHRNRWGRRTGTRSTRRAPASSGRPVGPTLVPQIADIGVEVELGSGCANHAKLVTVRLGKNPTGGPSMPVEGGIGARGGVRFTEDRTVGPKGSERGSAGDRWA

SEQ ID NO: 46183 - protein, 72 aa, Zea mays
  Coding DNA Sequence Number=SeqID_4404
  Gene Ontology: Mol. function=catalytic activity; Biological process =metabolic process
  Homolog annotation: Hit_ID=Q2QX58; Match level="QueryCoverage=75%, HitCoverage=7%, E-value=2e-12, Identity=65%"; Hit description=AMP -binding enzyme family protein, expressed
MTKVVVNEFTGGPSTDEGPQQPAGKQARLEKFTILSKIKMTLEPWMPESGLITTTLKLKREVIKKAYEVDLA

SEQ ID NO: 46184 - protein, 37 aa, Zea mays
  Coding DNA Sequence Number=SeqID_4405
MAIGFKVVSTKGEGGHARRFYIRGQIPFPNPQLVQVS

SEQ ID NO: 46185 - protein, 356 aa, Zea mays
  Coding DNA Sequence Number=SeqID_4406
  Gene Ontology: Mol. function=transporter activity; Cellular component= membrane; Biological process=oligopeptide transport
  Homolog annotation: Hit_ID=Q53L71; Match level="QueryCoverage=88%, HitCoverage=59%, E-value=6e-78, Identity=42%"; Hit description=POT family, putative
  Pfam annotation: Domain name=PTR2; Domain location=9-307; Score= -23.7; E_value=4.8e-05; Accession=PF00854.12; Description=POT family
MRSCPESGRLVVASASGGQKPPRISTKQAQCHTRLLRLPFGVDQFTHWSGAPKDRALKVLFGWYYVSMGGSAIISITLIVYLQDKLGWKIGFAISMVIAAFAAILNIVTSPLYIKVKPQKSTWISLVQVVFIAIRNRHIQLPKAAGENDLHYCNVGGLAMVPSSKMRVLQAETMDRHVGSTRFQMPAGSVAIFEGITFTLVSGCITGREKTLSHKQKMGIGVLFSIACALSASVVEAIRRKQATRQGLENNTDDGGVVNMSVLWLAPQCVFAGLISAFGSIGQIEFYYEVLPKSMSSLALALLPLAIGVANIASTVVVKLVKVITCSGGRVGWLLDNLNQGHYDYFYFVLAMLGIA

SEQ ID NO: 46186 - protein, 138 aa, Zea mays
  Coding DNA Sequence Number=SeqID_4407
MVILKVRHHLYDGHHLFRIKQQQTLGPSRDEQYLGFGSASWTATVRDGSPGRLAVLVAAVQTICDSGLDGPQPCYRSGLLCALSRTVRALGWTVYDAAGSYTFSSYDLDPAPCGRDHRVLRVSRSPGASLEDVESHRT

SEQ ID NO: 46187 - protein, 133 aa, Zea mays
  Coding DNA Sequence Number=SeqID_4408
MGETPNERTHRELRNSRRRDRLQVQEHEREQAEQDARLQRENLLLTRNLYPDFAWVLNTPRKSWDLKSIKCQNDDTLHLFLGRLQMMRNRIPEVAEAAMTEDFYRGSKDSAFVRVILQKAPATSKQLFREVDV

SEQ ID NO: 46188 - protein, 103 aa, Zea mays
  Coding DNA Sequence Number=SeqID_4409
MARDCGAAIHGTNAPAAFIASLGLCGYPRVCIWGCGPPVGMLAGEPQSRFGVAPLLRPTEKGVNPVAQKEPYPFGHAYLRKSPPGILDLTRSPALLCSMSWEN

SEQ ID NO: 46189 - protein, 51 aa, Zea mays
  Coding DNA Sequence Number=SeqID_4410
MEKVKRTEVPKAKVKKRFLQEVKVDHAKKRHDQAFGVHTIQRGRRSADVLL

SEQ ID NO: 46190 - protein, 644 aa, Zea mays
  Coding DNA Sequence Number=SeqID_4411
  Gene Ontology: Mol. function=metal ion binding; Cellular component =integral to membrane; Biological process=translation
  Homolog annotation: Hit_ID=Q1SFQ3; Match level="QueryCoverage=51%, HitCoverage=58%, E-value=3e-70, Identity=42%"; Hit description=Zinc finger, RING-type; Protein kinase PKN/PRK1, effector
MVVAASPEFDSKLLQTPCCILCFPFWQLDFAVLKYKNQKLAEQLEVHKFEFCALESRFNDLKEKQRTHNKTLVLVKSYWERLIADLGIVSVCKNESSRSSCSTGNNNIRKETDFLNGLLEAGATESSGSPNCQLGNDVSSEQSTTIDILQKLFLPSSGPWHVNNEFVSAALMKLPENEHSRQLHNATSDVLSKLHVVMRTVDNLHLKHRQLAANYQKQRDSSAWNRAEQKRLKEELTSVVAKLEGSKQKLAVLKAQGDNKQATPILVPTLGNKNMTAEKVRDKQTELQDLEATHKELMDARCVWTFKIDTYKYEQELISKRLEEIRRLHTERIEILNKLATFQVEMDTFVWRERQFNQKVDLAEIPQKVSAYCVSRIADLEKDVQKLCNEKNMLVLKLEEASREPGRNQVISEFKALVSSLPREMGAVQSELSKHKDASLQLHSLRAEVHSLSSIQTRKEQEIEEMSFRSAHAGSDISQLQSLVRELRENTQELKLFVELYKHESTDSRQLMESRDRELAEWARVHILKYSLSESKLEQRVISANEAEAISQQRLATAEAEIAELGQKLETSRRDLVKQSDILKSKHEECEAYVVEIESIGHAYEDIMSQNQQLLQQIIERDDHNTKTFSRKAQENCARYIKKV

SEQ ID NO: 46191 - protein, 227 aa, Zea mays
  Coding DNA Sequence Number=SeqID_4412
  Gene Ontology: Cellular component=membrane
  Homolog annotation: Hit_ID=Q6ZLQ0; Match level="QueryCoverage=83%, HitCoverage=26%, E-value=1e-78, Identity=79%"; Hit description =Putative ERD4 protein
MVERNHTKADKIYQEIEGHKQKIARAEVVYANSKTESNTEGTRPTHRTGFLGLIGTKVDTIEYCSEQIKELLPKLEAEQKTTLHEKQQRAAIVIFNSRSAVAFASQTLHAQVYDKWTVMEAPEPRQIIWSNLPMKLYDRQIRQSVVYGIVFLIVVFYMVSLTAIFAVTTLENLEKLPFLKPVVEQPAIKTEDSAITHMVNKLGPKKWSTFSKLYLDVLESNVGKVVP

SEQ ID NO: 46192 - protein, 102 aa, Zea mays
  Coding DNA Sequence Number=SeqID_4413
MGEGAGEEVAGGFKAIKMPIMALVSIDEERKWGEGEEGEEPVVSGSEGTRTGAASRLGAWVGVGSVAERRGARRGKEAAARLGEEEDPPAGGAHASVASSSE

SEQ ID NO: 46193 - protein, 222 aa, Zea mays
  Coding DNA Sequence Number=SeqID_4414
  Subcellular localization annotation: CTP_CleavageSite=59; ConfidenceScore=5.44e-01
MWGRKSWSPRVSLCTCRVKGDVGVPPKPRSSPSSVAVAEPEPWGRARRKSFGRGQGGVRALGSGEAEFRVFRVLARVRALGSGGAEFAVFRVLARVRALGSGGAEFAVFRVLARVRALGSGGAEFAVFRVLARVRALGSGGAEFAVFRVLARVRALGSGGAEFAVFRVLARVRALGSGGAEFAVAPLARPVCLSDSLCRVALQSEWRRRRCPSVRLASGAVE

SEQ ID NO: 46194 - protein, 82 aa, Zea mays
  Coding DNA Sequence Number=SeqID_4415
MTLGTSISHKPLRLEPIYEGNPICAPNRCAQWVDMYIVLSREKLLEVTGRNVAPEWLICRILVPCYAKGWQRCAALGNLNVP

SEQ ID NO: 46195 - protein, 425 aa, Zea mays
  Coding DNA Sequence Number=SeqID_4416
  Gene Ontology: Mol. function=Rab GTPase activator activity; Cellular component=intracellular; Biological process=regulation of Rab GTPase activity
  Homolog annotation: Hit_ID=Q69NG6; Match level="QueryCoverage=91%, HitCoverage=68%, E-value=1e-150, Identity=69%"; Hit description =Putative GTPase activating protein
  Pfam annotation: Domain name=TBC; Domain location=168-363; Score= -61.4; E_value=0.0033; Accession=PF00566.9; Description=TBC domain
MDRGYELRIQGPATLGLDVLDKLDVQKEYEKLRRQCHHVLHCNRGNGLNVINEFLNEDFSDGAEGSESPYSNGASKRACVMPRELKSLGSKAEESESSNWDVVESIDEDTKSESSESESSYEEDPDRTPVSTNMEESCDPKPRFVRTASAKSDIFLSDRTPEDFTTWQRIIRVDAIRANTEWVLFARNQAEVSKEKALQSAISVGLKDFDHLEPYMIYHAARLVALLEAYAVYDPEIGYCQGMSDLLSPIVAVMEEDHEAFWCFVGFMRKARHNFRLDEVGIRRQLKTVSQIIKLKDSQLYRHLQQLQAEDCFFLYRMVVVLFRRELTFEQTMCLWEVMWADQAAIRAGIGRSTWARIRLHAPPTDDLLLYAIAACVLQRRKLIIEKYSSMDEILRECNSMAGQLDVWKLLDDAHHLVVDLHHRI

SEQ ID NO: 46196 - protein, 120 aa, Zea mays
  Coding DNA Sequence Number=SeqID_4417
MAWSCLASRLAWAAAGGAGGWKQRAGRSSWLGLGAWVVQKRAGRRRGGDGEREEGGREIAAAAAIARDRSGGWGGEQAAARVRDGVTELKAKVEAEAERNVKLSETVKNLRDKCSGFATR

SEQ ID NO: 46197 - protein, 127 aa, Zea mays
  Coding DNA Sequence Number=SeqID_4418
MSSKSAKSSSRSELLAVVVLTADAQVQPLAHDDRPRTWGKSIFLNFGGRPWWCYPSWPPRPPDEEAGFSFWSSTTDVCRDATVVVRVSIILARSAVVGSDMAEVIDAADDGGERGGLGGSAAVEYMA

SEQ ID NO: 46198 - protein, 136 aa, Zea mays
  Coding DNA Sequence Number=SeqID_4419
  Subcellular localization annotation: CTP_CleavageSite=48; ConfidenceScore=5.36e-01
MGVAGGGTVTVVMPTRGAALVGSPTRFASWPTVVALLRGSGWLLLVARGAVGAARWMPLGFRWGVWWPLAPAGCRPVPWVVAARRTSPVGGGETLAVAALVGVLSGVGLWSSELLSLSAKLGNDDLSQVIGTIDEV

SEQ ID NO: 46199 - protein, 132 aa, Zea mays
  Coding DNA Sequence Number=SeqID_4420
MQSSSSSGAEPESEPWGRAMRSSSSSGAEPESEPWVGRGRVSYGARRRTWLLSASLCRVAQQSERRRRRCPLVRALVRIRCQATFALNAPAIWSVGVVTWPRLLLGEDWAEGEPKLCADGGYQLRLGVLGYP

SEQ ID NO: 46200 - protein, 294 aa, Zea mays
  Coding DNA Sequence Number=SeqID_4421
  Gene Ontology: Mol. function=transferase activity, transferring hexosyl groups; Biological process=metabolic process
  Homolog annotation: Hit_ID=Q6AVQ5; Match level="QueryCoverage=93%, HitCoverage=57%, E-value=2e-98, Identity=65%"; Hit description =Putative UDP-glycosyltransferase
MVTGKKRTFVLYPSLGVGHLIPMVELAKHLLRHGHGALIAVVNPPDTDAVSVAAVERLAAANPAIAFRLLPVPASPDAGADWVKRDLDTLRLANPVLRDFLLRSQPATALILDMFCVDALDVAAELGVPAYFFFASAAGDLAMFLNLPYLYPTLPSFRDMSEALVRCPGMPPVRAMDMPLTVQDRDSDRIKVRMYQFRRIPEGRGVLVNSFAWLEPMALRALGDGVCVPGRPTPRVFCVGPLVNDGSSTAGSGGRHECLAWLDTQPKRSVVFLCFGSKDACSVLIALFLYHQFY

SEQ ID NO: 46201 - protein, 272 aa, Zea mays
  Coding DNA Sequence Number=SeqID_4422
  Gene Ontology: Mol. function=protein kinase activity; Biological process=protein amino acid phosphorylation
  Homolog annotation: Hit_ID=Q6Z705; Match level="QueryCoverage=66%, HitCoverage=44%, E-value=1e-76, Identity=73%"; Hit description =Putative membrane related protein CP5
MALLAGPLWAAVLLGLLLGWAWRPRWAAGLVAAPAPAAAAQPPFATLGFWKAQLPARLRAPLGSAAAVRHGEEEEEDEVSVRGSSEAGSEELAVGKRDLANLWRLVEGRDGGPAWIKMMDRSLPTMTYQAWRRDAQTGPPQYQSSSIFEDATPEEVRDFFGDDEFRVSNKWDDMLVYHKTLEECQTTGTMKVHWVRKFPFFCSDREYIIARRIWKLGGAYYCVTKADGYSMQYIWTVLLTIYVAAPQLTLLGIATDARLRSSVVAAYTSRGL

SEQ ID NO: 46202 - protein, 210 aa, Zea mays
  Coding DNA Sequence Number=SeqID_4423
MGIKAEQRKFAHAAGRNWKAMAPEELHSAQTLENSTAARAQGAEREPRHEQGTGHGEQRDMAAVSLITADVVTQAPHPFSPTSLRRPSPSIRISLWISTSSVSASQGGRSMEVGLGAGVEASRRAQHTQSPMLRSVRNRGDLAGLRERSRSINWNDKLAESVAKRIRALDPKDTSSYILLSNAAAEKNLLEGGGGRIFPGRGGVRERDDG

SEQ ID NO: 46203 - protein, 122 aa, Zea mays
  Coding DNA Sequence Number=SeqID_4424
  Subcellular localization annotation: CTP_CleavageSite=37; ConfidenceScore=5.47e-01
MAFQFLPAACANFLCSALIPIASSTSPVVVVCRRIVCAALYMSLSHIVVKVSNPVLPCPTSSNPESRTLYKNKRDPCASLIKCSVEDFNRKSSSFRASLRNPKSQVKTELAACCSPSARHKG

SEQ ID NO: 46204 - protein, 1461 aa, Zea mays
  Coding DNA Sequence Number=SeqID_4425
  Gene Ontology: Mol. function=zinc ion binding
  Homolog annotation: Hit_ID=Q10LI9; Match level="QueryCoverage=58%, HitCoverage=86%, E-value=1e-130, Identity=39%"; Hit description=CW -type Zinc Finger family protein, expressed
MGDDAELEEGEACACGDDTAFVDPDVALSYIDEKLQDILGHFQKDFEGGVSADNLGSKFGAYGSFLPTYQRSPLPQTRSPPKAGNITSKSPFHQSNEDLSQKPPAVAVSSTPQSNGPVVPFSGDSIKKEIRPSTKSERGSVSHDSYGPSKCSDQNRLKVRIKVGSDNVLARNNAAIYSGLGLDISSPSSNEDSPDGRGSLSPEVNNVPHESPQTILQIMTCFSVPGGFLLSPLPANILQLTKKVVSSSKKWESNVDVENVQESYEGHVAKRVKSDGNKKRLIDAKNSKNKNDISAVMKKEIDMELVAGQKIVSEALKISLLSDPRAMDAKGENRLEEEPAENNLVGIRDARLKERCTKTDSMTVKVEPAKAEVMECLENSSFGSSEMDLSAVKGKSKPKTEKGEATLEDRNTTNDKDLISDRKQKKKIKSGSKYNASNFEGSISNVINEGASAVFHMGKISGLEALPYDTNGENNSKSEVKKMQREQKANVSTSSDFLEEEKHIHSSAAVKERSDMQSKPIHTGKKPKAKSHRDVRDNNFPEGSYGSKEQDSLENKSAFGDPRPKEKPWKFDSEDSDAPGISRKDSSYVKLDKHLATEEQKMHILPPATASTANAAFIHAAPVVIEEHWIFLRSGNVACYSGWPRKLGTLIATLKLEMWYTGIPGMNRCEISEEETTNALNALYVPAPANGIPSVGLPHVASSGLVTSSTPNMNGHIEQSRKRKNVLSDGNFVAEGSHQTQGSGHPMSNQHAPNKSKTHTDGIQYPIDRDSVSKSVDPTIKKQRSKSKHHSSYSDGVDLVERPKKHSKVKSKRDLDRDEYKASKKIRKEERHFDRDRNLGSGLASRDVPDEAKAFPVKSVTSKGSGERSDLSSSKQKNVSHHNHLENSKKARQDYVGFPEDESKEYFHQSDVQRSDLSSKKRIVKKWEESQYNPVAQVSKGAIKETYRDQNLKEAKLMSLNSEELFSMTSSKPPKAQHADQVLFYDGGRTNSELVEDNTHFSGKTGLPEQENSLSDKALDLGKPASDVAYIQTSAVTSSSSKASVSQKKKQTTQAMKTSSIESLSLSPQRNSNIDNVSASHSRVSGKDGSLNANSSTVPAMAKQLNTQVGVAVNDQWSSEPILVGSSRRKSDRDNGQVQLTQGHASDGIHPERGLNEDLQPESGRKDSNIKNSHIPKSSNHLHSGEKNNYNTDGSPMQPGKHLVDPKTPVLDKGDSSMHENKKSANSLQDRNGSTHCPPDGNPLLGLPSGKEKSYLKNNRQDSQKPKPQISPLKESKLDSHSTPLKPNGSKLTPQSRQYNAENGGRHGTAKQAIRSPADTFSPARKDNTSTAYALKEARDLKHKANRLKEEGKELESTRLYFDSALKFLHVASLLEPPSFDGLKQGDAAQSMYSDTAKLCNFVGHAYEKCKKMAAAALAYKCVEVAYLKAAYCKHPTASKDRQVLQAVVQTAPESSPEGAS

SEQ ID NO: 46205 - protein, 81 aa, Zea mays
  Coding DNA Sequence Number=SeqID_4426
MTIRMNLAMLIIRAGCLVLQVLVVLVPNGIRQVVTTHHRDARETPEDIIRKRREREQDLTDSRGTPLNETDIRTGVREWKL

SEQ ID NO: 46206 - protein, 106 aa, Zea mays
  Coding DNA Sequence Number=SeqID_4427
  Subcellular localization annotation: CTP_CleavageSite=55; ConfidenceScore=5.08e-01
MAEGLGRIECSAWCGAAASESGHTRGRSTASGGRGSGRLASMRLGGGLAGRPGLRCSGAQGRSALALAALGKSRREGRREEREGGGRGGQVGPVRRNGRRGFPCGG

SEQ ID NO: 46207 - protein, 666 aa, Zea mays
  Coding DNA Sequence Number=SeqID_4428
  Gene Ontology: Mol. function=GTP binding; Cellular component =intracellular; Biological process=small GTPase mediated signal transduction
  Homolog annotation: Hit_ID=Q8L7L0; Match level="QueryCoverage=53%, HitCoverage=52%, E-value=5e-86, Identity=47%"; Hit description=GTP -binding protein obg-like
  Pfam annotation: Domain name=ATP_bind_1; Domain location=494-635; Score=-56.0; E_value=0.0052; Accession=PF03029.7; Description =Conserved hypothetical ATP binding pro
  Pfam annotation: Domain name=GTP1_OBG; Domain location=294-451; Score= 218.9; E_value=1.1e-62; Accession=PF01018.12; Description=GTP1OBG family
  Pfam annotation: Domain name=MMR_HSR1; Domain location=490-589; Score= 94.0; E_value=4.5e-25; Accession=PF01926.13; Description=GTPase of unknown function
  Pfam module annotation: Pfam domain module=ATP_bind_1::GTP1_OBG::MMR _HSR1; Domain location=494-635::294-451::490-589
  Subcellular localization annotation: CTP_CleavageSite=67; ConfidenceScore=5.85e-01
MAPPAVAASAFPFRLFSAEARRNNKSGRGKRSAARPLKSSPPPRPPSSSSVIGGGVAATTFTRLPLRDAPESTEVTLDRFPTAPANPGAPALTLGSVQRLENEEFDVGWRPNSVARIPLRDSSDGVELTIGQFEARAAGRKSTGGRGFTRQTVERLGDDGEGEELVVTSLDVFEVKNGRRDRGLVPEVLDDGDDVVVFDPDYGVDSDDEEEEFEMFPFDKSHHEEADAVPRAEIGEVEYGDENDDNDGDEVVVFYADYDEEEDSEEDGYEVENAEEGEGDVKEKGVPAVMRCFDTAKIFAKAGDGGNGVVAFRREKYVPYGGPSGGDGGRGGDVYVQVDGEMNSLLPFRKSVHFRAGRGAHGMGQQQAGAKGEDVVVKVPPGTVVRTSDGGVELLELMKPGQRALLLPGGRGGRGNAAFKSGTNKVPRIAEKGEKGPEISSQRAESIELNYLNDYNNYPQIIQLYVSLTYNFLGMLVFGRWLELELKLVADVGIVGAPNAGKSTLLSVISAAKPAIANYPFTTLLPNLGVVSLDFDATMVVADLPGLLEGAHRGYGLGHEFLRHIRLELELFSPSLVDKPYVVVYNKMDLPEASERWNTFKERLQSEGIEPFCISAINRQGTQDVIHAAYKLLQKERQRMKETEALHLETTYFCRMERDRKSEPRV

SEQ ID NO: 46208 - protein, 279 aa, Zea mays
  Coding DNA Sequence Number=SeqID_4429
  Gene Ontology: Mol. function=transcription factor activity; Cellular component=nucleus; Biological process=regulation of transcription, DNA-dependent
  Homolog annotation: Hit_ID=Q84J59; Match level="QueryCoverage=99%, HitCoverage=93%, E-value=5e-82, Identity=60%"; Hit description =Branched silkless1
  Pfam annotation: Domain name=AP2; Domain location=42-106; Score =110.5; E_value=5e-30; Accession=PF00847.10; Description=AP2 domain
  Subcellular localization annotation: CTP_CleavageSite=38; ConfidenceScore=5.73e-01
MAFSEHPNPATASSSGQPQASPPSSPSERPPSGRGRRRAQEPGRFLGVRRRPWGRYAAEIRDPTTKERHWLGTFDTAQEAALAYDRAALSMKGAQARTNFVYTHAAYNNYPPFLVPFHQQQQQYGAAPQHIGSYGHGHHHYDQQQQQGSTTGECSSTMPPVPVERADGTLLLDRGGGHHHHHHHHRELLFATADDSSGYLSSVVPESCLRPRSSAAAVEDLRRYSVSDADSYGMGLREDVDDLAQMVAGFWGAGAGDGDGMVASSQGSDGYSPFSFLSH

SEQ ID NO: 46209 - protein, 114 aa, Zea mays
  Coding DNA Sequence Number=SeqID_4430
MTRLRTTSGGRQSFDSPEANLGGRRGYDSPEANLGRRRRFDLPEANLGRRRSHSSPECISDSPEHSFDSPEHNQDSPERVSGDCPLRPRLVQVWPYLAKLLHYILTRLEKFPIT

SEQ ID NO: 46210 - protein, 489 aa, Zea mays
  Coding DNA Sequence Number=SeqID_4431
  Gene Ontology: Mol. function=peptide deformylase activity; Biological process=translation
  Homolog annotation: Hit_ID=Q10FJ2; Match level="QueryCoverage=75%, HitCoverage=96%, E-value=6e-93, Identity=55%"; Hit description =Pleckstriny domain-containing protein, putative, expressed
  Pfam annotation: Domain name=TolA; Domain location=159-472; Score= -155.4; E_value=0.091; Accession=PF06519.2; Description=TolA protein
MATNGSSVRVRDTESSLEKVKRQLSSGSGRYLLQGPLLKRSETTLGLLKRRNTFFALKLLVLQKLGYLHYSRVPSKPLSQCKNADSNTRVECYPFELLNVELYPCCCILTIVLCALLLCATQLVLRAHKEAVNSLAGNGSPATLGTVATAVANANATAMEATKEIEAALKVSMRAALGLGTNNSNDGQLDDLTIMKETLRVKDEELQHLAKDIRSRDATINEIADKLTETAEAAEAAASAALTMDEQRRLLCLEIERLKQALERQVEQSMLKLRQSEEKVISLSKEKEQLMKERDAAFQEAHMWRVELGKAREQAVIQEATIARTEEKARVSEADAAARIKEAAEKLRTVEKEKEELLALVGVLQSQVQREQSSTKQVCGERSESCSGADSPPPLTKHVDASDDDVDKACVSDSRSVLVSSDSTEVQLAVDGVDIRPVGDAEWGGFQQSDALIADVREVSPEADGGSLDIPVVNPPPISDHVQGGATHP

SEQ ID NO: 46211 - protein, 1415 aa, Zea mays
  Coding DNA Sequence Number=SeqID_4432
  Gene Ontology: Mol. function=ARF guanyl-nucleotide exchange factor activity; Cellular component=intracellular; Biological process =regulation of ARF protein signal transduction
  Homolog annotation: Hit_ID=Q8S566; Match level="QueryCoverage=82%, HitCoverage=99%, E-value=0.0, Identity=90%"; Hit description=Guanine nucleotide-exchange protein GEP1
  Pfam annotation: Domain name=Sec7; Domain location=527-714; Score =383.7; E_value=2.9e-112; Accession=PF01369.11; Description=Sec7 domain
MGRPRMLTAAGGIDPIAEEPHHARSPADGGLGPDPAALACAISAEASTVLAVMRRGLRHPRATAADDAAAEHPLVASLRGLRRLAFSPSPSAAAALPAAALRPFLDAVRSEDAGAAATSASLAALHEVMSLTGPALPGAALREVVDAVASCRFEAGTEPAAEEAVLMRMLQALLACLRAPAAPALGDQHVCTAVNTCFRVVHQAAAKGELLQRFSRHVMHELIRCIFARLPQIGGADGVDGAVKPEMGGMDMNHPFGIKQMENGNGSYVSETGTSDENSADGSGLVVEPYGVPCMVEIFHFLCSLLNVVEQIGLDEDLPLFALKLINSAIELGGSSIQKHPKLLSLVQDELFRNLMQFGLSMSPLILSIVCSIALNLYHHLRTELKLQLEAFFSCIIIRLAQPRFGATYHQQEVAMEALVDFCRQKNFMVEMYANLDCDITCRNVFEELANLLSKSAFPINCPLSSMHILALEGLIAVIQGMADRIGNAVSRPELLPVELDEYTPFWTVKCENFSDPRHWVKFVRQRKYVKRRLMIGADHFNRDPKKGLEFLQGTHLLPEKLDPQSVACFFRYTAGLDKNLVGDFLGNHDEFCVQVLHEFAQTFDFQEMNLDTALRLFLETFRLPGESQKIQRVLEAFSDRYYEQSPQSFANKDTALLLSYSIIMLNTDQHNMQVKKKMTEDDFIKNNRNINGGSDLPREMLSELYHSICRNEIKTTPEQGLGYFEMSPSRWIDLMRKSKSTSPYIIGDSQPFLDHDMFAVMSGPTIAAIAVVFDHSEHEEVLLTCIEGFLGVAKISAFHHLEDVLDDLVVSLCKFTTLLNTSLVEEPVTAFGDDLKARLATETLFTIANRYGDYIRTGWRNVLDCILRLHKLGLLPARVASDAADDSELPAEAVQRKAAPSSVPPSHIPVMGTPRKSSGLMGRFSQLLSLDSEEPRSQPTEQQLAAHQRTLQTIQKCRIDSIFTESKFLQPDSLLQLAKALIWAAGRPQKVASSPDDEDTAVFCLELLIAITLNNRDRIVLLWQGVYEHIASIVQSTVMPCALVEKAIFGLLRICQRLLPYKENLADELLRSLQLVLKLDARVADAYCENITQEVARLVKANAAHIKSQMGWRTVILLLSITARHPDASEVGFEAIVFIMTEGAHLSLANYGFCIDAARQFAESRVGLADRSVRALDLMSDSVRNLALWSQEIKATTFEEGEKGPEAIREMWLRLLQALKKLSLDQREEVRNHALASLQRCLTSTGELCLQSATWSHAFDLVIFSLLDDLLEISQNHSQKDYRNMEGSLVLAMKLVAKVYLQLLPDLFGLSSFCKLWLGVLSRMEKYVKVKVRGKRSDRLQEVVPDLLKNILLVMKSKGILAKRSTIGGDSLWELTWLHANNISTSLLPDVFPSQEYEQQSSTGSPRGPSPVEA

SEQ ID NO: 46212 - protein, 95 aa, Zea mays
  Coding DNA Sequence Number=SeqID_4433
MGGRSEEKGSGTARSRAGPCPGGDGEEVLGVGRKFVRERACLPAFFLVSALIFQRRDVRRWKTPSRSVWVWLVLATSEKFAIMEVLRCGFDDLKA

SEQ ID NO: 46213 - protein, 323 aa, Zea mays
  Coding DNA Sequence Number=SeqID_4434
  Homolog annotation: Hit_ID=Q6YT10; Match level="QueryCoverage=34%, HitCoverage=35%, E-value=5e-32, Identity=63%"; Hit description =Putative lateral root primordia
  Pfam annotation: Domain name=DUF702; Domain location=228-322; Score =92.9; E_value=9.4e-25; Accession=PF05142.3; Description=Domain of unknown function (DUF702)
MASGTGEAASSPREEIVRGMAWHGMARGPSPSHLTAQRPTGMGMGWDLGMGVGKQKSERVSESKAHGPRKGADLVIRDNVVIQHVIRTHYLNVVCSVREFRLAELSSSATTRIGIRALCRRAGQRQLVAASWLPCFPSGVAGRKRLAPSSSFKEGRLPITEGLTCRCLPLHGRLPLHGRRRVAPCGGFQLWPPHPAQEHHHHFYAPNIIRFADDPAAGSSRGGRGSASGAGAGTISCQDCGNQAKKDCVHMRCRTCCKSRGFDCPTHVKSTWVPAAKRREHQQQQATGAAEPSKRHRDAATGAQPSSTTATTSSSGAYFIEKL

SEQ ID NO: 46214 - protein, 192 aa, Zea mays
  Coding DNA Sequence Number=SeqID_4435
  Gene Ontology: Mol. function=protein serine/threonine kinase activity; Cellular component=cell surface; Biological process =protein amino acid phosphorylation
  Homolog annotation: Hit_ID=Q2QMD5; Match level="QueryCoverage=67%, HitCoverage=18%, E-value=6e-55, Identity=79%"; Hit description =Protein kinase domain containing protein, expressed
  Pfam annotation: Domain name=Pkinase; Domain location=56-187; Score= -87.5; E_value=0.0024; Accession=PF00069.15; Description=Protein kinase domain
  Pfam annotation: Domain name=Pkinase_Tyr; Domain location=56-191; Score=-107.0; E_value=6.6e-06; Accession=PF07714.7; Description =Protein tyrosine kinase
  Pfam module annotation: Pfam domain module=Pkinase::Pkinase_Tyr; Domain location=56-187::56-191
MAQGHISLLVLRRGVGAGRRVRERNRAASELEDEFERGTGPKRFRYGELAVATGNFSHTQKLGEGGFGSVYRGFLEDMDLHVAIKRVSKRSKQGRKEYASEVRIISRLRHRNLVQLIGWCHGDSKLLLIYELMPNGSLDKHLYSSSDVGLLPWPVRHEIVLGPRLGRNDEALNLAVSERGISPDRWLAEAVS

SEQ ID NO: 46215 - protein, 140 aa, Zea mays
  Coding DNA Sequence Number=SeqID_4436
  Homolog annotation: Hit_ID=Q6K833; Match level="QueryCoverage=40%, HitCoverage=30%, E-value=6e-16, Identity=79%"; Hit description=mRNA cap guanine-N7 methyltransferase 2 (EC 2.1.1.56) (mRNA (guanine- N(7)-)-methyltransferase 2)
MAARAWWPWFAVLRRRGRPPARIKRGQASAQSLRERDRLIIRSHDMHGRQHSFQISEKLQSKILKVILHLLVAKCLRMVLKLKCRKRASKQIWTKYQKNVEAAHNKGLKTVPNSIRSENYTITFEVEEEKYELKLYTKYT

SEQ ID NO: 46216 - protein, 97 aa, Zea mays
  Coding DNA Sequence Number=SeqID_4437
MAEICCASVGAFEGACDVSGRGKLQHASACADACGAQCLYVSRLKEQAGADGTVRLPCDRTVVGQAEDGCPQDATAVFRSQDLQGLQEKRAFDNTER

SEQ ID NO: 46217 - protein, 470 aa, Zea mays
  Coding DNA Sequence Number=SeqID_4438
  Gene Ontology: Mol. function=ATP binding; Biological process=defense response
  Homolog annotation: Hit_ID=Q5Z5Z4; Match level="QueryCoverage=93%, HitCoverage=38%, E-value=3e-59, Identity=33%"; Hit description =Putative Pib
  Pfam annotation: Domain name=NACHT; Domain location=302-451; Score= -37.5; E_value=0.048; Accession=PF05729.3; Description=NACHT domain
  Pfam annotation: Domain name=NB-ARC; Domain location=265-468; Score= -121.7; E_value=0.016; Accession=PF00931.13; Description=NB-ARC domain
  Pfam module annotation: Pfam domain module=NACHT::NB-ARC; Domain location=302-451::265-468
MLPPCLAASALPIKEAVTEIEQLKVRVEDVSRRNSRYSLISDSGSKPIMQQQTAPKTIFGTMVLDMMVEARDTAKRQQGLGDLTQLLTKEQADLGLTQPFNPHEFLRSMVAQFYANSCLQNGMVINVDELKRIEEMATTGGGLIGAFMDKVNENRYLIVLENLSTIGDWDTIGTYLPDRKNGSRVIVSTQQCEIASLCIGHSYQVAEVKQYSAEHSVCVFFEEGLQGNGDKSMESDRVVDNNNEMSMQDEITHGTGFLSDRIPTSKRKDASDWVKNFQLVERKSEMNQLGNYIAKARVYGLQILSVWGIAGVGKSALVRNMYFDRIHRNDQLFEKYGWVDVTHPFNLRDFSRSLLLDFHSEPVQAMGIKDPTQECHKILEDNRCLVVIDDLQSIEEWDLIQAALVSRPSRSIIIVITTEASIATYCADNEGVVFNVKGLEDKAALKLFKKQPWGIFGIGIHNSYKKSGWY

SEQ ID NO: 46218 - protein, 339 aa, Zea mays
  Coding DNA Sequence Number=SeqID_4439
  Homolog annotation: Hit_ID=Q6QP51; Match level="QueryCoverage=58%, HitCoverage=99%, E-value=3e-33, Identity=43%"; Hit description =Putative growth-regulating factor 1
  Subcellular localization annotation: CTP_CleavageSite=33; ConfidenceScore=5.17e-01
MMTAPKKGFEGWPLRRVRQPPQSTRASSSLLIRGSKAGPSEGFDSRPRARRVRDDSGYVRYMAEARATLPRPAKASQKALRPQRSQTTPPRPRGLHPAGQGLVYQGAQSRLARARPWKGTVVPDELMPRPRASSGGSSASPDLRPRPREEVSASPDPKTRPREEVSASPDPKTRPQPREKSPPRPTLGSDRLRHRGYIITLPLASSDYEGTRPTSHLARRELRHFSDGHVIAYTGLKHFSDSHVGMYTGLRHFSARHGVTVEESVKRKWLETLLEVFRAVFGSEFGQSPGNSDRTSCLELRSNTVLTRAEKAPIFLLRLSCRVKTFKLVQTLSFIAIIR

SEQ ID NO: 46219 - protein, 577 aa, Zea mays
  Coding DNA Sequence Number=SeqID_4440
  Gene Ontology: Mol. function=ATP binding; Cellular component =membrane; Biological process=defense response
  Homolog annotation: Hit_ID=Q5Z5Z4; Match level="QueryCoverage=98%, HitCoverage=47%, E-value=1e-117, Identity=40%"; Hit description =Putative Pib
  Pfam annotation: Domain name=NB-ARC; Domain location=167-426; Score= -95.1; E_value=0.00032; Accession=PF00931.13; Description=NB-ARC domain
MGDLVVGLAKSVVEGVLTKAQSAIEEESKLRQSAQRDLVFITGEFEMMHSFLNVANEERAKNNVVRTWVRQVRDLAYDVEDCIEFVVHLDNRPHWWRRFIPSCMPASALPVDAVVAEIEKIKVRVEDVSKRNSRYSLISDSGSKPVMQQQPATGPAIGTTTLDMFVESRDATKKQQGLGDITQLITKENIDLGVISLWGTGGDLGKTSIIRKAYQDQEICENFGCRGWIKLTYPFNPHKFLQSLVTQFYTNSCLQQGTTLDVAQLKRMVAKRGIIEEFTKQVDGKRYLLVLENMCTMGEWDAIRACLPHRNKGNWIIVSTEHHEIASLCVGHSYQVLELKQYSAEYPVCVFFKESKKTGRVISSSGEILEDEMSHRGGLTYGRIPTSRKALASSWMDQSTLVGRESQMNELRKYQTTARFKDWQVMSVWGIAGVGKSDLVKNLYYERMLKEDPMFDKYGWVHVSHPFNLRDFSRNLLLDFHSDAVGIRDPIQECHKLLKEHQCLVVIDDLQSVEEWDLIRPALVSRHSKSVIIVITTDEKIATYCADDEEVVFNVKCLEAEASFDLFKKEEICVFLY

SEQ ID NO: 46220 - protein, 467 aa, Zea mays
  Coding DNA Sequence Number=SeqID_4441
  Gene Ontology: Mol. function=DNA binding; Biological process =regulation of transcription
  Homolog annotation: Hit_ID=Q84NK2; Match level="QueryCoverage=77%, HitCoverage=85%, E-value=1e-62, Identity=44%"; Hit description=Myb family transcription factor-like
  Pfam annotation: Domain name=Myb_DNA-binding; Domain location=259 -310; Score=42.7; E_value=1.2e-09; Accession=PF00249.21; Description =Myb-like DNA-binding domain
MEARAVSALDLSLHISLPSSAAGSASPAPELGGGGGIGRGAQPPAGADPWRRLNGSTASTELSLSPPLWQQDVAAGDVLPCRRLRPAAPNHYSSTADATTFVPVTVPRLISFDAAAGAEDEAARARPIEGVPVYSSSRAARRPFLGAGAGEYHRQGHHPKAAGLYNRPCHSSSRPSSLRSTTTTTSPAVAPPAESSYLSPSAYHRMLSSTSRLRLQGVLADTLRGYGGHHHQQQHLDSLAAARYMPRFLASRRGMRAPRMRWTSSLHARFVHAVELLGGHERATPKSVLELMDVKDLTLAHVKSHLQMYRTVKSTDKPATTSSGGPPVDGGGDDDDLPSARRAQSSSSSPAGRRDGSSPQAFTRHRSAASSEGAASLAGGDDVECSSSADDSDCGRARSASSSRPYTTRDPELLIMDKNSAFTSSEVKAKAYTTSSPYDCSKRRDKPPNLQAKKDGNTPKRHTFHTQ

SEQ ID NO: 46221 - protein, 254 aa, Zea mays
  Coding DNA Sequence Number=SeqID_4442
  Subcellular localization annotation: CTP_CleavageSite=72; ConfidenceScore=5.33e-01
MVTGIGLGAVPPDALLLAHARATPNRDGRSSSTHTQQRLHLSGFPSTPLHRSGDGVPRRVWRLAPPGSLPPRSAISPTPKSDNAPAPPISVLAPRPPSSTDLSLPPVPRAILPPSHHRATHQFHKTLGLKPPTSTPYTATPMSAIFGRPSGRRTLSGKAAASKEPAAAVEEPATTATELAGASNPSLVMAVAARDASCSPALATNLSRFSCHVHSVSSCLSRRRNWARRCGGRQAWRCSMCVVLVVSAAMGLPA

SEQ ID NO: 46222 - protein, 169 aa, Zea mays
  Coding DNA Sequence Number=SeqID_4443
  Homolog annotation: Hit_ID=Q7EY72; Match level="QueryCoverage=81%, HitCoverage=28%, E-value=9e-65, Identity=84%"; Hit description =Putative myrosinase
IFHLFLMHQGLLQIDERAGEGEQRPGELSVRASQKIVTVEQKLTRGWGGENAYHVSGYRYLLVDPERRVSRASPPGKVTTLAKDSLLALNMLRQEVDLEKSRYKRGDPCHDKDFEVCIRTKNNAWVIAKISQGRELYMALEKGGETLLYASTAVEKFSNRYCEGAFSTD

SEQ ID NO: 46223 - protein, 235 aa, Zea mays
  Coding DNA Sequence Number=SeqID_4444
  Homolog annotation: Hit_ID=Q7EY72; Match level="QueryCoverage=88%, HitCoverage=46%, E-value=8e-53, Identity=50%"; Hit description =Putative myrosinase
MDDFPNVGLQKDTYSIDKCCENTYVQRRPVEAPMYCGILRTDFNVGKKLQFPTYRDSLKERGTVQMLTVSREVALDVQDDTLNLYTYAVLRLTPRALYSNASSWSYLRKGTSVSAGQTSSSSNGTTAGERYRSRSRDTSPGGQNQMNRNFRPLLREKLSKGKDGFVAADFTATEARCAVPSTPILWFQQADECMHLCIYQHKSLTILLLVPASSVINGEEGITHVKKAMLENMRC

SEQ ID NO: 46224 - protein, 215 aa, Zea mays
  Coding DNA Sequence Number=SeqID_4445
  Homolog annotation: Hit_ID=Q7EY72; Match level="QueryCoverage=28%, HitCoverage=12%, E-value=3e-23, Identity=83%"; Hit description =Putative myrosinase
MPSRSREINTPMLLGCASPYIIGQARIPSARPKSTIPPPTSLSPSHLPGVPEQRLTAPHACVGRRPQSPVHARLPLSPPPFLVTAAAGPSPPFPLRRPAPAPAPDQSGPRGRPHLPPRVHSLAVACPAGWPLGPRQLRFRMGLSSAATGDGVQLCVFDLQRGQQEGQELDKILYFYPADCPILLQLSVIGLCEGIVTFTRLPSLSLIFIVQLVAI

SEQ ID NO: 46225 - protein, 76 aa, Zea mays
  Coding DNA Sequence Number=SeqID_4446
  Subcellular localization annotation: CTP_CleavageSite=56; ConfidenceScore=5.25e-01
MNSWFPQQAQQQPFVFPQFQPLMPQWGLHAPQPPPPPQGSWVMVHNRPPAVIPSYRGAYAGERSFMRERLMGEPFV

SEQ ID NO: 46226 - protein, 77 aa, Zea mays
  Coding DNA Sequence Number=SeqID_4447
MRADGGARQIPPQSTSVHIDGQASVCDPGGSSAREESGRSFLGPLWVSLIDNCSPSLSPAVDPPQAVGRTAATTMCG

SEQ ID NO: 46227 - protein, 112 aa, Zea mays
  Coding DNA Sequence Number=SeqID_4448
MERLHKESSPVAALSVFLMVSPAQLTVGLISQSMEVPDFSMAYQGIRDAAGLFIPSQAQDSRSDSCRRDLHQQILSMHATSQEEDNAGCCDFIAPGKLSGGGFWVLGSHQQR

SEQ ID NO: 46228 - protein, 80 aa, Zea mays
  Coding DNA Sequence Number=SeqID_4449
MSLKVGALHDFACHDSKYKPWQDLKLGAPSEDHCIYARELWNGPTRRPAGLCGPMCNQGHNHTQKGMPVGDRYPLGPLKK

SEQ ID NO: 46229 - protein, 190 aa, Zea mays
  Coding DNA Sequence Number=SeqID_4450
MVALAKFVWVVTSYGVALWSKVLQRTTSFIGRKRMWPLTHGWDLGIVKPHPMPCLNNQMVLSPAFAIEPRGRDATTFVLEVEAEAVKIVGKYSSKTELTRSWDIRGSNARLNRVFELNGFCIVKLRKKRKALLGLVDARCDAKASRPNAKGLTAAAAMPPPEVPAAAARRVPAPPRAIQVAGAEETKEAY

SEQ ID NO: 46230 - protein, 62 aa, Zea mays
  Coding DNA Sequence Number=SeqID_4451
MAELTEVLARLGGDWSGLATVAEALAAMAGGKELAGAKEGCLADERFELGIKVNTLDLWLKV

SEQ ID NO: 46231 - protein, 70 aa, Zea mays
  Coding DNA Sequence Number=SeqID_4452
MQKSATKPPSEYNTPFEDRGLLSGTVIRGTPNTPKHGWFLVLPLTGLTGKQRRLPRSDCCATRQGETNDS

SEQ ID NO: 46232 - protein, 121 aa, Zea mays
  Coding DNA Sequence Number=SeqID_4453
  Subcellular localization annotation: CTP_CleavageSite=48; ConfidenceScore=5.37e-01
MHPSSLLNPVRTRSLSPASFRTSSPSLALYHRHSHSSEIHDRAAKPARSRAKPPRAPSRALTDDPRSPGDRVYLVSGDFTTAERATKVTELQNPVHPIATVRPRSNDSDLLISVRDYTLCP

SEQ ID NO: 46233 - protein, 163 aa, Zea mays
  Coding DNA Sequence Number=SeqID_4454
  Homolog annotation: Hit_ID=Q6QP51; Match level="QueryCoverage=60%, HitCoverage=44%, E-value=9e-09, Identity=42%"; Hit description =Putative growth-regulating factor 1
METGKLTGLGETRNGTWAARGGEEDAQLGAMGGNLRRLRVLASWRLEGELERREQTEQRPAVDDARNGWSFLRRNWKLRLARPWASASRGGLRLARPQGSAPASASEGGLRLADPRARPQPRPQEESRPRPTPGSTSGGVSASPDLGLGPTTPRGIHHYPTPS

SEQ ID NO: 46234 - protein, 266 aa, Zea mays
  Coding DNA Sequence Number=SeqID_4455
  Subcellular localization annotation: CTP_CleavageSite=69; ConfidenceScore=5.61e-01
MSFFFVNIHQPAPILATNHTRPDPRLPGTSRPSLCPTPRSTWPHARLLVVQSIQASTSTYAPLLLTWTEAAKLSNSIAPLRSGRALLGFSGARAVHRPSPLTGILHSSPYHADALPYLAVRRGRQWPSSMPHLLRSHVARSNCASLPLFCPWKSAPPGRTSPAMSCTPSRSVVAAHTSFVGHHGHALQLRFFPSVGRHSQHSASGLRAPKPTSFISLKLRPFVLDVKPEPNVIAVSQLSSQNLVMARRVSVKCLPKYLSTSGNVIV

SEQ ID NO: 46235 - protein, 468 aa, Zea mays
  Coding DNA Sequence Number=SeqID_4456
  Homolog annotation: Hit_ID=Q6QP51; Match level="QueryCoverage=46%, HitCoverage=95%, E-value=2e-43, Identity=53%"; Hit description =Putative growth-regulating factor 1
  Subcellular localization annotation: CTP_CleavageSite=44; ConfidenceScore=5.46e-01
MAAADERKQRSNRLQAHVPSWSGRGALSHGVKTTRPCFVPRTTRARATAAPRTARPVALTPRQGKRHLLWAKQASLHLNHDDHVRKAAPEHSGFKPITDQGFEGWPLERVRQSPQNNRAPRPLLIRGSKAGPSEGFDSRPRARRVRDDSGYVRYMAEARATLPRLRLRLPEGSDLASPEPSLGQELKSRTKLRLARGPPQAVGTPSARPRPNSGKQRRSPRSDCRASHPGKADNNKFGLKRNRKLRLARPQGSASTSASEGGLRLARPQGSASTLASEGALRLARPQGSASTSTSEGGLRLARPQGSASGEATGNKTGIPSGSPRTNNCTSTGLKHFSDGHVIAYAGLKHFSDSHVGIDTMTTDDDEDNNGFNGDDYDYGFWCDISRIRAQPKPCIELKFVPASKPAEDPKPAEDPGNPNICYGSGQTVVFGALLSTCGYRRKPAPNPPLFGSPNPRTYGGNSDPPRL

SEQ ID NO: 46236 - protein, 111 aa, Zea mays
  Coding DNA Sequence Number=SeqID_4457
MEAINAIEGERTWGRERRSRRRFPVQGRRSGAVGDAARERAGAWRRRWRWLEDGGRERGGKRAWGAAAGARHPIVNTEWVSNRRSAHGPERNRVLPLSLNHGASSTNSGSV

SEQ ID NO: 46237 - protein, 63 aa, Zea mays
  Coding DNA Sequence Number=SeqID_4458
MDYNPLSARELFAKDSYTGPHILSMLALGGTQFKDGVGRYIQFVKQLNSTLQSNFVKYFDRQG

SEQ ID NO: 46238 - protein, 289 aa, Zea mays
  Coding DNA Sequence Number=SeqID_4459
  Gene Ontology: Mol. function=sequence-specific DNA binding; Cellular component=nucleus; Biological process=regulation of transcription
  Homolog annotation: Hit_ID=Q20DP4; Match level="QueryCoverage=65%, HitCoverage=44%, E-value=2e-83, Identity=69%"; Hit description=WRKY transcription factor 82
  Pfam annotation: Domain name=WRKY; Domain location=169-223; Score =7.6; E_value=8.5e-05; Accession=PF03106.6; Description=WRKY DNA -binding domain
  Pfam annotation: Domain name=WRKY; Domain location=2-60; Score=127.3; E_value=4.3e-35; Accession=PF03106.6; Description=WRKY DNA -binding domain
  Pfam module annotation: Pfam domain module=WRKY::WRKY; Domain location=169-223::2-60
MVADGFNWRKYGQKQVKSSDNSRSYYRCTNSGCLAKKKVEHFPDGRVVEIIYRGAHNHEPPQKTRFAKERVTPISVPSGGETLRLVNTEIVESSTPTCELERSAISETSEQHLFCSSDCEGDAGNKSEDEHPSAEALPKRRTLEATAPNLTPVRRTVREQKIIVQAGKMSDGYRWRKYGQKIVKGNPNPRVEFEYGYGDGIGGEVDRADIVAVDEGGALEGTVKLLKKLPQPGGLCYVVGHSAVLGLDAGAEDDRLPLSGPGDEVGAQKHSITGSRLACVGTTNQSASM

SEQ ID NO: 46239 - protein, 455 aa, Zea mays
  Coding DNA Sequence Number=SeqID_4460
  Gene Ontology: Mol. function=transferase activity; Biological process= metabolic process
  Homolog annotation: Hit_ID=Q118M0; Match level="QueryCoverage=72%, HitCoverage=95%, E-value=3e-21, Identity=25%"; Hit description =Glycosyl transferase, family 9
MAPAKPPARRHCCSYLLLLLPSTGHRRSVAAWSAKKKNPWLDPFDDGPDEEFDYQGMFSGGKQEEDPRPPEDPANPYGFLRFPQGYNPELDSLASKVRGDVRRACCVVSGGVYENVLFLPVVQMLKDRYPGVLVDVVASPRGKQVYEMCKNVRYANVYDPDDDWPEPAEYTHMLGVLKNRYYDLIVSTRLAGIGHALFLFMSSARDKVGYVYPNVNSVGAGLFLNEMFKAPTNNLADGGYHMYKDMLEWIGRPAKNVPRQPTQPLRVSISKKLRAYVEDKYSRAGVEKGKYVVVHGIASDSVASMTSRGDDDCLLPLEHWAQIAKEISSGDKGLKPLFVIPHDKHREEVEEEVGDDTNILFITTPGQLTCLINDSAGVVATNTAAVQLANARDKPCVALFSSAEKARLFLPYVEDKSSCTVISSMTGKLIDIDINAVKNAVKDLEPAPSFALAQK

SEQ ID NO: 46240 - protein, 126 aa, Zea mays
  Coding DNA Sequence Number=SeqID_4461
MASPASLQSGRKWTFVINEIEGLEGVTLRGLPDFIKTAHSHMAMRREVLFFLLDEEAHPSLGLAAPLLGREGVSLLLEVAGGLRVGWSGMVGSEGNIAFLVARAALASSSFGGGLERVLFLGASWV

SEQ ID NO: 46241 - protein, 103 aa, Zea mays
  Coding DNA Sequence Number=SeqID_4462
  Subcellular localization annotation: CTP_CleavageSite=68; ConfidenceScore=5.36e-01
MPISYTVTAIRTLPQPFKSCIGYLRSTHVLKTSIIARLRHSVNQGTPRTRGAPSKFVWATTTFGRGPSAEVFVKQYCLHWQKKTTGGLIDQFGSYTFTPRRRK

SEQ ID NO: 46242 - protein, 405 aa, Zea mays
  Coding DNA Sequence Number=SeqID_4463
  Gene Ontology: Mol. function=microtubule motor activity; Cellular component=microtubule associated complex; Biological process =microtubule-based movement
  Homolog annotation: Hit_ID=UPI0000D55AAA; Match level="QueryCoverage =38%, HitCoverage=30%, E-value=1e-29, Identity=38%"; Hit description =PREDICTED: similar to kinesin family member 18A
  Pfam annotation: Domain name=Kinesin; Domain location=3-254; Score =78.1; E_value=2.7e-20; Accession=PF00225.13; Description=Kinesin motor domain
  Subcellular localization annotation: CTP_CleavageSite=18; ConfidenceScore=5.03e-01
MKLWKETSRSSKATTSSRCGLAATPSRLPVKAAVIYVSFSHFDLLFFKLIFWMHAIGRDICNSLELVRFVNGYVQRTADLVEGVMQGRNGTVFYYGATGAGKTYTMLGTMENPEVTQKNHSIKLSYLEIYNETVSDLLSHGSPLNLREDKQVVIEYRSLDGVNVKRVGKLSLIDLAGSERALATDQRMQRSIEGANINRSLLAFSSCISALVEGKKHIPYRNSKLTQLLKDSTQQTTVNEEVLDQPDSESMLVLELQKENRVLREQLAKQQHKLLTAKAQLLTSKTSPQRSPAPLSHVSTPGSTQRKTRQSILAGGGGNYFSTLDSKRHAADNAQVRELQRKVSTLEPEIKKMKKEHLLQLKRKDDEHQRQQPFSSCCQRKKDSKPRGNRDTKESILQAASGIGI

SEQ ID NO: 46243 - protein, 100 aa, Zea mays
  Coding DNA Sequence Number=SeqID_4464
  Homolog annotation: Hit_ID=Q6EP91; Match level="QueryCoverage=58%, HitCoverage=20%, E-value=4e-07, Identity=48%"; Hit description=F-box protein-like
MARVFLRWVRADLGEIRNSSSRLQDWRQCWEFTDSNTRGVTSADCVWAAKLPANYRYLAALAAAADDEGCGDGDASGKRLTKKEIYARLCRSTLFDAAER

SEQ ID NO: 46244 - protein, 45 aa, Zea mays
  Coding DNA Sequence Number=SeqID_4465
MLHQLKNQLKITETTSKNTAEGSIKNAKEGTPKRVVEELIEEHYA

SEQ ID NO: 46245 - protein, 309 aa, Zea mays
  Coding DNA Sequence Number=SeqID_4466
MAMMGSTSKKMYLCQDRVDVGLMIEDPLTSHMPCHGRGCATEGAVEASHLADLRLVEVEEYHRRDCTATAIGPEYQSTTSTSPAPPTATLHRSHPHPDPATLSPATVVPTTAHLGLSPPRCPPHPYQRPAPHLATHRLSSRPLRFLRRCLRVSPLARPEIWRDPRELPRCSPLRHRVPVPHLLPLRLPHMCPVATLLEGLARVKSKVPADGHGYLTEERGGGGLGSEGRGGGGRRGVGVRGAKEDSEEEVTCVGEEEGEQEVHLPRPLLPPALERRPSLVQERPLLHRTVLSLAGPGGRRRAAPISGTS

SEQ ID NO: 46246 - protein, 119 aa, Zea mays
  Coding DNA Sequence Number=SeqID_4467
MALGIGRWAPAWAAGRARCMAASMHGRWPLGPLESLDAVPGSGRVAAGPLDATPGSGRARCMAAGGGWRRRRAAADALGVEARIGDGLTRGKTINLINPYPALSLKKDQEGGNPYCAFY

SEQ ID NO: 46247 - protein, 496 aa, Zea mays
  Coding DNA Sequence Number=SeqID_4468
  Gene Ontology: Mol. function=histone deacetylase activity; Cellular component=nucleus; Biological process=histone deacetylation
  Homolog annotation: Hit_ID=Q9ZTP8; Match level="QueryCoverage=99%, HitCoverage=100%, E-value=0.0, Identity=92%"; Hit description =Histone deacetylase
  Pfam annotation: Domain name=Hist_deacetyl; Domain location=23-372; Score=493.6; E_value=2.3e-145; Accession=PF00850.10; Description =Histone deacetylase family
MAASGEGASLPSPAGGEDAHRRRVSYFYEPSIGDYYYGQGHPMKPHRIRMAHSLVVHYGLHRLLELSRPYPASEADIRRFHSDDYVAFLASATGNPGVLDPRAIKRFNVGEDCPVFDGLFPFCQASAGGSIGAAVKLNRGDADITVNWAGGLHHAKKSEASGFCYVNDIVLAILELLKFHRGGYFDHFKCEIDAPLILVFAFKLQTVCCSDSYIVHLFQRVLYVDIDVHHGDGVEEAFFTTNRVMTVSFHKYGDFFPGTGHITDVGAAEGKHYALNVPLSDGIDDTTFRGLFQCIIKKVMEVYQPDVVVLQCGADSLAGDRLGCFNLSVKGHADCLRFLRSYNVPMMVLGGGGYTIRNVARCWCYETAVAVGVEPDNKLPYNDYYEYFGPDYTLHIQPKSVENLNTTKDLENIKNMILENLSKIEHVPSTQFHDRPSDPEAPEEKEEDMDKRPPQRSRLWSGGAYDSDTEDPDSLKSEGKDVTANFQMKDEPKDDL

SEQ ID NO: 46248 - protein, 117 aa, Zea mays
  Coding DNA Sequence Number=SeqID_4469
  Homolog annotation: Hit_ID=Q10L40; Match level="QueryCoverage=94%, HitCoverage=33%, E-value=2e-39, Identity=74%"; Hit description=HEAT repeat family protein, expressed
MASRLWPSTPEEVVRSIKDSSLALHTRTHAKALERSRKMSSLRLLIFGDGEVEPNEEQVLQITLEICKEDVISLIIQDLPSLGWGVRKDLVIYWCILLRQKVDETYCYPTYDIIYFF

SEQ ID NO: 46249 - protein, 127 aa, Zea mays
  Coding DNA Sequence Number=SeqID_4470
  Subcellular localization annotation: CTP_CleavageSite=73; ConfidenceScore=5.20e-01
MEASSSNGNDNKTPIRIGSHATTKMILSSSDAVAVLELQHSGFGTVAPTVAWSLSRTMSVGRRARCHSTAHVPAAGKREQKGLFDTIFGALYREEQLLETNPILNKVGSKSKPPVVVAAPAPKKAAE

SEQ ID NO: 46250 - protein, 155 aa, Zea mays
  Coding DNA Sequence Number=SeqID_4471
MEGRLVLHGPSMDLSFPARNGERRNEGRKKRTQSNTINDGRRVCWSNFGFGCRGGLSARGTSRVGPLGCCAGPGSVQGAGSSRLGGSWRAVGADESRGARPARILAGVAACRQGAVAARLCVEESRERRERIGDRGEKGGGDWLGRSRRTRAVRV

SEQ ID NO: 46251 - protein, 50 aa, Zea mays
  Coding DNA Sequence Number=SeqID_4472
MACSTSQELVGSFCLSSLQTAAWADTTQSQILDLGMGSFGMERNQHASAL

SEQ ID NO: 46252 - protein, 206 aa, Zea mays
  Coding DNA Sequence Number=SeqID_4473
  Homolog annotation: Hit_ID=Q8LMQ9; Match level="QueryCoverage=18%, HitCoverage=7%, E-value=6e-10, Identity=76%"; Hit description =Putative nucleolar protein
MAVQHGIDGARLIFTTRTISVAQQSACGGAQTPAEDPLTLTSENDDGGTSSSLSQSRAQCWRWFDTGERSRMRVGTYTQRGGAKWSQQPRDSPVLRDSSVGFRALSAPLLFSSRSDRDEGRGRPDWSNQYRSFQSMTCLMQISTRTKDFLVDTLKLHIYIGLQISKLLPVALTSLPDYSAVSWLSGAVQQQQQQQQQSLFVPSTLG

SEQ ID NO: 46253 - protein, 79 aa, Zea mays
  Coding DNA Sequence Number=SeqID_4474
  Subcellular localization annotation: CTP_CleavageSite=42; ConfidenceScore=5.48e-01
MGMGAYHMGPVGNAAMGIWGLSRGPRVRSVLSRGPRVRSVMVCAMGMGVAGVQQGMVVGMEMTEQCGTGVSTKYQYNND

SEQ ID NO: 46254 - protein, 95 aa, Zea mays
  Coding DNA Sequence Number=SeqID_4475
MERTRIIDRLVTRTSLEELQRDEEDPDTEVVQGSTSGAPMSHVESLVRPDEAKVLKRLEYINNEGLIHFAFDETIPMSKDDEIIVFKRFFRAAFN

SEQ ID NO: 46255 - protein, 131 aa, Zea mays
  Coding DNA Sequence Number=SeqID_4476
MASYDFIKDVNFFIDAFNLNLDCHIQSFGFMVESARVLFQKVVARFSALAAAVASASAAEVIPLNCKRLVRSNLRGLSSANGKGSVITSAAEDEEGLIVCFGTSSRTAKASSEGWRLRLRPNICPLRDQFD

SEQ ID NO: 46256 - protein, 151 aa, Zea mays
  Coding DNA Sequence Number=SeqID_4477
MGKSKKGGGSSHHSGDKRKREPTPPSEDFGDSEYSEEEFSSESEGSPAPASPPASSDDSDDSEGIAAEVWTYIRAIERAGLEGSDELEYSSDEENSSDHSRRAAAATAVTATTTEATTAARAVTAAARVAAATAAAAARAATRPVARHHWF

SEQ ID NO: 46257 - protein, 101 aa, Zea mays
  Coding DNA Sequence Number=SeqID_4478
MSPRPRPTSTCHGKQSNVSTRLTPQVSEEPATSGDPSPTAAAGNHFRCVDAESQRVEIYSDGGHGRHAIGGCGMAAQPRPATAHSHRLFVCKYKAAVYGSF

SEQ ID NO: 46258 - protein, 141 aa, Zea mays
  Coding DNA Sequence Number=SeqID_4479
MALGEDVVGASDNKEIGDDSTSEVSHFTDDLDAEGTIAVQIGRRVEIYDKRMWVPFAPRRRPTNLVAPSSQLGLDLSKRRQTRRGRRPPGPHPLSLVACVMGPSQGERAAQLTSIIGAALSNEDVPPIILHSEHRALYSSA

SEQ ID NO: 46259 - protein, 102 aa, Zea mays
  Coding DNA Sequence Number=SeqID_4480
MAFGMFNFSILHSPSQKSCWIVMVSTLFHLLSWASSDEGNPEWKNGRKPYLTFQHMQLCTWSSFTRLAFFIKVGTLKAIATMIESGIDKKLLVILGIGFEIS

SEQ ID NO: 46260 - protein, 110 aa, Zea mays
  Coding DNA Sequence Number=SeqID_4481
MTLAACARAQGSSDHLRRRPAHRRDRRDLPDVTDHPAGALLPPEVAPDPAPEPTPEDLPATTLEGKPRNPIEMNTSSLEDMVAGVTWPSILPPGWTVEWDPASAEEEHEE

SEQ ID NO: 46261 - protein, 39 aa, Zea mays
  Coding DNA Sequence Number=SeqID_4482
MGLVTVLVLGRLWWVAERSLELWASSGSYAWLLSVLQLL

SEQ ID NO: 46262 - protein, 152 aa, Zea mays
  Coding DNA Sequence Number=SeqID_4483
MPLTLAERWTIRIQNIIIVSRQRAQGRSHPATRQFITIALAWGALRRSTSLASKMGMVGVGDNSLVVSRLVSGHSIFCCLGFRAIPGWMCRVFAMEKTIESSLLRTLASAPASSRVSVVALLRRVIMTTSDVLGLLLICDVVHLGLGAVLSA

SEQ ID NO: 46263 - protein, 83 aa, Zea mays
  Coding DNA Sequence Number=SeqID_4484
MENKAPQITLSEQLKMRAMVQCAKDLQRKDLGNRLARTRSRLSSPYPLGLRLDGMILTAASAPSQNWTPPPMEPINYCPSELR

SEQ ID NO: 46264 - protein, 82 aa, Zea mays
  Coding DNA Sequence Number=SeqID_4485
MGKPVPSLLMLLLSRVTTLVPTITGIGDHVSGHVRGYVHCQWVTSCHCNLSYKFEVDTDSDTTCAKLTKISFKRAFYTIAVI

SEQ ID NO: 46265 - protein, 158 aa, Zea mays
  Coding DNA Sequence Number=SeqID_4486
  Gene Ontology: Mol. function=transferase activity
  Homolog annotation: Hit_ID=Q6YWK8; Match level="QueryCoverage=96%, HitCoverage=27%, E-value=6e-36, Identity=53%"; Hit description =Putative glycosyltransferase
MGVSEEAARVWAELPVRVDWAAAAAQCASLWAHARALLVAPAVRVLVLLSLAMTVMILAEKLFVCAVCLAVRALRLGPDRRYRWEPIGGGVGDEEEESGSGHGAKYPMVLVQIPMYNEREVYKLSIGAACELEWPSERFMIQVLDDSTDPVCKDPILV

SEQ ID NO: 46266 - protein, 48 aa, Zea mays
  Coding DNA Sequence Number=SeqID_4487
MALIKAWVFFVPESWDPAVSIGVDRCAGVVAPLAHQTVRCPTRQSDEL

SEQ ID NO: 46267 - protein, 109 aa, Zea mays
  Coding DNA Sequence Number=SeqID_4488
MTSRQAGGHEKALVFGPLALAFGGRKVQGRSGGACRGVSIAPDERTETEAAWAACGLGNNGGDPRPCPWARGPGLDLFARTAYRFTGVEIPTKEASDQAGPTLRGRTRR

SEQ ID NO: 46268 - protein, 87 aa, Zea mays
  Coding DNA Sequence Number=SeqID_4489
  Subcellular localization annotation: CTP_CleavageSite=45; ConfidenceScore=5.46e-01
MLHPTLPHPPRPPHAVPLAPLAEPRRCPARGALRRVATASLRHVVAHTPVTEARRTVAGRPARLGPLACSVAKASLRPAHIFAIRQV

SEQ ID NO: 46269 - protein, 78 aa, Zea mays
  Coding DNA Sequence Number=SeqID_4490
MSYKGSHKSEKVPSGGKHKEKGEESVNSGSMSSKSYKRREEYNKVNRLESAKEIWDTLNTTHEGDKITVGDLFSNAMS

SEQ ID NO: 46270 - protein, 70 aa, Zea mays
  Coding DNA Sequence Number=SeqID_4491
  Subcellular localization annotation: CTP_CleavageSite=57; ConfidenceScore=5.29e-01
MARERLASWAKPQLAQSGVRLHNNQVAQAAKPNSRLSISRPLVSGPSLKSRVWSQLVQEGKSNSKTSLSH

SEQ ID NO: 46271 - protein, 65 aa, Zea mays
  Coding DNA Sequence Number=SeqID_4492
MAFFSSNVLMLLVSLTVQDDTHFRSLADTLQYLTFTRPNIAYVVQLLSILLLREDKYVNFVTYNN

SEQ ID NO: 46272 - protein, 764 aa, Zea mays
  Coding DNA Sequence Number=SeqID_4493
  Homolog annotation: Hit_ID=Q01FN3; Match level="QueryCoverage=24%, HitCoverage=10%, E-value=9e-47, Identity=53%"; Hit description=[R] KOG1235 Predicted unusual protein kinase
MDGKVDWRLKKAGRGEGELVLGVCGRRRGAVAESRRCERDQEERVDPWGHRSLARPAGAGWRRSAEAGVGVSSGCVALGLLLLCTRSTGDEGTTPLPLLPRLGRLFRAAPRRSEVTRPPCSAAGLIHGGIWRVLGTEGAAAAGCVPGGEGGRTRHGFDQLVDGGAGVDTMAEREKLGGQGSWALAALLLLLSRSWLATCCQGRRLGGRGRGPPARAPAPRRSRTNGWRGALKPGGRLLEALAARKHDRRTEATVMVRPRSATTALDRRSAPTAGASAPLAAAAGARAWWSEGQRPGAATETRRGGGRIPRLRPWRRRPCPGLRGGAGVCALARSLGGGSVQVYVAAARGSGGEEASSRSPPPECWSQGLQCLRCPWATQNKPRQESTVEWSNLAAEDQAPTAGPQQHDTRPTCPEEGTANVLEHSGVAGKHKDDDPVCGRRSNRVQTGNLMCTSPPSPIELTVVTGMLAGAEHLYSASLLWSTKPPHWIGMGGSTPEELTEEGEASLHCWAFEQPAIMQEGPNGEHSKEPGSREEKQAGQEAIAAEEVAAGSREGTGVGLVGRDRGRGNLVYNFPIRIPERFSLVIRSLLTQEGICFTLKPDFKFLEVAYPYVAKRLLTDPNPALRERLIQVLFKDGAFQWKRLENLIVLAKENVSKMSSNPALKKNSLQAVRNRQLESKLDLTETIKDGARMFLIDAGIRRQLILAFTEDSRLHVEELIDVYRLVEDQIDMPSVAVEVLQDLPSVARDFMLSWSDSILSDRQY

SEQ ID NO: 46273 - protein, 270 aa, Zea mays
  Coding DNA Sequence Number=SeqID_4494
  Subcellular localization annotation: CTP_CleavageSite=44; ConfidenceScore=5.21e-01
MVGYSAFHDEVGGASRRGRAFHDESPARRAARSPAPGPSRVRRRAAARGQTERRAGKRPSVRVRSSGPVQAAKHLTEHSSSVHRPHRAQIFSLTERSIAHRPHHLLLQRPRSASGASTLTEQRPPEQRPPSSLTEQRPPSRTASGASARAASTVQAGVHAVQRPSRRTAPPDQLTERPRPVRPRLPATKIQSTAPGAAIVAPTPASSSRRCRPLHPRMQQPHTGVSGPNSGHSSAATIVGSSASARQQQQDAPHGRTLDPWPRRAAPHPW

SEQ ID NO: 46274 - protein, 390 aa, Zea mays
  Coding DNA Sequence Number=SeqID_4495
  Gene Ontology: Mol. function=zinc ion binding
  Homolog annotation: Hit_ID=Q2R2F0; Match level="QueryCoverage=81%, HitCoverage=87%, E-value=1e-95, Identity=56%"; Hit description=AT hook motif family protein, expressed
  Pfam annotation: Domain name=zf-MIZ; Domain location=180-218; Score= -5.9; E_value=0.0072; Accession=PF02891.10; Description=MIZ zinc finger
MATAVSTPADLSPTPAPRRRGRPPKNPAPAEAPGSPADQAEVIGDYERERDARIRENMERMQKLGILDLAHTLSHCAAASGLGTGSGRWRRKPVEPGSAGGARVKPASPAPSRRSLRLKDVEPVTYREIEPKKEKRSEGGKTVLMEVGAKEEIYTEEHDKLLGTCNTPWTLFVDGYGKDGKRIYDQVRGQTCHQCRYGENVLEVKKNPNWICPVCRGICNCSLCRTKKGWFPTGSAYRKAIGLGYKSVAHFLIATHRASSVNSSSVDNNKLPFAKSETSCISDHANESPEDGETTSKAKQNKATRRRVRKSSDGDNDSRSGSVVTSDCQDDQANKDAGCVTPSSKPASTKRKIMYLFYCLTAGSVPSCDDVVALSSTSSSWFASNDVLRE

SEQ ID NO: 46275 - protein, 616 aa, Zea mays
  Coding DNA Sequence Number=SeqID_4496
  Gene Ontology: Mol. function=RNA-directed DNA polymerase activity; Cellular component=mitochondrion; Biological process=RNA-dependent DNA replication
  Homolog annotation: Hit_ID=Q8S463; Match level="QueryCoverage=89%, HitCoverage=28%, E-value=0.0, Identity=88%"; Hit description =Putative prpol
  Pfam annotation: Domain name=RnaseH; Domain location=1-123; Score= -25.4; E_value=0.013; Accession=PF00075.14; Description=RNase H
  Pfam annotation: Domain name=rve; Domain location=328-487; Score =119.4; E_value=1e-32; Accession=PF00665.16; Description=Integrase core domain
  Pfam module annotation: Pfam domain module=RnaseH::rve; Domain location=1-123::328-487
MFFDGSLMKTGAGAGLLFISPLGKHLRYVLRLHFPASNNVAVYEALVNGLRIAIELGVWRLDARGDSQLVIDQVMKNSHCRDPKMEAYCDEVRRLEDKFYGLELNHIARRYNETADELAKIASGRTTVPPDVFSQDLHQPSVKIDDTPEPEATSAQSEVPSAQPEVPSARLEATLVQPEVPSAPEGEALRIEEERSGATPDRNWQTPYLQYLDQGELPLDRAEARRVARRAKSFVLLGDEKELYHCSPSGILQRCISVAEGQELLREIHSGACGHHAAPRALVGNAFRQGFYWPTAVADATRIVRTCEGCQFYAKQTHLPAQALQTIPITWPFAVWGLDLVGPLQKAPEGYTHLLVAIDKFSKWIEVRPLNSIRSEQAVVFFTNIIHRFGVPNSIITDNGTQFTGRKFLDFCEDHHIWVDWAAVAHPMSNGQVERANGMILQGLKPRIYNDLNKFGKRWMKELPSVVWSLRTTPSRATGFTPFFLVYGAEAVLPTDLECGSPRMRAYTDQSNQASREDSLDQLEEARDKALLHSARYQQSLRRYHAQGVRSRDLQMGDLVLRLRQDARGRHKLMPPWEGPFIIAKVLKPGTYKLANSQGEVYGNAWNIQQLRRFYP

SEQ ID NO: 46276 - protein, 436 aa, Zea mays
  Coding DNA Sequence Number=SeqID_4497
  Gene Ontology: Mol. function=transferase activity, transferring groups other than amino-acyl groups; Cellular component=cellular _component; Biological process=biosynthetic process
  Homolog annotation: Hit_ID=Q2R3A5; Match level="QueryCoverage=86%, HitCoverage=95%, E-value=4e-97, Identity=50%"; Hit description =Chalcone and stilbene synthases, N-terminal domain containing protein
  Pfam annotation: Domain name=ACP_syn_III; Domain location=195-289; Score=9.4; E_value=0.00013; Accession=PF08545.1; Description=3 -Oxoacyl-[acyl-carrier-protein (ACP)
  Pfam annotation: Domain name=Chal_sti_synt_C; Domain location=279 -429; Score=167.4; E_value=3.5e-47; Accession=PF02797.6; Description =Chalcone and stilbene synthases, C-te
  Pfam annotation: Domain name=Chal_sti_synt_N; Domain location=39-269; Score=291.9; E_value=1.2e-84; Accession=PF00195.10; Description =Chalcone and stilbene synthases, N-te
  Pfam module annotation: Pfam domain module=ACP_syn_III::Chal_sti_synt_ C::Chal_sti_synt_N; Domain location=195-289::279-429::39-269
  Subcellular localization annotation: CTP_CleavageSite=70; ConfidenceScore=5.02e-01
MGAHPSEKISQLSKILAKTPRRFSKNLQASAYTPLKAQGLLCAFRQQWHNGGGPACVLSVGTANPGNCVQQDEYTDWYFSITKNDHLTHTKAIMKKMCEKMMVKKRYLQVNEELFREHPEFLDPAAPSLEGKLAVVASVMPGLVAAAAEKAIAEWGRPAEDITHLVFATSSSAQLPHIDLRIASLLGLSTTVQRTVIGFHGCSGSSAALRVAKDIAENNRSARVLVACADMLSVMDGYLVPNVVAHRYGIIGHAIFGDGAGAVVVGSRPQEPVERPIFEMVSASQATLPGSELAVAAELTNFGMEYRLEFGELAAGVGDNIERCLIDALSPLGIGSVGWNNLFWAVHPGGPKVMDNFTAALRLEPGKLAPSRQVFSEYGNMVGPTLIFVLDEVIRRRQQDHEEGSCEWGFMVGFGPGFTIDVMALHACSGMSTVPH

SEQ ID NO: 46277 - protein, 58 aa, Zea mays
  Coding DNA Sequence Number=SeqID_4498
MATIAAGHRNWTSPLHNHRELNPGFRRTRRSGVCAFELGCWEVGGDLLAVGSDVIGRD

SEQ ID NO: 46278 - protein, 143 aa, Zea mays
  Coding DNA Sequence Number=SeqID_4499
MEASSRAETLAKELEAHQTTCTQKESALAEVAAAAAEASRTEASQWKARVKGQLRLCLRVCLVGFRIGSGPSRVYRDIHELTRAVDEKSIAYEAMYDTVVALYRTFEIEDTPSSSSPWRRMLALSGHMQSKLREALHTGMKRA

SEQ ID NO: 46279 - protein, 243 aa, Zea mays
  Coding DNA Sequence Number=SeqID_4500
MAVNVPQLGLVGPVKLRYGGPQHRSLYCNPHTEQSRSDPPYRTYAYARIGSETFSLGTRITFSSLDFLATATGELRLIDSDTPIVANAGGPSRSTSTRSKAEKRHLMRRAATLKRRLNKPAVAIKQKAEGASPSTFVADIDHPQPPSSTFWRMTQASIRQKNPKPMSLRQLGEFASWQHSRGVRMVGETKMPPTKRSTSTIAMHESLPTRKASSSNKRSSMPSYVESTESTTTQNESASRPLA

SEQ ID NO: 46280 - protein, 89 aa, Zea mays
  Coding DNA Sequence Number=SeqID_4501
MEQRASAAAADVQRQVHQTADFSERFRIKCKVLFYNRKFLTLLDGSYQIQGNTLAGSAAGQPIGWPEEGCPTLRLALFVIKRMGRLTTF

SEQ ID NO: 46281 - protein, 97 aa, Zea mays
  Coding DNA Sequence Number=SeqID_4502
MALRSQVLTTQFNRTQDGDTPRTGLDPAILSDKKVPMDRPGRRRQGGEQKPRGCEEFLYGNPGLTGSATTLTNDFLQLNSDHPEDLGEDHIIHSPLG

SEQ ID NO: 46282 - protein, 69 aa, Zea mays
  Coding DNA Sequence Number=SeqID_4503
MGCPSPTPDLLLNAMKLPVVMLGDKHSLAYHFRGWVLQSIPSSTNLSNNLKEHIMLNHQSANELKLKTI

SEQ ID NO: 46283 - protein, 73 aa, Zea mays
  Coding DNA Sequence Number=SeqID_4504
MNEALIHELDSGRPKTTADLLDIATKFADGEDAMGNHIYPVHHKLCECELLKRFIANPPNKKAKPEEATKVVE

SEQ ID NO: 46284 - protein, 633 aa, Zea mays
  Coding DNA Sequence Number=SeqID_4505
MKKKNCGHEKPHSAALVVAAATGGRGDRNKRPRPQKGNSGSCPIHPNSRHSAAECREIIDLAKHVSVRREQSSGDGSHLVADLVRKGSTTKRWPWLNQTSGLAYAYASLFCGSDNLGSGSREWTLVSWGDPEPSSRLAWSRTRGPRSCLPTGGDNEAIKAKELGARRLAALVAWPAAVTTSAPADRQWLASGGNHLNTLAMAKRPSLPPSYGSEDKAIQAKGLEARRLVALAGRTMTTGGRPQPHCMIKILEAERWRKGTSLHEIPLIAPRKTTRSSPPTHTGAPSLCYGGPTPQVIRLEQRPPGAQKANRRARNDSPCLFTFAKGSGPASGTGARVQESYSSDVGQRVRRRRAAAATAENREGGFSQPYTTVTRRPAHGPVKAIEREDHGLVSSPEAGPRATFGTLDQEYPYYSQPRAVAQGPAAPGLTTREGLPEEVRDLHVGITGPPRWEPDPFARGPDRSRQGPGAPGWKVLKALVKDQAGVRRWHVPRPHHEHFSSPPRRRPDDAMWPSARDDAHRLTGDVPSQHLMRPVHSAGRRRDYSAFNAPSTPLETSVASQYYGNRRYQGTRRLHRINSSKLSETFRAKSSKTQLKLMSNTTHSGVGAGALRHPVGEFLSDRHSLKCLKYTTL

SEQ ID NO: 46285 - protein, 129 aa, Zea mays
  Coding DNA Sequence Number=SeqID_4506
  Subcellular localization annotation: CTP_CleavageSite=67; ConfidenceScore=5.46e-01
MAGNPGAVDGGIQAARPPLLHPKARISPRTPLLALSRRQTTASLWRLRFLTTLCATPQVEDLCVNDRASSESKEDVHRYRPRRPGNPHPIMDARDEFGAPLRRTRDFTRVQIELELILLFYVFLLSLPM

SEQ ID NO: 46286 - protein, 164 aa, Zea mays
  Coding DNA Sequence Number=SeqID_4507
  Homolog annotation: Hit_ID=Q69WH7; Match level="QueryCoverage=24%, HitCoverage=6%, E-value=5e-13, Identity=84%"; Hit description =Putative TOM1 protein
MPQSVLVERATSESLIGPDWSLNLEICDILNHDPSRIVKSMNLEEPKRLTNLEWREYKENFLLNFVDEPGWPLEVLDRGSTTACILHVGHYSERAGARDLFLAADWSSVWPSDAYCSSSLRPAGAHTLFFPTPSACRSSCLQPTDGKKTCPTTVAIITLPLAFG

SEQ ID NO: 46287 - protein, 55 aa, Zea mays
  Coding DNA Sequence Number=SeqID_4508
MKVCALNASHSRRPSGAFVLSAWDRLERDERSGGDSGRGGDSLRRETLEEGPWCL

SEQ ID NO: 46288 - protein, 50 aa, Zea mays
  Coding DNA Sequence Number=SeqID_4509
  Homolog annotation: Hit_ID=Q8S481; Match level="QueryCoverage=80%, HitCoverage=5%, E-value=5e-12, Identity=82%"; Hit description =Putative TNP2
MEGYTTEEVIESCIDYISDGTMIGVPVPKHEDPQLGINRFGSPLLLGYED

SEQ ID NO: 46289 - protein, 415 aa, Zea mays
  Coding DNA Sequence Number=SeqID_4510
  Gene Ontology: Mol. function=unfolded protein binding; Cellular component=cytoskeleton; Biological process=cellular protein metabolic process
  Homolog annotation: Hit_ID=Q6K3R8; Match level="QueryCoverage=79%, HitCoverage=59%, E-value=1e-168, Identity=90%"; Hit description =Putative chaperonin containing TCP1, subunit 3
  Pfam annotation: Domain name=Cpn60_TCP1; Domain location=1-378; Score= 104.8; E_value=2.5e-28; Accession=PF00118.14; Description=TCP-1cpn60 chaperonin family
MLHVAQAFIDKNYHPTVICRAYTKALDDAIAVLDKIAMPVDVNDRGAMLGLVKSSIGTKFTGQFGDLIADLAIDATTTAGVDLGQGMREVDIKKYIKVEKVPGGQLEDSRVLKGVMINKDVVAPGKMRRKIVNPRIILLDCPVEYKKGENQTNAELMKEEDWQVLLEMEEEYIKNLCAQILKFKPDLVITEKGLSDLAIHYLSKAGVTAIRRLRKTDNNRIAKACGAVIVNRPEELQESDVGTGAGLFEVKKIGDEFFAFIVDCKDPKACTVLLRGASKDVLNEVERNLQDAMSVARNILKNPKLLPGGGATELTVSATLKQKSSSVEGVEKLTSFILTRTEDKLECWDCKVIPGKCAVSQHKLVLVAKIARTKVGADRGEGKKSSRKGPSKRPLGRKKMIQTTCGRRWQSAFGR

SEQ ID NO: 46290 - protein, 114 aa, Zea mays
  Coding DNA Sequence Number=SeqID_4511
  Gene Ontology: Mol. function=unfolded protein binding; Cellular component=cytoskeleton; Biological process=cellular protein metabolic process
  Homolog annotation: Hit_ID=Q6K3R8; Match level="QueryCoverage=93%, HitCoverage=19%, E-value=1e-44, Identity=87%"; Hit description =Putative chaperonin containing TCP1, subunit 3
MALHAPVHVMKDSLKRESGAKVHQANIQAAKAVADIIRTTLGPRSMLKMLLDAGGGIVVTNDGNSILREIDIAHPAAKSMIELSRTQDEEVGDGTTSVIVLGISHKHVNTILGF

SEQ ID NO: 46291 - protein, 73 aa, Zea mays
  Coding DNA Sequence Number=SeqID_4512
MAGEAGVVSGGVWRRGRARERAKLCEMRRGASRGTGRALRRELGTWASVVAEKSGDVRECALAGPRRVRGGQI

SEQ ID NO: 46292 - protein, 289 aa, Zea mays
  Coding DNA Sequence Number=SeqID_4513
  Gene Ontology: Mol. function=peroxidase activity; Cellular component =vacuole; Biological process=response to oxidative stress
  Homolog annotation: Hit_ID=Q5I3F2; Match level="QueryCoverage=97%, HitCoverage=97%, E-value=1e-112, Identity=67%"; Hit description =Peroxidase 6
  Pfam annotation: Domain name=peroxidase; Domain location=44-251; Score=305.8; E_value=8.2e-89; Accession=PF00141.13; Description =Peroxidase
  Subcellular localization annotation: CTP_CleavageSite=45; ConfidenceScore=5.16e-01
MASFRTSWHCLLAACLFLLASAAHGQQLSSSFYAATCPTLELIVRTTMLTALLAERRMGASLVRLFFHDCFVQIKANVELICPGVVSCADIVALAARDGTFLLGGPSWAVPLGRRDSTTASLALANSDLPSPVSGLAALLAAFGNKGLGPGDLTALSGAHTIGFSQCQNFRAHIYNDTDIDPAFASLRQRTCPAAPGTGDSSLAPLDVQTQLVFDNAYYRNLLAKRGLLRSDQALFNGGSQDALVRQYSANPALFASDFANAMIKMGNISPLTGTAGQIRANCRVVNSS

SEQ ID NO: 46293 - protein, 89 aa, Zea mays
  Coding DNA Sequence Number=SeqID_4514
MERSVRLLGLFSPAKKVAATLSTIPGAKGSTQNNKKIKVRVQKKAAKETEENPGLAHRTVRCATEQCPVHQEPYRLNSSPSGFWKATLL

SEQ ID NO: 46294 - protein, 193 aa, Zea mays
  Coding DNA Sequence Number=SeqID_4515
MGRRMALARSLQPLHSAVSAARLTSRLGAEVDRAVSQDMGTSLINFYLDWCHGERGIAPHSLSQQQQKSERRPTWNNLVWTFATLLSIGAPRPLIDLPRFIPSLDHPLMCEPLPLSLPYSQQLRLFGLISFSHPRFHNCELLAQGSNFSHIGPKVRCVKHILPKTRFLPHQQSGREWVGVGLLFWRGVITQLY

SEQ ID NO: 46295 - protein, 349 aa, Zea mays
  Coding DNA Sequence Number=SeqID_4516
  Gene Ontology: Mol. function=protein binding; Cellular component =cytoplasm; Biological process=biological_process
  Homolog annotation: Hit_ID=Q6H527; Match level="QueryCoverage=60%, HitCoverage=63%, E-value=9e-90, Identity=80%"; Hit description =Putative sds22+
  Pfam annotation: Domain name=LRR_1; Domain location=111-131; Score =5.1; E_value=31; Accession=PF00560.23; Description=Leucine Rich Repeat
  Pfam annotation: Domain name=LRR_1; Domain location=133-153; Score =13.1; E_value=1; Accession=PF00560.23; Description=Leucine Rich Repeat
  Pfam annotation: Domain name=LRR_1; Domain location=155-175; Score =13.4; E_value=0.83; Accession=PF00560.23; Description=Leucine Rich Repeat
  Pfam annotation: Domain name=LRR_1; Domain location=177-197; Score =6.3; E_value=19; Accession=PF00560.23; Description=Leucine Rich Repeat
  Pfam annotation: Domain name=LRR_1; Domain location=23-43; Score=3.5; E_value=63; Accession=PF00560.23; Description=Leucine Rich Repeat
  Pfam annotation: Domain name=LRR_1; Domain location=46-66; Score=7.4; E_value=12; Accession=PF00560.23; Description=Leucine Rich Repeat
  Pfam annotation: Domain name=LRR_1; Domain location=68-88; Score=8.5; E_value=7.5; Accession=PF00560.23; Description=Leucine Rich Repeat
  Pfam annotation: Domain name=LRR_1; Domain location=90-109; Score =3.6; E_value=61; Accession=PF00560.23; Description=Leucine Rich Repeat
  Pfam module annotation: Pfam domain module=LRR_1::LRR_1::LRR_1::LRR _1::LRR_1::LRR_1::LRR_1::LRR_1; Domain location=111-131::133-153::155- 175::177-197::23-43::46-66::68-88::90-109
MDQEFVIRDNKLTRIPDAGIFKDLLVFDVSFNEISSLTGLSKVSIKLKELYVSKNEVAKMEELEHFHALEILELGSNRLRVMENLETLTNLQELWLGRNRIRAVNLCGLKLIKKISLQSNRLTSMHGFQECAALEELYLSHNGIQKMEGLSTLHNLRILDVSANKLTTIENIETLTRLEDLWLNDNQIPSLEGIETALAGSREKLTTIYLERNPCDSNVRLLGDALTSDIDPSLVNEIENKLKGISEKEVTCTMVFLKMSSTREIDASSDTKAKKALGFPGEVINSNQLVRRTIDSNLILKVFIANSARVVEDIGSEFVALSRYGLNIVIGNQIIRGVRGLSQDPYPCY

SEQ ID NO: 46296 - protein, 129 aa, Zea mays
  Coding DNA Sequence Number=SeqID_4517
MDTNLDIADVVVDVGPVHWIQTINNAEGTWKPAPLLLWLQIPPVHPQALQVLPLTTRARAGESRSIGMWPAATMFALGFLLCPFPALSPSARNLTALLPELRDLFGSLYRHCRQEFVLLASTRRRRRGS

SEQ ID NO: 46297 - protein, 210 aa, Zea mays
  Coding DNA Sequence Number=SeqID_4518
  Homolog annotation: Hit_ID=Q6H667; Match level="QueryCoverage=97%, HitCoverage=70%, E-value=9e-42, Identity=52%"; Hit description =Thylakoid lumenal protein-like
  Pfam annotation: Domain name=Pentapeptide; Domain location=133-172; Score=43.0; E_value=1e-09; Accession=PF00805.12; Description =Pentapeptide repeats (8 copies)
  Subcellular localization annotation: CTP_CleavageSite=35; ConfidenceScore=5.66e-01
MTPASTSPLAAAVLPTNLSSFSRCPPRRLPRISCLAAPERGGNNASNASPAPQQPRWGAAVSAALAAAVVAASMPAYADLNKFEAEQRGEFGIGSAAQFGSADLKYASTSASSSLLHDHFVVTLPRKAVHVNENFRRANFTSADMRESDFSGSTFNGAYLEKAVAYKANFTGADLSDTLMDRMCPFSKYLNNMDKPNSLIDQSFRGCRMR

SEQ ID NO: 46298 - protein, 295 aa, Zea mays
  Coding DNA Sequence Number=SeqID_4519
  Gene Ontology: Mol. function=DNA binding; Cellular component=nucleus; Biological process=regulation of transcription
  Homolog annotation: Hit_ID=Q6H666; Match level="QueryCoverage=97%, HitCoverage=85%, E-value=1e-101, Identity=63%"; Hit description =Putative OsNAC7 protein
  Pfam annotation: Domain name=NAM; Domain location=2-89; Score=133.6; E_value=5.5e-37; Accession=PF02365.6; Description=No apical meristem (NAM) protein
MHLEWAEKCKIGMEEQNDWYFFSHKDKKYPTGTRTNRATTAGFWKATGRDKPIYTKSCLVGMRKTLVFYRGRAPNGHKSDWIMHEYRLETTENGTAPEEGWVVCRVFKKRVATVRRMADGAPWFDNHVAGGFMPDLVGSVPRQLMHHHPNAVAAVYSGQQQLYHCKPELEYHHLLPSQDAFLQQLPQLESPKPPPAYIAAQGSCSLQSPDDASGYTARQLPMTEAAYMDDSVTDWRVLDKFVASQLVSHGGDDTAKETAYSSPAQAFQSENRQPEEALDFASTSASGDGEASMWK

SEQ ID NO: 46299 - protein, 323 aa, Zea mays
  Coding DNA Sequence Number=SeqID_4520
  Gene Ontology: Mol. function=RNA-directed DNA polymerase activity; Biological process=RNA-dependent DNA replication
  Homolog annotation: Hit_ID=Q8W0Y2; Match level="QueryCoverage=99%, HitCoverage=16%, E-value=1e-130, Identity=74%"; Hit description =Putative gag-pol
MGSLQQPLQPGTVLRFGSLEFMSLDGSYDMILLPPPCDSDNGGRQPARRRRNRRRLPRVVEEQHSSSLRPLPHRRRRRRGNQGQAGGGTSSAVEQVDGAGAPTGGASGIDLAFETKTSAVSLQHANSEQTDDASTLAKGLLGVTLVPETTVQSVPDVTSSPPVDQEDRLTDVSTYGPSGSEEDDEPDFCWDFSGLGNPSAMWDFMTACDYCLSDCSDGSRSLGDEDGGPSRECFHVDLGGPSEGNHLGMPENGDLPRTVPCVDILRELAVVPVQAGGHDPQLEQIRGVQARLDEVAGALEPIPRDVGQEWAGQPPAREMRHLP

SEQ ID NO: 46300 - protein, 87 aa, Zea mays
  Coding DNA Sequence Number=SeqID_4521
  Subcellular localization annotation: CTP_CleavageSite=24; ConfidenceScore=5.16e-01
MASSSGQTLPRPSPASATCSPRIPQEAISSTVSPELGFSLDIINGKAPDVTRNSGVDEWLFVMLSTSPTTMTWAASPLGRLGHVTDP

SEQ ID NO: 46301 - protein, 125 aa, Zea mays
  Coding DNA Sequence Number=SeqID_4522
  Subcellular localization annotation: CTP_CleavageSite=55; ConfidenceScore=5.21e-01
MHGDGGAPRTVPVPNSPPPPRPKTLILSHIIHSRLRRHGLLSSHSMHSQRTSPCSSSHIGLDCFTFPIIVKCCSTTVWLGEGYAVHITVIKLGSTPMSTPPTFIVLYANGGGGLKAKPEHHCDCR

SEQ ID NO: 46302 - protein, 77 aa, Zea mays
  Coding DNA Sequence Number=SeqID_4523
MHRAEPAARQDEEERGIMEEGEGGFISFMGTVDPDKPPKFAPGLPLQMQRFSLGLALEIRREWVFFPKSDLERNALT

SEQ ID NO: 46303 - protein, 515 aa, Zea mays
  Coding DNA Sequence Number=SeqID_4524
  Gene Ontology: Mol. function=protein kinase binding; Biological process=regulation of cyclin-dependent protein kinase activity
  Homolog annotation: Hit_ID=Q6Z7H4; Match level="QueryCoverage=93%, HitCoverage=81%, E-value=1e-128, Identity=51%"; Hit description =Cyclin K-like
MDGRSLRDWAFQRNLKNSVREGNTVLQTIATVCVFLASKVEDTPCPLDYVVRVSYETMYRRDTAAAQRIRQKHPYRPLLDAMQNLGINKKEVKQVAWNFVNDWLKTTLCLQYKPQYIAAGSLYLAARLHDIKLPLHGAHVWWHQFGVAPKPLEAVIHQMMELAAVNKSNPVRPNLVKPKETLCEAKLSLSNSPDSVLNQSSLLISSSSPDIGETSDQVQVDSCQYLISSHTGDCRVSCPDNSSLDTSGKAHDEERLDQALITKHDSGMMPSTSNQTSLDATVGTESSAEYMKQDVSHCDDFNIRVNDQSLNQALRNQHGDAVPLPDMVSLDAKVDKESSWCLEPLIANFDCCIDSVNVDSLCTDQRLADVASGPTADVPSVLLAKENSDPLSAKLENIDVARIKGLLMKRKSRREIQNQAIASDGLSEEAWIERELESGIVTKQEANCAAISDELSDEAWIERELESGIVTGPTNEQAITFDGLSENDWIERELESGIIIEPAPAIKKRKLESSC

SEQ ID NO: 46304 - protein, 581 aa, Zea mays
  Coding DNA Sequence Number=SeqID_4525
  Gene Ontology: Mol. function=RNA polymerase II transcription factor activity; Cellular component=transcription factor TFIID complex; Biological process=transcription initiation from RNA polymerase II promoter
  Homolog annotation: Hit_ID=Q6JAE2; Match level="QueryCoverage=53%, HitCoverage=91%, E-value=1e-159, Identity=82%"; Hit description=TATA sequence-binding protein 2
  Pfam annotation: Domain name=NusB; Domain location=84-256; Score= -17.4; E_value=0.035; Accession=PF01029.9; Description=NusB family
  Pfam annotation: Domain name=TBP; Domain location=404-472; Score =61.3; E_value=3.2e-15; Accession=PF00352.12; Description =Transcription factor TFIID (or TATA-binding protein, TBP)
  Pfam annotation: Domain name=TBP; Domain location=473-532; Score=8.4; E_value=0.00022; Accession=PF00352.12; Description=Transcription factor TFIID (or TATA-binding protein, TBP)
  Pfam module annotation: Pfam domain module=NusB::TBP::TBP; Domain location=84-256::404-472::473-532
  Subcellular localization annotation: CTP_CleavageSite=84; ConfidenceScore=5.79e-01
MEAAPSARAFSPSSSPSAGARPSLPLAGLASRRARVLAAPPPPRAVASSRAPLVVSSPPPPEDSGTHNPAHAKVDRSGRFCSPRAARELALMISYAACLEGTDVVRLFDRRISARREPGFVFNKACLLNYNHMSFGGGPLEVGTEQEAEKLASQNDKDSANEADVLSAPPKLVYNNYVLRELLVAVASGWDKHVVIIDKIIPQAWKDEPVARILELCILHIAMAEMASKGTPHKVVINEAVDLAKRFCDGGAPRANTFCLQGLAFNLRESKSSVPLNRGMKPFLAAISVSPGASAFKRRGTWGSFELKESGGNEMDGEYARHWMSADVKSRVSSSVGRSGSDDLFRPYEISGWAGYASLVAAILKLHETVRMDWPNSWAAVVPSSSVMLRDCGTMLKIRLCSHEEGNKDRNIVSTVNLDCKLDLKAIALQARNAEYNPKRFAAVIMRIREPKTTALIFASGKMYARIIQKLGFPAKFKNIVGSCDVKFPIRLEGLAYSHGAFSSKIVLTGAKVREETYTAFENIYPVLSEFRKIQQWVDGYSVQLTYVMYSFMEHVWDWAPMTCDVKVTFFKLQASSRILV

SEQ ID NO: 46305 - protein, 140 aa, Zea mays
  Coding DNA Sequence Number=SeqID_4526
  Gene Ontology: Mol. function=sequence-specific DNA binding; Cellular component=nucleus; Biological process=regulation of transcription
  Homolog annotation: Hit_ID=Q6JAE3; Match level="QueryCoverage=99%, HitCoverage=100%, E-value=1e-47, Identity=69%"; Hit description =Putative DNA-binding protein
  Pfam annotation: Domain name=WRKY; Domain location=47-107; Score =75.6; E_value=1.6e-19; Accession=PF03106.6; Description=WRKY DNA -binding domain
MDDSSSQPATIVSGGEERNQRREEDDDEETAAAEAEAGNGSQLMVVPEDGYEWKKYGQKFIKNIQKIRSYFRCRHRLCGAKKKVEWHPRDPSAALRVVYDGAHQHGAAPPAAPEQGGGGGASNRYELGAQYFGAGPAGSG

SEQ ID NO: 46306 - protein, 168 aa, Zea mays
  Coding DNA Sequence Number=SeqID_4527
  Gene Ontology: Mol. function=structural constituent of cell wall
  Homolog annotation: Hit_ID=Q3SNT6; Match level="QueryCoverage=80%, HitCoverage=22%, E-value=1e-07, Identity=30%"; Hit description =OmpA/MotB
  Subcellular localization annotation: CTP_CleavageSite=83; ConfidenceScore=5.42e-01
CPRLHPPDLRNPRRSKPPANPAPASTARRPEYSPPQTARPTDRRRDPQARKSFRESRRDHRNPFAASPNNPEPPLQSVRRVAPAAYSAANQNPRAQSPACGPELNPPSQARGKTQMAPAGGQQQPMKRPRPTEFSGPPAPSPPALDLRCCSRLLPVWCPLDLSVAAGA

SEQ ID NO: 46307 - protein, 492 aa, Zea mays
  Coding DNA Sequence Number=SeqID_4528
  Gene Ontology: Mol. function=hydrolase activity, hydrolyzing O -glycosyl compounds; Cellular component=membrane; Biological process =carbohydrate metabolic process
  Homolog annotation: Hit_ID=Q8W0R0; Match level="QueryCoverage=87%, HitCoverage=87%, E-value=0.0, Identity=88%"; Hit description=3 -glucanase
  Pfam annotation: Domain name=Glyco_hydro_17; Domain location=34-355; Score=257.8; E_value=2.2e-74; Accession=PF00332.9; Description =Glycosyl hydrolases family 17
  Pfam annotation: Domain name=X8; Domain location=376-459; Score =132.8; E_value=9.2e-37; Accession=PF07983.3; Description=X8 domain
  Pfam module annotation: Pfam domain module=Glyco_hydro_17::X8; Domain location=34-355::376-459
MAAASYDRLAVAASAVVVAAVALAVAGLPAAGALGVNWGTMATHQLPPATVVRMLEDNGIRKVKLFDADAGPMDALAGTSVEVMVAIPNNMLDMMTDYGTARDWVRQNVSRYNFDGGVNIKYVAVGNEPFLSSFNGTFLNVTLPALQNIQRALNDAGFGDTIKATVPLNADVYNSPKDNLVPSAGRFRPDIAGLMTEIVQFLNQSGAPFTVNIYPFLSLYDNDDFPLDYAFFDGTGSPVVDNGIQYTNVFDANFDTLVSALAAAGVGGLPVVVGEVGWPTDGDKHATAAFAQKFYAGLLRKLAASAGTPLRPGQYIEVYLFSLIDEDAKSVAPGNFERHWGIMRYDGQPKYAMDLSGQGRNTALVAARGVQYLPRQWCVVNPNAQDTSKIGDSVTYACTFSDCTSLGYGSSCNGLDAAGNASYAFNMYFQVQNQVEGSCYFQGLAVPTSQNPSTDACNFTIQITPSAAGRRRAAAATALLLVVLLAAVHVAP

SEQ ID NO: 46308 - protein, 461 aa, Zea mays
  Coding DNA Sequence Number=SeqID_4529
  Gene Ontology: Mol. function=nucleic acid binding; Cellular component= protein complex; Biological process=microtubule-based process
  Homolog annotation: Hit_ID=Q6JAE0; Match level="QueryCoverage=92%, HitCoverage=98%, E-value=0.0, Identity=87%"; Hit description =Putative tubulin gamma-2 chain
  Pfam annotation: Domain name=Tubulin_C; Domain location=60-180; Score= 63.8; E_value=5.7e-16; Accession=PF03953.7; Description=TubulinFtsZ family, C-terminal domain
  Pfam annotation: Domain name=zf-CCHC; Domain location=364-383; Score =10.2; E_value=0.02; Accession=PF00098.13; Description=Zinc knuckle
  Pfam module annotation: Pfam domain module=Tubulin_C::zf-CCHC; Domain location=60-180::364-383
MACAAVWFKLRNQSVFHGVVLRRDPPLAIPREQTHSSKKFRPCLTVISASTTTLRHPGYMNNDLVGLLASLIPTPRCHFLMTGYTPLTVERQVNMIRKTTVLDVMRRLLQTKNVMVSSYARTKEASQAKYISILNIIQGEVDPTQTFPPHGRRPGLPHRDVVVVLDFATTMSVAMNGDEQVEMDWSLNQGNTIDSSVTLPEQAPPLVDWDLIQIQEEKEEEGITELCSEEQVYALLGLSREDEREEEMATDSKSRADGPNASIVLDIEGVEDVPMVVNDYILQETVTEYDKDNPSLDVGTIYPCMEDFRLAVRQYAINKEFELGIRATSKSRYRGYCKGGDCPWSVSGFKKKGEVAVMVLTSKVRCPNCGELGHRKTSYKCPLNGTKKILFGYQGFRAIFTAPVTSSKLSQNADVFVRLSGIKIYKSVRRRIDNMHQRLRLLEQHMETLLRPKLAKLLTMC

SEQ ID NO: 46309 - protein, 132 aa, Zea mays
  Coding DNA Sequence Number=SeqID_4530
  Gene Ontology: Mol. function=protein serine/threonine kinase activity; Cellular component=nucleus; Biological process=protein amino acid phosphorylation
  Homolog annotation: Hit_ID=Q6JAD7; Match level="QueryCoverage=99%, HitCoverage=78%, E-value=3e-71, Identity=100%"; Hit description =Putative casein kinase I
MDHIVGGKFKLRKKIRSESFGEIYLAVNVQNGEEVAVKLESVTSRHPQLHYESKLYMLLQGGTGIPHLKWFGVEGQYNVMVTLVDRIIALLALFYQEMVYLLGSCSVSVNHVLLNPGWMFYFSSRFLEVDDK

SEQ ID NO: 46310 - protein, 151 aa, Zea mays
  Coding DNA Sequence Number=SeqID_4531
MGAKLPHIQTHHGYIEDSHRRSAQTFRRSGSSGLVWDERFITEGAGAAAPRQQPELRHSRSVGSVAMLLLGGEADRDDKRKLTLAKPNLKGHHKKQEELVPGRKAFRTRDVAPAAEPPSPRVLAICCAPCSIFRDAGAGGSSSLARRAKKR

SEQ ID NO: 46311 - protein, 160 aa, Zea mays
  Coding DNA Sequence Number=SeqID_4532
  Gene Ontology: Mol. function=protein dimerization activity; Cellular component=nucleus; Biological process=regulation of transcription, DNA-dependent
  Homolog annotation: Hit_ID=Q69XK6; Match level="QueryCoverage=96%, HitCoverage=84%, E-value=9e-32, Identity=50%"; Hit description =Putative bZIP protein HY5
  Pfam annotation: Domain name=bZIP_1; Domain location=80-141; Score =39.5; E_value=1.2e-08; Accession=PF00170.11; Description=bZIP transcription factor
  Pfam annotation: Domain name=bZIP_2; Domain location=78-131; Score =38.5; E_value=2.3e-08; Accession=PF07716.5; Description=Basic region leucine zipper
  Pfam module annotation: Pfam domain module=bZIP_1::bZIP_2; Domain location=80-141::78-131
MESDDEIRRVPELGLELPGASTSGREAGPGAAGADRALAQSSTAQASARRRVRSHADKEHKRLKRLGGGDMHAIARHGPGCKWVRLLRNRVSAQQARERKKAYLTDLEVKVRDLEKKNSEMEERLSTLQNENQMLRQILKNTAVNRRGSGSTASGEGHGQ

SEQ ID NO: 46312 - protein, 38 aa, Zea mays
  Coding DNA Sequence Number=SeqID_4533
MPGRRLAIYMLSLTKPTMVVFARFLKRSLSLKVQRVQT

SEQ ID NO: 46313 - protein, 155 aa, Zea mays
  Coding DNA Sequence Number=SeqID_4534
MMVLALVVATSFAILLLFSLPSCLRLRATPFSVEGLGAGASSPYSSDTSPDIDLHIGYCISMTTFHIMRAPSFSLSSDVLFVFPAFSLFFLPNLLPLHGRSRELIDARRLEYGASQSCSWPFSVCAAEEDMVAPATLSYLSDEEYRFEILDNQGL

SEQ ID NO: 46314 - protein, 164 aa, Zea mays
  Coding DNA Sequence Number=SeqID_4535
MAAMAVARPHAASRARGSVARVENTRGEGIAARGGARGWGYRDKDELDADPPRATSLAGRDAAARGGCWPRCALRLRRAGQDWPPRRAGCHTRRARAHPRRDAAPRDAARHGLLVDQAIARAGASGLLDQWKRRRVHREGNTPGNRCPPRLRSGSGRDKGLCGV

SEQ ID NO: 46315 - protein, 169 aa, Zea mays
  Coding DNA Sequence Number=SeqID_4536
  Pfam annotation: Domain name=zf-CCHC; Domain location=101-118; Score =19.2; E_value=0.00066; Accession=PF00098.13; Description=Zinc knuckle
MNPNEDKVDEVNDKIPTPTVVKRKDESHGYLLNGMKNDQRTRKMFGYKIKPPQPQAEAPELMNTQIGVSYQAQLFNMQATDQPSSAGNQAKLTRREVKARGACFYCKEEGHFICQCPKKRLDRLAKKAFKQNSTSDDLEEIVFTRSKYKLIQSSDESGRLLDVRVEPRE

SEQ ID NO: 46316 - protein, 164 aa, Zea mays
  Coding DNA Sequence Number=SeqID_4537
MAAMAVARPHAASRARGSVARVENTRGEGTAARGGARGWGYRDKDELDADPPRATSLAGRDAAARGGCWPRCVLRPRRAGQDWPPRRAGCHTRRARAYPRRDAAPGDAARHGLLVDQAIARAGASGLLDQWKRRRVHGEGNTPGNRCPPRLRSGSGRDKGLCGV

SEQ ID NO: 46317 - protein, 300 aa, Zea mays
  Coding DNA Sequence Number=SeqID_4538
MVHDELGYRTKLTAWAHNTVTGKELVHGKGWLTARARPSVITARVMGERWLMTWWGPYGGESTAVSGSTSVRLAPRAHALERTPREPQHARPRPASGVIGNSASPDPRARTRAQPRKTANSAPPDPGPGLELSPGRRRTPLRPTQGPDSGSAPEDGELPSARPRARTRAQPRKTANSAPPDPGLGLGLSPGRRRTPLRPTQGSDSGSAPEDGELRSARPRARTRAQPRKTANSASPDPRARTWALPRKTTNSASPDPRARTQPWPQPTVSASPNPGARTRLRPRKTDSTSTSEEPPPCPT

SEQ ID NO: 46318 - protein, 135 aa, Zea mays
  Coding DNA Sequence Number=SeqID_4539
MGDEIGCGDQGSQVRARPTGLRRNTAKIQYGPRRTRLQDEADRLGPQHSDQERARAWKGVADCQGLLVGDYRACDGGTVAYDMVGAIWRRKYCSQWKHECETDAKGPRARTHPQRATARTRCSHMMMHKGSIPHI

SEQ ID NO: 46319 - protein, 159 aa, Zea mays
  Coding DNA Sequence Number=SeqID_4540
  Subcellular localization annotation: CTP_CleavageSite=35; ConfidenceScore=5.13e-01
MVGTTSDLLFLVFSPFDPDLKRAMQKPSTQLKKPSSGMVADTTTAGELWKEPAPAPAPAVLPPLQLQRHKVRRPLLQQDLPHLIASNLTKKRDVRPVTVVENQLDAVLRGGPPGKRWVVDAMIGGFVASLYLPKLVDSKLIIIIIIIIHQWRRWWIRLL

SEQ ID NO: 46320 - protein, 159 aa, Zea mays
  Coding DNA Sequence Number=SeqID_4541
MWSKMLNKRKAIHSYLVHKVQHKPINIQVRDPIQKEQKGLECAVDWRTGLSGVPPDSVRCTRTVQGSTSHSRENAGELRYNSPDCPRYSAGAEVRAVVRGAPDCSVPQEDKGANDQLLQNPNGWVTWRRSGQPTMPVRWRIGLSGALIDSSLPNGDFGG

SEQ ID NO: 46321 - protein, 49 aa, Zea mays
  Coding DNA Sequence Number=SeqID_4542
MTMLTPSLLQLLGRPSLPLRSHSPAPALLTMILSCGPSRSFLGPLLNAN

SEQ ID NO: 46322 - protein, 98 aa, Zea mays
  Coding DNA Sequence Number=SeqID_4543
  Subcellular localization annotation: CTP_CleavageSite=21; ConfidenceScore=5.03e-01
VQEEGQGGLGRGAAWTARALRAGRRSSGVQHAGAVGFRGCASMLELGRGVGSVGVQRRLGGGCSAKSRARCELGALGSGVARHGAGRAARAASASWRA

SEQ ID NO: 46323 - protein, 147 aa, Zea mays
  Coding DNA Sequence Number=SeqID_4544
MANALRRNRSWERRMSSNELWGHVRQGNRGTMATSRNTGMVDKRNGGAAEKRWHDEETPRQRKETAWGKRKGIDKRQSGKEQQVVMQVTPSLGHRLVSGDGRRRRAATQVGDRWHREPIQSPSAQQATSDSRQAMPRQMMIESRWLC

SEQ ID NO: 46324 - protein, 179 aa, Zea mays
  Coding DNA Sequence Number=SeqID_4545
  Homolog annotation: Hit_ID=Q6YUT6; Match level="QueryCoverage=79%, HitCoverage=19%, E-value=3e-33, Identity=61%"; Hit description =Putative pentatricopeptide (PPR) repeat-containing protein
MWMRGFATSGAAEGSIVRRHAACSIRQSPARARAPAAQHLKTKWKVKAPVRTPPAAHAAEEEDGMVCAGGGLEAGAEGGVEEESGGVRQSVEQAEHVAQVARGRDGVGERAEEVLGGRTVSNAAGRGKEGVELGRLPHGARGWPWRRRHGTAACSRSGGQDSACAVPVSRSRGSKFETV

SEQ ID NO: 46325 - protein, 664 aa, Zea mays
  Coding DNA Sequence Number=SeqID_4546
  Gene Ontology: Mol. function=binding; Cellular component =intracellular; Biological process=protein kinase C activation
  Homolog annotation: Hit_ID=Q6YUT6; Match level="QueryCoverage=84%, HitCoverage=75%, E-value=0.0, Identity=72%"; Hit description =Putative pentatricopeptide (PPR) repeat-containing protein
  Pfam annotation: Domain name=PPR; Domain location=184-218; Score =43.9; E_value=5.6e-10; Accession=PF01535.11; Description=PPR repeat
  Pfam annotation: Domain name=PPR; Domain location=285-319; Score =41.1; E_value=3.8e-09; Accession=PF01535.11; Description=PPR repeat
  Pfam annotation: Domain name=PPR; Domain location=320-353; Score=9.1; E_value=0.63; Accession=PF01535.11; Description=PPR repeat
  Pfam annotation: Domain name=PPR; Domain location=356-390; Score =12.6; E_value=0.24; Accession=PF01535.11; Description=PPR repeat
  Pfam annotation: Domain name=PPR; Domain location=422-456; Score=1.7; E_value=4.7; Accession=PF01535.11; Description=PPR repeat
  Pfam annotation: Domain name=PPR; Domain location=51-85; Score=42.3; E_value=1.7e-09; Accession=PF01535.11; Description=PPR repeat
  Pfam module annotation: Pfam domain module=PPR::PPR::PPR::PPR::PPR::PP R; Domain location=184-218::285-319::320-353::356-390::422-456::51-85
MGLTDDARRAFDEIPAKDAVVWATVIGGLVRWGLLDEARRLLVQAPERNVVSWTSLIAGYSRAGRPADAVYCFNCMLSDGVAPDEVAVIGALSACSKLKNLDLGRLLHLLVGQKRIRMTDNLVVALIDMYAKCGDIAQAQAVFDAVGRGQKPEPWNAIIDGYCKLGHVDVARSLFDQMGARDVITFNSMITGYIHSGRLRDALQLFMQMRRHGMRADNFTVVSLLTACASLGALPHGRALHASIEQRIVEEDVYLGTALLDMYMKCGRVDEATAVFHRMGERDVHTWTAMIAGLAFNGMGKDALESFCQMKRDGFQPTSVTYIAVLTACSHSSLLDEGRLHFNEMRSLHKLHPQVEHYGCMIDLLARSGLLDEAMHLVQTMPMQPNAVIWGSILSACRVHKNIDLARHAAEHLLKLAPEEDAVYVQLYNIYIDSRQWADAKRVRMLMEERGVKKTAGYSSITVAGQVHKFVANDQSHPWTLEIMAMMEEIACRLKSVGYSPVTSRIAVDVDEEEKEQALLAHSEKIAIAFGLISLPPSLPIHIVKNLRAEPKPAHAARLLRRPPSASALSDIPCDQPLAGGVGGYGDDGRGVRLLLGGATALSVVAWDPLDPPAPGAFSSSRGPCGLLPEAQGAGTAVESFVRSKEARFLLWQGQFGRGAVANG

SEQ ID NO: 46326 - protein, 351 aa, Zea mays
  Coding DNA Sequence Number=SeqID_4547
  Homolog annotation: Hit_ID=Q60CZ4; Match level="QueryCoverage=37%, HitCoverage=36%, E-value=1e-18, Identity=38%"; Hit description =Uncharacterized plant-specific domain TIGR01589 family protein
MATEEVLHKVLLVEEPRFGKNHAVQSLILRCLQMYMDQKEVVDALSHHSKIEPCITELVWRQLEHQNPLFFKAYYMRLMLKNQIMVFNKLLQDQFEVINKEFSSGIPSMSLPNGSNSNLLKQNPCFLPETAPGSAMPDGIMHNGSSRGIINGTPSGDQLLNASKDLHGLHNGIDASTSLQSDQNAAAVLYGVDNETSATIKTESCYSSNADFAFCGNTFLESCQSIGDASGGGSFSSSELNGQPLNDSILDMESSSFSFLNQMPQSFIFPDLGDDFNQSAEITQFLTPETNFSDSTGGDHTVATSGGQTCILVFTGVLPQQVERGHAQRTNHLYIRSWAVKPALMKSLRTF

SEQ ID NO: 46327 - protein, 310 aa, Zea mays
  Coding DNA Sequence Number=SeqID_4548
  Gene Ontology: Mol. function=receptor activity; Cellular component =endoplasmic reticulum; Biological process=UDP-N-acetylgalactosamine metabolic process
  Homolog annotation: Hit_ID=Q5Z8V4; Match level="QueryCoverage=74%, HitCoverage=64%, E-value=4e-82, Identity=71%"; Hit description =Putative Reg receptor
  Pfam annotation: Domain name=EXTL2; Domain location=81-308; Score =280.5; E_value=3.3e-81; Accession=PF09258.1; Description=EXTL2, alpha-1,4-N-acetylhexosaminyltra
  Subcellular localization annotation: CTP_CleavageSite=29; ConfidenceScore=5.17e-01
MAKLLLQLKAAADRRHGPGPGRRHPLAPRHAAASATRFVPACLALAAAATTLVALALTLQNRGLGPADPSPSSVSPRGGGFAVVVNTWRRPALLRRSVAHYAACGGVDAVHVVWSEPRPPPEPLRRGVLGLGGARRRVRFEINAGDSLNNRFRPIRALESDAVFSVDDDLIVPCSALRFAFSVWRTAPSAMVGFVPRMHWPTDPRSTEDAYRYGSWWSVWWTGTYSMVLSKAGFFHKKYLEMYTNQMPPSIRRYVDENRNCEDIAMAFLVANATGAPPIWVQAGTFLTSLSLDILPQEGYLRLDRAASAA

SEQ ID NO: 46328 - protein, 59 aa, Zea mays
  Coding DNA Sequence Number=SeqID_4549
MAAARMQLGTWGWAAPARWRLGGRLVRARSDRWREGSLCNVLVQSTGLVKCTGSMNLSC

SEQ ID NO: 46329 - protein, 223 aa, Zea mays
  Coding DNA Sequence Number=SeqID_4550
MKVCPSRPSSEDRYIQKEIMFQRTKRPSPASGAIGNSASPDPRARTRARLRKTTNSASPDPRARTRPRLRKTTNSALPDPRARTRARPRKTTNSASPDPRARTRARPWKTMNSASPDPRAQTQPCPQAMVSASPDPGLRLDLNLGRQTRPRPRRSHRLARPRARTDHVIGGAIITLSLASSGYGEQDRRPIWLAPGPPGVETPTVGAPGRGLLRVDEQLPVKL

SEQ ID NO: 46330 - protein, 311 aa, Zea mays
  Coding DNA Sequence Number=SeqID_4551
  Gene Ontology: Mol. function=sugar porter activity; Cellular component=intracellular; Biological process=metabolic process
  Homolog annotation: Hit_ID=Q6K8H8; Match level="QueryCoverage=99%, HitCoverage=98%, E-value=3e-98, Identity=40%"; Hit description =Selenium binding protein-like protein
  Pfam annotation: Domain name=PPR; Domain location=118-152; Score =42.3; E_value=1.6e-09; Accession=PF01535.11; Description=PPR repeat
  Pfam annotation: Domain name=PPR; Domain location=220-254; Score =29.3; E_value=1.4e-05; Accession=PF01535.11; Description=PPR repeat
  Pfam module annotation: Pfam domain module=PPR::PPR; Domain location =118-152::220-254
MSDTTPAATALNHWNRSIQLAAASGSYGHCLRLYAGPLLAAGLRGDASTFPSLAKSCAALRLPGLGRAVHALAFLSGAAVSRDAFVRTSLVDMYAKCGRLPDAHRLFDETPCSSRTLVAWNCMISAYGRSSQVEEAVGVFNAMRRAEVRPSGSTVVGLLSGCADSVSARYPGVSVYGLTIKSGLDADLLVSNSVLTMLVRGGQLDSARLLFDRVENKSVVTWSAMASAYLQTGDWMEVFALFSSMRETEQPMDSVVLANLITAAMLFGNNLVAKGVHALAIKWKKARSYRTLISKQGLVKKPGWSYIELGG

SEQ ID NO: 46331 - protein, 251 aa, Zea mays
  Coding DNA Sequence Number=SeqID_4552
  Gene Ontology: Mol. function=kinase activity
  Homolog annotation: Hit_ID=Q6QP54; Match level="QueryCoverage=56%, HitCoverage=38%, E-value=9e-17, Identity=53%"; Hit description =Putative kinase
  Subcellular localization annotation: CTP_CleavageSite=60; ConfidenceScore=5.03e-01
MNSDTILFALTCIHSHVMLGLLPSVKPKHLRTSPQHWRPPPVNSFDHLRQAVTFVMPPKKASGLGAALQPLDVQRKKEKMLRLADLQRKIDEAAEEIATGYTMAFIIQATPASHVSAFRTRGGLWTDERKERIQVYNGGVAAEVESEPLGRARRRPSVDARAESEPWGQAKRSSSSFGAEPESEPWGQAKRSSSSSGAAPESEPWGRVKRSSSSSGAEPESEPWGRAKRSLSSSGAEPESEPCGRAKRSFP

SEQ ID NO: 46332 - protein, 151 aa, Zea mays
  Coding DNA Sequence Number=SeqID_4553
  Homolog annotation: Hit_ID=Q6QP51; Match level="QueryCoverage=34%, HitCoverage=30%, E-value=2e-15, Identity=74%"; Hit description =Putative growth-regulating factor 1
MQAACNRTKGAHPFDFDASSMEAQAHTSCNRRASYYVRETAPPLASVLCLLDCGTGAATRGDPAHGPTVPTEHIGHGDRERGYSERDPSPRRKRALSPPTDQRFEGWPLGRVRQPPQSTRAPRPLLVRGSKVGPSEGFDSHLRPLGLRTHY

SEQ ID NO: 46333 - protein, 71 aa, Zea mays
  Coding DNA Sequence Number=SeqID_4554
MENYSGSLPRGQRHTGSERFEWQANSSLSLPSLHAMAAGLAQGFAATYICVRGGESELRGSVAGETKVGMC

SEQ ID NO: 46334 - protein, 173 aa, Zea mays
  Coding DNA Sequence Number=SeqID_4555
  Subcellular localization annotation: CTP_CleavageSite=51; ConfidenceScore=5.18e-01
KQRRASSKQRRAAALTAAASRGGRRSEQQQAEEGGSAQSSSKQRRAAALTAAASRGGRRSEQQQAEEGGSAQSSSKQRRAATLTAAASRGGRRSQQQQAEEGGGAQSSSKQGRAAALRAVSSKQMKRWRSTPARLKTVTALAQFQAFQPPWWAGPNRKEQPGAQNKAPSREQP

SEQ ID NO: 46335 - protein, 133 aa, Zea mays
  Coding DNA Sequence Number=SeqID_4556
METMETIQLLEGVAKNSKNLKLVENHENETRVATYLSGKVNAMLWLVLLLVNGMLGCSVVVKDRVAISASSPRAMKRGVSDSPKTPGYIANTKVLRKEQKCAGHFAHHEAPAMSRRQPWNKTNLEFEGGPHCG

SEQ ID NO: 46336 - protein, 246 aa, Zea mays
  Coding DNA Sequence Number=SeqID_4557
MDSSAADDPMADEAGVEDAFTQEINHSYVPRYHVLSWMETVEGMVAGVASLPPVYLILNRDLLETGWGWKRLVPYRPGYVELHVFKKYLGDYFDHNREAFLCAEQKPDPFGWIVAEKSALIAAAKSLPINLHHCKNNQNAFQCLKMEKALLRYCASFLTPDDKRLILRIKDQAKQMIQSEGDQSLIVTICLECIAKEAELMYNYLPCDFDTTEEVAVCNKVRRSALNLMLYKGSESAVAAGAMMGQ

SEQ ID NO: 46337 - protein, 85 aa, Zea mays
  Coding DNA Sequence Number=SeqID_4558
MAITFNTAIVFNVKEVFHFGSLSYITDRRGILHRVVDAGRGAPTTVPGIISGLFMGGGLCWSQLFLPTVSHGTTVLGELIIMMDE

SEQ ID NO: 46338 - protein, 397 aa, Zea mays
  Coding DNA Sequence Number=SeqID_4559
MGPRASRIFVEELMGTRVGPGEVMSSLELWETSSHMLKVTGGRWHRKDPIPRVTDDDYFMSRLAHEMRIFPYGTNISVVMSIVMEKDCQDAQQKKRNAPLRLVDPRRDANVARPSAKGISPPATMPPPVVSAATKLPLPPRVTETMVSGTGGTSQELLVDDYLVGRVTMFDAQTGLPSAGAEAGQLAVVPSTVPVGQVGAAKGDTGTSPDPWPKFCIAADGGGELASTAAAASVAASVVWQLRYVTAFADQVASGALTSQLISKRKQLEGRVEHLRTQHAKAIRDKSAAENKSCNLLNKVTALEKEKEDLSRQLNDEKEDAENARAEAQAARKRVADLELELKNMCGHHEKMESATRAGVDWAHTPLWRHTMTSARRLSPSTNQGGGGDPLLGVATG

SEQ ID NO: 46339 - protein, 421 aa, Zea mays
  Coding DNA Sequence Number=SeqID_4560
  Homolog annotation: Hit_ID=Q6ETX3; Match level="QueryCoverage=25%, HitCoverage=47%, E-value=2e-38, Identity=70%"; Hit description =Putative u1 small nuclear ribonucleoprotein C
  Pfam annotation: Domain name=hATC; Domain location=5-57; Score=-2.5; E_value=0.059; Accession=PF05699.5; Description=hAT family dimerisation domain
  Pfam annotation: Domain name=zf-U1; Domain location=194-231; Score =95.0; E_value=2.3e-25; Accession=PF06220.3; Description=U1 zinc finger
  Pfam module annotation: Pfam domain module=hATC::zf-U1; Domain location=5-57::194-231
MTWDDIYGDDIADVMTVPTSTMSLESAFSLAGRVIEERHQRLTSDMVEVLSCIKDWPNTLSCRTWTATKYLDCAQGGRAGPTRDGQRVVPGRAQIVSGDIFGYCSEGALHRGGEPPDVGSVGTRDSAYGPSQSLTRMGLLAIDRPSHLMVLELSKGFHWQGFRAQQSLVSLAPTPLATETRSPSPALPSSVAAMPRYYCDYCDTYLTHDSPSVRKQHNAGYKHKANVRTYYQQFEEQQTQSLIDQRIKEHLGQAAAFQAGAPFNQHLLAFPGAMARPRLPILPTPGMPHGFPQAPGAPLMPGIRPPILPAPGYPGPPPTMQQPGAPPGSMPQPGAPPGSMPQPGAPPGSMPMQMAPLPRPPTLPPPTSGVPGAPIPNSGAPPAIYQANPQASAGPTSGAPPAPPTAPQPAFSYAPPSEGNH

SEQ ID NO: 46340 - protein, 396 aa, Zea mays
  Coding DNA Sequence Number=SeqID_4561
  Gene Ontology: Mol. function=oxidoreductase activity; Cellular component=membrane; Biological process=electron transport
  Homolog annotation: Hit_ID=Q737F3; Match level="QueryCoverage=99%, HitCoverage=96%, E-value=0.0, Identity=82%"; Hit description =Cytochrome p450
  Pfam annotation: Domain name=p450; Domain location=1-394; Score=11.0; E_value=1.8e-11; Accession=PF00067.12; Description=Cytochrome P450
MRNPIMFYENLIKQQERFFQIDDFYGMGGTWVALHYDDVITILKDSRFIKDLRKFTSPHDKQHPNSGNTAASKMFDWLMNMPNMLTVDPPDHTRLRRLVSKAFTPRMIEDLRPRIQQIADELLVAVQEHGKMDIISDFAYPLPIIVISEMLGIPATDRNQFREWTQILMNVSVNPSQGNAVTTTLEKFIQYIEVLLNEKRLNPAADLISELVQTKEQEDRLSNNELLSTIWLLIIAGHETTVNLISNGVLSLLQHPEQMNLLRENPSLIPSAVDELLRYSGPVMFISRLASEDMTIHGKRIRKGDLVLLSLTAANIDPQKFSYPEELNISREENNHLAFGAGIHHCLGAPLARLEGQIALGTLLQRLPNLCLAIKPDQLNYNHSKIRSLVNLPVVF

SEQ ID NO: 46341 - protein, 67 aa, Zea mays
  Coding DNA Sequence Number=SeqID_4562
  Subcellular localization annotation: CTP_CleavageSite=18; ConfidenceScore=5.00e-01
MKPWKETSRSSKTTTSSRCGLAATPSRLPVKAAFIYVSFPHFDLLLTGEGDLFRAEKKNADWGQTVG

SEQ ID NO: 46342 - protein, 128 aa, Zea mays
  Coding DNA Sequence Number=SeqID_4563
MRKEHDDVRGDTKCLQEAMSQLQEDLRGAKLQVEEAGSIVREVSARLEKANSKLSREHDMAREGFAVGRSNEELDRIEEQVRPHAQARLIKSERGDLVTMLCLFSCIDGDGIPEGVAARSRFFGLADV

SEQ ID NO: 46343 - protein, 1000 aa, Zea mays
  Coding DNA Sequence Number=SeqID_4564
  Gene Ontology: Mol. function=transferase activity; Biological process= response to oxidative stress
  Homolog annotation: Hit_ID=Q9FI32; Match level="QueryCoverage=99%, HitCoverage=99%, E-value=1e-152, Identity=33%"; Hit description =Phosphoribosylanthranilate transferase-like protein
  Pfam annotation: Domain name=C2; Domain location=247-328; Score=59.3; E_value=1.2e-14; Accession=PF00168.20; Description=C2 domain
  Pfam annotation: Domain name=C2; Domain location=3-86; Score=60.4; E _value=6e-15; Accession=PF00168.20; Description=C2 domain
  Pfam annotation: Domain name=C2; Domain location=409-489; Score=36.4; E_value=9.6e-08; Accession=PF00168.20; Description=C2 domain
  Pfam annotation: Domain name=C2; Domain location=582-674; Score=59.5; E_value=1.1e-14; Accession=PF00168.20; Description=C2 domain
  Pfam annotation: Domain name=PRT_C; Domain location=847-1000; Score =172.3; E_value=1.2e-48; Accession=PF08372.1; Description=Plant phosphoribosyltransferase C-ter
  Pfam module annotation: Pfam domain module=C2::C2::C2::C2::PRT_C; Domain location=247-328::3-86::409-489::582-674::847-1000
MKLVVEVVGAHDLPARRGRVTPFVQVAFGGQRHATGVRPGEANPTWNETVVFVVDAIVGRLSDRSIDVGVYHRRASGGKSCLGRVRLFGAAVAPSAEEAVLLRCPLDKPRFFAPARGEVALRLYLAPYGPPATLAAAGNAYSSTYATTFNDTASMAGGPETVVGGADTQSSPAPVTKKKEPVQEPAVHVFNSIPTQSSTGSLIFPPPPPPSMPPPTGAAKATKKAAPGTAGDAKAAEYLMVDKLEFLYVNVVRARGLSGTDLTLGTDPYVEVRVGNYSAVTRHLVRNHEPEWNQVFAFSKDQLQADNVELIVKDKNLIVWDSIVGKADLSIAEVPSLALPNRPLAPQWYRLKGAKGQWTGGEVNVAAWKGSQSDEAFAGALHAGAHDLALPAVAATQTKSYYAPRLCYLRCHVIAAQDLVHPESSRRSRMSVLARVQLGAQRLSTRASPSARWDENFFLVAAWPFDEPLEIAVMDIASPERHELLGEVTFPRGSIKVQQFDKTKFMPPAPLWYDLNLPRSSDGGGDGEGDARDRGRRHDFSRKIQLRVYYDAAYHVLDEAMSYASDFQPSAKSLRSQAIGVLELAVLRATGLRSTKRPNGGRVAVNAYCVAKYGHKWIRTRTLLDTASPSWQEQFTFDVFDPCTVLTVALFDNSQLSDEASRRGDTDAPLGKVRIRVSTLASGRTYEQPYSLFVVHPTGLLRCGELHLAVRFTHTAWLNMISLYLRPMLPNQHFAKPIPTHLVPRLRRHAADAIASRLARAEPPLLPGVVHYVLRDPSTYPRPDVSQDYAYSMRRSLAACARLRDVLAPLAAFGRWFRGVRDWDNPVTTVLVLIVFFVLVWMPSLIISTFFLYLFSLGVWNFWRRPARPAQMEHYSDGVPQAMFEEEFDAGFPSGTTPEALHERYWRLRGTATSIQVFIGDVASKGERVHALLAWRDGRATVIALVVVAALTVVTYAVPFRALVSVTGVYVMRHPLLRRKEPSALMSFFRRLPSDAEVML

SEQ ID NO: 46344 - protein, 183 aa, Zea mays
  Coding DNA Sequence Number=SeqID_4565
MKIQYLASPKMTNNMENKKQMPCKIEQHICYNCHEKCHLRKSYQVMDNLCTVITQHRDNESLGLSLWYHRDKDIIHMQLALRVKPLVVRGAYHVLAKSGSSKLRVKARLGQVLGPYRLGPIIKGLPNIPQDTPMSDSPKIGRPKRYDPIAMCTFDQGDHMLKEHTIVMRVADTIATPRRGDIP

SEQ ID NO: 46345 - protein, 143 aa, Zea mays
  Coding DNA Sequence Number=SeqID_4566
  Pfam annotation: Domain name=TF_Otx; Domain location=48-138; Score= -24.8; E_value=0.076; Accession=PF03529.4; Description=Otx1 transcription factor
MVPPPSSLEIEHELSMVRIGAPAVFFKEPSQEQQHNSMALGSRIALWASPLPVFLPAASSPLRQQGVGSPRRSSSTTPWRSTAGLLYGRRISPSSSLQPPLLCNSKQASPALLHPQLPNGAQIFQPSSKADTHRSSFPVSPRQ

SEQ ID NO: 46346 - protein, 87 aa, Zea mays
  Coding DNA Sequence Number=SeqID_4567
MKMHLVGMDTLLILLSLGPGYHNVKEREISAEFRTLGHDLMTRSMSKSIFLRRKRGVWEAQQRHRTALLRSNEQLARRSAEVADLTS

SEQ ID NO: 46347 - protein, 222 aa, Zea mays
  Coding DNA Sequence Number=SeqID_4568
  Homolog annotation: Hit_ID=Q8W0S0; Match level="QueryCoverage=24%, HitCoverage=8%, E-value=3e-23, Identity=94%"; Hit description =Putative galactosyltransferase family
MVGIETNIQEWDCGGGSKRLDEIVTTRHTGRKVPAVAGVAVAPAAGASGGLPPPHLPQVPPRAGPGGHRPRRRPYRRRRLLLSVLRRLPAPAWVHFRHLLLVGPVPVRLFWHRYDRVSLPDLASRNRSALDCMADDAWALGLTAWEDAAAFAGDPWALLLQLLCLYFRRCLAEASALVLPRNHERLGVVLLAMTRCERREQISSNTTLGNCQRMLREMASQR

SEQ ID NO: 46348 - protein, 102 aa, Zea mays
  Coding DNA Sequence Number=SeqID_4569
MTKLGIIPFTIVLKTIFLDKKFRYIDRYSRLFKPCSILVPLRSRESRKKTEAAGTLPVAAQMSEKDSAPRACHGRRTRARRPSVTCRGRRRRAHSPAGSASC

SEQ ID NO: 46349 - protein, 143 aa, Zea mays
  Coding DNA Sequence Number=SeqID_4570
MDDKSLKAPLLCLAPNVGRFTPVEPADGRVGYHIKPGVRLRAPNPYPACQMLKGKFFGWVAECTRSGPKMRRGPRGPMLEAYVRSPRPRVGTGPLPGQKSGLGMCDNVAPPDHPYWGVREPLQTPSPGIRWAHVEVWVPSVGT

SEQ ID NO: 46350 - protein, 196 aa, Zea mays
  Coding DNA Sequence Number=SeqID_4571
MRASGGPHIDYAPKTVVHFRSLDFVINEEGDLIRAMPALPPLFEIPNIVLETLGALCLAPRKWSYDAEASSYYGRSNRGCRAFPPRLLHAPTVIVALVARGHLPTSDDLEFVGMADDDGTSSSTLYTDSDLDLSPPESSKNNPPVDIEARVRFYALKTCKGRRLCIPPCCSDQGPGVIAFSRAIWSELDAWSATEA

SEQ ID NO: 46351 - protein, 148 aa, Zea mays
  Coding DNA Sequence Number=SeqID_4572
  Homolog annotation: Hit_ID=Q9SE43; Match level="QueryCoverage=44%, HitCoverage=7%, E-value=4e-13, Identity=56%"; Hit description =Homeodomain-leucine zipper protein interfascicular fiberless 1
  Pfam annotation: Domain name=Homeobox; Domain location=1-43; Score= -8.2; E_value=0.036; Accession=PF00046.19; Description=Homeobox domain
MERVYGDCPKASSARRQQLLRECSILSNIESKQIEVWFQNRRQGVDDIARGEHATATMVGKEMGSTNMGAGPSGAASQQPRQGQSRVARSRRREARLGMEEATRVAERRILPCTHVASGGEAVAMTDNRRGEGARLQCAREEERPSHE

SEQ ID NO: 46352 - protein, 644 aa, Zea mays
  Coding DNA Sequence Number=SeqID_4573
  Gene Ontology: Mol. function=protein dimerization activity; Cellular component=nucleus; Biological process=regulation of transcription, DNA-dependent
  Homolog annotation: Hit_ID=Q7XDB4; Match level="QueryCoverage=99%, HitCoverage=91%, E-value=0.0, Identity=72%"; Hit description=Auxin response factor 16, putative, expressed
  Pfam annotation: Domain name=Auxin_resp; Domain location=274-357; Score=181.2; E_value=2.5e-51; Accession=PF06507.4; Description=Auxin response factor
  Pfam annotation: Domain name=B3; Domain location=117-222; Score =115.9; E_value=1.2e-31; Accession=PF02362.12; Description=B3 DNA binding domain
  Pfam module annotation: Pfam domain module=Auxin_resp::B3; Domain location=274-357::117-222
MKEAGEERCLDPQLWHACAGGMVQMPPVRSRVYYFPQGHAEHAHGGGGATDLAGARARPLPPLVLCTVAGVRFLADPETDEVFAKIRLVPAAPGEVEFGEPREFGIDPEDAREKLSSFAKTLTQSDANNGGGFSVPRYCAETIFPKLDYRADPPVQTVLAKDVHGEVWKFRHIFRGTPRRHLLTTGWSAFVNQKKLVAGDSIVFLRTEHGELCVGIRRAKRVSCGGMECISGWNAPVYGALSAFLKDEEGKITKGPGGYMRGRGKVEITDVVEAASLAASGQPFEVVYYPRASTPEFVVKAASVQNAMRNQWCPGMRFKMAFETEDSSRISWFMGTIASAQVADTIRWPNSPWRLLQVSWDEPDLLQNVKCVNPWLVEIVSSIPPIHLGTFSPPRKKLRVAQHPDFPFEGQLLNPIFHGNPLGPSNSPLRCFSDIAPAGIQGARHAQFGLPLTDYQLNQLHLGFNRLGAMTPTPRISKGFVISSAPASESVSCLLTIGTPQATEKSDDIKRPHIMLFGKPILTEQQMDSGGSREGLSQDRKASELGLEDGHCKVFMESEDVGRTIDLSVFGSYEELYGQLADMFGIEKAEIMRHLCYRDAAGAVRHTGEEPFNDFMKVARRLTIIEGTEGRPQKPLVEYMVERA

SEQ ID NO: 46353 - protein, 105 aa, Zea mays
  Coding DNA Sequence Number=SeqID_4574
  Homolog annotation: Hit_ID=Q6TDS4; Match level="QueryCoverage=38%, HitCoverage=4%, E-value=5e-12, Identity=85%"; Hit description =Homeodomain leucine-zipper protein Hox9
MNRKLIAMNKLLMEENEQLQKQVSQLVHENVYMKQLLQSPSPDLFGIVTISHGGHGVVARAFGLENLEPTKVTTALAFSIRNNQSGVHYTHSLVAPTESHLEGGE

SEQ ID NO: 46354 - protein, 47 aa, Zea mays
  Coding DNA Sequence Number=SeqID_4575
MQQELQQHRETNKGNTTRCRKKGSKNSDQRKDVSVAAPPMGYGLMQE

SEQ ID NO: 46355 - protein, 65 aa, Zea mays
  Coding DNA Sequence Number=SeqID_4576
MDCGLVLLKLRDSYANLLRPRDYVYCEPFDQIWMDWIRSTHDEAVHADYPWTRDLLSGFNEDLNV

SEQ ID NO: 46356 - protein, 108 aa, Zea mays
  Coding DNA Sequence Number=SeqID_4577
  Subcellular localization annotation: CTP_CleavageSite=7; ConfidenceScore=5.53e-01
MGRSSTTAAPKASSSDASPSPKKAPGGYTRHAKWAHLSDFQRAQHGGPGPRVMQPARRMLRASNCTATRATATPPRLRNQYRDSRQPYARPSSASLARRSMRPKMGRQ

SEQ ID NO: 46357 - protein, 165 aa, Zea mays
  Coding DNA Sequence Number=SeqID_4578
  Subcellular localization annotation: CTP_CleavageSite=45; ConfidenceScore=5.09e-01
MGLRQADGGGGVLDGLGNTPASNRAQLRAYQGKLRVGARRVLGVASARVRGKETEWGTGHLEKGWSGDRHSLGVCRGRGVHGDARIVHAGSSRGTCPTDGTHESARAGERMGGLADERVSRDRESRARGELALTAQSHRPGRESGDARARVGTERRGPAVRGRRA

SEQ ID NO: 46358 - protein, 115 aa, Zea mays
  Coding DNA Sequence Number=SeqID_4579
MAGSIGEIRVRHDMHQGQARVAAAMVDEPNDTGPSDECVRRAHVSRTEGGELMKRSSSTSTMEESATLLPTRHEDNDNNPQQQEHEGLAEAGSERVDGELGRDRSRLRHSISKSN

SEQ ID NO: 46359 - protein, 213 aa, Zea mays
  Coding DNA Sequence Number=SeqID_4580
  Subcellular localization annotation: CTP_CleavageSite=38; ConfidenceScore=5.27e-01
MGVFPRGFARSYPPWSFSATGVANSRRNSTASSYPRVYASKIWARGDSPPIKEHDKAEGWKLPADTTRRESSSTPECLHWHLSLAGGKDDSGNPDPRASERKTQRASGRAAQGRLTRGPQLSARVCGSRSQKWAERGHSPPLVGRITIWRPSDPPLRLRLLRALRVVARTATGVVVVSVSVKGKATSQTPPPAEARGRVLLLLLLSLELLLLV

SEQ ID NO: 46360 - protein, 217 aa, Zea mays
  Coding DNA Sequence Number=SeqID_4581
MDGSRYLNPIGPQFLIWVVRRASNGARIPLPQPCRTVAHPPNRDGAIAGDPILHILELIPRATRCKLKRTQWGCFHGALPAATRHGVSRPQVWRIHGGIQRRRATPESMLVKFGHEAILHRSRNMTKLRDGNYQRTRRESLGAGRVANDGEAIAVAAGKAGAIFAEQYAESKRPRGAREADPRAPVVGASVRKQVPEMGRARTLSPPGGPNYHLAAQ

SEQ ID NO: 46361 - protein, 81 aa, Zea mays
  Coding DNA Sequence Number=SeqID_4582
MAQMLVRWRDRHGAGVGFGRLYDVDNTTRLSSRVAELRRAWARLRRAASMANNTDERGSTTRAWAYRMAQQQWLGRGLGYS

SEQ ID NO: 46362 - protein, 382 aa, Zea mays
  Coding DNA Sequence Number=SeqID_4583
  Gene Ontology: Mol. function=hydrolase activity, acting on ester bonds; Cellular component=cellulose and pectin-containing cell wall; Biological process=lipid metabolic process
  Homolog annotation: Hit_ID=Q5Z983; Match level="QueryCoverage=96%, HitCoverage=95%, E-value=1e-123, Identity=63%"; Hit description=GDSL- lipase-like
  Pfam annotation: Domain name=Lipase_GDSL; Domain location=36-359; Score=107.2; E_value=4.9e-29; Accession=PF00657.12; Description=GDSL- like LipaseAcylhydrolase
MGWYDGLLLMKALVVLTGSMLVLSAAAVERRRVPAMYVFGDSTLDVGNNNHLQGKQVPRANKPYYGIDLPGSGKPTGRFSNGYNVADFVAKHLGFEKSPLAYLVLKARNYLIPSAITRGVSYASAGAGILDSTVRNAGGNLPLSQQVRLFAATRAAMEAKVGARAVAELLSRSFFLVGVGSNDFFAFATAQAKGNSTAVGVGTQSDVVAAFYGSLVSNYAAAITELYKLGARKFGIINVGPVGCVPAVRVLNATGGCADAMNQLAAAFDGFLDSLLAGLAARLPGLAYSVADSFGFAARTDPLALGFVSQDSACCGGGSLGAEKDCLPGAQLCADRDRFLFWDRVHPSQRAAMLSAQAYYDGPKEFTAPISFKQLADKIVIK

SEQ ID NO: 46363 - protein, 55 aa, Zea mays
  Coding DNA Sequence Number=SeqID_4584
MQGSTGSKLFCQKGSSIIDKLYLESQIQHTLESLFFSREGFLLSLAPNSCFVGRP

SEQ ID NO: 46364 - protein, 188 aa, Zea mays
  Coding DNA Sequence Number=SeqID_4585
  Subcellular localization annotation: CTP_CleavageSite=69; ConfidenceScore=5.39e-01
MATWATARGAQAQKNEILSQPRTAEQNPSASSQPAKRQPARRRRQRTCSLLLAARSDALGCTCSCPAVPASQERRLLQCSCPAAPASTLAVGTLPARSAVARRPPAAGRCRVGSGRAGVARLASPLAGRLSPARQPPGHAPWPVPCAVATAAQSSPSPSLRVCESPISQHLVSSLGHASSVRQNEEEA

SEQ ID NO: 46365 - protein, 807 aa, Zea mays
  Coding DNA Sequence Number=SeqID_4586
  Gene Ontology: Mol. function=binding; Cellular component =intracellular; Biological process=metabolic process
  Homolog annotation: Hit_ID=Q6H4W1; Match level="QueryCoverage=98%, HitCoverage=98%, E-value=0.0, Identity=74%"; Hit description =Putative pentatricopeptide (PPR) repeat-containing protein
  Pfam annotation: Domain name=PPR; Domain location=108-142; Score =35.4; E_value=2e-07; Accession=PF01535.11; Description=PPR repeat
  Pfam annotation: Domain name=PPR; Domain location=209-243; Score =34.4; E_value=4e-07; Accession=PF01535.11; Description=PPR repeat
  Pfam annotation: Domain name=PPR; Domain location=318-352; Score =44.0; E_value=5e-10; Accession=PF01535.11; Description=PPR repeat
  Pfam annotation: Domain name=PPR; Domain location=384-418; Score =36.0; E_value=1.3e-07; Accession=PF01535.11; Description=PPR repeat
  Pfam annotation: Domain name=PPR; Domain location=485-519; Score =42.6; E_value=1.4e-09; Accession=PF01535.11; Description=PPR repeat
  Pfam annotation: Domain name=PPR; Domain location=520-554; Score=7.1; E_value=1.1; Accession=PF01535.11; Description=PPR repeat
  Pfam annotation: Domain name=PPR; Domain location=586-620; Score =40.0; E_value=8.1e-09; Accession=PF01535.11; Description=PPR repeat
  Pfam annotation: Domain name=PPR; Domain location=621-655; Score =18.8; E_value=0.02; Accession=PF01535.11; Description=PPR repeat
  Pfam annotation: Domain name=PPR; Domain location=657-690; Score =10.8; E_value=0.39; Accession=PF01535.11; Description=PPR repeat
  Pfam annotation: Domain name=PPR; Domain location=723-757; Score=0.9; E_value=5.8; Accession=PF01535.11; Description=PPR repeat
  Pfam module annotation: Pfam domain module=PPR::PPR::PPR::PPR::PPR::PP R::PPR::PPR::PPR::PPR; Domain location=108-142::209-243::318-352::384- 418::485-519::520-554::586-620::621-655::657-690::723-757
  Subcellular localization annotation: CTP_CleavageSite=30; ConfidenceScore=5.21e-01
MANLAAQLAAVLQACIKRSGGRKPSRSNAKAAHARVLAAGLAADTFLLNRLVELYSLSGLPCHALRAFRALPHPNVYSYNAAISAACRAGDLAAARDLLGRMPDRNAVSWNTVIAAVARSGSPGEALEMYQGMLQEGLAPTNFTLASVLSACGAVAALDDGRRCHGLAVKVGLDGHQFVENGLLGMYTKCGSVADAVRLFDGMPSPNEVSFTAMMGGLAQGGAVDDALRLFARMSRTGIRVDPVAVSSVLGACAQACAGDYNVARAIQLAQSIHALVVRKGFGSDQHVGNSLVDLYAKGMKMDEAIKVFESLSSVSIVSWNILITEYGQLGCYERAMEVLEFMQESGFEPNEVTYSNMLASCIKARDVPSARAMFDKIPKPSVTTWNTLLSGYGQEELHQETIDLFRRMQHQNVQPDRTTLAVILSSCSRLGNFELGKQVHSASVRLLLHNDMFVASGLIDIYSKCGQVGIALIIFNMMTERDVVCWNSMISGLAIHSLSEEAFDFLKQMRENGMFPTESSYASMINLCARLSSIPQGRQMHAQVLKDGYDQNVYVGCSLIDMYAKSGNMDDARLFFNCMIVKNLVAWNEMIHGYAQNGFGEKAVELFEYMLTTKQKPDSVTFIAVLTGCSHSGLVDEAVTFFNSMESNYGITPLVEHYTCLIDALARAARFAEVEAVIGKMPYKDDPILWEVLLAACVVHHNAELGEFSAKHLFRLDPKNPSPYVLLSNIYATLGRHGDASAVRALMSSRGVVKGRGYSWVNHKDGSRAFMVADDLGTDVGERTMFSDNGDTSGMTEVHIDETCAG

SEQ ID NO: 46366 - protein, 422 aa, Zea mays
  Coding DNA Sequence Number=SeqID_4587
  Gene Ontology: Mol. function=biotin-[acetyl-CoA-carboxylase] ligase activity; Cellular component=intracellular; Biological process =protein modification process
  Homolog annotation: Hit_ID=Q8S4V8; Match level="QueryCoverage=71%, HitCoverage=84%, E-value=6e-94, Identity=54%"; Hit description =Holocarboxylase synthetase 1
  Pfam annotation: Domain name=BPL_LipA_LipB; Domain location=114-215; Score=77.3; E_value=4.9e-20; Accession=PF03099.9; Description =Biotinlipoate AB protein ligase family
  Subcellular localization annotation: CTP_CleavageSite=44; ConfidenceScore=5.50e-01
MRLPPPSTTAAAAAATVGAVLAAVALRRYLSASRHREPARVPMSAAAGATTLVVYGKSAQEQELLASAAGSVVLGEGDPSGDVAIALAYESAGFDAAAYMSALRARRFGRWMLWTPRIGSTQDLITRNFAKLPVGVVCVADVQFKGRGRSKNVWESPPGCLMFSFTSQMQDARKLPLMQYVVCLSITEAIKELCRAKGLPELDVRIKWPNDLYLKGLKVGGILCTSSYEPKVYNICTGVGLNVDNEKPTTCLNAALQEANHTSPILKREDILAYFFNKFENLFEIFMNHGFQVLEEQYYNSWLHSGQRVVVHDAHENKSGSVVTIQGLTPTGYLHAIGEDNKSYELHPDGNRLHILSLAKTYQQIDARAKGRTTERVISGHITGSICVPFPEMFNGAPSLLSADELRQKFQQAGRNFPRQTH

SEQ ID NO: 46367 - protein, 250 aa, Zea mays
  Coding DNA Sequence Number=SeqID_4588
  Subcellular localization annotation: CTP_CleavageSite=45; ConfidenceScore=5.22e-01
MEGKKRLATVATWCAHVVLLLFVQPRQVAGRRPCLNCHRRAARPRSAAVFNRIVMSTALATAGGGAEVTDNKVIILSLGYTRHWIMISLYETLEYDHLTRAGPGDDESRNTKGRLMLMRYTCTSLQKMIPLLTESRLEEKNKYKGKKDDSSDDGKKNDKPYKSKDDNKNKFHKKGSEAYIIDGWLTDIVSSSGSSLYDSDKEKKEKVVALGIGISLPPPSSSTHLRLMDKCDRKVQSDDNCSVDNSDSDE

SEQ ID NO: 46368 - protein, 88 aa, Zea mays
  Coding DNA Sequence Number=SeqID_4589
MVELDQAKGGCDGRTMVAGARVTMAGVGMLGSREIPVKVHLPTGHGLKLFLAWVRSCLVPKVDLSQGPKPRGTLAFWPVKKLGPNAIL

SEQ ID NO: 46369 - protein, 51 aa, Zea mays
  Coding DNA Sequence Number=SeqID_4590
MARIPRRLSRPCGASSLLLAELPAGVKIQVEVVTEEESTPVSFDQVEEPSN

SEQ ID NO: 46370 - protein, 67 aa, Zea mays
  Coding DNA Sequence Number=SeqID_4591
MNEGQRGSRFYGLGEGKLSSSASDSGAMPLEIAAGSVSVRKKGADMVDPRGSDKLALEIGRSTREGK

SEQ ID NO: 46371 - protein, 279 aa, Zea mays
  Coding DNA Sequence Number=SeqID_4592
  Gene Ontology: Mol. function=calcium ion binding; Cellular component =intracellular; Biological process=embryonic development ending in seed dormancy
  Homolog annotation: Hit_ID=Q84R52; Match level="QueryCoverage=72%, HitCoverage=49%, E-value=2e-96, Identity=83%"; Hit description =Putative fertility restorer-like protein
  Pfam annotation: Domain name=PPR; Domain location=130-164; Score =29.2; E_value=1.5e-05; Accession=PF01535.11; Description=PPR repeat
  Pfam annotation: Domain name=PPR; Domain location=59-93; Score=53.0; E_value=1e-12; Accession=PF01535.11; Description=PPR repeat
  Pfam annotation: Domain name=PPR; Domain location=94-128; Score=25.7; E_value=0.00016; Accession=PF01535.11; Description=PPR repeat
  Pfam module annotation: Pfam domain module=PPR::PPR::PPR; Domain location=130-164::59-93::94-128
MERPGARCKPDTYTYTVLISWYCRIGVGTGCRKAARRRIYEAGRLFRRMGEKGLEPDVVTYNCLINGLCKTYRVERAHEMFDEMLRKGCTPNRVTYNSFIRYYSVVNQVDKAVEWMREMVARGHGMASSSTYTPVIHSLCESRRVTEARQFLIDMAESGHVPREHTYKLVKAAIDDAGEDALPAGLCQSIEDGITARFRQFINGCKCLPIPQGNKRMVGNVFVGSHVQFLQKITSHMSRNAHSNKTPKISFHAMHTTSGLCMTEDFILICHTGTEIEAL

SEQ ID NO: 46372 - protein, 462 aa, Zea mays
  Coding DNA Sequence Number=SeqID_4593
  Gene Ontology: Mol. function=acyltransferase activity; Cellular component=integral to membrane; Biological process=metabolic process
  Homolog annotation: Hit_ID=Q7XEP2; Match level="QueryCoverage=96%, HitCoverage=85%, E-value=1e-173, Identity=67%"; Hit description =Acyltransferase family protein, expressed
  Pfam annotation: Domain name=Acyltransferase; Domain location=239 -360; Score=40.5; E_value=5.6e-09; Accession=PF01553.11; Description =Acyltransferase
MAFETGGVLRLLLLIALAPLAGLLYYLVSEPAGIQVLIFASMAGARVADIEAVARAVLPKFYCADLHPESWRVFSACGRRCVLTANPRIMVEAFLKEYIGTDIVVGTELVVWRGRATGMVRSPGVLVGEQKADALRRVFGDDAAPEVGLGDRKTDYPFMRLCKEGYVVPAAPKLRPVPREDLPKPVVFHDGRLVQKPSPALALLTVLWIPIGFLLACLRIAAGALLPMRVVYHAFRALGVRVIIKGNPPPPASRETGQTGVLFICSHRTLLDPIFLSTALGRPITAVTYSVSRLSEILSPIRTVRLTRDRAADAAMIRRLLTEGDLVICPEGTTCREPFLLRFSALFAELTDEIVPVAMENQMSMFHGTTARGWKGLDPFYFFMNPSPGYVVTFLNKLPAELTCSGGKSSHEVANYIQRLIASTLSYECTSFTRKDKYKALAGNDGTVVSKPNIDKNKAMGC

SEQ ID NO: 46373 - protein, 230 aa, Zea mays
  Coding DNA Sequence Number=SeqID_4594
  Homolog annotation: Hit_ID=Q69NK8; Match level="QueryCoverage=28%, HitCoverage=10%, E-value=1e-20, Identity=73%"; Hit description=CwfJ / zinc finger(CCCH-type)-like protein
MPAPTSRPWHPRPAVAGGAVLADPSDIKPSISTAGPFHALLCVGQFFSPEGAAEGSPEDVTDYLEGRASVPIPTYFTGDYGPAAPRLLSKAAAGARGPKDLLPGNRSIHSAYLVLDFGCSSTQTSSLVFFKDWGAPVQLAKKFGYHSAVLQGFETIARRAIHTVRIITLPQRPRHHQMFILWNLPTVRPHHTFRLHIEEKTTPIMLIDVDEIHGLELGRNIVKNLHLAAK

SEQ ID NO: 46374 - protein, 340 aa, Zea mays
  Coding DNA Sequence Number=SeqID_4595
  Homolog annotation: Hit_ID=Q6AVS5; Match level="QueryCoverage=19%, HitCoverage=22%, E-value=3e-24, Identity=89%"; Hit description =Putative macronuclear development protein
  Pfam annotation: Domain name=Alba; Domain location=17-91; Score=55.4; E_value=1.8e-13; Accession=PF01918.11; Description=Alba
MDRYHRVERARNQSTIEENEIRITAQGLIRNYVSYATFLLQERRIKEIVLKAMGQAISKSVAVAEIIKVLQHMLNIPGNSRCHHCSANLADHQDNNSSSWSMKIPMHGVEEEGGAVGVEGVGLEVAMVDMETIKVAITKVVGITTIKVDMVAMMIKVGMVVDMATTKADMETIKKMVDITEVEEVVCEEEAIGVTVEAMKEAGVVAMKEAGSAAAMKVAGVVAMKEAGSAAAMKVAGVVVVLVEGDMVAEEGVEWVAADERTKCMQTSGVSFNACLINISGKIRAFYVGSSSVTCEAGPGEGFLHAETRERKVPEWNFSGTPDSAPDNAPDCPVCHQPNG

SEQ ID NO: 46375 - protein, 648 aa, Zea mays
  Coding DNA Sequence Number=SeqID_4596
  Gene Ontology: Mol. function=protein binding; Cellular component =small nucleolar ribonucleoprotein complex; Biological process =ribosome biogenesis and assembly
  Homolog annotation: Hit_ID=Q4TF16; Match level="QueryCoverage=43%, HitCoverage=80%, E-value=9e-24, Identity=28%"; Hit description =Chromosome undetermined SCAF4913, whole genome shotgun sequence
  Pfam annotation: Domain name=WD40; Domain location=101-194; Score =19.3; E_value=0.013; Accession=PF00400.22; Description=WD domain, G -beta repeat
  Pfam annotation: Domain name=WD40; Domain location=201-236; Score =8.0; E_value=4.2; Accession=PF00400.22; Description=WD domain, G -beta repeat
  Pfam annotation: Domain name=WD40; Domain location=248-285; Score =0.0; E_value=36; Accession=PF00400.22; Description=WD domain, G-beta repeat
  Pfam annotation: Domain name=WD40; Domain location=289-327; Score =25.6; E_value=0.00018; Accession=PF00400.22; Description=WD domain, G-beta repeat
  Pfam annotation: Domain name=WD40; Domain location=347-417; Score =9.6; E_value=2.8; Accession=PF00400.22; Description=WD domain, G -beta repeat
  Pfam annotation: Domain name=WD40; Domain location=55-97; Score=13.3; E_value=0.88; Accession=PF00400.22; Description=WD domain, G-beta repeat
  Pfam annotation: Domain name=WD40; Domain location=9-46; Score=0.5; E_ value=32; Accession=PF00400.22; Description=WD domain, G-beta repeat
  Pfam module annotation: Pfam domain module=WD40::WD40::WD40::WD40::WD4 0::WD40::WD40; Domain location=101-194::201-236::248-285::289 -327::347-417::55-97::9-46
MDKLRVHRCTGDAVEWSPSPIVALAASPCASQVAAAREDGSLELWLVSPGSVGWHNQLTIQGNDESRVTSLVWGRRGGEATGRLLSSSVDGSVCEWDLFYLQQKIVLDTVGIPIWQMAIEPSVDAKNTENNSSEFAVNGHPNQNDSSDSDLSNIDDGDNSEDEDGSTNTISSYHVNDFQRLALACDDGSVRLYNVPESGALTYYRSLPRVSGRTLSVAWSSNAKFVFSGSSDGCWDSTSFHEMYRITVGLGGASNSPELCVWSLLFLRCGTIVSGDSTGSVQFWDSRHGTLLQAHSYHKGDVNALTTVPSGNRVFSAGSDGQVILYKISKDEFGASKNVIKEQVQKWVYVGYLRAHTHDIRALTMAVPICREDALPEEKVVKIRRREKHEFSYHRWAHLGVPMLISGGDDAKLFAYSAREFTQFSPHNFCPAPQHPLIKLARNSTVNGDYVMLVQSSNFLDVLLVTVQNKLTTPNGVRPCLFALRHKGGKKYTLDKLELPKGLPCSQKGQRRLRHSDCSATRQSESDRQSGLAKGATANSAPPDPRARTRAKTRKTANSAPPDPRARTRAKTRKTANSAPPDPRARTRASTRKTTKLRFARPQGSDSALASAERLPPRPTPWLGLGHGNKRQTQPRLRRNPHVALPRA

SEQ ID NO: 46376 - protein, 132 aa, Zea mays
  Coding DNA Sequence Number=SeqID_4597
MDGGDRPALCVAKELLSIPDVAPTPITDREPTSHVDTARGGDGGDTGATITSRLSEAPVRDAAGTERAESDGESEDNVDSASWRDATTTDTREQVVRGGDVGDDALVLHDCLHSHSSPSKKQPFLDLPDNPT

SEQ ID NO: 46377 - protein, 414 aa, Zea mays
  Coding DNA Sequence Number=SeqID_4598
  Gene Ontology: Mol. function=protein serine/threonine kinase activity; Cellular component=integral to plasma membrane; Biological process=protein amino acid phosphorylation
  Homolog annotation: Hit_ID=Q6ZIG4; Match level="QueryCoverage=89%, HitCoverage=100%, E-value=0.0, Identity=83%"; Hit description =Receptor protein kinase PERK1-like protein
  Pfam annotation: Domain name=Pkinase; Domain location=46-317; Score =123.9; E_value=4.5e-34; Accession=PF00069.15; Description=Protein kinase domain
  Pfam annotation: Domain name=Pkinase_Tyr; Domain location=46-317; Score=78.5; E_value=2.1e-20; Accession=PF07714.7; Description =Protein tyrosine kinase
  Pfam module annotation: Pfam domain module=Pkinase::Pkinase_Tyr; Domain location=46-317::46-317
MKALGRAMRWASCCKLSDGDEPGRRKKDASWRIFSLKELQSATNNFNYDNKVGEGGFGSVYWGQLWDGSQVAVKRLKSWSNKAETEFAVEVEILARVRHKSLLSLRGYCAEGQERLIVYDYMPNLSIHAQLHGQHAAECNLSWERRMKIAVDSAEGIAYLHHHATPHIIHRDVKASNVLLDSNFQARVADFGFAKLVPDGATHVTTRVKGTLGYLAPEYAMLGKASESCDVFSLGVMLLELASGKKPVEKLNPTTKRTIAEWALPLARDRKFKEIADPKLNGSFVEDELKRMVLVGLACSQDKPEQRPVMSEVVELLRGESTERLSRLENGDLFKPDISFHGSSGPDSSDCVTEERSPKADATEEAVDSSETVPSARCAVQERWSTVEAKVMQARADEPGAVKDGCWVLADGPE

SEQ ID NO: 46378 - protein, 120 aa, Zea mays
  Coding DNA Sequence Number=SeqID_4599
MGNRAGRWRKSGAGAATLGQGTGEQQAEREGVAARMNVRELRLALEPSSDAPWGRNQRATEKLGEEDGAGTRRRRGEQGDEHQECCHRGKRHGERRVFTALGAARNLHGEVRAEDRVIRW

SEQ ID NO: 46379 - protein, 94 aa, Zea mays
  Coding DNA Sequence Number=SeqID_4600
MVIARFGPQDNGQLVESEGVAGEEPEQQLVGEGKCPLTHLCPIHSYNLLPAFKQFILTSANDSQDKDLTWKQCCQMPKLPFSFGSSQAEEEKTR

SEQ ID NO: 46380 - protein, 79 aa, Zea mays
  Coding DNA Sequence Number=SeqID_4601
MESWAQGGGLALGRGGRPELEEKGVVEGGAELLLGRRRKKTGSMRFSFFDPFLPHSYANIWRFSLSSFFSYSRLRLRSH

SEQ ID NO: 46381 - protein, 118 aa, Zea mays
  Coding DNA Sequence Number=SeqID_4602
MPCDSASSLRLCCCACAVDACYVLPWRAAADAVEQPLHALRLGFLPACYVVRRASIEIYVMSRFGNTGYVRIELVHSKCVWLWSRMKSIGAHVMSKLKCKLLGEKRFDIDYRGECVVN

SEQ ID NO: 46382 - protein, 113 aa, Zea mays
  Coding DNA Sequence Number=SeqID_4603
MEQHLPPEVSLGRDETASPIRGWPQPSRNCVLVLVRIQEISISHKPPRLKPIFKALFCLCIQVHPMGVALELQVDLRNNQLEGRLSAPKARSTGNTASRPYTMKKGYFHARLG

SEQ ID NO: 46383 - protein, 114 aa, Zea mays
  Coding DNA Sequence Number=SeqID_4604
  Gene Ontology: Mol. function=catalytic activity; Biological process =metabolic process
  Homolog annotation: Hit_ID=Q6IWA2; Match level="QueryCoverage=42%, HitCoverage=6%, E-value=2e-15, Identity=75%"; Hit description=Beta -amyrin synthase
MVHDAFNLHDLELFWQNYINGNTHVVNTAWAMLSLIYAGQVERDPIPLYQAARELINMQLDTGDFPQQARTVRGPGPDGPQPGARRRCSLVRRERSAAQGRTVRDLVQELGFPA

SEQ ID NO: 46384 - protein, 201 aa, Zea mays
  Coding DNA Sequence Number=SeqID_4605
MQTIEPCRSRLARPSSSLESPMPSMTTISEDGRASWGAAATCMSGSPSLAHLRAQVSPPLTRPGDLSPLALRIGEPLPPHLQIWEPSSRLWIEEPPPPRVRIGEPPSPCLRIGAVAPRVPPSRAFLGNRRCRTHLDVPFVFSAFALFFLSNLLPPPKVTVVSQPTLVDADLRNWTTKACSAEQSTYAAKLVVVLCRLGGSR

SEQ ID NO: 46385 - protein, 156 aa, Zea mays
  Coding DNA Sequence Number=SeqID_4606
MAPMLFGAIKGTPRHMEQVFYTLGGGHRRLRVGFVARMRFEAAAGGWHSRSWGNDDNGAVDASAAAGSKGVFVPGGPQARRRRRRPAPAARPNASALVGLAVPPIATTTSAGPCAALAASSADVGLLRDGRDMRGSNRRSPYRGGYGSDFSQNHPE

SEQ ID NO: 46386 - protein, 74 aa, Zea mays
  Coding DNA Sequence Number=SeqID_4607
MEHNLQPPMATKEKSKEIDRLAREQKAEERQKQRGKESDVEAGIEIPEERALYHSGYLESNVKLVRLVLDFVYG

SEQ ID NO: 46387 - protein, 205 aa, Zea mays
  Coding DNA Sequence Number=SeqID_4608
  Gene Ontology: Mol. function=transferase activity
  Homolog annotation: Hit_ID=Q9FQB4; Match level="QueryCoverage=36%, HitCoverage=33%, E-value=2e-34, Identity=94%"; Hit description =Glutathione S-transferase GST 25
  Pfam annotation: Domain name=GST_N; Domain location=5-78; Score=58.9; E_value=1.7e-14; Accession=PF02798.10; Description=Glutathione S -transferase, N-terminal domain
MAGADDLKVLGMWTSPFVIRVRIVLNLKGLAYEYVEEDLGNKSALLLSSNPVHKTVPVLLHAGRPVNKSQIILQYIDKDEAPRKKARLGWGQGLTKYEKQKVQGPVDPAEAIADGSPADGELKTASLVPVPAPYVAPAPPAAPVLAPAPAPAPSAAPAFLSAPMQCSSPVTGPPYCSSGMQVTPLLDESGHPLKSALPYSYHRIP

SEQ ID NO: 46388 - protein, 317 aa, Zea mays
  Coding DNA Sequence Number=SeqID_4609
  Gene Ontology: Mol. function=catalytic activity; Cellular component =cellular_component; Biological process=metabolic process
  Homolog annotation: Hit_ID=Q6IWA2; Match level="QueryCoverage=88%, HitCoverage=33%, E-value=5e-97, Identity=63%"; Hit description=Beta -amyrin synthase
  Pfam annotation: Domain name=Prenyltrans; Domain location=176-219; Score=41.3; E_value=3.3e-09; Accession=PF00432.11; Description =Prenyltransferase and squalene oxidase re
MWRLKVSEGGGPWLRTENGFLGRQVWEFDADAGTPEERAEVERLRQEFTRHRFQRKESQDLLLRMQVNNMAYHLMRLTVKRKAHILEEGVNEKHRKYAKSSQRLSPSTPSMKLENSEEVTEEIILTSLRRALSQQSILQAHDGHWPGDYSGFLVIMPMFIFSLYVTGSINTIISPEHRHEILRYIYNHQNEDGGWSTHVLTTSTMLGSCLNYAALRLLGEVAHREEDALSKGRAWILSHGSAAALPQWGKIWLSIIGAYDWSGNNPIIPELWMVPYALPIHPDNGEKYLASMIPSHKEDSSSSVCPQQKNKSPSHHL

SEQ ID NO: 46389 - protein, 133 aa, Zea mays
  Coding DNA Sequence Number=SeqID_4610
MDALKFEYLDYEDPSDNVGAGEKRKRAAKSEADEEPPSGLVKKKAKMSVQKDTTMKKTSAPKKTTAAQEHEKGSITTTSSYNCTRILEIMTQLLPFSPLSPFGPTLTWFMPTSKDSTKAKNLRRAKKFYLKRR

SEQ ID NO: 46390 - protein, 105 aa, Zea mays
  Coding DNA Sequence Number=SeqID_4611
  Subcellular localization annotation: CTP_CleavageSite=37; ConfidenceScore=5.36e-01
MSDPSAWRGPAKARCSAQPRVLGVAGHGPLPLPGSPRPARVACRGPGTRNWGVVRFDVVPLMGLGVCGSLCQGGDEDDGFGYDYGNGEDEVVEEDFQEFQEYDEF

SEQ ID NO: 46391 - protein, 149 aa, Zea mays
  Coding DNA Sequence Number=SeqID_4612
MDRHTWSIKYRCVVYQHSRGMYPDRWEATCLVRRPEHDLRGTEVCLEHYSISERDTVEAAMQDVARRNPRLNRTINLVVVFNTELDHTLDKLSRARAKIVELQAKRAERRHQEYGSPALAGTQHPYRSPPCGHHAYGTPDGRTKINLDP

SEQ ID NO: 46392 - protein, 147 aa, Zea mays
  Coding DNA Sequence Number=SeqID_4613
  Gene Ontology: Mol. function=protein binding; Cellular component =cytosol; Biological process=meiotic chromosome segregation
  Homolog annotation: Hit_ID=Q5QYK5; Match level="QueryCoverage=66%, HitCoverage=63%, E-value=2e-29, Identity=60%"; Hit description =Uncharacterized conserved protein
  Pfam annotation: Domain name=UPF0047; Domain location=26-145; Score =133.3; E_value=6.5e-37; Accession=PF01894.8; Description =Uncharacterised protein family UPF0047
  Subcellular localization annotation: CTP_CleavageSite=48; ConfidenceScore=5.12e-01
MTTAVLSPLRKQGDVSKDPTAPTAVLLQGSSAPPTATTSHEQGDNLLVVQHTSASLTINENYDSDVQADTETFLNRIVPEGHNAPWKHTMEGPDDMPAHIKSSMFGCSLTIPITDGRLNTGTWQGIWLCEHRDHASPRKIVITLNGV

SEQ ID NO: 46393 - protein, 134 aa, Zea mays
  Coding DNA Sequence Number=SeqID_4614
MPTIFALIDVLPPEVAKLLPKNRLLSELETSGVVGRFAGLEVKPGSTVKCEPEYGFMLHLSQENRLKQVQEMQSNCDKGLKHMSCEAPLLGPMAELWKLKNPDISESEWAVQAAAASIYSTCNMAMRTENVSCF

SEQ ID NO: 46394 - protein, 130 aa, Zea mays
  Coding DNA Sequence Number=SeqID_4615
MDGRGRRHGSGSRGEARFAGTAAMDGKNHGIKSCLRDLGSNFPCAGAAAGIGGGGCGRGEEEADGSRGCGMRAWGGCGRMRGGCGLRRGAAAGCATGAAAGVRGMRARQNPTAAYGVPIPEAPKSAFGAV

SEQ ID NO: 46395 - protein, 253 aa, Zea mays
  Coding DNA Sequence Number=SeqID_4616
  Gene Ontology: Mol. function=nucleic acid binding; Cellular component= intracellular; Biological process=chromatin modification
  Homolog annotation: Hit_ID=Q7X9P9; Match level="QueryCoverage=64%, HitCoverage=70%, E-value=7e-29, Identity=48%"; Hit description=C2H2 -type zinc finger protein ZFP36
  Pfam annotation: Domain name=zf-C2H2; Domain location=162-184; Score =16.2; E_value=0.12; Accession=PF00096.16; Description=Zinc finger, C2H2 type
  Pfam annotation: Domain name=zf-C2H2; Domain location=98-120; Score =24.0; E_value=0.00055; Accession=PF00096.16; Description=Zinc finger, C2H2 type
  Pfam module annotation: Pfam domain module=zf-C2H2::zf-C2H2; Domain location=162-184::98-120
MDASLAGVVLRRGHMISIGHRKIRSIHYLHRPHPPVRGYSSHHYKERIVTHREFVMDQDDYLSLCLAAALVAASQQAAGDAPPLRARAAASELRPLHFRCPICGKAFASYQALGGHKASHRKPAAAAAAYDGKAPSSPSSSGQHQKGAVAAGIGGASAGGRHVCTVCHRYFATGQALGGHKRFHYLHGPSVPASSLPPSTAGAAAGVGWLDLNLTPLAPDVSFAGVRRRRGEDDEVQSPLPLPAKKHRASTSA

SEQ ID NO: 46396 - protein, 795 aa, Zea mays
  Coding DNA Sequence Number=SeqID_4617
  Gene Ontology: Mol. function=binding; Cellular component=plastid chromosome; Biological process=positive regulation of transcription, DNA-dependent
  Homolog annotation: Hit_ID=Q6ZLH4; Match level="QueryCoverage=96%, HitCoverage=97%, E-value=0.0, Identity=72%"; Hit description =Putative pentatricopeptide (PPR) repeat-containing protein
  Pfam annotation: Domain name=PPR; Domain location=185-219; Score =34.2; E_value=4.6e-07; Accession=PF01535.11; Description=PPR repeat
  Pfam annotation: Domain name=PPR; Domain location=220-255; Score=4.9; E_value=2; Accession=PF01535.11; Description=PPR repeat
  Pfam annotation: Domain name=PPR; Domain location=256-290; Score =47.7; E_value=3.8e-11; Accession=PF01535.11; Description=PPR repeat
  Pfam annotation: Domain name=PPR; Domain location=291-325; Score =44.9; E_value=2.8e-10; Accession=PF01535.11; Description=PPR repeat
  Pfam annotation: Domain name=PPR; Domain location=326-360; Score =54.5; E_value=3.4e-13; Accession=PF01535.11; Description=PPR repeat
  Pfam annotation: Domain name=PPR; Domain location=361-395; Score =40.0; E_value=8.3e-09; Accession=PF01535.11; Description=PPR repeat
  Pfam annotation: Domain name=PPR; Domain location=396-430; Score =34.4; E_value=3.8e-07; Accession=PF01535.11; Description=PPR repeat
  Pfam annotation: Domain name=PPR; Domain location=431-465; Score =37.0; E_value=6.5e-08; Accession=PF01535.11; Description=PPR repeat
  Pfam annotation: Domain name=PPR; Domain location=466-500; Score =42.9; E_value=1.1e-09; Accession=PF01535.11; Description=PPR repeat
  Pfam annotation: Domain name=PPR; Domain location=501-535; Score =47.7; E_value=4e-11; Accession=PF01535.11; Description=PPR repeat
  Pfam annotation: Domain name=PPR; Domain location=536-570; Score =10.3; E_value=0.46; Accession=PF01535.11; Description=PPR repeat
  Pfam annotation: Domain name=PPR; Domain location=571-605; Score=1.6; E_value=4.9; Accession=PF01535.11; Description=PPR repeat
  Pfam annotation: Domain name=PPR; Domain location=606-640; Score =18.2; E_value=0.03; Accession=PF01535.11; Description=PPR repeat
  Pfam annotation: Domain name=PPR; Domain location=641-675; Score =39.9; E_value=8.7e-09; Accession=PF01535.11; Description=PPR repeat
  Pfam annotation: Domain name=PPR; Domain location=676-710; Score =52.7; E_value=1.3e-12; Accession=PF01535.11; Description=PPR repeat
  Pfam annotation: Domain name=PPR; Domain location=711-745; Score =31.6; E_value=2.8e-06; Accession=PF01535.11; Description=PPR repeat
  Pfam annotation: Domain name=PPR; Domain location=746-780; Score =16.9; E_value=0.073; Accession=PF01535.11; Description=PPR repeat
  Pfam module annotation: Pfam domain module=PPR::PPR::PPR::PPR::PPR::PP R::PPR::PPR::PPR::PPR::PPR::PPR::PPR::PPR::PPR::PPR::PPR; Domain location=185-219::220-255::256-290::291-325::326-360::361-395::39
  Pfam module annotation: Domain location=466-500::501-535::536 -570::571-605::606-640::641-675::676-710::711-745::746-780
  Subcellular localization annotation: CTP_CleavageSite=56; ConfidenceScore=5.60e-01
MAEMLALPLPLRAPAPPPRPTIPNPIVTHRQPHTPSSSPPRLFSPNSLLSTSRPTPASSSRKPRLGRPLDTFRGEQPWHLPPSLSLPARRALLALLADPAEHASPRDVLSALPETDLPAVVNTLASRGGHPGIAVAVVRAARDLHGDRALHHPRVLPTAIRVFARAGCLAEASAILEAAPAPDASAYTALVSAFSRAGRFRDAVAVFQRMVDGGVQPALVTYNVVFHAYSKMSVPWKEVVALVDSMKEDGIERDRYTYNTLISCCRRRGLHREAAQVFDEMKAAGFEPDKVTFNSLLDVYGKARKHEEAIGVLKRMENAGCTPSVVTYNSLISAYVKDGLLEEALELKQEMEFRGMKPDVVTYTTLISGLDRVGKIDAALATYSEMVRNGCSPNLCTYNALIKLHGVRGKFTEMMAVFDDLRSAGYVPDVVTWNTLLSVFGQNGLDSEVSGVFKEMKKAGYIPERDTYVSLISSYSRCGLFDQAMEIYKRMIEAGIYPDISTYNAVLSALARGGRWEQAEKLFAEMVDRDCKPDELSYSSLLHAYANAKKLDKMKTLSEDIYAERIERHNWLVKTLVLVNNKVNNLPETEKAFQELRRRRCSLDINVLNAMVSIYGKNKMVKKVEEVLSLMMENSINHSAATYNSLMHMYSRLGDCEKCESILTEIKSSGMRPDRYSYNTVIYAYGRKGQMKEASRLFSEMKCSGVKPDIVTYNIFIKSYVANIMFEEAIDLVRYLVTQGCRPNERTFNSILQGYSRHGRMVEAKSFLSNLPKIYPGISKQEKQRLSELLAKHTS

SEQ ID NO: 46397 - protein, 456 aa, Zea mays
  Coding DNA Sequence Number=SeqID_4618
  Gene Ontology: Mol. function=transcription factor activity; Cellular component=nucleus; Biological process=regulation of transcription
  Homolog annotation: Hit_ID=Q84Z08; Match level="QueryCoverage=99%, HitCoverage=100%, E-value=0.0, Identity=76%"; Hit description =Putative short-root transcription factor
  Pfam annotation: Domain name=GRAS; Domain location=37-365; Score =255.0; E_value=1.6e-73; Accession=PF03514.5; Description=GRAS family transcription factor
  Subcellular localization annotation: CTP_CleavageSite=35; ConfidenceScore=5.13e-01
MMQFTHTAPPPPPLHPNGHAGGLGLGLFLDVGAPRAARPWPGSFPTPASKISLGNLNSTSCMEQLLVHCANAIEANDATLTQQILWVLNNIAPPDGDSNQRLTAAFLCALVARASRTGACKAVTAAVAAAVESAALHVHRFTAVELASFVDLTPWHRFGYTAANAAILEAVEGFPAVHVVELGTTHCMQIPTLIDMLASRPEGPPILRLTVADVAPCAPPPALDMSYEELGAKLTNFARSRNMSMDFRVVPTTPADAFTSLVDQLRVQQLVMDGTEALVLNFHMLLHTVPDETAGSVSLTHPVSLRTMLLKSLRTLDPNLVVVVEEDADFTADDVVGRLRAAFNFLWIPYDAVDTFLPKGSEQRRWYEAEIGWKVENVLAQEGVDRVERQEDRGRWGQRMRSAGFRAVSFGEEAAGEVKAMLNEHAAGWGMKREDDDLVLTWKGHNVVFASAWAPS

SEQ ID NO: 46398 - protein, 94 aa, Zea mays
  Coding DNA Sequence Number=SeqID_4619
MAPSCSLRDDHMAAASQLLKVISSIFFEAERKYNRTNQGRTQAYGRLGHGPGHRPKIFLEELVFESGWIMLKNYKPASAVASPLPVCPSGLAES

SEQ ID NO: 46399 - protein, 221 aa, Zea mays
  Coding DNA Sequence Number=SeqID_4620
  Gene Ontology: Mol. function=protein dimerization activity; Cellular component=nucleus
  Homolog annotation: Hit_ID=Q2QNH1; Match level="QueryCoverage=79%, HitCoverage=23%, E-value=4e-58, Identity=58%"; Hit description=HAT family dimerisation domain containing protein, expressed
MAIVAIEEQPDNNPEDQGFTPEENIDTDRNDKNVSDHEPMVNSPPTENASVDEQPVFTEDIYDLRNWDNLDNKSRDILVEKGPIRDENIEFPLDTNGRHFSYTHYSTKMSNGEVYYRKWLLFKSSLGHEGFRDWRRINERLKEHEGSIQHIISMNSWNELRVRLVLETVRKRIGKRVGYVQQTPARLGTPDCPVVHRTVFSAPGWSVVNSPLSGFDSGVRL

SEQ ID NO: 46400 - protein, 226 aa, Zea mays
  Coding DNA Sequence Number=SeqID_4621
  Gene Ontology: Mol. function=transferase activity; Cellular component= cytoplasm; Biological process=auxin mediated signaling pathway
  Homolog annotation: Hit_ID=Q60DP1; Match level="QueryCoverage=99%, HitCoverage=99%, E-value=3e-71, Identity=63%"; Hit description =Glutathione S-transferase, putative
  Pfam annotation: Domain name=GST_C; Domain location=105-199; Score =39.8; E_value=9.4e-09; Accession=PF00043.15; Description=Glutathione S-transferase, C-terminal domain
  Pfam annotation: Domain name=GST_N; Domain location=3-76; Score=71.1; E_value=3.6e-18; Accession=PF02798.10; Description=Glutathione S -transferase, N-terminal domain
  Pfam module annotation: Pfam domain module=GST_C::GST_N; Domain location=105-199::3-76
MEGGVVLLNCSVSPFGNRVRIALKLKGVVYEEKAENLAAKSPLLLSSNPVHAKVPVLIVGGKPVCESLVILEFIDDAFSSTAGELRLLPADPYARAHARFWASYVDTKLNDCAMRVWRQPKGAAAAVEAAAKDTVAALKTLEAELGGKPYFGGDALGYIDVALVPFAPWFLTYERFGGFGVAAECPALAAWAERCVRENQCVAESLPEAEHVFQFVCGMRKAFGLD

SEQ ID NO: 46401 - protein, 110 aa, Zea mays
  Coding DNA Sequence Number=SeqID_4622
MEEGILGNKVTDHPILREGKGEDDMNGGELDDRAEALHQCGSARAAANGGANWGGARRSVDHHYQPIDGAKNAGGVTSHHRVDVVEVVVDGDRVVHQGLGTGMSRRVGGN

SEQ ID NO: 46402 - protein, 167 aa, Zea mays
  Coding DNA Sequence Number=SeqID_4623
  Gene Ontology: Mol. function=triacylglycerol lipase activity; Biological process=lipid metabolic process
  Homolog annotation: Hit_ID=Q5VP27; Match level="QueryCoverage=96%, HitCoverage=42%, E-value=3e-61, Identity=68%"; Hit description =Lipase-like protein
MATLNAVDIAANAYNKIPGPRTGDQDFRDVFHRTPGPPGCSRVRNRTRPHPLTTRPVGYADVGVELLIDTRRSPFLKHHGSESQSHDLEVHLHGIAGWQGDRGGFELVVDRDVALVNKFDDCLADEYPVPVRWKVHHNKSMVKGGDGRWVLEDHDPDYEDEDGNINL

SEQ ID NO: 46403 - protein, 387 aa, Zea mays
  Coding DNA Sequence Number=SeqID_4624
  Gene Ontology: Mol. function=hydrolase activity, acting on ester bonds; Cellular component=cellulose and pectin-containing cell wall; Biological process=lipid metabolic process
  Homolog annotation: Hit_ID=Q8RZ48; Match level="QueryCoverage=97%, HitCoverage=97%, E-value=1e-137, Identity=62%"; Hit description =Lipase-like
  Pfam annotation: Domain name=Lipase_GDSL; Domain location=36-372; Score=115.6; E_value=1.5e-31; Accession=PF00657.12; Description=GDSL- like LipaseAcylhydrolase
MGFSCQHRSASLRIFLVSVVLLLTAPAGRCHCYKRIFSFGDSIIDTGNFARSGPIMEYPFGMTYFHHPTGRISDGRVLVDFYAQALQLPLIPPNLPEKDTGLFPTGANFAVYGSTAMPPEYYRRWNHDVRACYLGVQMGWFKQMLQRIAPWDGRVPRRRQEASVHMPNRLIIPSGAKRQILSESLIVLGEIGGNDYNFWFAARRPREQAGQFIPDIVATIGSAAQELIGMGAKAILIPNNFPIGCVPTYLSGYRSGNRADYDEHGCLRWFNDFSQRHNRALRGEVDRLRAQHPGVKLIYADYYGAAMEFVKDPHRFGIGDPLTACCGGDDQPYHINRPCNRAARLWGKPSGFASWDGMHMTEKAYQVISHGVLNGPFADPPFAKWSC

SEQ ID NO: 46404 - protein, 37 aa, Zea mays
  Coding DNA Sequence Number=SeqID_4625
MGGSGAATCPEKVIYSKASTVTRNLENRACKNDTHAI

SEQ ID NO: 46405 - protein, 117 aa, Zea mays
  Coding DNA Sequence Number=SeqID_4626
MAEEEVTGKLLSYFTVDRHQKITKHGEIDIASLLPLLQISNNLLRRKTHQIIVYRNNNMFLTLHIRAMARHAIIGRVSFSIGHGRKVGIAMPDQMSPTSQGPVVGTCAPEQVDPTGE

SEQ ID NO: 46406 - protein, 314 aa, Zea mays
  Coding DNA Sequence Number=SeqID_4627
  Gene Ontology: Mol. function=hydrolase activity, acting on ester bonds; Cellular component=cellular_component; Biological process =lipid metabolic process
  Homolog annotation: Hit_ID=Q8RZ61; Match level="QueryCoverage=99%, HitCoverage=76%, E-value=1e-127, Identity=69%"; Hit description =Lipase-like
  Pfam annotation: Domain name=Lipase_GDSL; Domain location=2-279; Score=66.8; E_value=7.2e-17; Accession=PF00657.12; Description=GDSL -like LipaseAcylhydrolase
MGLPFVRPYLSGRRAEDFASGANFAVGGATALGPDFFRSRGFDIGDGRVHLGMEMKWFHDLLELLCRSGRSGVWRWNEKGCSDIMSQSLFIVGEIGGNDYNLPMLSRVPIEKIRSFTPNVIAKISSTITELIGLGAKTLVVPGNLPIGCVPKYLLIFKSDDKEDYEPETGCLRWMNEFSEYHNKLLLEELEKLRKTNPTVTIIYADYYGAAMEIFRSPERFGIEEPLVACCGGEGPYGVSLSTACGYGDYKVCDNPDKYGSWDGFHPSEAAYKAIAMGLLRGTYTQPSIASTTSSCPQLTELGSSVEYKVLYDL

SEQ ID NO: 46407 - protein, 202 aa, Zea mays
  Coding DNA Sequence Number=SeqID_4628
MEAREEEWIPRNYEESGPSHFPKQLAEKASKGPFIANQSKTPSASNKKKKERALMVILDDGESPQSPRQSRRVKICLLESVPVELVPVTRVSDPLVIETSRIEPPRALEGTPSSTSSLDLGPVAVPAKPRIAEPDVGQMTPSIESSSTLAMSSIRLSPPLALVKPRGQEGVIVDYSNKNLLELTEKSKSMMARIILDIDISI

SEQ ID NO: 46408 - protein, 360 aa, Zea mays
  Coding DNA Sequence Number=SeqID_4629
  Gene Ontology: Mol. function=hydrolase activity, acting on ester bonds; Cellular component=cellular_component; Biological process =lipid metabolic process
  Homolog annotation: Hit_ID=Q8RZ49; Match level="QueryCoverage=93%, HitCoverage=88%, E-value=1e-137, Identity=67%"; Hit description =Lipase-like
  Pfam annotation: Domain name=Lipase_GDSL; Domain location=27-346; Score=162.5; E_value=1.1e-45; Accession=PF00657.12; Description=GDSL- like LipaseAcylhydrolase
MGGAILLVSLVLLLNSPVGLCGCFKRIFSFGDSIIDTGNFASTVRSTPIKELPYGITYFNRSTGRVCDGRVIIDFYAQALGLPVIPPSIPGEATSPFPTGANFAVLGATGLSPDYYKANYNFTMPLPSSLDLQLQSFRKVLARIAPGDDNTKSLLGESLVVMGEIGGNDYNFWFFARNSRDTPSQYMPEVVGRIGAAVQEVVDLGAKTVLVPGNFPIGCVPQYLSAFQSNDASSDYDQYGCLVWFNDFSKKHNQLLQQEVGRLRSQNPGVKIIFADYFGAAMQFVQNPKNYGIDDPLVACCGGGGRYHTGKGCDKNATLWGNPSAFASWDGLHMTEKAYSIIADGVLNGPFADTPLLKTC

SEQ ID NO: 46409 - protein, 141 aa, Zea mays
  Coding DNA Sequence Number=SeqID_4630
MDRHRRHGCFVATSGPVSRKFVRRHGLHLINNDTARFLLDTSFFIQCLAPTVVDGRHQPVIGHSGPIGGLTGGREVGLLGSIVEGGIASACGPLAATASKCTGIGSCHGLIVVRLVDDGRMRRRARHVVERLVHLLTLRQQ

SEQ ID NO: 46410 - protein, 461 aa, Zea mays
  Coding DNA Sequence Number=SeqID_4631
  Gene Ontology: Mol. function=triacylglycerol lipase activity; Biological process=lipid metabolic process
  Homolog annotation: Hit_ID=Q53P41; Match level="QueryCoverage=99%, HitCoverage=100%, E-value=1e-173, Identity=68%"; Hit description =Lipase, putative
  Pfam annotation: Domain name=Lipase_3; Domain location=203-362; Score= 197.0; E_value=4.6e-56; Accession=PF01764.16; Description=Lipase (class 3)
  Subcellular localization annotation: CTP_CleavageSite=67; ConfidenceScore=5.70e-01
MAVHLPVPQPSSGLCAKPQQQRGNASTAAAAVATPPSTFAPQTTRLSAPTIALNIRHTTTPAAPPVVVMTERVAKKQNEETTATLASMWREIQGARDWAGLVEPLHPLLRAEIVRYGELVAATYKAFDLDACSKRYLNCKYGKARMLEAVGMAGAGYDVTRYIYAAPDIALPGAAGPCPSRWIGYVAVASDETARRLGRRDVVVSFRGTVTGSEWVANMMSSLEQARFDPADPRPDVKVESGFLSVYTSDDATCRFTYGSCRNQLLSEVTRLISKYKHEEMSITLAGHSMGSSLALLLGYDLAELGLNCDGCGDTVPITVYSFAGPRVGNTGFKNRCDELGVKVLRVVNVNDPITKLPGIFLNENFFGAGRLELPWSCACYTHVGVELALDFFKARDPACVHDLEAYIGLLKCPNKVAVVKNDGEHVLSKAMKFVLQHSFDTWRWQMAAIQVGELVQAIGL

SEQ ID NO: 46411 - protein, 842 aa, Zea mays
  Coding DNA Sequence Number=SeqID_4632
  Gene Ontology: Mol. function=protein kinase activity; Cellular component=integral to membrane; Biological process=protein amino acid phosphorylation
  Homolog annotation: Hit_ID=Q8RWC6; Match level="QueryCoverage=95%, HitCoverage=96%, E-value=0.0, Identity=51%"; Hit description =Putative receptor-like protein kinase
  Pfam annotation: Domain name=LRR_1; Domain location=122-144; Score =5.6; E_value=25; Accession=PF00560.23; Description=Leucine Rich Repeat
  Pfam annotation: Domain name=LRR_1; Domain location=146-168; Score =13.6; E_value=0.74; Accession=PF00560.23; Description=Leucine Rich Repeat
  Pfam annotation: Domain name=LRR_1; Domain location=170-193; Score =10.4; E_value=3.2; Accession=PF00560.23; Description=Leucine Rich Repeat
  Pfam annotation: Domain name=LRR_1; Domain location=195-216; Score =4.8; E_value=36; Accession=PF00560.23; Description=Leucine Rich Repeat
  Pfam annotation: Domain name=LRR_1; Domain location=218-237; Score =6.0; E_value=22; Accession=PF00560.23; Description=Leucine Rich Repeat
  Pfam annotation: Domain name=LRR_1; Domain location=240-263; Score =8.0; E_value=9.1; Accession=PF00560.23; Description=Leucine Rich Repeat
  Pfam annotation: Domain name=LRR_1; Domain location=264-285; Score =8.4; E_value=7.8; Accession=PF00560.23; Description=Leucine Rich Repeat
  Pfam annotation: Domain name=LRR_1; Domain location=287-307; Score =8.1; E_value=8.6; Accession=PF00560.23; Description=Leucine Rich Repeat
  Pfam annotation: Domain name=LRR_1; Domain location=312-335; Score =7.4; E_value=12; Accession=PF00560.23; Description=Leucine Rich Repeat
  Pfam annotation: Domain name=LRR_1; Domain location=337-358; Score =14.5; E_value=0.4; Accession=PF00560.23; Description=Leucine Rich Repeat
  Pfam annotation: Domain name=LRR_1; Domain location=359-382; Score =12.3; E_value=1.4; Accession=PF00560.23; Description=Leucine Rich Repeat
  Pfam annotation: Domain name=LRR_1; Domain location=384-410; Score =0.6; E_value=2.2e+02; Accession=PF00560.23; Description=Leucine Rich Repeat
  Pfam annotation: Domain name=LRR_1; Domain location=98-119; Score =19.2; E_value=0.015; Accession=PF00560.23; Description=Leucine Rich Repeat
  Pfam annotation: Domain name=Pkinase; Domain location=532-830; Score =54.8; E_value=2.9e-13; Accession=PF00069.15; Description=Protein kinase domain
  Pfam annotation: Domain name=Pkinase_Tyr; Domain location=532-830; Score=52.4; E_value=1.1e-15; Accession=PF07714.7; Description =Protein tyrosine kinase
  Pfam module annotation: Pfam domain module=LRR_1::LRR_1::LRR_1::LRR _1::LRR_1::LRR_1::LRR_1::LRR_1::LRR_1::LRR_1::LRR_1::LRR_1::LRR _1::Pkinase::Pkinase_Tyr; Domain location=122-144::146-168::170
  Pfam module annotation: Domain location=240-263::264-285::287 -307::312-335::337-358::359-382::384-410::98-119::532-830::532-83
MVCCHGGRRRSAALLFLAVAVVACAAAAAAQEPNTDAYFVSGFFSKLGRAAPSSSGANGVCSWSGVSCDGAGRVVAFVAAGMDLAGAIPEDTIGKLARLQVLDLSGNRLTALPNDLWELGASLGALNLSGNAIRGALPNNIGDFARLKVLDISHNAFTGALPQALGSIVGLQVLNASHNQFQGQVPNAIVFGCVSVVAMDLSGNALDGGLPDLSPLRSLARLNLSGNRLRGSIIGAFQEQLRVIDLSNNGFSGLNFSSGYAGSALVYLDLSGNELTGEFTIAGRFQNLRHVNLAHNQLSNANLLVSMGGISGLEYVNLSSTGLHGQIPADFSSRLVGLKVLDLSRNNISGVVPDMSSLGLHLLDLSVNNLTGEIPVALVKKLTSMDRFNFSYNNLTVCASELSAEAFATAFAQSRNDCPIAVNPDSIVKSRGKHKGMKLVLAVVLSLFFSVLGLLCLAAACRRGRKRCDELPVVKQVSSFDEPAVSGPFSFQTDSTTWVADVKVATSVPVVIFEKPLLSLTFADLLAATSNFDRGTLLAEGRFGPVYRGFLPGGIQVAVKVLVHGSAIGDQDAARELERLGRIKHPNLVPLTGYCVAGVQRIAIYEYMESGNLHNLLHDLPLGVQATEDWSGDTWEDNTGGVATTEIVTPEGTATWMFRHKIALGAARALAFLHHGCIPQIVHRDVKASSIYFDCAMEPRLSDFGLSMVAGTRADLLHHSPGYAPPEFSGSENAAATAKSDVYSFGVVLFELVTGKKPLGDEYPGVQKEASLVSWARAMVKASLAPSIIDPKIRDTGPERQMEEALRIAYLCTAELPSKRPAMQQIVGLLKDIEPKVEEEGD

SEQ ID NO: 46412 - protein, 51 aa, Zea mays
  Coding DNA Sequence Number=SeqID_4633
MDDDSSGVLMVVTGELGGAQQDGGYQSEDRMRRGLQGRRKKDYSSFQVFTS

SEQ ID NO: 46413 - protein, 304 aa, Zea mays
  Coding DNA Sequence Number=SeqID_4634
  Gene Ontology: Mol. function=protein kinase activity; Cellular component=cytoplasm; Biological process=protein amino acid phosphorylation
  Homolog annotation: Hit_ID=Q5ZE15; Match level="QueryCoverage=89%, HitCoverage=84%, E-value=2e-62, Identity=48%"; Hit description =Mitogen-activated protein kinase kinase-like
  Pfam annotation: Domain name=Pkinase; Domain location=23-285; Score =109.6; E_value=8.9e-30; Accession=PF00069.15; Description=Protein kinase domain
  Pfam annotation: Domain name=Pkinase_Tyr; Domain location=23-285; Score=-18.8; E_value=2.6e-11; Accession=PF07714.7; Description =Protein tyrosine kinase
  Pfam module annotation: Pfam domain module=Pkinase::Pkinase_Tyr; Domain location=23-285::23-285
MTASVLAAVPAPAAPEKLRLSDLDWICNLGAGGLASVCKARHCRTGAVFAVKISFDQDPLVVEKEAEVLKIAAGATHVIDFYALLREPGYKAALVLEYMDAGSLGSLLRRRRRGGLRIPEAAVAEVAMQCVQGLLQLHYRGIAHLDVKPDNILANSRGEIKFSDFNISRVVGSGEVPITGGTKKYFSPERFAPKARAGPIGAMKADVWGLGVTVLELFMGRLSLVPGVKNPSTEELKQAICDGETPSVPEDTEASAELRAFLAACLEKNPARRPFPVELLEHPFLARRDVEASRRALLEILAAA

SEQ ID NO: 46414 - protein, 180 aa, Zea mays
  Coding DNA Sequence Number=SeqID_4635
MAGPALGPSLASVTPSSDEYGWGLSASTVVLRPRPVEEPISDGSRGGSVKDGGEAPAALFPPHIAHPLDHEVYTAVEPVVAELTGRERFRCHFRIRVNVAPGLLRLGGRGFAESPWSVGYLRSGRDPLGGRRFPAGLAVLPWNRALPWPELPVSQPLLRPSSAAALVNAAGNGWRGEEGA

SEQ ID NO: 46415 - protein, 288 aa, Zea mays
  Coding DNA Sequence Number=SeqID_4636
  Gene Ontology: Mol. function=protein kinase activity; Cellular component=cellular bud tip; Biological process=protein amino acid phosphorylation
  Homolog annotation: Hit_ID=Q5ZE15; Match level="QueryCoverage=71%, HitCoverage=63%, E-value=2e-38, Identity=44%"; Hit description =Mitogen-activated protein kinase kinase-like
  Pfam annotation: Domain name=Pkinase; Domain location=86-288; Score= -14.2; E_value=1e-07; Accession=PF00069.15; Description=Protein kinase domain
  Pfam annotation: Domain name=Pkinase_Tyr; Domain location=86-277; Score=-111.0; E_value=1.2e-05; Accession=PF07714.7; Description =Protein tyrosine kinase
  Pfam module annotation: Pfam domain module=Pkinase::Pkinase_Tyr; Domain location=86-288::86-277
MNTTELSSTSMSMHQHHHVKNSGSNATSHNQDAIISGSHAAPSAPAIKLRLFHSASDGHPDAAASRDVPAEAPAPAAPEKLRLSDLEWICNLGAGGLASVCKARHCRTGEVFAFAVKISFDQDPLVLENEAEVLKIAARATHVIDFYALLREPGYNAALVLEYMDTGSLGSLLRRRRRRGLRIPEAAVAEVAMQCVEGLLQLHYRGVAHLDVKPDNILANSRGEIKMGDFNISRVLYVGSGELLEVPITGGTKMYFSPERFAPNARAGPIGAMKADVWGLGVTIVELF

SEQ ID NO: 46416 - protein, 217 aa, Zea mays
  Coding DNA Sequence Number=SeqID_4637
  Gene Ontology: Mol. function=electron carrier activity; Cellular component=membrane; Biological process=electron transport
  Homolog annotation: Hit_ID=Q2R428; Match level="QueryCoverage=63%, HitCoverage=66%, E-value=2e-43, Identity=61%"; Hit description =Plastocyanin-like domain containing protein
  Pfam annotation: Domain name=Cu_bind_like; Domain location=70-162; Score=46.2; E_value=1.1e-10; Accession=PF02298.8; Description =Plastocyanin-like domain
  Subcellular localization annotation: CTP_CleavageSite=75; ConfidenceScore=5.52e-01
MGIPTTVMFRVVVIAVFTLSTAAAAGNATASPSSVTNSTASSTKNTTAPLLPPFGTNHAVGDGAGWIFDWKANASAANYSAWAANRTFFLGDYLSFRTDTSNTVVHTTNATAYRFCSAGVAARGGGGGWKPEEAFLVVMLTAEGTNYFFSDALDGEHCRKGMRFQVGVAHGRGLPSVPPSYYEPLSGAPAGTRARHDGAVAVWGVAMVAAFAALAFS

SEQ ID NO: 46417 - protein, 103 aa, Zea mays
  Coding DNA Sequence Number=SeqID_4638
MTARNLIGLCGARFTTKCLLVNNEEWMEVGDEMWVPCARENDCESGARADAGDELSSVGFGEHGAMPIGGILSKAAPKLSTIKLRHSDMSQDEGVNRLKDEMT

SEQ ID NO: 46418 - protein, 516 aa, Zea mays
  Coding DNA Sequence Number=SeqID_4639
  Homolog annotation: Hit_ID=Q2R429; Match level="QueryCoverage=72%, HitCoverage=97%, E-value=1e-115, Identity=55%"; Hit description =Expressed protein
MKPRNPENTLARVSLSAKSQRPRLIPPTCLSPPPNSNAARLLPHHRPDEEADHTPPAPPPRNQTVSSSFSFSRGLQRRRVEIPNLRLDQFLLPPLPLVRSRIIDQLYILYALIFGKIPCIPQQFCLRMVILYPGCVAPTVHRDFLPRWVLLNNSSRMYCHVFPDRTKPKRQYRHQWVPCFSKGSSFQAEELKTYPNTVPEEIFNTIILDDSDAFYVLELSTSREFSSSLDKNSAILICLFDVDGDSLLQRVPAIYLGQPTHGFKTEQQIPFQSGSVDIVTFKGSKLKTIKEVWIGLESGSWRLDGLSLKVIHGPVGQPKEINGTPEQKFSGLQYTFENVNVFLGDDGASVAEARPTAITDLSGVGLSDLQQGMLSSRSKASSIQEVREDGLREYADLKQSLLLYDASIVITGFSTFILASNDSAAYSFLIGGIGGFLYLLLLQRSVDGLPVIGSPSEAGGAVALKYGAGGDSFALTPTDLFVGTAGFLANKVAVLLAAFMPMLSDSKSEDGSGDSS

SEQ ID NO: 46419 - protein, 528 aa, Zea mays
  Coding DNA Sequence Number=SeqID_4640
  Gene Ontology: Mol. function=nucleic acid binding; Cellular component= membrane; Biological process=electron transport
  Homolog annotation: Hit_ID=Q5Z957; Match level="QueryCoverage=99%, HitCoverage=99%, E-value=1e-148, Identity=51%"; Hit description =Putative CPRD2
  Pfam annotation: Domain name=BBE; Domain location=464-524; Score =85.8; E_value=1.3e-22; Accession=PF08031.2; Description=Berberine and berberine like
  Pfam annotation: Domain name=FAD_binding_4; Domain location=75-216; Score=98.5; E_value=2e-26; Accession=PF01565.13; Description=FAD binding domain
  Pfam module annotation: Pfam domain module=BBE::FAD_binding_4; Domain location=464-524::75-216
  Subcellular localization annotation: CTP_CleavageSite=80; ConfidenceScore=5.43e-01
MAASGRKAVVVLILCMLCCNTSLLPCSASSDSFLQCLSAMMPSELVYQQSSSSFTSVLQSSVQNPKFVTNTTVRPLCIITASDVSHVQTAVRCGRWNGVRLRVRSGGHDYEGLSYRSVQPEVFAVLDLARLRGVQVRPGDDSAWVDAGTTLGELYYAVGTTNPGFLFPGGACATVGVSGFISGGGIGLMMRKYGVGGDNVVDARIVNANGDVLDRFAMGDDLFWAIRGGGGETFGVVVAWRLKLSKVPPTVTVVNVLRTMEQGAADLVAKWETTILQPPVLPDLTIRVVLQYRQAFFQTLFLGGCSDLLNTMRGLFPELGTTAADCHEMSWLRAMAFIYFGNTDTPVEALLNRTNNVGNYYFKSKSDYVRRAVGKAGWDSLYQQWLSQNGNGQIILEPHGAAVGGANTMTTSPYPHRRGVLFNIQYGSNWCCGANGTEAAAALGWLNGLYGFMAQFVTSNPREAFANYRDLDMGQNVIGSDGLSSYWSARAWAERYFMGNYRRLAAVKAAVDPTDYFRNEQSIPPLPK

SEQ ID NO: 46420 - protein, 115 aa, Zea mays
  Coding DNA Sequence Number=SeqID_4641
MAECAVNPGAHCVDPFLSPDRYKVALVAVLPFLFALRTPVATPPSSSSKDAAATAPYSDLGVFRYQGGCLGLPRVGANVVASTWEIGSQCRARNCSSSLFWTADLRGARAAVSIA

SEQ ID NO: 46421 - protein, 48 aa, Zea mays
  Coding DNA Sequence Number=SeqID_4642
MADPGARVAEGVKRACVEKAGGELGYAGVIRSGPNGAKKKSVKRTENT

SEQ ID NO: 46422 - protein, 475 aa, Zea mays
  Coding DNA Sequence Number=SeqID_4643
  Gene Ontology: Mol. function=catalytic activity; Biological process =metabolic process
  Homolog annotation: Hit_ID=Q2RA11; Match level="QueryCoverage=75%, HitCoverage=70%, E-value=7e-60, Identity=37%"; Hit description=CBS domain-containing protein, putative, expressed
  Pfam annotation: Domain name=CBS; Domain location=52-242; Score=26.1; E_value=0.00012; Accession=PF00571.18; Description=CBS domain
  Subcellular localization annotation: CTP_CleavageSite=72; ConfidenceScore=5.66e-01
MVGGMSPPRRTLSMGSGGAMGRRAASAGVMGDSPKRGLSRSMTMGGERTVKRLRLSRALTVPESTTVLEVCRRMAARRADAALLTDSNALLCGILTDKVGRGPWPLLFNSCSSPFHKIFSKFRHLPVVDNGEVVAMLDIAKCLYDAISRMERASEKGKAAIANVAAGDDKYSIVEALKEQMFRPCLSAIIGEDSTVVMVSPGDSVLAATKRMVEAHATSAVVAVGSKPQGILTSRDILMRLVAKNLSADATPVEKERKFLHLPVMDRDGSIISIIDVIDIAHAAISIVESSGGGGDGSAGSDEAASSMFQRFWDSAMALGPLDDETDTQSQMSEASRSQMMMSDVHHHHHHHDSAGGGSEAGFSLSSFSFKLQDRRGRMHRFSCEVQSLTPLVTCILRRLGADIDPDRLPQILGLKLFLDYSGTTGRRKAVATPRGAMAVGMSSRDAWAAAYSGVAAGAALVTGIGVMAYLRRSA

SEQ ID NO: 46423 - protein, 199 aa, Zea mays
  Coding DNA Sequence Number=SeqID_4644
  Gene Ontology: Mol. function=DNA binding; Cellular component=nucleus; Biological process=RNA-dependent DNA replication
  Homolog annotation: Hit_ID=Q9LGH0; Match level="QueryCoverage=77%, HitCoverage=47%, E-value=1e-23, Identity=34%"; Hit description=NAM -like protein-like
MSKDPAIGTNQSGKAYWCRISDYYNEHKKTTNARTQHSLEHKWSDIQRDTTKFCAAYDKVIRLKQSGKSEDDQVKDALQMFESMHKKQFRFMHCWYMLRQEVKWTTWLSSCETPHNTGNVNVNETGSQARQGEDQFGSPSDTFVRPMGRDRAKKARSTSTSINSTACMAMLQKFQEDRARFEEKATKYEDQAAASTEED

SEQ ID NO: 46424 - protein, 149 aa, Zea mays
  Coding DNA Sequence Number=SeqID_4645
MGKSKKGGSSSHHSGDKRKREPTPPSEDFDDSEYSEEEFSSESEGSPVHASPPASSDDSDDSQGLVVEVWTYIQVVEHAGLEGSNESEYSSDEENSLDSSEEGGGDGDGGDDDDDGGDGDGGGDGREGGGKGGEGDGEGGSKGSNKASG

SEQ ID NO: 46425 - protein, 119 aa, Zea mays
  Coding DNA Sequence Number=SeqID_4646
MAMAMAMAGLRCRGDHFQWHGWGQPLCGRVQAGARPWLCSLGLLHSIVSLCSGSERLSLSRRLWMWLCAFAILSQSASLRLIMPGKRKLSKVLHCSAHKDGPAITDLAQSASRMSIEDG

SEQ ID NO: 46426 - protein, 591 aa, Zea mays
  Coding DNA Sequence Number=SeqID_4647
  Gene Ontology: Mol. function=transporter activity; Cellular component= membrane; Biological process=oligopeptide transport
  Homolog annotation: Hit_ID=Q94DS0; Match level="QueryCoverage=96%, HitCoverage=96%, E-value=0.0, Identity=65%"; Hit description =Putative peptide transporter
  Pfam annotation: Domain name=MFS_1; Domain location=45-528; Score =28.0; E_value=1.7e-05; Accession=PF07690.6; Description=Major Facilitator Superfamily
  Pfam annotation: Domain name=PTR2; Domain location=107-512; Score =213.9; E_value=3.8e-61; Accession=PF00854.12; Description=POT family
  Pfam module annotation: Pfam domain module=MFS_1::PTR2; Domain location=45-528::107-512
MERSLATGTTESPQEECFKGNKGGFRALPFIFCEFRPRSHLTGHMATNEMLEKVAGFGLNTNMITYLTDKYHLSTVSSQTMLFVWSAISNFTPIPGAVLADMYLGRFMAVALGSVACLIGMVFLWLSATVPGARPPPCSGDQCAPPGTRHLAWLLAGFAFLSLGAGGVRPCSMAFGADQFSRHPRQRRASILQSYFNAYYASIGVAFTVAVTAIVYLQDNVGWSVGFAVPMGLMLLSAVSFLLGSSLYIKEKGERRMFAGIGTAVAAAIRNHGARLPDKTVDGVYHHLKDCKLAVPTDKLRFLNKACLLRATKDDAPCNGSDAAAAASERHGHDGTRLCTVDQVEQLKSAIRVLPIWSSTIFLALAMNQSFAVKQADAMDRRVGAGGFRVPSGSLAVFNMATMSLWSACYDRWVAPALQRYTGNPHGLTMKQRIGGGLLLATASTAVSAAVEGERRRLAQRGVTISAFWLVPQFALVGLAEAFGVIGEIEFLYTELPKSMASFSMSLLYMAFGVGNLAGALIVKVVQVASGQGVGTGWLVDNLNVGRYDYYYWLLTGYGVANFVYFAWCCWLYGEEGKNVEWEEEDNTEQP

SEQ ID NO: 46427 - protein, 77 aa, Zea mays
  Coding DNA Sequence Number=SeqID_4648
MALSPSSLRKGDEGAFLVTTVPKVSEEIRDRKGERALGLRPPDEDVNIVMQVWTEIMCLSTSFGIRMVQEKFEINVM

SEQ ID NO: 46428 - protein, 478 aa, Zea mays
  Coding DNA Sequence Number=SeqID_4649
  Gene Ontology: Mol. function=RNA-directed DNA polymerase activity; Cellular component=intracellular; Biological process=RNA-dependent DNA replication
  Homolog annotation: Hit_ID=UPI00004C1731; Match level="QueryCoverage =99%, HitCoverage=34%, E-value=0.0, Identity=91%"; Hit description =UPI00004C1731 related cluster
  Pfam annotation: Domain name=RVT_1; Domain location=56-238; Score =83.0; E_value=9.6e-22; Accession=PF00078.17; Description=Reverse transcriptase (RNA-dependent
MPGIPRDVAEHSLDIRARARPVRQPLRRLDEEKRRVIGEEIHKLMAAGFIKEVFHPEWLANPVLVRKKGGKWQMCVDYTGLNKACPKVPYPLPRIDQIVDSTAGCETLSFLDAYSGYHQIRMKESDQLATSFITPFGMYCYVTMPFGLRNAGATYQRCMNHVFGEHIGRTVEAYVDDIAKGVKLNPEKCIFGVPRGMLLGFIVSERGIEANPEKIAAITSMGPIKDLKGVQKVMGCLAALSRFISRLGERGLPLYRLLRKAECFAWTPEAEEALGNLKALLTRAPILVPPADGEALLVYVAATTQVVSAAIVVERQEEGHALPVQRPVYFVSEVLSETKIRYPQVQKLLYAVILTRRKLRHYFESHPVTVVSSFPLGEIIQCREASGRIAKWAVEIMGETISFAPRKAIKSQVLADFVAEWVDTQLPTAPIQPELWTMFFDGSLTKTGARRGPTLHLAPRETPTLRPTPPFPGVQQCG

SEQ ID NO: 46429 - protein, 61 aa, Zea mays
  Coding DNA Sequence Number=SeqID_4650
MSQEGISVDPDKVHESSEKDGDDADPTAPPGSEIEQARVQVRRLATRAQAVSDLPSTHWKE

SEQ ID NO: 46430 - protein, 197 aa, Zea mays
  Coding DNA Sequence Number=SeqID_4651
MDYRDGEACHAEVQVSGGIKPSVRNFSAPTEPPVQTSSSQPLEVSCEHPGSTSALRSDPLAEIPDATAHDHTSLFFFAESGDGQWPLQCHAMSGGLVGFGEDSADDRVPPDNSGMRRTRLTHSPGWQCAHAAWREEKNEEVGHREGSGNGDVGLTVGPQLSVLEQEHREGGTAFGREPLDRFQPVEDLEDSFLFAVA

SEQ ID NO: 46431 - protein, 120 aa, Zea mays
  Coding DNA Sequence Number=SeqID_4652
MAGSAPRESRFIVLIRRRSPRGDQAFPPAIEVVVAMPRDERRSGRIWEDSADEWVPPDSSRVRRTGLTHGPGWQCARAAWREEKKRRGRTRRRNWRWGCGLTFGPQLSVLAQEHGECGAG

SEQ ID NO: 46432 - protein, 166 aa, Zea mays
  Coding DNA Sequence Number=SeqID_4653
MASPTLANGADTRFSFTTFFERVFTSILWEALQSDAMTHLIGLAQTAKTTLDDTEVFVVDLSSELVEKDLQIEQVGNHTRELEQQVEIRDNTIEVLENHVHDVQEELDDANAHLDMNHQDMNQALEADWNNEDRIPRWQQDPAVGKMSMFPATTLSSNNAGVDGPT

SEQ ID NO: 46433 - protein, 320 aa, Zea mays
  Coding DNA Sequence Number=SeqID_4654
  Homolog annotation: Hit_ID=Q2QNH1; Match level="QueryCoverage=14%, HitCoverage=5%, E-value=2e-12, Identity=66%"; Hit description=HAT family dimerisation domain containing protein, expressed
  Subcellular localization annotation: CTP_CleavageSite=49; ConfidenceScore=5.29e-01
MPPLRAPKVIGSQKANSTPSPSRARQVCRWPEASGQAVVEASGQRPGCQAAAPQQTAGGQKLDQTQQQIMSSRKYPSGSEKRKRKKQEDEFIQMTLLIRCVNLSYGKINIEEYFLGFLKVDDTSGLGIFNILIDAMESFGYFLGHRCLQTSASSLTSLSSQPLLPALTSPVWRSLAPRRCLCLSRPLDPSICSLAFTLSPACPEVCPLCVSSSSPWLASDPAREFPQRRQLAGLQLACIMVVAPSLLVGSCVAAHTCRTPLLLCWLRAPDYVLRSSLALAAGHHQPCLPRLVHSVAREVLDVMAELRNGGNENRSCARDL

SEQ ID NO: 46434 - protein, 380 aa, Zea mays
  Coding DNA Sequence Number=SeqID_4655
  Homolog annotation: Hit_ID=Q6QP51; Match level="QueryCoverage=43%, HitCoverage=62%, E-value=5e-22, Identity=46%"; Hit description =Putative growth-regulating factor 1
MTASKEAGPSEGFDSRFRALGLHAHYWLAPEGFDSRLRAHRARDDSGYVRYTAEARATLPSHFAPPLTDLTGKQCRLPCSDCCATRQGAIGSSASPDPRARTQPRYRKTVSASPDPRARAQPQHRKTVSASPDPRARTPPRPRKTVSASPDPMARTQPRPRTTDSASPDPRARTQPRPRRNHRLARPWARTDHATGGPIITLPLASSGYGEQDRCPIWLAPEEVLESTRCRWVEPISNRLAWPHTATMTDHDRADGVAPGVDKLVHEAHRLGSSTARVASLKSYRRARGLYDRCAERWFRGHKCPNTVELQAIEEVWDLLDELEDSETVQDSQPQLLMTLSEAAWTGTDAVSTLCFQGNIQQHPLMILIDSGSTHSFISD

SEQ ID NO: 46435 - protein, 176 aa, Zea mays
  Coding DNA Sequence Number=SeqID_4656
MDVRDPKARRPGHGVRWRHWTSRRGFTGDEGGGHDRALGVWGRAQACSGRSGALSRGRNTGMEAPESVKHGEAERLGDGRDVVKPQVDGGGLRLRKKCSGERGPDELEQKRANQGVSRVADGKAELTEVTDAAAAFGERRWSCLVARAGRERGRGSSAEGANEQGKWAIGVRALKG

SEQ ID NO: 46436 - protein, 259 aa, Zea mays
  Coding DNA Sequence Number=SeqID_4657
MVTGQLSHLERLHHRLREEQERQRQEREQQDSSSPPQQEVESMSRPDPVPQLEAPPAPPQGIVATRGAIGGAAGGDPDGDNDSGSSDHSTELFEDEGNPRLSSTVNLVVVLNTELDHALDELSRARAEIAELRAERAERRHQKDGSPAPARTQHPCRSPPHEHHAYGTPDCRTKIDLDPYIMSNNRRRGGRRAQQEQCVPQGEESQPLRPPPPPYDSGANVLHASLGSASYWTDFGSHAASATTTSATSADVDATNAEG

SEQ ID NO: 46437 - protein, 212 aa, Zea mays
  Coding DNA Sequence Number=SeqID_4658
  Homolog annotation: Hit_ID=Q6QP54; Match level="QueryCoverage=30%, HitCoverage=22%, E-value=2e-16, Identity=67%"; Hit description =Putative kinase
LLVAVRLGGNNEFRRYGNDLSQLSCTLGDWALDFPHNWLGHDWSEAADVYTQQGDESAPCGAISRLRQRLRRFSCNGLDWSSDSEEEIGHSAPYASDQENNLMSSLTSHGGKQINKTKRDVGMGMGRAVRMSAQGRVMMTPPVDVAGVRPSLGDVEAPPKPRSSLSSVAEVESEPLVRARRRPSAKARVESEPWGRAERSSSSSRAEPKSEP

SEQ ID NO: 46438 - protein, 158 aa, Zea mays
  Coding DNA Sequence Number=SeqID_4659
MAKGLTGGEIAPVRRTGRSGKSRWSRRCADCRRRWTELAGPCEQAGKIVGSEEFGLVARSTCDGGQPKSGDGDLAAPGRQGLDPCLKKLHGSAGTLSRGSGEAKGLWKWLAAMAGVWVARAGGAELAGVKDEVKTAGVSVEWSVTCLGVVLKVAGELG

SEQ ID NO: 46439 - protein, 74 aa, Zea mays
  Coding DNA Sequence Number=SeqID_4660
MARMRGGATLGVQPTKRESLNTSATTPIVASPLNRVLQKGVLRAHRRAECQWGGRCSIYNKDPKDVGTVNMMAT

SEQ ID NO: 46440 - protein, 274 aa, Zea mays
  Coding DNA Sequence Number=SeqID_4661
  Homolog annotation: Hit_ID=Q6ZBH5; Match level="QueryCoverage=20%, HitCoverage=12%, E-value=1e-18, Identity=77%"; Hit description =Putative hydroxymethylglutaryl coenzyme A synthase
MVAISPLRRVWMVLGGVSSLVVPVHASPGNISRSLPLPPKPHLPRSPAYSDDSSFWTLVPSTGAPKVQFGCYIIKQKGRGRKEERKGKYGQHLVRESDALSSVNLEGDLGEAGADSACSSGTQWFLVAASAAGGVTGARSTGCCSGLVRQQRTVVDEPVAAIAAAGGRWSSSDTCHESHSSSTPSHYSFVDKRRKVVIVALKNTQSLSAISIDYCDIQVYVEGPTRPTGGVVAIAMLIGSNAPISFERKYRASHMTHVYDFCKPDLTSKYPISF

SEQ ID NO: 46441 - protein, 792 aa, Zea mays
  Coding DNA Sequence Number=SeqID_4662
  Gene Ontology: Mol. function=catalytic activity; Cellular component =intracellular; Biological process=metabolic process
  Homolog annotation: Hit_ID=Q2R497; Match level="QueryCoverage=92%, HitCoverage=95%, E-value=0.0, Identity=83%"; Hit description=PPR986 -12, putative, expressed
  Pfam annotation: Domain name=PPR; Domain location=101-135; Score=7.5; E_value=0.98; Accession=PF01535.11; Description=PPR repeat
  Pfam annotation: Domain name=PPR; Domain location=167-201; Score =38.0; E_value=3.3e-08; Accession=PF01535.11; Description=PPR repeat
  Pfam annotation: Domain name=PPR; Domain location=268-303; Score=7.1; E_value=1.1; Accession=PF01535.11; Description=PPR repeat
  Pfam annotation: Domain name=PPR; Domain location=339-373; Score=8.7; E_value=0.7; Accession=PF01535.11; Description=PPR repeat
  Pfam annotation: Domain name=PPR; Domain location=416-450; Score=1.7; E_value=4.7; Accession=PF01535.11; Description=PPR repeat
  Pfam annotation: Domain name=PPR; Domain location=482-516; Score =55.9; E_value=1.4e-13; Accession=PF01535.11; Description=PPR repeat
  Pfam annotation: Domain name=PPR; Domain location=517-550; Score =13.4; E_value=0.19; Accession=PF01535.11; Description=PPR repeat
  Pfam annotation: Domain name=PPR; Domain location=553-587; Score=2.9; E_value=3.4; Accession=PF01535.11; Description=PPR repeat
  Pfam annotation: Domain name=PPR; Domain location=619-653; Score=8.1; E_value=0.83; Accession=PF01535.11; Description=PPR repeat
  Pfam module annotation: Pfam domain module=PPR::PPR::PPR::PPR::PPR::PP R::PPR::PPR::PPR; Domain location=101-135::167-201::268-303::339 -373::416-450::482-516::517-550::553-587::619-653
  Subcellular localization annotation: CTP_CleavageSite=45; ConfidenceScore=5.65e-01
MASVPSVAVPVAASGFPAAGGADSRRPPPSSVSAADKNSRLLGLRAGYPWAHPFSTPLQNNWNGRSIQAAQNGSTMEAPLRPLDVGEAMAMLREGKTVQSAMYVPLLHVCVETGSLGGARALHGHMVKTGTSADMFVATSLVNAYMRCGASQDARSLFDQMPEKNVVTWTALITGYTVNSQLLEALEVFVEMLEAGRYPSHYTLGAMLNACSASNNADLGSQVHGYTIKYRALSITSIGNSLCRMYAKSGSLESAMRAFRMVPDKNVITWTTMISACAEDENYTELGLTLFLDMLMDGVLPNEFTLTSVMSLCGTRLDLNLGKQVQAFCFKIGCQTNIPVKNSTMYLYLRKGETDEAMRFFEEMDDVSIITWNAMISGYAQIMETAKDDLHARSRGFQALKVFRNLKRSAMKPDLFTFSSILSVCSSMMALEQGEQIHAQTIKTGFLSDVVVNSALVNMYNKCGCIEDATKAFVEMSIRTLVTWTSMISGYSQHGRPQEAIQLFEDMRFAGVRPNEITFVCVLSACSYAGLAEKAEHYFDMMKEEYKIEPIVDHYGCMVDMFVRLGRLDDAFAFIRRTGFEPNEAIWSSLVAGCRSHGNMELAFYAADRLIELRPKGIETYVLLLNMYISNERWHDVARVRKLMKQEGLGVLMDRSWITIKDKVYFFKANDKTHELSDELYQLLENLLEKAKTIGYEPYQSAELSDSEDDKKPPAGSVRHHSERLAVALGLLQTPPGATVRVTKNITMCRDCHSSIKFFSLLANREIVVRDSKRLHKFKDGRCSCGDFGALL

SEQ ID NO: 46442 - protein, 70 aa, Zea mays
  Coding DNA Sequence Number=SeqID_4663
MAINGGLHNGEEEGETGEEKRAVVRRFPARDRTGATIEGRDREWGLPVTTTTGDDTEHDLRKFDANNDDG

SEQ ID NO: 46443 - protein, 226 aa, Zea mays
  Coding DNA Sequence Number=SeqID_4664
  Gene Ontology: Mol. function=beta-lactamase activity; Cellular component=integral to membrane; Biological process=beta-lactam antibiotic catabolic process
  Homolog annotation: Hit_ID=Q358K2; Match level="QueryCoverage=86%, HitCoverage=49%, E-value=8e-28, Identity=36%"; Hit description =Similar to Beta-lactamase class C and other penicillin binding proteins precursor
  Pfam annotation: Domain name=Beta-lactamase; Domain location=1-213; Score=-35.5; E_value=0.0044; Accession=PF00144.14; Description=Beta -lactamase
MRSGLAAFDEDPASPGNEDKMDEAADPLAFVLSVPQADPPGTRYRYNSVTAYTAGVVVAKATGGTLAAFADANLFAPLGIAHWQWSADRAGYTKGQGNLMLTARSLAAIGEMVRDGGRYHGRRIVSAAWLRAALEPKVAIGESDPFADGYGYFWYAKRQQIGGVDIPVSFASGNGGNKIYVVPSRHLVVAITSSAYGHGYGQRRSEAILKAILSAPRPLGVVRRAG

SEQ ID NO: 46444 - protein, 127 aa, Zea mays
  Coding DNA Sequence Number=SeqID_4665
  Gene Ontology: Mol. function=alpha-glucuronidase activity; Cellular component=extracellular region; Biological process=carbohydrate metabolic process
  Homolog annotation: Hit_ID=Q9A4L9; Match level="QueryCoverage=94%, HitCoverage=16%, E-value=1e-14, Identity=40%"; Hit description=Alpha- glucuronidase
  Pfam annotation: Domain name=Glyco_hydro_67N; Domain location=32-124; Score=46.7; E_value=7.6e-11; Accession=PF03648.5; Description =Glycosyl hydrolase family 67 N-termin
MVGAIGRFAVALTMLVCLACARPARAEDGYDLWLRYRPLPQLQRPAATVSAITVLRESPTLRVAAEELERGFSGLSGHAVARRDAITADSVVLATAQVPEVAALALPVAALNDEGYLIRPATLGGRR

SEQ ID NO: 46445 - protein, 105 aa, Zea mays
  Coding DNA Sequence Number=SeqID_4666
MKDTVDGTDRHSFTDDSEDEHCSPTGQIEDPKCREFLRKVSERVHQNPEPSYLLGMGMRDLLGETWDGSPDGKFPTGRKITVTGVRMTGIWVWLVLGGLDNMMYE

SEQ ID NO: 46446 - protein, 133 aa, Zea mays
  Coding DNA Sequence Number=SeqID_4667
MHVVSMKVVSELLLGDGFRVGMGGEAGTIQNLVTVIALSDSDSIDLWFQVYLGPAVKGAISMMTMGRQAVMVLNLDRSGGTILLMAALCVLSTQFRNLCPSLAQLVKGVVQLGVEHDDQVYHGAQSRIALNNW

SEQ ID NO: 46447 - protein, 137 aa, Zea mays
  Coding DNA Sequence Number=SeqID_4668
  Homolog annotation: Hit_ID=Q9LUW5; Match level="QueryCoverage=41%, HitCoverage=11%, E-value=7e-09, Identity=50%"; Hit description=DEAD -box ATP-dependent RNA helicase 53
  Subcellular localization annotation: CTP_CleavageSite=56; ConfidenceScore=5.37e-01
MAAHLRSAAVRLGALWPKMRGGASRRSPNWRRAAAPYRPMPGATSTPASWAGPCPREGEGEGVDTGTEKGLEIARLGTSPRIVEKLAARGITRLFPIQVLPPSWTGKTLAFVIPIMDKILSYNEKNGFVSLSHVEFF

SEQ ID NO: 46448 - protein, 154 aa, Zea mays
  Coding DNA Sequence Number=SeqID_4669
  Subcellular localization annotation: CTP_CleavageSite=66; ConfidenceScore=5.59e-01
MLGSDGVPSGSTPPTTSIVATSIDVTAVATGPISQANFMAFQQLLVQQFAALTVSINDMSSSTPPPASATTSVAALTYGMLGYGGIAPLPTTIAHYHHHRSLPIYHNTSSIVDLHLGATSVKHARIHPSDCLPTLLILDPVVHCPHACAATAAL

SEQ ID NO: 46449 - protein, 91 aa, Zea mays
  Coding DNA Sequence Number=SeqID_4670
MVQGFKQVLHDRFSIVTVNFQNLTQADNSFTEWWQDATEAANVSARQGLNSLIILGAWILWKHHNRCVFDGASPCMTVALVQASEERTSWS

SEQ ID NO: 46450 - protein, 562 aa, Zea mays
  Coding DNA Sequence Number=SeqID_4671
  Gene Ontology: Mol. function=dihydrofolate reductase activity; Cellular component=nucleus; Biological process=one-carbon compound metabolic process
  Homolog annotation: Hit_ID=O81395; Match level="QueryCoverage=92%, HitCoverage=100%, E-value=0.0, Identity=93%"; Hit description =Bifunctional dihydrofolate reductase-thymidylate synthase (DHFR-TS) [Includes: ...
  Homolog annotation: Hit description=Dihydrofolate reductase (EC 1.5.1.3); Thymidylate synthase (EC 2.1.1.45)]
  Pfam annotation: Domain name=DHFR_1; Domain location=58-235; Score =275.1; E_value=1.4e-79; Accession=PF00186.9; Description =Dihydrofolate reductase
  Pfam annotation: Domain name=Thymidylat_synt; Domain location=277 -562; Score=726.9; E_value=1.3e-215; Accession=PF00303.9; Description= Thymidylate synthase
  Pfam module annotation: Pfam domain module=DHFR_1::Thymidylat_synt; Domain location=58-235::277-562
  Subcellular localization annotation: CTP_CleavageSite=63; ConfidenceScore=5.32e-01
MQVAIFSSIACSPTSQFRRLQFLDLSIKSRPYHFSQSCLMALAAAPASGDSQSGPQRNYQVVVAATRDMGIGKGGVMPWKLLGDLKFFKELTLTTTDPAKKNAVIMGRKTWESIPVKSRPLPGRLNVILTRSGSFDFATVENVVICGSMKSALELLASTPYCLSIEKVFVIGGGQVLREYLNGPACEAIHLTDIQSSIECDTFIPPVDFSVFQPWYSSFPVVESNIRHSFVTFVRVRKSVAETHESNGKESTEIDTKNDKFEIENFSFLPKIVYDRHEEYQYLNLVEDIIRFGAQKNDRTGTGTLSKFGCQMRFNLRKNFPLLTTKRVFWRGVVEELLWFISGSTNAKVLQEKGIHIWDGNASREYLDRIGLAHREEGDLGPVYGFQWRHFGAEYTDMHADYTGKGFDQLMDVIDKIKNNPDDRRIILSAWNPSDLKKMALPPCHMFAQFYVENGELSCQMYQRSADMGLGVPFNIASYSLLTYMIAQVCDLSPGDFVHVIGDAHVYRNHVRALEEQIQKMPKPFPILKINPSKKDIDSFMASDFKLVGYDPHQKLEMKMAV

SEQ ID NO: 46451 - protein, 914 aa, Zea mays
  Coding DNA Sequence Number=SeqID_4672
  Gene Ontology: Mol. function=DNA-dependent ATPase activity; Cellular component=nucleus; Biological process=DNA replication initiation
  Homolog annotation: Hit_ID=Q6QNH2; Match level="QueryCoverage=99%, HitCoverage=99%, E-value=0.0, Identity=83%"; Hit description =Minichromosomal maintenance factor
  Pfam annotation: Domain name=AAA_3; Domain location=522-663; Score= -8.7; E_value=0.0029; Accession=PF07726.2; Description=ATPase family associated with various
  Pfam annotation: Domain name=AAA_5; Domain location=522-669; Score =9.4; E_value=0.00034; Accession=PF07728.4; Description=ATPase family associated with various cel
  Pfam annotation: Domain name=MCM; Domain location=464-809; Score =722.1; E_value=3.7e-214; Accession=PF00493.13; Description=MCM235 family
  Pfam annotation: Domain name=Mg_chelatase; Domain location=509-670; Score=-134.2; E_value=0.0013; Accession=PF01078.11; Description =Magnesium chelatase, subunit ChlI
  Pfam module annotation: Pfam domain module=AAA_3::AAA_5::MCM::Mg _chelatase; Domain location=522-663::522-669::464-809::509-670
MDDSENNAPSTPGSPGFSTDRLPPNTTTSRGATDPSSYSDDDGEAEVDPHVLPDDDDPAAVAAPDEDEEGEDLFNDNYLDDYRRMDEHDQYESVGLDDSLEDERNLDEIMADRRAAEAELDAREVRTGATADRKLPRMLHDQDTDDDTNFRRPKRHRASFRQPSGPRTPRSDDDGDGATPSSPGRSHRGMSSGGDVPMTDQTDDDPYEDEFDEEDEMNMYRVQGTLREWVTRDEVRRFIAKKFKEFLLTYVHPKNDQGEFEYVRLINEMVLANKCSLEIDYKQFIYIHPNIAIWLADAPQSVLEVMEEVAKNVVFDLHKNYRNIHQKIYVRISNLPVYDQIRNIRQIHLNTMIRIGGVVTRRSGVFPQLQQTIYRNYQKLTLQESPGIVPAGRLPRYKEVILLNDLIDCARPGEEIEVTGIYTNNFDLSLNTKNGFPVFATVVEANYVAKKQDLFSAYKLTDEDKAEIEKLSKDPRIGERIIKSIAPSIYGHEDIKTAIALAMFGGQEKNVKGKHRLRGDINVLLLGDPGTAKSQFLKYVEKTGHRAVYTTGKGASAVGLTAAVHKDPVTREWTLEGGALVLADRGICLIDEFDKMNDQDRVSIHEAMEQQSISISKAGIVTSLQARCSVIAAANPVGGRYDSSKTFTQNVELTDPIISRFDVLCVVKDIVDPFTDEMLARFVVDSHARSQPKGANLEDRVSTDVDDDPLAAARQADPDVLSQDMLKKYITYAKLNVFPKIHDADLDKISHVYAELRRESSHGQGVPIAVRHIESIIRMSEAHARMHLRSYVSQEDVDMAIRVLLDSFISTQKFGVQKALQKNFRKYMTFKKDYNELLLLLLRTLVKDAVHFEEIMAGSASRLTHVEVKLEDLRNKAQEYEIYDLKPFFSSACFRDNGFLLDEGRGIIRHPLAE

SEQ ID NO: 46452 - protein, 232 aa, Zea mays
  Coding DNA Sequence Number=SeqID_4673
  Homolog annotation: Hit_ID=Q2R4J0; Match level="QueryCoverage=72%, HitCoverage=99%, E-value=6e-19, Identity=42%"; Hit description=P21 -Rho-binding domain containing protein
  Pfam annotation: Domain name=PBD; Domain location=100-145; Score =22.0; E_value=0.00037; Accession=PF00786.18; Description=P21-Rho -binding domain
MTPISEQQQANKEPPHHTQSATCHIAPAPSEVAGVVGDAENADQEQEQDQQQQAARRERDFLAGIRKLFKSFKSLSHIFEIYKDDDDSDDEDDDMDTSIEIGLPTDVQHVAHIGLDGSTNLSSLIRGREGARELFSLSSLTTLEQFELAMASLAATGKQRNGLIRGAPAPRPNQTLIDLSLTAHLELELTVSEKEQAQQRLRCLEIDDNQSKTPPRGLRAMPRIMPTKRRPM

SEQ ID NO: 46453 - protein, 169 aa, Zea mays
  Coding DNA Sequence Number=SeqID_4674
  Homolog annotation: Hit_ID=Q7PCA3; Match level="QueryCoverage=19%, HitCoverage=34%, E-value=1e-08, Identity=78%"; Hit description =Putative phytosulfokine peptide
MERGRSSTSCRSLLLLLLVCFSHGAGAAAAARLLTPLQAAAAVPPPLALHQAESNGATAAAADDGLVMTQEGDADATSNGNDDDEISSVSESETMTGAEEGVWDGGQRRGGVPAEAAARRRAPRLHLHAAQGQAKERCDLLVRCRSSGQQCPTVAPPLSGSDEAKQQAQ

SEQ ID NO: 46454 - protein, 167 aa, Zea mays
  Coding DNA Sequence Number=SeqID_4675
  Gene Ontology: Mol. function=metal ion binding; Cellular component =transcriptional repressor complex; Biological process=ubiquitin cycle
  Homolog annotation: Hit_ID=Q2QXQ1; Match level="QueryCoverage=41%, HitCoverage=28%, E-value=6e-16, Identity=51%"; Hit description=Zinc finger, C3HC4 type family protein
  Pfam annotation: Domain name=zf-C3HC4; Domain location=121-163; Score= 37.0; E_value=6.4e-08; Accession=PF00097.15; Description=Zinc finger, C3HC4 type (RING finger)
MDSPTFSSDNGVPQSADGSSDNEEQEAATEFPEGSSSDSEELEGASSSDNEEQESAVEFLEGASDDILEIVRILMDNVFVEDDPQLTLQIVRNLMDGVAGLEKRVFNSTAEPGRDDGCRGCAICLEDFQDGVEVAVMACSGQHEFHSGCITNWLRRSNTCPMCRHAL

SEQ ID NO: 46455 - protein, 289 aa, Zea mays
  Coding DNA Sequence Number=SeqID_4676
  Homolog annotation: Hit_ID=Q2QXS4; Match level="QueryCoverage=89%, HitCoverage=95%, E-value=5e-90, Identity=68%"; Hit description=Stem -specific protein TSJT1, putative, expressed
  Subcellular localization annotation: CTP_CleavageSite=43; ConfidenceScore=5.35e-01
MNHSLLKDGSWGPLAASGPPARGSLRPGARMLAVFSGEVVEVPAELVAAGSRTPSPKTKASELVARFLGTSCPAAVSVRLADLGHLAYSHANQALLRPRSFAAKDEVFCLFEGVLDNLGRLSQQYGLSKGANEVLLVIEAYKALRDRAPYPASLMLAQLAGAYAFVLFDASTNSLLVASGGDVPLFWGVTADGCVAFSDDIDVLKGSCGKSLAPFPQGLLPLVPLSESSKKERRGSSSSSSLTEYPLPAPYTGCFYSNALGGLKCYENPKNKVTAVPANEEEICGATFQ

SEQ ID NO: 46456 - protein, 179 aa, Zea mays
  Coding DNA Sequence Number=SeqID_4677
  Gene Ontology: Mol. function=carboxyl- and carbamoyltransferase activity; Cellular component=ornithine carbamoyltransferase complex; Biological process=amino acid metabolic process
  Homolog annotation: Hit_ID=Q8SA97; Match level="QueryCoverage=53%, HitCoverage=15%, E-value=3e-12, Identity=58%"; Hit description =Ornithine carbamoyltransferase
MTHTDDPFGHHHSSTIRGSGMGVIYTHNHLPANGSSFSPLLGQLPKLNFPTFDGKNLKLWQFGCEDYFYMYGVDPNKAALILSGTIIRGTLKAPDSQLAVRPCRRRHRKLRSAQPRVRTRAQPRKTANSALPDLGLELGLSPGRRRTPLRPTQGSDLGSAPEDGELRSARPRARTWALP

SEQ ID NO: 46457 - protein, 139 aa, Zea mays
  Coding DNA Sequence Number=SeqID_4678
MDSLLVGSDERRHFYRSRCWRCSNQTHCKGAVQGSRLHQKLLQRIYDRFDDEDKRWSALKSKVDANLADVTSLQAKLDDTDIDTFRSDLRRTLEHQLDTCVTKLESSTWERLDAVVDDTTTHVAPGERLGSVRGLVSKD

SEQ ID NO: 46458 - protein, 152 aa, Zea mays
  Coding DNA Sequence Number=SeqID_4679
  Gene Ontology: Mol. function=DNA binding; Cellular component=cytosol; Biological process=regulation of transcription, DNA-dependent
  Homolog annotation: Hit_ID=Q8GZA8; Match level="QueryCoverage=38%, HitCoverage=24%, E-value=9e-20, Identity=72%"; Hit description =Protein ULTRAPETALA1
MAAANGAAGAVLFSEEDLREVSGVRWGEDFVEVTCGCTSHRYGDAVGRLRVFASGDLEINCECTPGCREVSILQYPCISVCLEYYCRNFNSIIWKAWAPPKCKFFSWLAVQNRVWTADRFGAPMVVESCSIRSEKREGIANPHHPRVLDNLV

SEQ ID NO: 46459 - protein, 81 aa, Zea mays
  Coding DNA Sequence Number=SeqID_4680
  Gene Ontology: Mol. function=DNA binding; Cellular component=nucleus; Biological process=regulation of transcription, DNA-dependent
  Homolog annotation: Hit_ID=Q8S8I2; Match level="QueryCoverage=76%, HitCoverage=27%, E-value=6e-21, Identity=65%"; Hit description =Protein ULTRAPETALA2
MQSRSLESGAARNGSGRDYGDDRRVTCDDEEERASRKVLRGCSRAPSCTGCMKCVCFGCETCRFKDCDCQTCVDFYRNSKE

SEQ ID NO: 46460 - protein, 552 aa, Zea mays
  Coding DNA Sequence Number=SeqID_4681
  Gene Ontology: Mol. function=oxidoreductase activity; Cellular component=mitochondrion; Biological process=electron transport
  Homolog annotation: Hit_ID=Q5W745; Match level="QueryCoverage=99%, HitCoverage=94%, E-value=0.0, Identity=86%"; Hit description =Putative NADPH dehydrogenase
  Pfam annotation: Domain name=Pyr_redox; Domain location=222-328; Score=67.4; E_value=4.7e-17; Accession=PF00070.17; Description =Pyridine nucleotide-disulphide oxidor
  Pfam annotation: Domain name=Pyr_redox_2; Domain location=57-375; Score=95.3; E_value=1.8e-25; Accession=PF07992.4; Description =Pyridine nucleotide-disulphide oxidore
  Pfam annotation: Domain name=efhand; Domain location=381-409; Score =20.0; E_value=0.0087; Accession=PF00036.22; Description=EF hand
  Pfam module annotation: Pfam domain module=Pyr_redox::Pyr_redox _2::efhand; Domain location=222-328::57-375::381-409
MASNGMSLVHRAAEAVRRTPRWKKRLVLFAVGASTLTYACQDNRVLQICDGTGNKKKVVILGTGWAGASFLRNIDTSLYDVHVVSPRNYFTFTPLLPSVTCGTVEARSIVEPIRNIVRKRNGSFRFWEAECIKIDPRNKKVHCRSDVGTNINGNGEFVVDYDYLIVSIGARPNTFNTPGVTENCHFLKEVEDAQKIRKSVMKCFERAALPNLSEEERKKNLHFVVIGGGPTGVEFAAELHDFVNADLAKLYPDVKKYVNISVIEAGGHILTMFDKRITEFAEEKFKRDGIDLKTNFKVVKVSDKDITMTNPATGEVAVPYGMAVWSTGIGTRPIILDFMKQVGQENRRVLATDEWLRVQGCEDVYALGDCATIAQRKVMEDVASIFRVADKDNSGTLTVKKIKDVLGDIYERYPQVELYLKSNQMKSFHELLKDSDGNSKELKELNIEQFKKALAQVDSQVKMLPATAQVAAQEGSYLADCFNRMKTCEQYPEGPIRIRGAGRHRFKPFRYRHLGQFAPLGGEQTAYQLPGDWVHVGHSTQWLWYSVYARAL

SEQ ID NO: 46461 - protein, 73 aa, Zea mays
  Coding DNA Sequence Number=SeqID_4682
MEIISQWLDGNHSHERTPIHTSILSGKNMSKKFYKDIRMIQLPPINTPIVISSVGGLRLRRSSKTGFNSVSGV

SEQ ID NO: 46462 - protein, 390 aa, Zea mays
  Coding DNA Sequence Number=SeqID_4683
  Gene Ontology: Mol. function=acyltransferase activity; Cellular component=integral to membrane; Biological process=metabolic process
  Homolog annotation: Hit_ID=Q60EI7; Match level="QueryCoverage=87%, HitCoverage=90%, E-value=1e-147, Identity=68%"; Hit description =Putative 1-acylglycerol-3-phosphate acyltransferase
  Pfam annotation: Domain name=Acyltransferase; Domain location=66-224; Score=47.5; E_value=4.4e-11; Accession=PF01553.11; Description =Acyltransferase
MRRCRGVACVVIILSTAFLLVVYLAPITTFAVRLFSVHYSRKATSFLFGMWLSLWPFLFEKINKTKVVFSGENVPPKRRVLLFANHRTEVDWMYLWDLALRKGHLGYIKYILKSSLMKLPIFSWAFHIFEFIPVERKWEIDEAIIQNKLSKFKNPRDPIWLAVFPEGTDYTEKKCIMSQEYASEHGLPMLEHVLLPKTKGFICCLQELRSSLDAVYDVTIAYKHRLPDFLDNVYGVDPSEVHIHVRMVQLHHIPTTEDKITEWMVERFRQKDQLLADFFMKGHFPDEGTEGDLSTPKCLANFLTVVYVVASCAYLSFVTYYSILPPQLIGSPEGDVKAKKTKGGEMIAYQLDYGSQSTVAQQPQSYYGHRVICNTSLRSCHIVEDDPLLW

SEQ ID NO: 46463 - protein, 151 aa, Zea mays
  Coding DNA Sequence Number=SeqID_4684
MTRLAASYWPSIYGWKVEDMYNFEPGAVDALVAIIVYHGHDLLQKGFHHTVDLTKMKNINNTRSIFAYIVIGGEQRYRDAVVGVAAVGDDDAAPTNDDADRGGPDEERTGVELAAQCSGRRQVRGGGDVALGKEAIRKMEPGPFGSIGFGV

SEQ ID NO: 46464 - protein, 67 aa, Zea mays
  Coding DNA Sequence Number=SeqID_4685
MDVADVVSVLEHDGYYLADEPEVHFVWQPNQESSVLVMSRVFDDYFIEDCGVILAPESSIAFVSICL

SEQ ID NO: 46465 - protein, 236 aa, Zea mays
  Coding DNA Sequence Number=SeqID_4686
  Homolog annotation: Hit_ID=UPI0000DA43ED; Match level="QueryCoverage =45%, HitCoverage=96%, E-value=9e-12, Identity=33%"; Hit description =PREDICTED: similar to keratinocytes proline-rich protein
MGQSAAGEGATVDVAKNGPAVMVVRDRRRLWQEKRATLRLRHNDRVKKRPRASLLIRGSKAGPSEGFNSRLRALGLRAHYWSEVRRSAPWKGSTAASGHSGSTPTTDQGAACAAPTAVPHDRVRLTAAKPGPRRYGKLRFARPQGSDSGSAPEDDELRIARPQGSDSGSAPEDDELRFARPQGSDSGSAPEDDELRFARPQGSDSGSAPEDDELRFARPQGSDSGSAPEDDELRFA

SEQ ID NO: 46466 - protein, 102 aa, Zea mays
  Coding DNA Sequence Number=SeqID_4687
  Subcellular localization annotation: CTP_CleavageSite=92; ConfidenceScore=5.89e-01
MASSSALAVPSIPLPPPSAYKRNRPSPVLTTPAPANSSASPRANQASVAVLPPSLRPINQCPKLRHTLTVTRHPFPPPIAPGNRTGDLTTVDTRHRAADRPP

SEQ ID NO: 46467 - protein, 119 aa, Zea mays
  Coding DNA Sequence Number=SeqID_4688
  Subcellular localization annotation: CTP_CleavageSite=66; ConfidenceScore=5.42e-01
MASGPTLFSLGAPLCRPAPLLRPAAALRSAPAAALARSVLYSAAPPLSLPKRSPNPCNKPRQALPRSSMLLRLARGCSTNRSSEPRPPTSLRSPMRDDAFVFTPHVQQPRPRFDMDSVG

SEQ ID NO: 46468 - protein, 179 aa, Zea mays
  Coding DNA Sequence Number=SeqID_4689
MAILRRQLCRMGAAAPLLWWWRAWEKPPSCGFEDERARLVLGHLKTKVVDPCANGWDQPQFTTFRRSDSGPWISIWRSRSWAGSDLIRRVGARSGGQDLTVPLRPNHFSHEPLGFYKNNPQSSSDYYYVFCLLVWCYVNFLFILCLIVLRRVEEPMAEDSGVQQIEVAKHELIEGKLCP

SEQ ID NO: 46469 - protein, 132 aa, Zea mays
  Coding DNA Sequence Number=SeqID_4690
MQRSGLSGSFATAELCEVETLYHELQVRMPTWMSSGSRVMGLAIHPSGSCSTKSFVLWLELPSSSSSSPTGSPPVAGIPCGDVGAYLTEVLGKVASQTPPPAKARGNSPAAPTPGVGALAPRAGEDAISPEG

SEQ ID NO: 46470 - protein, 242 aa, Zea mays
  Coding DNA Sequence Number=SeqID_4691
MGGCSPRVETLEHLSNGGMLGDLGSTVAELWLQGEEAGGRGLGEPKGLGANRKMSHVAGEKAELTKATGVAETQQRPQNWRWTTASFTTRVQSERERERARVLGWGATERGWASECGRAPEKARVHGDSVRCTRGLQAELLTFENFQRCFAIIHRTVLCTTGQCPVPQGRATLNSPASGIRSAKIHRTVRCDSGATATSRATVDCNALNARLRAQRSRARAGGTPDSLQGLSGAPPDSQAGP

SEQ ID NO: 46471 - protein, 65 aa, Zea mays
  Coding DNA Sequence Number=SeqID_4692
MGSLWLSRRGEGGPAKCFVFSGEVPFGSSGWEALLASREAGRGAGLDRVGLEWPDYSGRRVVLAI

SEQ ID NO: 46472 - protein, 36 aa, Zea mays
  Coding DNA Sequence Number=SeqID_4693
MGDGGSSSYPPSKRLDGRHALESLFFNRVTSHFDCG

SEQ ID NO: 46473 - protein, 99 aa, Zea mays
  Coding DNA Sequence Number=SeqID_4694
MEEGDDGRAEETRRVDPAPCTVDPREEDDGGRTSGRVGVPPPRRAQSLPTRVKELLCRAQWIHERSGSMEEGDDGRRGREEWILHRAPWIRGRRTAGGG

SEQ ID NO: 46474 - protein, 162 aa, Zea mays
  Coding DNA Sequence Number=SeqID_4695
MGKNNKRKHEPTPPSEEFGDSEYSEVEFSSESEGSPAPVPLRESSDDSDDSQGLAAEVWTYIQAVERSGLEGSDESEYSSDEEDSDGGGEDEDDDDDDGDDDDGDGDGDGDGSGSGSGSGGGSKDGDGDGSKDGDGGGSNRGGSSKGSTRGGGGGGSNRASG

SEQ ID NO: 46475 - protein, 173 aa, Zea mays
  Coding DNA Sequence Number=SeqID_4696
MRILEIVDEANTKLMRDYVVERRSWIGAKSLRVWNILLAVGDLYPLASFSPVGSLLFRYICSLPLFCSALDRHRQHRALGLSSAPSKHAVAEPAGLAGCAALAKQTCLPDDCSASSKRMAVLRGEKVKHNAVEQGFNLWLSWGGVLKSTFNPLGYVVLAPKVGYKDYDSDEAA

SEQ ID NO: 46476 - protein, 67 aa, Zea mays
  Coding DNA Sequence Number=SeqID_4697
  Subcellular localization annotation: CTP_CleavageSite=54; ConfidenceScore=5.21e-01
MTFSPSPFGFDESSSPKVPNQPVRGAIAIYLSCHFRWVLQSVPSPSQRLLMMAPSMKETGDTQEGVN

SEQ ID NO: 46477 - protein, 635 aa, Zea mays
  Coding DNA Sequence Number=SeqID_4698
  Gene Ontology: Mol. function=transporter activity; Cellular component= intracellular; Biological process=transport
  Homolog annotation: Hit_ID=Q6Z6I5; Match level="QueryCoverage=87%, HitCoverage=85%, E-value=0.0, Identity=75%"; Hit description =Putative phosphatidylinositol/ phophatidylcholine transfer protein
  Pfam annotation: Domain name=CRAL_TRIO; Domain location=154-338; Score=166.2; E_value=8.5e-47; Accession=PF00650.10; Description =CRALTRIO domain
  Pfam annotation: Domain name=CRAL_TRIO_N; Domain location=68-137; Score=47.6; E_value=4.1e-11; Accession=PF03765.5; Description =CRALTRIO, N-terminus
  Pfam annotation: Domain name=Herpes_BLRF2; Domain location=511-606; Score=-38.4; E_value=0.07; Accession=PF05812.3; Description =Herpesvirus BLRF2 protein
  Pfam module annotation: Pfam domain module=CRAL_TRIO::CRAL_TRIO _N::Herpes_BLRF2; Domain location=154-338::68-137::511-606
  Subcellular localization annotation: CTP_CleavageSite=73; ConfidenceScore=5.80e-01
MSSAAVSGSGGAAAAADGGVEGAPALSASASRTSSLRHRAMSASSKLLRSSLSRKSMGRRSSKVMSVSIEDVRDAEDMKQVDAFRQTLVLEELLPARHDDYHMMLRFLRARKFDIEKSKQMWSDMLQWRKEFGADTIIDEFVFEEMDQVLEHYPQGHHGVDKDGRPVYMEKLGQIDTTKLLQVTSMDRYVQYHVREFERAFAVKFPACSISAKKHVDQSTTILDVSGVGYKNFNKAARDLIGRLQKIDGDNYPETLCRMFIINAGQGFRLLWNTVKSFLDPKTTAKIHVLGNKYQSKLLEVIDASELPEFFGGTCNCEGGCMRSDKGPWKDPEILKVPSTCLDYFALHSDEGPAILNSKQHMEHATRRTERCVTDSDTGFRSTLQKQDSMRRNAVDSPKVAREKIEHPQMSPLHEMKTASDPDPAAKDSFDGGGLFPGVDRGMDFNWSGEVSEEKLQIARDMYAQLPDAYKQGDAGDRQVVSGFMALVMGVVAMFRVGKIAPKRAMDAAMGIATMEAMAKKTRQMQMQQQLQLGGPDAVVVSAAQYQALVKRVDDLEAKVAALASGPPEVPPELEESIKAAAARVDALETELDATKKLLETSSAQQEEVLAYIEKKKKKRGMTRNRGAKPLVVLM

SEQ ID NO: 46478 - protein, 604 aa, Zea mays
  Coding DNA Sequence Number=SeqID_4699
  Gene Ontology: Mol. function=transporter activity; Cellular component= intracellular; Biological process=transport
  Homolog annotation: Hit_ID=Q6Z6I6; Match level="QueryCoverage=93%, HitCoverage=98%, E-value=0.0, Identity=76%"; Hit description =Putative phosphatidylinositol/ phophatidylcholine transfer protein
  Pfam annotation: Domain name=CRAL_TRIO; Domain location=159-340; Score=91.4; E_value=2.8e-24; Accession=PF00650.10; Description =CRALTRIO domain
  Pfam annotation: Domain name=CRAL_TRIO_N; Domain location=73-142; Score=49.6; E_value=1e-11; Accession=PF03765.5; Description=CRALTRIO, N-terminus
  Pfam module annotation: Pfam domain module=CRAL_TRIO::CRAL_TRIO_N; Domain location=159-340::73-142
MSGHLDRFARPCFEGRSSHDECRDHKSDFEVSEDEKKTRMGSLKKKAIDASTKIRHSLKKNRRKSGSRVLSVSIEDVRDLEELQAVEAFRQALLLDELLPARHDDYHMMLRFLKARKFDIDKAKQMWMDMLHWRREYGTDTILEDFEYTELDAVLQYYPHGYHGVDKEGRPVYIERLGKVDPSKLMNVTTMDRYVRYHVKEFERSFLIKFPACSVAAKRHIDSSTTILDVQGVGLKNFSKTARELIQRLQKIDNDNYPETLYQMFIVNAGPGFRLLWNTVKSFLDPKTTAKIHIVQSGEVHCARQIVTISNGEEKIITYAKPKHHSMRGSDTSTAESGSEADDAISPKALRSYIQHPKLTPVREEVKIVRATSFSTRLPEYDVPVVDKAVDATWRREQPRKIPFMPQDADSSVKTMSRPSDSSWDKIVATLMACLMAIVMLVRSVKDLVTRRLPYKGGSEEIHSTLYPDPIQKEEFRPPSPIPGFAEADLFAVVLQRLGELEEKVQMLQEKPSEMPCEKEELLNAAVRRVDALEAELIVTKKALHEALIRQEELLAYIDRKEIAKAQHNWLVGWVALAEPIIWPAVDSKQGHGSCWKSVGVMER

SEQ ID NO: 46479 - protein, 225 aa, Zea mays
  Coding DNA Sequence Number=SeqID_4700
ILELFCVGSRRYKAKATCGIGESIEVEGRVQSGSGSSGLVQKYLKKIFFPCCVHLMYSPSPRTQDRASPVSGTPHLCLVTKDNRGLTSPWPRHLEQLHPRLRMESRHRGIGAADSFIGNPSNYVVSSQSHARTESLKGCYGIKLVGLTVPPTPSIVVFSDHRGQIKHVPVFVVVWGVCQCPRRRRCCATVTDQNTSKKWCLKWEPTPVFTDQVEEPSNWIFDRGI

SEQ ID NO: 46480 - protein, 127 aa, Zea mays
  Coding DNA Sequence Number=SeqID_4701
  Homolog annotation: Hit_ID=Q5ZCF0; Match level="QueryCoverage=48%, HitCoverage=6%, E-value=8e-24, Identity=90%"; Hit description =Putative insulin degrading enzyme
MAAAAVAAAGSSNVEFIRARSDKREYRRVVLANALEILLISDPDTDKAAACMEVEVGSFSDPEGLEGLAHFLGEFSTSLLVSSASPSPLSSRFARVQRFDFSFDLLRARADRIISRIRVDSWSEDLV

SEQ ID NO: 46481 - protein, 307 aa, Zea mays
  Coding DNA Sequence Number=SeqID_4702
  Gene Ontology: Mol. function=metalloendopeptidase activity; Cellular component=extracellular space; Biological process=proteolysis
  Homolog annotation: Hit_ID=Q5ZCF2; Match level="QueryCoverage=60%, HitCoverage=19%, E-value=4e-87, Identity=81%"; Hit description =Putative insulin degrading enzyme
MDWWEEASEVSTGLIKKGLNSLIILGAWIMWNHQNKCVFDGWTPNLALILRLSCPLYHMHLFFLLCNTFSLFRIFWESKKFEGSTSSAEPWYNTPFSVENVTPSVIQEWIEKAPTEKLHLPKPNIFIPKDLSLKEVHEKVTFPTVLRKSPLSQLWYKPDMLFSTPKVHIIIDFHCPLSSHSPEAVVATELFVDLLVDYLNAYAYDAQIAGLFYSIYVTSAGFQVSLGGYNDKMRVLLNAILVQIVKFEVKPNRFSALKVICLHACTEGQRCSDYPIQDPLRHVEVPMVTARRGPSFCLRSFGSKRWQ

SEQ ID NO: 46482 - protein, 213 aa, Zea mays
  Coding DNA Sequence Number=SeqID_4703
MDQFCHHNLGSPTSGIAGVDPSDDRRLDVLDSAIAPIAEVDEVASDGGEEMDLGGGSGGEDRPMTVPLLPEDPKVQIFRQHNHRGHRITLVSTTIRHISAPGHEEPHGVRLISALGHKEPRGLRLANSVATAGSERVSCIIGFSEDLAARNEASLRCALLVVIVGTRPVVIADEILDEVARSFQLDIQVHPCVAALFATYIRSIVGDGAAILF

SEQ ID NO: 46483 - protein, 136 aa, Zea mays
  Coding DNA Sequence Number=SeqID_4704
  Subcellular localization annotation: CTP_CleavageSite=77; ConfidenceScore=5.18e-01
CQRFTSSQNKRTKVGFILRGKGNRRHLWSGGTGLSGVHRTVSGAPPNMSGAPEDFSTNSPPSGNSRGDSAIIHRTVRCTPDMSGAPRKGGLRNSPASGFHFSCSAKIHRTVRCTPDCPVHPRSNGYFAPTATCDGI

SEQ ID NO: 46484 - protein, 267 aa, Zea mays
  Coding DNA Sequence Number=SeqID_4705
  Subcellular localization annotation: CTP_CleavageSite=12; ConfidenceScore=5.17e-01
MRRCAVAIWAVRAALMTRSCSRTSVATRSREAGSSNSHLDGGDGRSQRRGSWRGSSDVRPCRGYEGGEAWRGTTVRLGSDGHVEEGPEAGDVGGASNSELVVGPKPRPVLEGRGPQQQGRRRPPLGKLRRWRLRMGWRVRAGPLGRHARAGLRQRTGEGGDARSQGRVGNGGGRRRGRHGSRLAVAGRRLGVGSAEQGEGWGQQRSEGREGREEGRPAVGRRGWSGPAVGRGGRGCWRGERKKDLALYHVGNPNPGLGLGVVLIDLS

SEQ ID NO: 46485 - protein, 76 aa, Zea mays
  Coding DNA Sequence Number=SeqID_4706
MAGTGRPLWPFPPAIRGGVALVGKTLDGDEGHGRSGVLGWLGWLGKMGKGAGNPMVGLNRGVAFLNALVQVTFSIV

SEQ ID NO: 46486 - protein, 76 aa, Zea mays
  Coding DNA Sequence Number=SeqID_4707
  Gene Ontology: Mol. function=sequence-specific DNA binding; Cellular component=nucleus; Biological process=regulation of transcription, DNA-dependent
  Homolog annotation: Hit_ID=Q43700; Match level="QueryCoverage=74%, HitCoverage=18%, E-value=4e-22, Identity=84%"; Hit description=Heat shock factor
MVSDNPKQWEFANDDFIRGQQHRLKNIHSRKPMLSHSSHTQGSRPLADAERRDYGEEIERLNGRFGDERSRGIGGD

SEQ ID NO: 46487 - protein, 249 aa, Zea mays
  Coding DNA Sequence Number=SeqID_4708
  Gene Ontology: Mol. function=GPI anchor binding; Cellular component =membrane; Biological process=cell wall catabolic process
  Homolog annotation: Hit_ID=Q4VVD8; Match level="QueryCoverage=80%, HitCoverage=49%, E-value=9e-77, Identity=70%"; Hit description=LysM -domain GPI-anchored protein
  Pfam annotation: Domain name=LysM; Domain location=116-165; Score =9.3; E_value=0.061; Accession=PF01476.10; Description=LysM domain
  Pfam annotation: Domain name=LysM; Domain location=185-227; Score =36.1; E_value=1.3e-07; Accession=PF01476.10; Description=LysM domain
  Pfam module annotation: Pfam domain module=LysM::LysM; Domain location=116-165::185-227
MAKSRGFVMAAVMVVAVVVAVVSVAPRGAEAKTTIEPCSGSDSCPALLGYTLYADMKVSEVAALFAVDPAALLAANALDFGAPGAAHRILPMGLFVRVPTRCSCADGVRKSVSVRYAARPADTLATVSDVVFAGLASSDQIRNENGLTSADPDAPLDAGQKLAIPLPCVCFNSSDNNLPAVYLSYVVQVGDTVPAIAASYETTVTDVMNVNAMGSPVAAPGDILAIPLPDENLFKSPSQMVVIKSNPKK

SEQ ID NO: 46488 - protein, 221 aa, Zea mays
  Coding DNA Sequence Number=SeqID_4709
MAKTQLISNKRGGPDWVRHEASALAAPHLPYVLRVISGSAEGLSERGCGAGLEEDERWAQFAGERDQRPWTQGCAWRGYLCASLGKIGMEAAALGAAVHQRRRGARVMAADPLSLPDFFMQASRCIPARGQRRRCQEHGDLIWVSHIYRPPEESPSRCGSGYAGLSLNPVERCPRGSGGSLERMEIKLTVRAHLSHTRIGVPSVTPKILFLELERFSKGFE

SEQ ID NO: 46489 - protein, 138 aa, Zea mays
  Coding DNA Sequence Number=SeqID_4710
  Pfam annotation: Domain name=Collagen; Domain location=58-118; Score=- 45.2; E_value=0.072; Accession=PF01391.8; Description=Collagen triple helix repeat (20 copies)
MARAYWRSIERSRLGGSDESGVSSDEVDSFDSSEEWSGDDGDDEGDDSGDNNSEDDSGDDGGEGDSGGDGSEGDSGNDSDDNGDGGNSGSKGDDGDGSSKSDDGDGSGDGDKGDSGGSSDGGKGNDSGGKASVIVPLV

SEQ ID NO: 46490 - protein, 108 aa, Zea mays
  Coding DNA Sequence Number=SeqID_4711
  Gene Ontology: Mol. function=nucleic acid binding; Cellular component= intracellular; Biological process=translation
  Homolog annotation: Hit_ID=O24586; Match level="QueryCoverage=93%, HitCoverage=17%, E-value=6e-22, Identity=52%"; Hit description=Gag
MDPKGKGMVVNDKEKESIFNEPRDDKPTNSGSSHKKKDGKKKRRIKKIVYYDSDESSSSPRDDDDEKKKPVNSNFSFDYSRIPFNSDAHLIPIPLGKPPDFDQFSTYR

SEQ ID NO: 46491 - protein, 199 aa, Zea mays
  Coding DNA Sequence Number=SeqID_4712
MAEDQGRLKATVVELWQHRKNSGEHGPGGPEGLGVNRGAFQVASDRAELTGAIDAAGSPTTTVERTADVGRERGRECSVEGTNEQGEVGERGMGSKGVRACRGGRRLCGRGRVHGGAMGGRLGTGSDGWGPRGRERMSACARKLALTGRPHRAVRGREGEKGRAGGRQQAGSACQGLRARGHGAGPAGSTSAEMGFSIF

SEQ ID NO: 46492 - protein, 69 aa, Zea mays
  Coding DNA Sequence Number=SeqID_4713
MRYLHEDATLEEMLNPRQSSVHAPSVRRGPEFLQRRPGLVLQQVHPTQDQGGRGDPAAEVDGDQVDGEV

SEQ ID NO: 46493 - protein, 666 aa, Zea mays
  Coding DNA Sequence Number=SeqID_4714
  Gene Ontology: Mol. function=protein dimerization activity; Cellular component=nucleus; Biological process=regulation of transcription, DNA-dependent
  Homolog annotation: Hit_ID=Q84UA5; Match level="QueryCoverage=89%, HitCoverage=93%, E-value=0.0, Identity=73%"; Hit description =Liguleless2-like protein
  Pfam annotation: Domain name=bZIP_1; Domain location=286-337; Score =22.3; E_value=0.00055; Accession=PF00170.11; Description=bZIP transcription factor
  Pfam annotation: Domain name=bZIP_2; Domain location=284-339; Score =21.0; E_value=0.0042; Accession=PF07716.5; Description=Basic region leucine zipper
  Pfam module annotation: Pfam domain module=bZIP_1::bZIP_2; Domain location=286-337::284-339
MVQGEESSWRMERAALPLNQALAYGVQAHAAAAAAPPTCFLPSPPPTALPAGLLLVVELAVAMVQGEESSWRMERAALPLNQLALAYGVQAHAAAAAAAAAPPTCFLDFQPAAASAAYFGFGELEEALIHGGGAASAGGGVDPGVIIKNDVAQAKSAAGYLAGAGTGRPPTLEIFPSWPMRHQQQLHSGNSQSVGSTGTDSSSAQNTMSQMELVSPASSAPRQEVMMVTTDDYSYKPGLAAAPAAAAPPSFQQHHPLPLQLHGGEGGGDHDKRKHGSTRKDGKLVDAKTERRLAQNREAARKSRLRKKAYVQQLETSRIRLQQVEHELQRARSQSFDMSWAYRGPGPVRWRVQRRRGHELCCGLQLQLSCRSRSRPQRGAAMFDMEYARWLDDDTKRLAELRGGLQAHLLDGNLGLIVEECMQHYDELFQLKAALARSDVFHLLTGSWATPAERCFFWMGGFRPSELLKILIPQLDPLTEQQLLGICNLQQSSEQAEEALAQGLHQLHQSLADTVAAGTLNDGAAAPNYMNIMAVALEKLASLENFYQQVTIFLPSISCIVDRHPQDLILTVDHELHSNVTVAMELVLVLRATGSGPAFSMAGAAQPFVRKLALRAPSADNLRHQTLHQMRRILTTRQAARCFLSIGEYYSRLRALSNLWASRPRE

SEQ ID NO: 46494 - protein, 261 aa, Zea mays
  Coding DNA Sequence Number=SeqID_4715
  Homolog annotation: Hit_ID=Q8H473; Match level="QueryCoverage=47%, HitCoverage=23%, E-value=6e-13, Identity=40%"; Hit description =Putative crp1(Chloroplast RNA processing 1) protein
  Pfam annotation: Domain name=PPR; Domain location=209-243; Score =33.2; E_value=8.9e-07; Accession=PF01535.11; Description=PPR repeat
MVKTEEHYSLPSARCGDSFIEQRPREDRREKAAVVGEGEGDAGCGDNFIEQRPREDKREKAAVVGDSLARMGERSSGRRGGRGRDDVGRSGSVGGRWPHEDGREKTLVVRAPVLLTPASQWFMDLTASSIPHGASPHAVAAFHNMLIRADANAKAACRASEALDAIVSCLVDLDLCSLTSSLRHIERLVDVVGLLTRALGSCLDSVLPLVVSVVVNGLCKSGLVDDACRLLNDMPRNGVKLNVLCRGGGKRGDFGGYLSTR

SEQ ID NO: 46495 - protein, 460 aa, Zea mays
  Coding DNA Sequence Number=SeqID_4716
  Gene Ontology: Mol. function=protein binding
  Homolog annotation: Hit_ID=Q8RZ32; Match level="QueryCoverage=89%, HitCoverage=98%, E-value=0.0, Identity=88%"; Hit description=F-box protein-like
  Pfam annotation: Domain name=F-box; Domain location=1-47; Score=20.9; E_value=0.0047; Accession=PF00646.23; Description=F-box domain
MELLPVEVVGNILSHLGVARDVMIASAVCRKWRDACRRHLRLLSFNSNDFPRDMTTRQLEIVITQTIFQTMGLQRLSIHIDNTHEFSAAPVIAWLMYTRETLRSLSYNVRTIPNVSILEKCGRQKLEVLDLELDHNTITGVEPSYQRFTCLKSLSLRHVSILALDLSLLVAACPRIESLALDVLEVVTSELQSTMELTSHTLKSLFAKSVGVDKIILDADNLEVLHLNALNLDLFELNGKGTLKHFKIDDVSVTHLDIGDNTDHLEAVDVSNFTIVWPKFYSMISRASNLRMLRFWGVVFDDEDEIVDSETIAVSFPLLRHLSLSYELRDGLLHYSLQGSSLLENVSVLELGWTVISEHFGPWVFGMIGRCPNLKKLVIHGVLSETKTREDRQMLASFTSFIVCVMRKYVHVDQPCAAPCTATHALPLPLSPVHHRRDLRAAANVVSSLKTSLHHSKASS

SEQ ID NO: 46496 - protein, 78 aa, Zea mays
  Coding DNA Sequence Number=SeqID_4717
MDWPDPNLCLFMTTVALELRGAQDNLRRAVHDGVSHGAVLTDFGEIRNSRAMVDDLCHTRFWKVLTERYSGKSLSPLK

SEQ ID NO: 46497 - protein, 222 aa, Zea mays
  Coding DNA Sequence Number=SeqID_4718
MNQSHFLDSLFLNLEGEIPVKGPISAAHLAAPTAQQRLLLASCAHGLPFVPRPIPLTRAADGPAASALLCVLSLPRLRARPAARSPARRAPARLSNRHRAQARSPSWPTPSWPTRAAARPAVCRAHSATATPLLVLRVWKTGIVATTTPLSLSSRTAPRHGWYARLALPEGVNRKSCPIITIAPINIVGPKATCVEPISRRGKGEGVKADLQEFQDFDEFED

SEQ ID NO: 46498 - protein, 130 aa, Zea mays
  Coding DNA Sequence Number=SeqID_4719
MAWERRRRGCCRGPLAKVLGELMREMRRELEPSRHGWGAEEEPTMGCSWRGGGVGCGLGEEPEEEEMCGRRDRGGLPFIEKELWTCQPALAGGTCYNNDFGQTFLAFSRWIRILVTVEDIFLDLHSTNPI

SEQ ID NO: 46499 - protein, 136 aa, Zea mays
  Coding DNA Sequence Number=SeqID_4720
MAQIRSRRRAHELTSWARRAHELTRRVWLIIGDEAPAPRGEGRLTSWAQRQGAQALTGGPKDRRAGANQYPGDREGEGAWLRAQMSRGKWASGVRALKGSGHAEVAGKHADMGASTARVHRPRVFNSNSNQVSNSN

SEQ ID NO: 46500 - protein, 135 aa, Zea mays
  Coding DNA Sequence Number=SeqID_4721
MEEQGRRHTLGGERERSLERWIIDGELGFGSMASVDIGGRKEEQRCCLAPWILAAMGQRRAPQPGGGGRGRLELRHRERGVERHGQLRELSGCSLGASAQNQRGEGRCQENPSMLRNREGRHRLEKKTGSGRAQR

SEQ ID NO: 46501 - protein, 67 aa, Zea mays
  Coding DNA Sequence Number=SeqID_4722
MEGISTGVGVHFIGKKGEVEGRRDEDRGSARERVKGGINSIDGIHQWGKCYKSTPLKKNLVLEIKEG

SEQ ID NO: 46502 - protein, 200 aa, Zea mays
  Coding DNA Sequence Number=SeqID_4723
MAFPFLAGASLSLSTPGYLSPRPGFLIGINPTHQKHSLRYSIVSGPVSWPESHERRHHIQAVNGLLMYEGESLRPHIPLSILVGQVTPLPSCQLVAAATHVPFCGWRLWRPARQFDPTRPLPDEPSRYPTHILSRLQPVSCAHLGHPQGSRTDFAAMAFQTGDSYAELPRTVAGFLKLVELCKGLVVVPCLASLVEVYGV

SEQ ID NO: 46503 - protein, 73 aa, Zea mays
  Coding DNA Sequence Number=SeqID_4724
MAFPDRENHRALGNRSLEHTLGRRCTTHRGQTLPQHCHRPHRRVGAQGRKKRRRPLDPSQRRRFERLDTSSGN

SEQ ID NO: 46504 - protein, 86 aa, Zea mays
  Coding DNA Sequence Number=SeqID_4725
  Subcellular localization annotation: CTP_CleavageSite=18; ConfidenceScore=5.16e-01
MKLWKETSRSSKTTTSSRCGLAATPSRLPVKAAVIYVSFPHFDLFSPEGMRPSCGEEYAETAVAGDWMAAGKRRGRWRPRVLKIRV

SEQ ID NO: 46505 - protein, 138 aa, Zea mays
  Coding DNA Sequence Number=SeqID_4726
MELRLHSEKAGKHGLGETEGLGANQRASRVASEEAELTEATDATEARRHPRNGQRTTTEVHRCAQCEREERGCLVRAQLSEWVRALEKGSGVWGSGWETHGVGASTAESAGGRLGKGRWLTGGVRKPARASMRTGGQR

SEQ ID NO: 46506 - protein, 93 aa, Zea mays
  Coding DNA Sequence Number=SeqID_4727
MEFAPAHVEPRLQPPSLILPHRVLRKSRKHLMTKIDLAKYQGQWCSVMPKVIKDLQAKKTLMEGVQGMGPLYYLLEYQEELKVHKDQLMTLMT

SEQ ID NO: 46507 - protein, 98 aa, Zea mays
  Coding DNA Sequence Number=SeqID_4728
MWYEWVSGLDALLEGWACSCSWSLAKMPMTLPSSIASLPYGGAKPGGGARGTPPELQHEQWAPNVGTCSHGHVDPTEKREEYWQSLSRDGKSFVNLPL

SEQ ID NO: 46508 - protein, 68 aa, Zea mays
  Coding DNA Sequence Number=SeqID_4729
MGIAPGVAPSSNLQESLATTNTTLKVDNGEVAILHARIKVADCHVAELELGVTNLHEGVDEVVAFVRA

SEQ ID NO: 46509 - protein, 258 aa, Zea mays
  Coding DNA Sequence Number=SeqID_4730
MAAVTTVRDVLYHYAFARGVYERFIGDCDRHPQMARNAVALLLWFDQGTNQVISLLPGMSTTALGHLVTEASCVIRCLHMKDVVPGPPTPLLSALCQDSRMDCPRFFDSNRGLIVRGVADLLDGVCTLIFDDRLYHLLRRYQTGLVGRIPELEAPYASAVVVTVPEDYRSMFVTFSRGQSVERDEIFNYFRETWGDCIVRVLMEKTTGGAQPMYGRVIFKRKAFVSLLLNGDDRAPIFIGGREIWLREYTPRSSSNSN

SEQ ID NO: 46510 - protein, 85 aa, Zea mays
  Coding DNA Sequence Number=SeqID_4731
MKGVSRFGVKGKLAPRRSDERFQWYSEWIGSDSVNLAVGDLHARIHTDRSDSFVQRGRIIGVVVYRLTGAQSAVVLRRGPSVVKK

SEQ ID NO: 46511 - protein, 130 aa, Zea mays
  Coding DNA Sequence Number=SeqID_4732
MELNAQGKDRLVPGGGPSIVEGLMFGQNSSSSVLVLFFELRTVRGLSADRPQYKYFVLRTVQGPGADRPQYKDFVLRTVRGPGADRPQYKFQQMRRVSKTLFWLSFMYRGPSDLEGQAVRKSFLNALTLL

SEQ ID NO: 46512 - protein, 370 aa, Zea mays
  Coding DNA Sequence Number=SeqID_4733
  Gene Ontology: Mol. function=sequence-specific DNA binding; Cellular component=nucleus; Biological process=regulation of transcription
  Homolog annotation: Hit_ID=Q6IEP2; Match level="QueryCoverage=94%, HitCoverage=97%, E-value=3e-63, Identity=43%"; Hit description=WRKY transcription factor 39
  Pfam annotation: Domain name=Extensin_2; Domain location=4-289; Score= -142.8; E_value=0.1; Accession=PF04554.4; Description=Extensin-like region
  Pfam annotation: Domain name=WRKY; Domain location=171-231; Score =129.7; E_value=7.9e-36; Accession=PF03106.6; Description=WRKY DNA -binding domain
  Pfam module annotation: Pfam domain module=Extensin_2::WRKY; Domain location=4-289::171-231
MEEERCFNNWDLDAVVRLGCRRLLSPSPQPDPFASFLPPPPQKEKPVAPAPAKEPEPHTAWRFPDLGAGGGQDGEELLRALLADQPPLHQPLPTPAATPTPTPTATPPPPSQQQHLQPTVTAVDVAPPQVRPAPARAQPSGRQVPGGVPRSKRRKNQVKKVVCHVPADGSSPDVWAWRKYGQKPIKGSPYPRGYYRCSSSKGCAARKQVERSRADPNTFILTFTGEHNHAAPTHRNSLAGTTRHKFPSSAAPQPPPPSVVVGGDAQDRQPSPSPTSTSTAGLSPTTPLRTPSMEEEEEEEEEEEEEDELLVEDMEMAGEDELLFLSTDADAGAPTSSLFDVVGEPFLSPPWVTAASSAGEPATGAAGAGS

SEQ ID NO: 46513 - protein, 98 aa, Zea mays
  Coding DNA Sequence Number=SeqID_4734
MDSKGTGLVINDKEKEKETLYVDETKVFGKLWKTECNLTVVTIMGDRYPPGPLEVKNPCIGPQTSHPTKSSHRGPGKDYNGSGPNQEGNGLMPGSPAD

SEQ ID NO: 46514 - protein, 98 aa, Zea mays
  Coding DNA Sequence Number=SeqID_4735
MEGGGQGGKQQTTGGRTDKRQSAGRSKPEMEAGSRRRPRLWTDELTSSRAGGRPAGRGAGELLTCERASCAAAVGLGVRHAASCGYRLGDGGGTSPTL

SEQ ID NO: 46515 - protein, 62 aa, Zea mays
  Coding DNA Sequence Number=SeqID_4736
  Subcellular localization annotation: CTP_CleavageSite=26; ConfidenceScore=5.00e-01
MAVMPGDFTALAVDHAHRDGPSPSSVADHAPGSRLKTTLTAAAHPGTQAVSRVPLRKDLFIG

SEQ ID NO: 46516 - protein, 119 aa, Zea mays
  Coding DNA Sequence Number=SeqID_4737
MEGLCLRRTPRIDVLELWTMDADGRALIKIVDGGEMDGVAEGSTGRGHGRGWDEPGRIWEALLAWLGTDREGGRVWGRPSWEAGRAWTTARWMGSRRGARGGDHGWGGMNGEMVDVTRG

SEQ ID NO: 46517 - protein, 54 aa, Zea mays
  Coding DNA Sequence Number=SeqID_4738
MEMLVEAEKANTEAAKEALVALSRDPLFYELANGLCGSIIMLPVFFSLPMANGE

SEQ ID NO: 46518 - protein, 157 aa, Zea mays
  Coding DNA Sequence Number=SeqID_4739
  Gene Ontology: Mol. function=protein binding
  Homolog annotation: Hit_ID=Q1RZC4; Match level="QueryCoverage=70%, HitCoverage=35%, E-value=1e-17, Identity=37%"; Hit description =Cyclin-like F-box
  Pfam annotation: Domain name=F-box; Domain location=18-66; Score =17.3; E_value=0.055; Accession=PF00646.23; Description=F-box domain
MATGDESETAVRASEELRDWSDMTPVCLAEAFSRLALEDLWRGAMPCCRSWRDAARSRPGLFAVLDLEPGFAESTPGAEAAAWWTPSFQRRVDAMVRSAATFAVGELCEIHVRHCSDDALAFAAESGKVSQGVGPPSGRLGEVGGQGSYALDLRLDA

SEQ ID NO: 46519 - protein, 651 aa, Zea mays
  Coding DNA Sequence Number=SeqID_4740
  Gene Ontology: Mol. function=protein serine/threonine kinase activity; Cellular component=integral to membrane; Biological process=protein amino acid phosphorylation
  Homolog annotation: Hit_ID=Q9M342; Match level="QueryCoverage=92%, HitCoverage=93%, E-value=1e-138, Identity=44%"; Hit description =Putative wall-associated receptor kinase-like 15 precursor
  Pfam annotation: Domain name=APH; Domain location=353-545; Score= -6.2; E_value=0.016; Accession=PF01636.13; Description=Phosphotransfer ase enzyme family
  Pfam annotation: Domain name=Pkinase; Domain location=351-627; Score =155.2; E_value=1.7e-43; Accession=PF00069.15; Description=Protein kinase domain
  Pfam annotation: Domain name=Pkinase_Tyr; Domain location=351-627; Score=108.2; E_value=2.3e-29; Accession=PF07714.7; Description =Protein tyrosine kinase
  Pfam module annotation: Pfam domain module=APH::Pkinase::Pkinase_Tyr; Domain location=353-545::351-627::351-627
MGIALLALLLVLPASHARVCPPCGSTAVPYPLSTGDGCGDPAYKVRCAAATNSSTSSPTLMFDALNGTSYRITSISAATQRLVVAPAPLVAQGSRCVSEGRGGGVQLNASLPFNVSSSNTIMLLNCTSALLLSPLNCSSNSLCHVYANATGSTAAACAPLPLCCTFVAGGSSTSYSIRVSPQFCSAYRSFVGLDPAAQPPATWGRRLGLELQWATPREPLCRTQADCEDGANATCADDPLTPAARRCFCVPGLSWSPLAGACQLNPSDCQIAGGCGGSNHAPLIAGLVCGLGGALLLAAAGLLAYRRQRRVRLARERLAKEREEILNANNASGRTARNFSGRELKRATGNFSRDNLLGAGGYGEVYRGVLGDGTVVAVKCAKLGNTKSTDQVLNEVRVLSQVNHRSLVRLLGCCVDLDQPLMVYEFVPNGTLADHLHGATSLSRPPTLGWRQRLAIARQTAEGVAYLHSAAVPPIYHRDIKSSNILLDARLDAKVSDFGLSRLAEPGLSHVSTCAQGTLGYLDPEYYRNYQLTDKSDVYSFGVVLLELLTSKRAIDFARGADDVNLAVHVQRAADEERLMDVVDPAIKDGATQLQLDTMKALGFLALGCLEERRQNRPSMKEVAEEIEYIINIEAAGHPIEQQRTCLDSSE

SEQ ID NO: 46520 - protein, 190 aa, Zea mays
  Coding DNA Sequence Number=SeqID_4741
MEARGGASGSKGARRGGPFSWPRGAEEAVAGWIWGRAVLFLRFFTGLAAPVFSALGHGSAQQQGTKLNPPALSDSLGHGGRKPASNQEPGRCGDAGDEAKKKEAALASSRLLDPAFKPSKLSQDRLDKFKELHKKRLQITEKPKYKRKLKEMINYYKCTFGLKEDKEYNRDAKAKCQASVNSTRVLFIYL

SEQ ID NO: 46521 - protein, 443 aa, Zea mays
  Coding DNA Sequence Number=SeqID_4742
  Gene Ontology: Mol. function=protein serine/threonine kinase activity; Cellular component=nucleus; Biological process=protein amino acid phosphorylation
  Homolog annotation: Hit_ID=Q5N7Q8; Match level="QueryCoverage=83%, HitCoverage=50%, E-value=1e-166, Identity=80%"; Hit description=Wall- associated kinase 4-like
  Pfam annotation: Domain name=Pkinase; Domain location=107-401; Score =124.5; E_value=3e-34; Accession=PF00069.15; Description=Protein kinase domain
  Pfam annotation: Domain name=Pkinase_Tyr; Domain location=107-401; Score=100.1; E_value=6.6e-27; Accession=PF07714.7; Description =Protein tyrosine kinase
  Pfam module annotation: Pfam domain module=Pkinase::Pkinase_Tyr; Domain location=107-401::107-401
MAINILSLYLFHKRRSHVNFQGLEITTLVEGVAAGAGVAILAAAIFLFVRRKRKQKRVVNSSSKLLKYSGSGGTPRSRVGDMESGSIEDPPTHLFTYEELEEATSCFDENRELGDGGFGTVYKGSTNNTGRWSSSSFPVLGRSGYLKDGRVVAVKRLYNNSYRRVEQFQNEAAILSGLRHPNLVMFYGCTSSQSRELLLVYEFVANGTVADHLHGQRAAERALPWPLRLGVAVESAAALTYLHAIEPPVVHRDVKTTNILLDADYHVKVADFGLSRLFPLDVTHVSTAPQGTPGYVDPEYHQCYQLTDKSDVYSFGVVLVELISSKPAVDVTRHRNEINLAGMAISKIQKCQLEELVDIDLGYETDPATKKAMTAVAELAFRCLQQNGEMRPPIKEVLEVLRSIQGEYQTGKDGDKNKDGPLSPTTVHAPWESRATTPNTSRD

SEQ ID NO: 46522 - protein, 317 aa, Zea mays
  Coding DNA Sequence Number=SeqID_4743
  Gene Ontology: Mol. function=protein serine/threonine kinase activity; Cellular component=nucleus; Biological process=protein amino acid phosphorylation
  Homolog annotation: Hit_ID=Q5N7S6; Match level="QueryCoverage=81%, HitCoverage=53%, E-value=7e-49, Identity=40%"; Hit description =Receptor serine/threonine kinase PR5K-like
MAALCSPRRRLPLPLLLPLLLAVLVAASRGDDPSGDEYFNRSICKLQPYRCGEVNITYPFYLSDDTADVLGNSSSYCGYPGLAIDCVDDEYPTIQLGGGSSTGYSYNVTDIDYPTSTIYLADPDVLDDASCPRVDHNVTVSPSPTLWLNLSDYTVRYLLFFTNCSVHVLHVPNQSDISPIACASGSDGDDYSFVVPSEMPHQLLSQQCGQVTLVPVLQNATLTPVDPLWSTSGYRDALKQGFQLQWDSDMKTERCDDCERSSGKCAYNTSGEFVACLCADGHVTDHGCTNELDQGQGLRLLRVLQSAHRSRRHTPSF

SEQ ID NO: 46523 - protein, 162 aa, Zea mays
  Coding DNA Sequence Number=SeqID_4744
  Gene Ontology: Mol. function=kinase activity
  Homolog annotation: Hit_ID=Q6QP54; Match level="QueryCoverage=72%, HitCoverage=34%, E-value=4e-13, Identity=58%"; Hit description =Putative kinase
MARLTIAKSSLRRNRRSPPRPTSRLDLNLDLEGWSPPRPTRGLGLNLDLGGWSPPRPTPGLGLNLDLEGWSPPRPTPGLGLNLDLGGWSPPRPTPGLDLGPDLRRNRVLTQPRPRPQEESPPRPTLGSDQPRHRGVIITLTLASSGYGEQDRRPIWLAPVNK

SEQ ID NO: 46524 - protein, 256 aa, Zea mays
  Coding DNA Sequence Number=SeqID_4745
  Gene Ontology: Mol. function=nucleic acid binding; Cellular component= intracellular
  Homolog annotation: Hit_ID=Q5QMP3; Match level="QueryCoverage=82%, HitCoverage=86%, E-value=2e-59, Identity=53%"; Hit description=Fiber protein Fb2-like
  Pfam annotation: Domain name=Di19; Domain location=38-238; Score =74.9; E_value=2.5e-19; Accession=PF05605.3; Description=Drought induced 19 protein (Di19)
MDSEHWISRLAAAKRYYAAQLGRVDDVPGMGTEEVEMEVEDDGDMEMELEMALELGDATWPEVACPYCYEDHDVASLCIHLEEDHPYEPHAAPCPICSQRITRDMLNHITMQHGYLFKNGHRSRRFIVPESHAISLLSRDLRGTHLQALLGGGHGHRSNNAVTTNISSDPLLSSFGLSFSASDAPEPSKSASSIPDGTAIRKETPVQPWESSLCLDAVQSGCNAMSIVKQGDLMVVANVDDSWVVLGTASDDSAIM

SEQ ID NO: 46525 - protein, 276 aa, Zea mays
  Coding DNA Sequence Number=SeqID_4746
  Homolog annotation: Hit_ID=Q7XEZ8; Match level="QueryCoverage=63%, HitCoverage=33%, E-value=2e-24, Identity=48%"; Hit description=F-box protein interaction domain containing protein, expressed
  Pfam annotation: Domain name=F-box; Domain location=6-54; Score=19.8; E_value=0.0099; Accession=PF00646.23; Description=F-box domain
MAEAAGGGPLLPEELVIWEILTRLPAKPLLRCRAVCLSWRRRLTSDAKFLLAHHRRQPSLPLLTQGDRSTEDRRIDALDYRTGERLPVARTTGRTAANADDLNVLASCDGLLVLIANGGLHICNPATRQRAPLALLHGASCISALYPYRPSGSYRVAGALLLRESRGRPRRVPRAHRRVARAQVRRRTSRAVGVRRRGDGDADDVVLSPARRGRQQDLLAAGHVVGDALSRHTFKESLVHHDFFSMEGNAAGVDEKPLFDGLSTVALLREDTSEPH

SEQ ID NO: 46526 - protein, 81 aa, Zea mays
  Coding DNA Sequence Number=SeqID_4747
RHVCVDWFIGAGKAERSGGKEVEGVELDAAPKANADEPAIGVKNVVWHANGSPTWRANCHGFRNLGTIRFVFGRSASVDSL

SEQ ID NO: 46527 - protein, 138 aa, Zea mays
  Coding DNA Sequence Number=SeqID_4748
MEKDRQDDAQKHQAVVRIADPMREAKRARVSVKAAAFGSSKPVPAAKPAAPGHSKASASEKATASSGSKAPPGGPVKGRGSGEGQLAVVPPLVATTSPTAVVGAKGAARDPWGLLSVRAARLCWPLPLRTWQAPCPSD

SEQ ID NO: 46528 - protein, 811 aa, Zea mays
  Coding DNA Sequence Number=SeqID_4749
  Gene Ontology: Mol. function=RNA-directed DNA polymerase activity; Cellular component=nucleus; Biological process=RNA-dependent DNA replication
  Homolog annotation: Hit_ID=Q8S472; Match level="QueryCoverage=99%, HitCoverage=77%, E-value=0.0, Identity=82%"; Hit description =Putative gypsy-type retrotransposon RIRE2
  Pfam annotation: Domain name=Retrotrans_gag; Domain location=299-390; Score=71.4; E_value=2.9e-18; Accession=PF03732.7; Description =Retrotransposon gag protein
MRDFMTACDYCLFDCSDGSRSLDDEDCGPSRECFHVDLGGPSEGNHLGMPEDGDLPRPVPRVDIPRELAVVPVQAGGHDPQLEQIRGVQARLDEGTGALEPIRRDVGQAWAGQPPAGEIRHLPQGLQHRVADDARLRPPPTSSGVGQNLAAAAMLLRAMPEPSTTEGRRIQGELKNLLEGATVRRAESSASRRQGYPSEPHAATSRFMREASVYTGRTRNTAPAAPGRLSNEHHHHDRRAHLDERAFSRAIRRAPFPTRFRPPATITKYSGEAKPELWLADYRLAYQLGGTDDDNFIIRNLPLFLSDTARAWLEHLPPGQISNWDDLVQAFAGNFQGTYVRLGNSWDLQSCRQQPGESLRDYIQRFSKQRTELPNITDSDVIGAFLAGTTCRDLVSKLGRKTPTRASELMDIATKFASGQEAVEAIFRKDKQPQGRPSEDAPKASTQRGAKKKGKKKSQAKRDAADADLVAAAEYKNPRKPPGGANLFDKMLKEPCPYHQGPVKHTLEECVMLRRHFHRAEPPAEGGRARDDDKKEDHQAGEFHEVRDYFVIYGGHAANASARHRKQERREVCSVKVAALVYLDWSDKPITFDQADHPDQVPSPGKYPLVVDPVIGDVRLTKVLMDGGSSLNIIYAETLGLLRVDLSSVRAGAAPFHGIIPGKRVQPLGRLDLPVCFGTPSNFRRETLTFEVVGFRGTYHAVLGRPCYAKFMAVPNYTYLKLKMPGPNGVITVGPTYKHAFECDVECVEYAEALVESEALIADLESLSKEVPDVKRHAGNFEPVEMVKAIPLDPSGDISKQIRIGSGLDPK

SEQ ID NO: 46529 - protein, 162 aa, Zea mays
  Coding DNA Sequence Number=SeqID_4750
MGVWTFRSPSADHPPSSRAAYRSCSYISATDGQSSAGGSVSLDAEDAPHSHPDYPIDVIGWTYPRMRFPVAEYSSKRIVDQFSLPSDTNIQYFHTQLQFDVFCGTLMDTKFHKHQVSLRYNSPDCPVHQRSNAQPRAGVGADVWANRVSLSRAAFTSSQPLA

SEQ ID NO: 46530 - protein, 806 aa, Zea mays
  Coding DNA Sequence Number=SeqID_4751
  Gene Ontology: Mol. function=beta-galactosidase activity; Cellular component=beta-galactosidase complex; Biological process =carbohydrate metabolic process
  Homolog annotation: Hit_ID=Q6ZJJ0; Match level="QueryCoverage=96%, HitCoverage=96%, E-value=0.0, Identity=68%"; Hit description =Putative glycosyl hydrolase family 35
  Pfam annotation: Domain name=Gal_Lectin; Domain location=719-797; Score=97.2; E_value=5.1e-26; Accession=PF02140.8; Description =Galactose binding lectin domain
  Pfam annotation: Domain name=Glyco_hydro_35; Domain location=43-314; Score=413.7; E_value=2.6e-121; Accession=PF01301.10; Description =Glycosyl hydrolases family 35
  Pfam annotation: Domain name=Glyco_hydro_42; Domain location=64-310; Score=-258.0; E_value=0.074; Accession=PF02449.6; Description=Beta -galactosidase
  Pfam module annotation: Pfam domain module=Gal_Lectin::Glyco_hydro _35::Glyco_hydro_42; Domain location=719-797::43-314::64-310
MSHRVRLAAAALVVVAALALAPGAAAAWQLTKNGTVVSYDRRSLIIDGRREIFFSGSIHYPRSPPDMWPELIAKAKEGGLNTIETYIFWNIHEPEKGQFDFEGRYDIVRFFKLIQEHNMYAMVRLGPFIQAEWNHGGLPYWLREIPDIVFRTNNEPYKMHMETFVKIIIKRLKDANLFASQGGPIILAQIENEYQHLEAAFKNDGTKYIKWAANMAISTNVGIPWIMCKQTKAPSDVIPTCNGRNCGDTWPGPMNKSMPLLWTENWTAQYRVFGDPPSQRSAEDIAFAVARFFSVGGLYKEPKWGHLRDLHLALKLCKKALLWGKTSTEKLGKQFEARVFEIPEQKVCVAFLSNHNTKDDVTLTFRGQSYFVPRHSISILADCKTVVFGTQHVNAQHNQRTFHFADQTTQNNVWQMFDEEKVPKYKQSKIRLRKAGDLYNLTKDKTDYVWYTSSFKLEADDMPIRRDIKTVLEVNSHGHASVAFVNTKFVGCGHGTKMNKAFTLEKPMDLKKGVNHVAVLASTMGMMDSGAYLEHRLAGVDRVQIKGLNAGTLDLTNNGWGHIVGLVGEQKQIYTDKGMGSVTWKPAVNDRPLTWYKRHFDMPSGEDPIVLDMSTMGKGLMFVNGQGIGRYWISYKHALGRPSQQLYHIPRSFLRQKDNVLVLFEEEFGRPDAIMILTVKRDNICTFISERNPAHIKSWERKDSQITVTAADLKPRATLTCSPKKLIQQVVFASYGNPMGICGNYTIGSCHTPRAKELVEKACLGKRICTLPVSADVYGGDVNCPGTTATLAVQAKCSKRSPRAAQ

SEQ ID NO: 46531 - protein, 140 aa, Zea mays
  Coding DNA Sequence Number=SeqID_4752
MVVLVVYGRDTAQPLGSRQEWNGFLSRPRRWKGISEGHGADAVHLAREGAPMVERWEEGGHGLGCFVVATPVDGARRLTGIAGALTGLGLFAAGKVRSEGGSAGSARMEGGRRMEGCRAPSRGRLRRRVRPQAAGDSEAK

SEQ ID NO: 46532 - protein, 191 aa, Zea mays
  Coding DNA Sequence Number=SeqID_4753
MPSPPPVRHHRAVPPTAPEPCATNCARAPAFTPVPMRGVGGAINALPQAGFNADGAILTPNPYRSRHRTSHLHPSPHAAQDEPLAPFPRSPSTPSPRAVQAKSHPRPNYLQQSTATSHLRPPPHPSPRAANCARAISASALPQVTFNVVPTRGTGREPCSPQILVAVDDHLPSMPAYTPIPRAGVRHRPTP

SEQ ID NO: 46533 - protein, 322 aa, Zea mays
  Coding DNA Sequence Number=SeqID_4754
  Gene Ontology: Mol. function=protein binding
  Homolog annotation: Hit_ID=Q84QP7; Match level="QueryCoverage=78%, HitCoverage=91%, E-value=2e-47, Identity=45%"; Hit description =Putative speckle-type POZ protein
  Pfam annotation: Domain name=BTB; Domain location=166-255; Score= -12.2; E_value=0.052; Accession=PF00651.21; Description=BTBPOZ domain
MAMMGSTSDKMYLYRSAGFIEFELDFAGTDIHHVSSDDFSAGEHVWRVKCYPLAEKVGSVIYLSLVLGLTSDDAKCDDVDAILDAFLLGGDHGARAPSSSPHAQRSRFHLYPPKVSQTCGSCVHFMKWIVLDSESVTDGYVTFMVGVKVLGDCPIPVPSSDIGKHLGHLLDHADGSTDLFGSMENAKTRSILLHGIRPETFRVLLRFMYTDALPGDELVESSSDVDLFHDLLAAADMHQLGRLKLLCARKLWDCVSPETVAKILGCAETNNCSELKSACLDFFLLEENFKVAVLTDEYFQLMQSFPSVIDEIRARRGFDRQT

SEQ ID NO: 46534 - protein, 294 aa, Zea mays
  Coding DNA Sequence Number=SeqID_4755
  Gene Ontology: Mol. function=transcription factor activity; Cellular component=nucleus; Biological process=regulation of transcription, DNA-dependent
  Homolog annotation: Hit_ID=Q7G609; Match level="QueryCoverage=83%, HitCoverage=93%, E-value=2e-43, Identity=41%"; Hit description =Putative CCR4-associated factor 1
  Pfam annotation: Domain name=CAF1; Domain location=22-269; Score =112.5; E_value=1.3e-30; Accession=PF04857.10; Description=CAF1 family ribonuclease
MFPIPPPVIPAPATVVGRFQIVSVGASNYIEELNRIGFLLQMFPYVAIDTEYPGTLHGAPAGPALTTAARYYAFVKANVDELPALQLGLTLCDEGGKLPEAIDDYGRSVQLAWEFNFSDFDIARGRHAPESVRFLMSQGFHFDVAREYGVPSAYFADWLAGVLARLPHWCQPPTWVAFGGAFDFAYMVKMLSGGQPLPDTPEEFVALARYLLRGPVFDAKCMAQHCGRPELCGAGLRTVAAVLGVPQLDPAPPRLAGPKSHTACRIYTVMRTLVHGGDGYAYAYAYEGLIDGIY

SEQ ID NO: 46535 - protein, 163 aa, Zea mays
  Coding DNA Sequence Number=SeqID_4756
MIFVVLTGSLFPMQMMRSFITVVQENYPNRLGVLFVIRLPPVVRVIAQTFLQIAISHGIRGDEDDIASKSAPPASIDGARYGFEPPVLQSSHQVIIEGFTGRRSEHSSSIPKLTSLIQQEEKIYMLMAWIRKMDYIVHDLEGADHVTDLDHNHVAELKILGLY

SEQ ID NO: 46536 - protein, 621 aa, Zea mays
  Coding DNA Sequence Number=SeqID_4757
  Gene Ontology: Mol. function=oxidoreductase activity; Cellular component=intracellular; Biological process=lignin catabolic process
  Homolog annotation: Hit_ID=Q339K6; Match level="QueryCoverage=90%, HitCoverage=92%, E-value=0.0, Identity=62%"; Hit description =Multicopper oxidase family protein, expressed
  Pfam annotation: Domain name=Cu-oxidase; Domain location=165-320; Score=131.8; E_value=1.9e-36; Accession=PF00394.12; Description =Multicopper oxidase
  Pfam annotation: Domain name=Cu-oxidase_2; Domain location=444-588; Score=154.7; E_value=2.4e-43; Accession=PF07731.4; Description =Multicopper oxidase
  Pfam annotation: Domain name=Cu-oxidase_3; Domain location=39-155; Score=227.5; E_value=2.9e-65; Accession=PF07732.5; Description =Multicopper oxidase
  Pfam module annotation: Pfam domain module=Cu-oxidase::Cu-oxidase _2::Cu-oxidase_3; Domain location=165-320::444-588::39-155
MKVWVGLPAAAAVVVVFLIFAGVAALPAAMAAVVEHTFVVSQVNLTRLCKETLVTVVNGQLPGPAIEVTEGDSVVVHVVNRSPYNMTIHWHGVKQRLNCWADGVPMVTQCPILPGRSFTYRFNVAGQEGTLWWHAHVPCLRATLHGALIIRPRHSPYPFAPKPDREIPVVIGEWWDMDLAQLDRNTMDGFLVDVPTGSTINGKLGDLYSCSGAAQDGFVLEVEPGKTYLLRLMNAALFSEYYLKVAGHRMTVVASDANYVRPYTTDVVAIAPGETMDVLLPADAPPGRSYYMAALAIQAPEPDVQVPPTITRGIVQYRSSSSDVAVDGVVVPAADPAVVMPDMPDQHDTTISFHFHGNLSSLRRRHRVPPARADDHMLVTLSLGSVCRDGGRACARSDSDESIIVGTMNDVSFRAPTAAAMPLLEAHYYGRGDMAMAAAAGVELRALPDAPLRVFNFTDPAYIPYGPKEAPLEPTEKQTTVRRFRHGAVVEVVFQDTAVMQSDSNPMHLHGHDMFVLAHGLGNYDAARDVATYNLLDPPLKNTVVVPRLGWVAVRFVADNPGTWYIHCHFDFHLSMGMVAVFIVEDGSSADTYLPPPPADLPKCGSNKGGLYLPEEFYLQK

SEQ ID NO: 46537 - protein, 292 aa, Zea mays
  Coding DNA Sequence Number=SeqID_4758
  Gene Ontology: Mol. function=transcription factor activity; Cellular component=nucleus; Biological process=regulation of transcription, DNA-dependent
  Homolog annotation: Hit_ID=Q7G609; Match level="QueryCoverage=90%, HitCoverage=98%, E-value=3e-45, Identity=41%"; Hit description =Putative CCR4-associated factor 1
  Pfam annotation: Domain name=CAF1; Domain location=22-269; Score =110.9; E_value=3.6e-30; Accession=PF04857.10; Description=CAF1 family ribonuclease
MFPIPPPVIPAPATVVGRFQIVSVGASNYIEELNRIGFLLQMFPYVAIDTEYPGTLHGAPAGPALTTASRYYAFVKANVDELPALQLGLTLCDEGGKLPEAIDDYGRSLQLAWEFNFSDFDIARGRHAPESVRFLMSQGFNFDVARQYGVPSAYFAGWLAGVLARLPHWCQPPTWVAFGGAFDFAYMVKMLSGGQPLPDTPEELVAWARFLLRGRVFDAKCMAEHCGRPELCGAGLRTVAAVLGVPQLDPAPPRLAGPKSHTACRIYTVMRTLVHAGDGYAYAYEGLIDGIY

SEQ ID NO: 46538 - protein, 113 aa, Zea mays
  Coding DNA Sequence Number=SeqID_4759
MESDETISVTTMNNVFELLANKADIASLFHDHVATKIPFVPPSSPHPPSRPPVKSPSTWSKRKWPDLNFQLDTQILDAWYYNRSSLDYDDTVVVEFVDGPPKIFNFTNRALSP

SEQ ID NO: 46539 - protein, 524 aa, Zea mays
  Coding DNA Sequence Number=SeqID_4760
  Gene Ontology: Mol. function=pyridoxal phosphate binding; Cellular component=cellular_component; Biological process=amino acid and derivative metabolic process
  Homolog annotation: Hit_ID=Q6YZ18; Match level="QueryCoverage=95%, HitCoverage=95%, E-value=0.0, Identity=69%"; Hit description =Putative Aromatic-L-amino-acid decarboxylase
  Pfam annotation: Domain name=Pyridoxal_deC; Domain location=59-448; Score=521.5; E_value=9.4e-154; Accession=PF00282.9; Description =Pyridoxal-dependent decarboxylase cons
MGSLSGTSSSLAAAFDADSERFQPLNADDVRSYLHKAVDFIYDYYKSVESVPVLPSVEPGYLARQLKSAPPNAAAPFDVAMHELREAVVPGTTHWASPNFFAFFPATNSAAAIAGELVASAMNTVGFTWQANPAAAELEALALDWLAQLLLLPDSFMNRPCSAVVAGRGAGTRGGGVILGTTSEAMLVTLVAARDAALRRSGSDGVAGITRLTVYAADQTHSTFFKACRLAGFDPANVRSIPTGADTDYALDPARLLEAMRRDAGAGLVPTYVCVTVGTTSSNAVDPVGAAADAAAEFGAWVHVDAAYAGSACICPEFRHHLDGVERVDSLSLSPHKWLLTCLDCTCLWVRDTRRLTDSLETRPEYLRNHATESGAVTDLKDMQVGVGRRFRGLKLWMVMRTYGAAKLRQHIRSDVAIAKVFEESVRADHRFEVVVPRNFALVCFRIRPSATASMTEEDAEVANRELMERLNKSGRAFLANTVIGGKFVLRFAVGSTLQEERHVRNAWDLIKMTTTEIINGEVD

SEQ ID NO: 46540 - protein, 271 aa, Zea mays
  Coding DNA Sequence Number=SeqID_4761
  Homolog annotation: Hit_ID=Q6Z5K5; Match level="QueryCoverage=25%, HitCoverage=17%, E-value=3e-24, Identity=76%"; Hit description =Sucrase-like protein
  Pfam annotation: Domain name=Suc_Fer-like; Domain location=86-240; Score=-56.1; E_value=0.011; Accession=PF06999.3; Description =Sucraseferredoxin-like
  Subcellular localization annotation: CTP_CleavageSite=38; ConfidenceScore=5.50e-01
MLHIFPKLLKQFPFPPRPLSSSQRVPTRRRLLPLRLLMASPTQGDAPLAAPAPAADATDAAFAAAAAVPDPGAEFGFQRPELGKEKLVGTVGFHERHVFLCYKGPDLWPSHLEASESDRLPRLLAAAIKARKPNLKKTTPVSRGSFVWIRASGEDDGVGHWRTGATARGDIRGSEDQREEAGGDDNPMEVKRAAADSVRRRRGHNGGHQLGDAVPAGLVRGGILRSGLWTLLEVSWRVGMMKGQKNGCSFDHDRTTIKKSDDVDTLGCYGP

SEQ ID NO: 46541 - protein, 73 aa, Zea mays
  Coding DNA Sequence Number=SeqID_4762
MAPGRSSVVLGGVEAEQAKGSASTVRRSAAVLHDASESWRPKTDDATRRQISYDRMLSASPPASPVSGANTGR

SEQ ID NO: 46542 - protein, 134 aa, Zea mays
  Coding DNA Sequence Number=SeqID_4763
  Subcellular localization annotation: CTP_CleavageSite=28; ConfidenceScore=5.13e-01
MKTTDPSGKAATMMDPTGKAATSTDPTVAATKKGEGGRAGPTRQGAALVLTRGEVGPERQYPARRSKKHGGGGRGKTTLAAVGGGTCSAIGGATPVRPQAGATAVGVEAATRCMSATLRKRGLATDGVEERGGS

SEQ ID NO: 46543 - protein, 81 aa, Zea mays
  Coding DNA Sequence Number=SeqID_4764
MTERVRQARPHVPSSAGRYGRGRRQANHRAAWVWVAKCRCFCQKALCRPCPPCRIKNRGDGGCSELAIRSIKAICRIHGYE

SEQ ID NO: 46544 - protein, 316 aa, Zea mays
  Coding DNA Sequence Number=SeqID_4765
  Gene Ontology: Mol. function=DNA binding; Cellular component=nucleus; Biological process=regulation of transcription, DNA-dependent
  Homolog annotation: Hit_ID=Q5JMA5; Match level="QueryCoverage=99%, HitCoverage=100%, E-value=2e-68, Identity=47%"; Hit description =Blind-like
  Pfam annotation: Domain name=Myb_DNA-bind_2; Domain location=13-70; Score=-9.3; E_value=0.1; Accession=PF08914.1; Description=Rap1 Myb domain
  Pfam annotation: Domain name=Myb_DNA-binding; Domain location=14-62; Score=38.8; E_value=1.9e-08; Accession=PF00249.21; Description=Myb -like DNA-binding domain
  Pfam annotation: Domain name=Myb_DNA-binding; Domain location=68-116; Score=32.7; E_value=1.3e-06; Accession=PF00249.21; Description=Myb -like DNA-binding domain
  Pfam module annotation: Pfam domain module=Myb_DNA-bind_2::Myb_DNA -binding::Myb_DNA-binding; Domain location=13-70::14-62::68-116
MGRSPCCDKTKVKRGPWSQEEDAVLRSFVQRFGNAGNWIALPQKAGLKRCGKSCRLRWLNYLRPELRHGGFTDEEDSLILSLYGEIGSKYDAWSVIASRLPGRTDNDVKNYWNTKLKKRYLASSTSTGEARPPPPPPAPPSASGDDSSAAADSHQAQQDEPSLPLTPPAFSTDLDTTFAVVDDDMLLFKSDQLYAELVGLVEKKSQATAGPSTGGGGDEANSTATPSSSSYGTGTTNSPTVSSSSGSCALWPTDVHGTTLLSEPTSSSLFDDAYGVGDDAFGAAALPAYSFQDLLASSYDDATAAVVTQELMQYYQ

SEQ ID NO: 46545 - protein, 317 aa, Zea mays
  Coding DNA Sequence Number=SeqID_4766
  Gene Ontology: Mol. function=cyclin-dependent protein kinase regulator activity; Cellular component=intracellular; Biological process=DNA integration
  Homolog annotation: Hit_ID=Q6JJ56; Match level="QueryCoverage=99%, HitCoverage=26%, E-value=1e-136, Identity=70%"; Hit description =Putative copia-like polyprotein
  Pfam annotation: Domain name=RVT_2; Domain location=2-191; Score =186.4; E_value=7e-53; Accession=PF07727.4; Description=Reverse transcriptase (RNA-dependent
MGGITFRYLISLAVNLNLKMKLMDVVTAYLYGNLDTDIYMKIPEGIPVPNRDEKNRALYSVKLKKSLYGLKQSGRMWYNRLSDFLSKKGYINNEDCPCVFIQRSPNGFCIISAYVDDLNIIGTHKEIEEASSYLKSEFEMKDLGKTKFCLGLQLKHFEGGILIHQSTYTQKVLERFGLEKAYPAKTPMIGRSLQVDQDPYRPREEGEEVLGAEYPYLSAIGALMYLANSTRPDIAFAVNLLARYSAEPTKRHWKGIKDIFRYLQGSKDLGLFYRKNQDLNFIGYADAGYLSDPHSGKSQTGYVFLCGGTAISWKSSK

SEQ ID NO: 46546 - protein, 166 aa, Zea mays
  Coding DNA Sequence Number=SeqID_4767
  Gene Ontology: Mol. function=protein serine/threonine kinase activity; Cellular component=intracellular; Biological process =protein amino acid phosphorylation
  Homolog annotation: Hit_ID=Q5QN75; Match level="QueryCoverage=81%, HitCoverage=38%, E-value=2e-69, Identity=94%"; Hit description =Mitogen-activated protein kinase kinase 1
  Pfam annotation: Domain name=Pkinase; Domain location=15-163; Score= -7.6; E_value=4.2e-08; Accession=PF00069.15; Description=Protein kinase domain
  Pfam annotation: Domain name=Pkinase_Tyr; Domain location=19-163; Score=-123.1; E_value=6.4e-05; Accession=PF07714.7; Description =Protein tyrosine kinase
  Pfam module annotation: Pfam domain module=Pkinase::Pkinase_Tyr; Domain location=15-163::19-163
MSVIWNLAKSNEVLWHVGICMGIQMNIQESVRKQIVQELKINQATQSPHIVMCHQSFYHNGVIYLVLEYMDRGSLADIVKQVKTILEPYLAVLCKQVLEGLLYLHHQRHVIHRDIKPSNLLVNRKGEVKITDFGVSAVLASSIGQRDTFVGTYNYMAYVIHHVHAM

SEQ ID NO: 46547 - protein, 128 aa, Zea mays
  Coding DNA Sequence Number=SeqID_4768
MFPINVLILELEVGLTHVPKANEDNTLIEIAAEPPADSTLAPEDKGVEESTAAMVVAQPDSTLSFEINGTGVLVESSAKPLQAKDVELTKSVHDLAVKALLSNDDTEREMCPWAISKCFGDLVSNTSA

SEQ ID NO: 46548 - protein, 64 aa, Zea mays
  Coding DNA Sequence Number=SeqID_4769
MGFWVHSGDAPPRPSWAPLSEEPVTEDPGDQQIEVAEQELIEEEPMTEDPGDQQIEVAEQELIE

SEQ ID NO: 46549 - protein, 232 aa, Zea mays
  Coding DNA Sequence Number=SeqID_4770
MKDRGVDRGREELAVARGRRRSHDSPEANLRRETQSRLARRQPQAEDTVTTCPRHSLGRRRSRDLPEAILGRETHFRFTRGHLRQHSRSYLPRPTTLILERRLSPPYGQVRCYHMSRESICSGTSPMGLDPHGWVPDPHVCNLDPLRGLGPPHIQTIPPSRELDPLYGVQVANKGSQCYRAQHATRPYSGPTHGSGDTTWPLAHGAILRMETRPQPALNARRPRRALTKRKA

SEQ ID NO: 46550 - protein, 623 aa, Zea mays
  Coding DNA Sequence Number=SeqID_4771
  Gene Ontology: Mol. function=transporter activity; Cellular component= intracellular; Biological process=transport
  Homolog annotation: Hit_ID=Q6ZG68; Match level="QueryCoverage=82%, HitCoverage=97%, E-value=1e-167, Identity=78%"; Hit description =Putative SEC14 cytosolic factor
  Pfam annotation: Domain name=CRAL_TRIO; Domain location=234-418; Score=155.5; E_value=1.4e-43; Accession=PF00650.10; Description =CRALTRIO domain
  Pfam annotation: Domain name=CRAL_TRIO_N; Domain location=148-217; Score=52.9; E_value=1.1e-12; Accession=PF03765.5; Description =CRALTRIO, N-terminus
  Pfam module annotation: Pfam domain module=CRAL_TRIO::CRAL_TRIO_N; Domain location=234-418::148-217
MASGKSRLRLLPRECLGQVVTVSSACGWRRASRDCVSRLSIAAPKPFLSSIAAPPLRLKALLSETYSSSVSLIGNPIMAEVLSGSHEHRLSSALDGHYDEKRKSNVEYTEDEKKAVIAALKKKALSASQKFRHSMKRGRKSSKVMSISILDEREPEEVQAVDAFRQLLVLEELLPSQHDDYHMMLRFLKARKFDIEKAKQMWSDMLKWRKEFGADTILEEFEFEEADKVAECYPQGYHGVDKEGRPVYFERLGQIDVNRLMQVTTMDRFVKNHVKEFEKNFAVKFPACSIAAKHHIDQSTTILDVQGVGMKQFSKAARELIGMLQKIDGDNYPETLCRMFIINAGQGFRLLWGTVKSFLDPKTTAKIHVLGNKYQSKLLEVIDASELPEIFGGTCRCEGGCMKADKGPWKDPEIMKTPGSPYSCDVPMVEEAIDAICKSHGTPPDEKIAITKAIINVSNGSKPPLFAGIIALVMSIATMVRLTRSMMPGKVLGAAIGGATLSEGKSKVQERQRSKLSEEAVEEAEDAVSAKRLSELEEKVIALLTKPASMPADKEEVLQAAVSRVSALEEELAATKKTLQETLERQLEIVAYIEKKKKSKGQKKKLKAHEPVQTHSGLARRSS

SEQ ID NO: 46551 - protein, 86 aa, Zea mays
  Coding DNA Sequence Number=SeqID_4772
  Subcellular localization annotation: CTP_CleavageSite=66; ConfidenceScore=5.21e-01
MVKDAEPSTRKLGTTLLSSTPPGGFTNGTRIHSDRTSYGLPSEALCLTVPPTPTTCGELRFESELVQSASKTKSPPPSTIPMNSKS

SEQ ID NO: 46552 - protein, 248 aa, Zea mays
  Coding DNA Sequence Number=SeqID_4773
MRKATRPRRRYDQAQLALDHAPDASSKLCADGLSLAGTLASRSHFLLEQRDACERSAYDLLAAKGEATEAHAYAALIHDAYDALVETTRRDAKLATLAHLGSVKVSSLLRILERGKEVAKARVATLEEELGGRTKKEEKLLASWQGSALDSLFQKLCICCSLSPFYGSCPPPSAIQGKFDDADWNCFKVQCRLEELENERRLLSKVVGTMCGRIEAHCLPWFKLLVSRLEGLTGLFQELEVESFCQGI

SEQ ID NO: 46553 - protein, 162 aa, Zea mays
  Coding DNA Sequence Number=SeqID_4774
MSNLGMSTTSDVTKCKECGVLASQNNTINKTVDEQTFKTQKDAQPNQHTSDLGTCCCCAKVHNKPIEKTNVGFKIEAEGISEGSLVWRTGLSGGAPDSVRCTRGLRAELLSLGNFSEPTRYNSPDCPVYTGLSGVHRTVSGAPRGRDSGTWQPRKSVAAAPL

SEQ ID NO: 46554 - protein, 125 aa, Zea mays
  Coding DNA Sequence Number=SeqID_4775
  Subcellular localization annotation: CTP_CleavageSite=38; ConfidenceScore=5.23e-01
MGRAGLYNSVAGVASSATVRSPETRQTWSLGSLGSPGRARTGQEGLANSLADYQSQKRDRKRENDEGKAELTMAKALAEVQRRWRNDVGMGLAGGAHAMGVAVVEAEDRRGPPVKGKRTRGRSEA

SEQ ID NO: 46555 - protein, 103 aa, Zea mays
  Coding DNA Sequence Number=SeqID_4776
MDPSQRAGDSGAHPAKREARHDLHRHGSMRLLPLLLLVDRLCGKEQYAPYTTHRHQWKVRATTWQAMYRNMPGSCTVGSRDPRQNTPDSSEDAQDVGNQGRLA

SEQ ID NO: 46556 - protein, 328 aa, Zea mays
  Coding DNA Sequence Number=SeqID_4777
  Homolog annotation: Hit_ID=UPI000069ED77; Match level="QueryCoverage =53%, HitCoverage=77%, E-value=1e-11, Identity=37%"; Hit description =UPI000069ED77 related cluster
  Subcellular localization annotation: CTP_CleavageSite=28; ConfidenceScore=5.05e-01
MQSACNRAKWAHPFDPNAASMEAQAHTSCNRRAGCYVRATAPPLAPLPRLLDCGTSTTTRGNPVYDPTVPARRIGHGDRERGYPERDPSPRRKRAPSPPTDQRFEGRPLGGVQQPPQSAQAPRPLLVRGAIGNSASPDPRARTRAQPRKTTNSASPDPRARTRAQPRKTTNSASPDPGLGLGLSPGRRRTPLRPTLGLGLSPRRRRTPLRPTPGLGLGLSPGRRRTPLRPTPWLGLGLSPGRQRTPHRPTQGSDSALSSADGLRLARPRGSDSTSASEDRLDLDLGGASTSPNPGLGPTTSQEAPSLPYPKLTQATGNKTGVPSSSSR

SEQ ID NO: 46557 - protein, 173 aa, Zea mays
  Coding DNA Sequence Number=SeqID_4778
MTTKRGEQGVDGVQAWDSTKLEDGSDNLARRWRGKGQGSAALLGSVVDGSGLNTVDNAARRCCCRRKETDGAPTGIPAGASTREKPPAPEDDKLRFARPQGSDSGSAPEDDELRFARPQGSDSGLVPEDDELRFARPQVSDSGSAPEDNELRFARPQGSDSGSAPEDDELRFA

SEQ ID NO: 46558 - protein, 150 aa, Zea mays
  Coding DNA Sequence Number=SeqID_4779
MADHGRMPHGGASDPILGKSSDCGLWCTTEANCGWYERVIERQSEGSAQFKGTGYVLRQFEMKTVTTVNPLDTVPGTMVASYFHLMKLGSLGNPSPTPLPGGFSLVLAPAGIPVGAPSVSFRLQQHRRAALSTVFSPEPSTTDPNSAALP

SEQ ID NO: 46559 - protein, 97 aa, Zea mays
  Coding DNA Sequence Number=SeqID_4780
MTTKRGEQGVDGVQAWDSTKLEDGSDNLARRWRGKGQRSAALLGTVVDGSGLNTVAKRPSEVAVGERKRMEHPQGSLQAPDGLPAQGRNIQIHVDPN

SEQ ID NO: 46560 - protein, 213 aa, Zea mays
  Coding DNA Sequence Number=SeqID_4781
  Gene Ontology: Mol. function=catalytic activity; Biological process =metabolic process
  Homolog annotation: Hit_ID=Q7F1X5; Match level="QueryCoverage=54%, HitCoverage=23%, E-value=6e-22, Identity=50%"; Hit description =Putative 4-coumarate-CoA ligase
  Subcellular localization annotation: CTP_CleavageSite=65; ConfidenceScore=5.89e-01
MSSSPSQIACSSSTPRHQCPPPHASLSSAPTLTFVATVSPANPASRSVVVLTAPEVAAKLPRNLRCVVIDSNEYKSLSSVGGVASSLPVAVKQFDTAIILYSSGTTGRVKAVAVLHLNLIAVTRAHRNNRVIAEKESAEAGEEPLMLTVTLFIRVHDVAEGILALRGALNSRQLQQNMLRPSRRKFGLMVVYYAKRGDKHHTRATFENMRQGE

SEQ ID NO: 46561 - protein, 742 aa, Zea mays
  Coding DNA Sequence Number=SeqID_4782
  Gene Ontology: Mol. function=double-stranded RNA binding; Cellular component=intracellular
  Homolog annotation: Hit_ID=Q6H5U8; Match level="QueryCoverage=93%, HitCoverage=75%, E-value=0.0, Identity=78%"; Hit description=Double -stranded RNA-binding domain (DsRBD)-containing protein-like
  Pfam annotation: Domain name=dsrm; Domain location=627-690; Score =42.9; E_value=1.1e-09; Accession=PF00035.15; Description=Double -stranded RNA binding motif
MHTVAVGARCLVMESRPPVVADVVPPLVVMHTACLRENKTAVVPLGDEELHLVAMTSRRNLTNHACFWGYKLPFGLYNSCLTMLNLRCLGIVFDLDETLIVANTSRSFEDRIDALQRKLSNETDPQRRNGMLSEIKRYQDDKSILKQYIEGDQVYDDGKVYKAQPEIVPPLSDNQQPMTRPVIRLQDKNIILTRINPLIRDTSVLVCLRPAWEDLRSYLIARGRKRFEVYVCTMAERDYALEMWRLLDPDSRLINSVQLHDRMVCVKSGLKKSLLNVFHDGSCHPGMALVIDDRLKVWDEKDQLRVHVVPAFTPYYAPQAESSPHVDIEFHGSIDRDFDEGLLPRISNVHYEDEVNEISAPDVGNYLITDDENVALVNGNRDSLPFDGMADAEVERRMKEANAQSFHQTAGDFVMPVAPAQNFVSTSVASLAPPLGMMPSPFSQPVAPPGFSDSLQGSPAREEGEVPESELDPDTRRRLLILQHGQDTRDPTSPLPAIPPVQVPVPPVQPHGNWFPTEDGINQSNLNRGSAGFTVESDSIVYEKKQPPHPSFFHGGDSPMPSDRFGYQNQRFPSQLPHEDHPMMQNHAPPKYRSFSGEELASWHVPSSQRNNQIESGRHFAQYAGTSAGILEGIALKCGSKVEYKSALCDTAELQFSIEVWIVGEKVGEGIGRTRREAQRQAAEMSLRNLASCNNTELLPIDEYRSGSFVVQLRSLVRSHDAGPYTLADHVESDDAFPDDPA

SEQ ID NO: 46562 - protein, 116 aa, Zea mays
  Coding DNA Sequence Number=SeqID_4783
  Subcellular localization annotation: CTP_CleavageSite=70; ConfidenceScore=5.36e-01
MVRPALASPLGHTSTSPIEVFTSSKKTSRSKTDQADPQGQGFVLDVQNKGPGSQGRSASLADFVRQVKIRRVARSNLGQFVRHRVYGGRVGEVEGDGAWGLRQARERAWADRDSRI

SEQ ID NO: 46563 - protein, 134 aa, Zea mays
  Coding DNA Sequence Number=SeqID_4784
MAGEAKSSPSELMCNRNNATRYGEVGEDVEKVLNDEGAMVGSVHEKRRIYGRGIRPATNRRGSGLPAPIDPRPKPSPTPAHPPEVFTIGSKQVWKGEGVLLLRVWRDDGMPSYRRAEVTIAVATTRPRRSPGEG

SEQ ID NO: 46564 - protein, 144 aa, Zea mays
  Coding DNA Sequence Number=SeqID_4785
MAHLRCTARSVIPFLPSRLVERPLRCTVIGQSSHLERPHLRLHEEQEHRRQEREEQDSSPSPQQEVESGRQPSPMPQLDVPPAPPQGTPAAGGDPNRDEDDGGSSSHITEPLEEQEPEGWVARPITRDTSRGCHFHDALDTLPR

SEQ ID NO: 46565 - protein, 77 aa, Zea mays
  Coding DNA Sequence Number=SeqID_4786
MGFSARNQGPQRKKQECGLYFQETEGLFNKITKRRGMGCPQPFYHRSMAEISLERERARARTRTNNRAREVKDWGAG

SEQ ID NO: 46566 - protein, 62 aa, Zea mays
  Coding DNA Sequence Number=SeqID_4787
MAMMGSTSEKMYLCQDRVDVGLLTEDPLTGHMPHHGAVRTMISGVKRPTESIILPLSGTLLR

SEQ ID NO: 46567 - protein, 518 aa, Zea mays
  Coding DNA Sequence Number=SeqID_4788
  Gene Ontology: Mol. function=histone-lysine N-methyltransferase activity; Cellular component=nucleus; Biological process=chromatin modification
  Homolog annotation: Hit_ID=Q6K9F7; Match level="QueryCoverage=91%, HitCoverage=92%, E-value=1e-130, Identity=53%"; Hit description =Putative SET domain protein SUVR2
  Pfam annotation: Domain name=Pre-SET; Domain location=177-329; Score=- 9.3; E_value=0.0039; Accession=PF05033.6; Description=Pre-SET motif
  Pfam annotation: Domain name=SET; Domain location=335-493; Score =104.6; E_value=3e-28; Accession=PF00856.18; Description=SET domain
  Pfam module annotation: Pfam domain module=Pre-SET::SET; Domain location=177-329::335-493
MELSRISTEKFDDAVKSMTDAGFLKETVEQALKKLIILYEENWEHIEADNYSTLVEALLGHSDPKAGQKKRAEKNLNVDSDHYNKKLKIKGGQTPRSSMHGSAKKELTEEADSLEERTTGNQLQTSRAETTITGENSCTLLESQDPCTSETPTVMCPKVLGSNRHNGIKRQYHDVNDITRGEECVSIPIVCGEDGVLPPPFHYISQNTTFQDACINLSLARIGDENCCSGCFGDCLAEPLPCACARETGGDFAYTRDGLLKEGFLDACVSMLREPLKQPHFYCKGVCPIEQIMKGVSSAKPDACKGHLIKKFIKECWIKCGCTRNCGNRVVQRGITRKLQASEVFLASRKKGWGLRSAENLPRGAFVCEYVGEILTNTELHKRNTELYGKNNKKAGKARHTYPVNLDADWGTEGVLNDEEALCLDGTFYGNVARFMNHRCIDGNIIAIPVEVETPDHHYYHLAFFTTREVEAFEELTWALWWPIYGFRDMINEYFTALVERERTASLETQILFGIGEG

SEQ ID NO: 46568 - protein, 234 aa, Zea mays
  Coding DNA Sequence Number=SeqID_4789
  Gene Ontology: Mol. function=nucleic acid binding; Cellular component= intracellular; Biological process=DNA integration
  Homolog annotation: Hit_ID=Q8H6I0; Match level="QueryCoverage=99%, HitCoverage=15%, E-value=4e-83, Identity=67%"; Hit description =Putative gag-pol polyprotein
MSGDHAKKEMVTDEKPATSHGKAPSGESGNKVKGSPSHDKSCRSGDKKKMKKVVYYETDSSSPSTSGSDTPSVTSKRHERKKFSKIPLRCPRISKHTPLLSVPLGKPPVFYGEDYCMWSDKMRHHLTSLHASIWDIVEFGAQEPSMGDEGYDSDEVAQIRHFNSQATTILLASLSREEYNKVQGLKSAKEIWDVLKTAHEGDEVTKITKRETIEGSSVASCFTKEKIHKPCTTV

SEQ ID NO: 46569 - protein, 930 aa, Zea mays
  Coding DNA Sequence Number=SeqID_4790
  Gene Ontology: Mol. function=protein serine/threonine kinase activity; Cellular component=integral to membrane; Biological process=protein amino acid phosphorylation
  Homolog annotation: Hit_ID=Q2QM26; Match level="QueryCoverage=93%, HitCoverage=85%, E-value=0.0, Identity=45%"; Hit description=Leucine Rich Repeat family protein
  Pfam annotation: Domain name=APH; Domain location=723-923; Score= -15.2; E_value=0.069; Accession=PF01636.13; Description =Phosphotransferase enzyme family
  Pfam annotation: Domain name=LRRNT_2; Domain location=41-85; Score =47.1; E_value=6.1e-11; Accession=PF08263.3; Description=Leucine rich repeat N-terminal domain
  Pfam annotation: Domain name=LRR_1; Domain location=117-139; Score =11.9; E_value=1.7; Accession=PF00560.23; Description=Leucine Rich Repeat
  Pfam annotation: Domain name=LRR_1; Domain location=141-163; Score =13.5; E_value=0.75; Accession=PF00560.23; Description=Leucine Rich Repeat
  Pfam annotation: Domain name=LRR_1; Domain location=165-187; Score =12.9; E_value=1.1; Accession=PF00560.23; Description=Leucine Rich Repeat
  Pfam annotation: Domain name=LRR_1; Domain location=189-211; Score =16.1; E_value=0.13; Accession=PF00560.23; Description=Leucine Rich Repeat
  Pfam annotation: Domain name=LRR_1; Domain location=225-247; Score =13.9; E_value=0.57; Accession=PF00560.23; Description=Leucine Rich Repeat
  Pfam annotation: Domain name=LRR_1; Domain location=249-272; Score =3.5; E_value=64; Accession=PF00560.23; Description=Leucine Rich Repeat
  Pfam annotation: Domain name=LRR_1; Domain location=275-297; Score =10.0; E_value=3.8; Accession=PF00560.23; Description=Leucine Rich Repeat
  Pfam annotation: Domain name=LRR_1; Domain location=299-321; Score =8.7; E_value=6.7; Accession=PF00560.23; Description=Leucine Rich Repeat
  Pfam annotation: Domain name=LRR_1; Domain location=323-353; Score =6.2; E_value=20; Accession=PF00560.23; Description=Leucine Rich Repeat
  Pfam annotation: Domain name=LRR_1; Domain location=355-377; Score =9.1; E_value=5.7; Accession=PF00560.23; Description=Leucine Rich Repeat
  Pfam annotation: Domain name=LRR_1; Domain location=380-402; Score =9.6; E_value=4.5; Accession=PF00560.23; Description=Leucine Rich Repeat
  Pfam annotation: Domain name=LRR_1; Domain location=404-426; Score =16.7; E_value=0.085; Accession=PF00560.23; Description=Leucine Rich Repeat
  Pfam annotation: Domain name=LRR_1; Domain location=428-450; Score =15.2; E_value=0.24; Accession=PF00560.23; Description=Leucine Rich Repeat
  Pfam annotation: Domain name=LRR_1; Domain location=452-474; Score =12.8; E_value=1.1; Accession=PF00560.23; Description=Leucine Rich Repeat
  Pfam annotation: Domain name=LRR_1; Domain location=476-498; Score =7.7; E_value=11; Accession=PF00560.23; Description=Leucine Rich Repeat
  Pfam annotation: Domain name=LRR_1; Domain location=501-523; Score =7.1; E_value=13; Accession=PF00560.23; Description=Leucine Rich Repeat
  Pfam annotation: Domain name=LRR_1; Domain location=525-547; Score =13.2; E_value=0.98; Accession=PF00560.23; Description=Leucine Rich Repeat
  Pfam annotation: Domain name=LRR_1; Domain location=549-571; Score =11.1; E_value=2.4; Accession=PF00560.23; Description=Leucine Rich Repeat
  Pfam annotation: Domain name=LRR_1; Domain location=573-595; Score =8.1; E_value=8.8; Accession=PF00560.23; Description=Leucine Rich Repeat
  Pfam annotation: Domain name=LRR_1; Domain location=597-620; Score =12.4; E_value=1.4; Accession=PF00560.23; Description=Leucine Rich Repeat
  Pfam annotation: Domain name=LRR_1; Domain location=93-115; Score =3.2; E_value=72; Accession=PF00560.23; Description=Leucine Rich Repeat
  Pfam annotation: Domain name=Pkinase; Domain location=721-928; Score =13.3; E_value=2.4e-09; Accession=PF00069.15; Description=Protein kinase domain
  Pfam annotation: Domain name=Pkinase_Tyr; Domain location=721-925; Score=15.3; E_value=2.1e-13; Accession=PF07714.7; Description =Protein tyrosine kinase
  Pfam module annotation: Pfam domain module=APH::LRRNT_2::LRR_1::LRR _1::LRR_1::LRR_1::LRR_1::LRR_1::LRR_1::LRR_1::LRR_1::LRR_1::LRR _1::LRR_1::LRR_1::LRR_1::LRR_1::LRR_1::LRR_1::LRR_1::LRR_1::LRR
  Pfam module annotation: Pfam domain module=Pkinase_Tyr; Domain location=723-923::41-85::117-139::141-163::165-187::189-211::225 -247::249-272::275-297::299-321::323-353::355-377::380-402::404 -426::428-450::452-474::...
  Pfam module annotation: Domain location=476-498::501-523::525 -547::549-571::573-595::597-620::93-115::721-928::721-925
MCVLLLAAASMLSSSHTTTAAAHGAASATASPPPAALLIATADDQQALLAFKDLVTGDPHGVLTSWTAAGNTTAGVCSWRGVGCRSRRRRPGRVTSLELASANLTFTVSPFLANLTFLGTLNLSHNFLSGNIPRELGFLPRLSYLDLRHNSLQGVVPGSLAGASRLLVLQLEYNSLVGEIPANLSHLQRLEVLDVGSNQLSGAIPQSLGSLSRLTLSRTADKAQALSSLDLAYNHLSGTIPASLFNISSVATFELSGNKALSGVLPSDIGATLPNLQNLILNDCQLRGRIPRSIGNASLLRYIQLGDNQLEGALPLEVGSLKDLEVLTVESNRLEDEWWGSDDWDLIASLSNCSKLFYLSLDSNSFRGVLPPSIVNLSSTMQKLHLSHNGFHGAIPTDIRKLSSLTILTLRGNLLTGSIPPSIGELHSLGVLDLSENNISGGIPPALGNLTNLSILYLFKNSLQGPIPTSLGKLQNIGSLVLSLNQLTGSIPAEVVSLSSLTSYLGLSYNSLTGQIPSEVGKLTNLVLLDLSVNQLSGDVPAALGKCVELAQLQLNDNLLQGAIPQSLSGLQGMQELDVARNNLSGPVPKFFADWPSLNYLNLSYNRFEGSVPVTGVFGNASAFSVAGNNKVCGGVTALQLPPCPTVEDEEPDDADNRRPRRLAVIIGTVVGSTSLLLLAFCGLLLLVMRRRKRAPANLPLAEDQHWQVSFEEIQKATDQFSPSNLIGVGSFGSVYRGILLSPGARQVEVAIKVIDLRQHGAEHSFLAECRALRSVRHRNLVKVVTACSSVGHQGNDFKALVYEFMPNGDLDVWLHHHHRQDPQDGAPRRRRRLTVTQRVDIALDVAAALDYLHHHGQAPVVHCDLKPSNVLLDGDMVARVADFGLARFIRNKMVSESAGGSSTWSVGIKGTIGYIPPGCRACCLVCSSY

SEQ ID NO: 46570 - protein, 75 aa, Zea mays
  Coding DNA Sequence Number=SeqID_4791
MGWGGEFRNRATPFGGLQTIGIIIVVIESVGGSCAEGHSRASDAARDTLSASAVACVIASDLYATASVGDIGQIL

SEQ ID NO: 46571 - protein, 498 aa, Zea mays
  Coding DNA Sequence Number=SeqID_4792
  Gene Ontology: Mol. function=ammonium transporter activity; Cellular component=membrane; Biological process=transport
  Homolog annotation: Hit_ID=Q69T29; Match level="QueryCoverage=96%, HitCoverage=96%, E-value=0.0, Identity=75%"; Hit description =Putative ammonium transporter
  Pfam annotation: Domain name=Ammonium_transp; Domain location=24-468; Score=183.7; E_value=4.6e-52; Accession=PF00909.11; Description =Ammonium Transporter Family
MAGGGAAYQSSSASPDWLNKGDNAWQMTSATLVGLQSMPGLVILYGSIVKKKWAINSAFMALYAFAAVWLCWVVWAYNMSFGDRLLPFWGKARPALGQRFLVAQSQLTATAVRYRDGSLEAEMLHPFYPAATMVYFQCVFASITVIILAGSLLGRMDIKAWMAFVPLWITFSYTVSAFSLWGGGFLFQWGVIDYSGGYVIHLSSGIAGLTAAYWVGPRSASDRERFPPNNILLVLAGAGLLWLGWTGFNGGDPYSANIDSSMAVLNTHICASTSLLMWTLLDVFFFGKPSVIGAVQGMITGLVCITPGAVERKQTKENKVSKEESKRLQLLHSGLLGSSYSRLNRLFKAWCKGGQPLSWEFSQRIDDTLGVFHTHAVAGLLGGATTGLFAEPVLCNLFLAIPDSRGAFYGGDGGSQFGKQIAGALFVIGWNIVITSIICVLIGLVLPLRIPDAQLLIGDDAVHGEEAYAIWAEGELNDVTRQDESRHGSVAVGVTQNV

SEQ ID NO: 46572 - protein, 715 aa, Zea mays
  Coding DNA Sequence Number=SeqID_4793
  Gene Ontology: Mol. function=zinc ion binding; Cellular component =nucleus; Biological process=regulation of transcription, DNA -dependent
  Homolog annotation: Hit_ID=Q5VRR4; Match level="QueryCoverage=88%, HitCoverage=80%, E-value=0.0, Identity=52%"; Hit description =Putative far-red impaired response protein
  Pfam annotation: Domain name=FAR1; Domain location=93-306; Score =59.5; E_value=1.1e-14; Accession=PF03101.5; Description=FAR1 family
  Pfam annotation: Domain name=SWIM; Domain location=587-623; Score =26.5; E_value=9.4e-05; Accession=PF04434.8; Description=SWIM zinc finger
  Pfam module annotation: Pfam domain module=FAR1::SWIM; Domain location=93-306::587-623
MSHVEPAAAGVDQVGEGTVVPHDNGVSGTGGDVATTEAQVAVAVSTSGDERRGDYGDDAENEEEEEAATVQGSKEGTDELLRKVVCSEEAAYKLYCDYGHRMGFSIRKGKQSYFTGTKRIRTKDYFCSKEGLKEGEKLTDANFNDPHTRTNCRAMVRFRVNDQGEWKVIRLVSDHNHNLARPEERHLLRSARSLIAGRSSSVEVMLYGGYQVQGGAPQLPTGSTSATNNVENQKQDLLLGYGAATKTLTIGTGDVQSLVSHLKSRANEDGMFYWDVQLDRGGRMTNFFWRDGRSRTDYDCFCDVVVFDSTYRLSKHNLICAPFVGVNHHWQTTMYGCALLADESTSAFVWLFKSFLESMGNRHPQSIFTNLDQVVTKAVEEVFPNARHRIAHWHIQKNAHSRLGALNVSKTFNKMFTKCIQGCDSEAEFEETWAQMLCEFKLQDNKWLKKLYKLKQKWCSALNNCTFDGGIEYEPQCDSMSNMFNNVSDKLTSLCAIAVAVDKQTEDWREKELDEDARCFQRPPACIIKYSDILNHAAKVYTHRIYKLFETDFLDGCGATKFKELPCQDNNTYQFEMTMQGRGSRVCTVHFNMSMMQLSCSCSKFETMGLLCPHALKALSIKNICKIPESYILKRWTKDAKKWVFNPKQYESSYQECMNDEAAYCNYVMRYAYDLVTKSQGQDALRKALWETLESGEKELERYLENVTQHAPYAT

SEQ ID NO: 46573 - protein, 73 aa, Zea mays
  Coding DNA Sequence Number=SeqID_4794
  Homolog annotation: Hit_ID=Q2RAX8; Match level="QueryCoverage=94%, HitCoverage=66%, E-value=1e-10, Identity=52%"; Hit description =Expressed protein
MAAAAEVYRRVLKAVQKHVGRGATKQRFLDFGAAEFRAPVGTEADARARLRLAGDYAYLLTSVHHHKVLEIDP

SEQ ID NO: 46574 - protein, 382 aa, Zea mays
  Coding DNA Sequence Number=SeqID_4795
MTALGRLSRLLSSIVHRSGGLVRAFSMLVEVVDVADVSDLYVPRDAHCYYIFGSQATEIWITPLYFSKTCGLSILDTDFIEENLGVLPELDLLVFRSLNMSRSESEIDNCYKPFVKLFKALEVHRLLREKCPARGQGAAANAIMVTIEEKIFDFMKSCSTNAMLISYSGAHGERTKKHIVGSEDRGDEALISEVSDVTKDLKASNVPLKVRNFMGNKELSVEGKTTTAEGNVEIVPGDELTATLLDAVNTIQRTTTGYDQIRSAKKKVMSHVKQMRMYQIRLFKLLQEKVMHKDLEIDLEGPKNASVKLKAVNASAIVDTHRHGMAHAMQPDNVNLVEHLPEGNQESLSKEPYDVNDVVDLFQYKCSEYLTIAVAEFDEREI

SEQ ID NO: 46575 - protein, 359 aa, Zea mays
  Coding DNA Sequence Number=SeqID_4796
  Gene Ontology: Mol. function=protein serine/threonine kinase activity; Biological process=protein amino acid phosphorylation
  Homolog annotation: Hit_ID=Q2RAX3; Match level="QueryCoverage=50%, HitCoverage=42%, E-value=1e-80, Identity=81%"; Hit description=CIPK -like protein 1, putative, expressed
  Pfam annotation: Domain name=NAF; Domain location=226-286; Score =122.8; E_value=9.8e-34; Accession=PF03822.5; Description=NAF domain
MAGTHRARIWPPTPPDPRPRPQAHEHPCTVRIANATSRKPWPAAIGAGWSRGSGSTSPSHHPPVTATEGPTACDDPNWIRLRSSEHEDGSGVAASRCESGEERDRGREFGAARVEDRRGKEESRSSPGRRQRGGLSSGCALPPCRSRQAAVAPVASCPGFDPEGTTQGLVPGRGRITIPEILEDEWFKKGYKRPEFDEKYDTPLDDVDAVFNDSEEHHVTEKKEEEPVALNAFELISRSAGLNLGNLFDSEQEFKRETRFTSKCPPKEIIRKIEEAAKPLGFGVQKKNYKLRLEKVKAGRKGNLNVATEILQVAPSLHMVQVRKAKGDTLEFQKFYKNLSKTLKDVVWKSEDLQMRAAS

SEQ ID NO: 46576 - protein, 476 aa, Zea mays
  Coding DNA Sequence Number=SeqID_4797
  Gene Ontology: Mol. function=protein binding; Cellular component =nucleus; Biological process=ribosome biogenesis and assembly
  Homolog annotation: Hit_ID=Q1HFN6; Match level="QueryCoverage=90%, HitCoverage=95%, E-value=0.0, Identity=78%"; Hit description =Immature pollen 1
  Pfam annotation: Domain name=WD40; Domain location=171-207; Score =5.8; E_value=7.8; Accession=PF00400.22; Description=WD domain, G -beta repeat
  Pfam annotation: Domain name=WD40; Domain location=232-300; Score =31.3; E_value=3.3e-06; Accession=PF00400.22; Description=WD domain, G-beta repeat
  Pfam annotation: Domain name=WD40; Domain location=305-344; Score =24.2; E_value=0.00046; Accession=PF00400.22; Description=WD domain, G-beta repeat
  Pfam annotation: Domain name=WD40; Domain location=350-389; Score =27.2; E_value=6e-05; Accession=PF00400.22; Description=WD domain, G -beta repeat
  Pfam module annotation: Pfam domain module=WD40::WD40::WD40::WD40; Domain location=171-207::232-300::305-344::350-389
  Subcellular localization annotation: CTP_CleavageSite=36; ConfidenceScore=5.00e-01
MGRTIKKARKAKPKKSKKHVLWLNSFFCISVLQKTEASSSSNHAVASGPAKVWQPGVDALEDGEELQFDPEAYNYLRGFGIGWSCLSFDVVRDQLRLVRSEFPHTLYGVAGTQAEKASLNYIGVFKLSNINGKKREPIPASAVDGDTDVDSDSSSDEEDEEINEDTKPILHLKKVAHAGCVNRIRSMTQKPHICATWGDTGHVQVWDLSSFLNSLAESGASAPKEDDIIHKHLPMKVFSGHKDEGYAIDWSPLVTGRLVSGDCNKCIHLWEPTSNNWNWSPTEADIFASCSVDGTISIWDVRTGKKPSISVKAHKADVNVISWNRLASCMIASGCDDGSFSVHDLRSIQDSLVAHFEYHKKAITSIEWSPHEASSLAVTSEDHQLTIWDLSLERDTEEEAEFRAKMKEQANAPDDLPPQLLFAHQGQRDLKEVHWHPQIPSMIISTAIDGFNVLMPSNIDTTIPGSTDTAMPPAEP

SEQ ID NO: 46577 - protein, 348 aa, Zea mays
  Coding DNA Sequence Number=SeqID_4798
  Gene Ontology: Mol. function=DNA binding; Cellular component =mitochondrion; Biological process=DNA integration
  Homolog annotation: Hit_ID=UPI00004C1731; Match level="QueryCoverage =99%, HitCoverage=29%, E-value=1e-144, Identity=66%"; Hit description= UPI00004C1731 related cluster
  Pfam annotation: Domain name=rve; Domain location=103-272; Score =94.2; E_value=3.8e-25; Accession=PF00665.16; Description=Integrase core domain
MFFDGSLMKTGAGAGLLFISPLEKHLRYVLRLHFPASNNVAEYEALLVIDQVMKNSHCRDPKMEAYCDEVRRLEDKFYGLELNHIARRYSETADELAKMASGRTTVPPDVFCQDLHQPSVKTDDTPEPKKKAPGGYTHLLVAIDKLSKWIEVRPLNSIRSEHAVAFFTNIIHRFGVPNSIITDNGTQFTARKFLDFCEDYHIRVDWAAVAHPMMNGQVERANDMILQGLKPRIYNDLNKFGRRWMKELPSVVWSLRTTPSRATGFTPFFLVYGAEAILPTDLEYGSPRTRVYDDRSSQSSREDSLDQLEEARNVALLHSARYQQSLRRYHARGVRSRDLQVGDLVLRL

SEQ ID NO: 46578 - protein, 563 aa, Zea mays
  Coding DNA Sequence Number=SeqID_4799
  Gene Ontology: Mol. function=zinc ion binding
  Homolog annotation: Hit_ID=Q2QY62; Match level="QueryCoverage=59%, HitCoverage=57%, E-value=7e-76, Identity=70%"; Hit description=Zinc finger family protein, putative
  Pfam annotation: Domain name=zf-DHHC; Domain location=328-379; Score =63.7; E_value=6e-16; Accession=PF01529.11; Description=DHHC zinc finger domain
MVADDRRGDGVKQTNPWMPRIAEVRVRQKVLLHSTEKKKENRVTYNLESERYLRGDPVIDGLQYSLTAGHCLLLRQLQCLCSGPSSVESKAGVTHVQPRHHRCVSRDRIRASIMQQQQPGAEGAVMKPSEPAEDEQHQQKPGLEGAVMKPSKPAEDEQHQQKPGLEGAVMKPSEPAEDEQQQEEAERRRLYQAWKGNNIFLCGGRLMFGPDAASLLLTTFLIVAPTIVFCYQIKSTFYGSGGRQQQQMHQAAALVVTVTTIMPETEPWLQTQDLVFLSMTSTRDPGIVPRNSRAPPEADEFLGCNTPSMDWSGGRTPRMRLRRTKDVIINGFTVKVKFCETCLRYRPPRSSHCSICNNCVHKFDHHCPWVGQCIGLTTYENFRYHYDKKDNPYRKSIAANFAEVFFTKIPPPMNDFRSWVGEGALEAGFYTPYIGLDVTNPREKIDLDMESKEVLVGGIQIPTALQNIDYGSFEESSGDKNRNAGQKSAHFPIAWAQGNEAAGTSAGATVTFNNKTSDDGVNEFDSPNTTTTQASTKANTEPPGEGDTKETNSSNIIAKALKE

SEQ ID NO: 46579 - protein, 1436 aa, Zea mays
  Coding DNA Sequence Number=SeqID_4800
  Gene Ontology: Mol. function=heat shock protein binding; Cellular component=integral to membrane; Biological process=protein folding
  Homolog annotation: Hit_ID=Q2QUQ6; Match level="QueryCoverage=28%, HitCoverage=37%, E-value=1e-81, Identity=41%"; Hit description =Expressed protein
  Pfam annotation: Domain name=DUF1723; Domain location=108-157; Score =80.6; E_value=4.8e-21; Accession=PF08330.1; Description=Protein of unknown function (DUF1723)
MASDDGDKDILLLVHQVPLDMEDVPAPRLAHLLAPLHRAPPPPPPPPFRSPPPPQAAASAEHRLSFRGWLGIPRHWDDWVAKLRPLHARLWRRLGIHDAVLASTLRFKRDASAILHLASFWSPATATFAFPWGEATVTLQDVALLAGFPALGAPATAPLPPQWRPDEAALNGVRLGFNRSACKKAHHSAWVKHFLTDDNADTVFEHAAFLALWLTRFVLPGHPESTMRQAVFPIAVRLARGDRVALAPAVLASIYRDLREIKAFLIATGAAATTGNADMISSLSVYSPLYILQLWMWERFPALRPAKVNPLVDGDPLAARWHDLSRKLNPAQIREALSTGCNFVWQPYVSSMEHTGWVHSSDLAEDDELASLAQFLHPCELVGMDCIEQYLPHRVARQFGLDQDVPADVHRANQDWAIAWQTYQLEGKNVAFFIPHSEPGITTRYAQWWRQQLLPSGIDAATASAPVEWKTSKRKVKKTPAAMEAEAEKERKMKKARVSPTYTDKKRKLEELYDAKLSDWLPTARNEISDTTSDMESEEALLPNVGTTNDDIVLLMPRKQTTTAPVRALMDNDMILALGERGNFMVDEPPDIQSEPEAVVPATLDEEIVKIPEVISLDIPDKPEEGATAVMEEQKEATSVSDRSEEASALVIGEVEEKVAIEGAICVTGMNPSGNNSATVMEADERNAVPKEFGRAAKEVIEAVPQSQHEVNAGVINNSHDVVALPEEAHPVQPTNNSGGCPVVSCIMEDSKVAGDSGKIDYEYFCDFVEEQREIPCVQEISGENSRMGEKEREETSHESPQLEIVECVQDIVLRETDYDVNQKIVYPAVEDVATSDSMSTSLLGVPEPENAELNKHPYLAIKDEEDIPMEAARGEVAEMEQISTSAKGGAEEHGDFSELDHMGRADAKLHLHLNSEVPEKIDEIECKEVAGTMRLTGRYSDQKLGDVPEVGYTEDENIRGLVVNTSDRKPSEVSQVEPAKLEHSKDLVKEETDKSENIPGLECIGLEETRGDLMEECANTKSDNVPELENTGLGGTHGPIEDTDGRLKEIHDVNAELDKHNVHESDIDRSEDIMQIDPLTQDKATWLAKEETEDKTTKVQEVKYEQLRNEPPIQEDSKEKPCADSKDLSENVVVQSKEVDKLKQAGEGCQALMEKDMENASGAFVLEQTEDGHRKSLIETSINNDSEITLVEQLDGQSESLTRTEDSNDSTNEKDVVEDSNESINAKMPCSSATVQLKEDKMEVFHEGKMEEPCAQDAELSNQREPSSDATAMEIEAVALEQDSRIICKNMEATTVEGSHTLDSGLSSDLAKVNETHAAREIKNQEVLDVDMKVAMSVCGEYQINSIGMEDVKSTKGSQNQECLDQKEQLAREERYNLGTAIENNKMNLLEDENFLVYGRYHNSPTHTKVKRVKPTKGIQNQELLNNKEMSLPRI

SEQ ID NO: 46580 - protein, 364 aa, Zea mays
  Coding DNA Sequence Number=SeqID_4801
MAALGRLSRLLSSTVHRSGGLVRAFSMLAEVVNVADVSDLYLPRDAHCYYIFGKHEPLKLSYTRVISISEYFKEVSLLDRARRNRFIEDIDDDLPFLTHDRIKTCGLSILETDFIEENLGVLPELDLLVFRSLNMSRSESEIDNCYKPFVKLFKALEGKYVVRDAIFKLPKSLDLHLKYLELPIVKDYRVIYGRTLFPKLLISIMYCEVHRLLREQCPARGQSAAANAIMVTIEEKIFDFMKSCSTNVMLISYSGAHGERANKQIVCSEDGGDEALTSEVSNVTKDLKASNVPLKVRNFMGNKKLSVEGKRTTAEGNIEIISGDELTATLLDVVNTIQCITTGYDQIRLAKKKLMSHVKQMRMC

SEQ ID NO: 46581 - protein, 294 aa, Zea mays
  Coding DNA Sequence Number=SeqID_4802
  Gene Ontology: Mol. function=protein serine/threonine kinase activity; Cellular component=cytoplasm; Biological process=protein amino acid phosphorylation
  Homolog annotation: Hit_ID=Q2RAX3; Match level="QueryCoverage=83%, HitCoverage=56%, E-value=8e-97, Identity=68%"; Hit description=CIPK -like protein 1, putative, expressed
  Pfam annotation: Domain name=Pkinase; Domain location=15-251; Score =116.1; E_value=9.9e-32; Accession=PF00069.15; Description=Protein kinase domain
  Pfam annotation: Domain name=Pkinase_Tyr; Domain location=15-240; Score=-93.8; E_value=1e-06; Accession=PF07714.7; Description=Protein tyrosine kinase
  Pfam module annotation: Pfam domain module=Pkinase::Pkinase_Tyr; Domain location=15-251::15-240
MSAAATKVKRRVGKYELGRTIGEGTFAKVRFAKNTETGEPVAVKILDKEKVLRHKMAEQVTFPALKPNMGFGILVQSSVSRFGGTSHFADDDTNYYMVMGSKTKVYIVLEYVTGGELFDTINLKPSYLQPENLLLDSYGNLNVSDFGLSALSQQIKDDGLLHTTCGTPNYVAPEVLEDQGYDGAMADLWSCGVILFVLLAGYLPFEDSNLMTLYKKISNAEYTFPPWTSFPAKRLLTRILDPNPMTKFSHFHDPISSKVDFMYQLTRIEKEANWVILTGLVVAKPTDNKGLWCN

SEQ ID NO: 46582 - protein, 69 aa, Zea mays
  Coding DNA Sequence Number=SeqID_4803
MEKARTRPPERWTVELSKRERRPKAAISAERAARTGAGKLWDLGRTVPNTVEFAYWIGRTKQKKILVTS

SEQ ID NO: 46583 - protein, 172 aa, Zea mays
  Coding DNA Sequence Number=SeqID_4804
  Pfam annotation: Domain name=DUF588; Domain location=12-148; Score =42.4; E_value=1.5e-09; Accession=PF04535.3; Description=Domain of unknown function (DUF588)
  Subcellular localization annotation: CTP_CleavageSite=37; ConfidenceScore=5.31e-01
MTTKAAAAVATAYVRTRTTVALRLLAFAASLAAAVVVVTNRQDRWGITVTFKMFAVWEAFVAINFACAAYALLTAVYAKKLASKHWLHHMDQFSVNLQAASTAGAGAIGSVAMWGNEASGWFAVCRFYRLYCDRGAVSLALAFVALAALAVATGLSRFPAHDTQAVVDHPDD

SEQ ID NO: 46584 - protein, 86 aa, Zea mays
  Coding DNA Sequence Number=SeqID_4805
  Subcellular localization annotation: CTP_CleavageSite=63; ConfidenceScore=5.10e-01
MAFSVKHMLRRKSRVGIGPLACHVGRTPVTPRRISGGAAAVRRDVSDRGNRNRSIGIGLKEPVAEDPGAQQIEVAEQELIEGKLCP

SEQ ID NO: 46585 - protein, 200 aa, Zea mays
  Coding DNA Sequence Number=SeqID_4806
MGLRGRTLPDWTIDKCNHITKEEFVLMQPFGCKVQGHLNRLSSIERLTRRVSGARWRLLGATPNAMELMADGLGLEATGARGELPWDLHGRLSTSCMIRLSKAQSIIGLLAGHHHHAEGFGTEPPPGIGFHRLLPDGIGMAVEAPPEIDDEHLEQPRTPLGRRSGWPTMRVEVVPRGSAPGRRFREPSSSRHMANPDPLR

SEQ ID NO: 46586 - protein, 661 aa, Zea mays
  Coding DNA Sequence Number=SeqID_4807
  Gene Ontology: Mol. function=RNA-directed DNA polymerase activity; Cellular component=mitochondrion; Biological process=RNA-dependent DNA replication
  Homolog annotation: Hit_ID=UPI00004C1733; Match level="QueryCoverage =99%, HitCoverage=59%, E-value=0.0, Identity=82%"; Hit description =UPI00004C1733 related cluster
  Pfam annotation: Domain name=RnaseH; Domain location=290-417; Score =10.6; E_value=6e-06; Accession=PF00075.14; Description=RNase H
  Pfam annotation: Domain name=rve; Domain location=520-659; Score =87.8; E_value=3.3e-23; Accession=PF00665.16; Description=Integrase core domain
  Pfam module annotation: Pfam domain module=RnaseH::rve; Domain location=290-417::520-659
MPGIPRDVAEHSLDIQAGARPVKQPLRRFDEEKRRAIGEEIHKLMAAGFIKEAYVDDIVVKTRKASDLLSDLGATFRCLKAKGVKLNPEKCVFGVPRGMLLGFIVSERGIEANPEKIAAITSMGPIKDLKGVQRVTGCLAALSRFISRLGERGLRLYRLLRKAECFTWTPEAEEALGNLKAFLTNAPILVPPAVGEALLIYVAATTQVVSAAIVVERREEGHALPVQRPVYFISEVLSETKICYPQIQKLLYAVILMRRKLRHYFESHPVLADFVAEWVDTQLPTAPIKPELWTMFFDGSLMKTGAGAGLLFISPLGKHLRYVLRLHFPVSNNVAEYEALVNGLRIAIELGVRRLDARGDSQLVIDQVMKNSHFRDPKMEAYCDEVRRLEDKFYGLELNHIARRYNETADELAKIASGRTTVPPDVFSRDLHQPSVKTDDTPEPEKPRTCNISTEESYPSTEPKLGGWRAPRALVGNAFRQGFYWPTAVADTTRIVRTCQGCQFYARKTHLPAQALQTIPITWSFAVWGLDLVGPLQNAPGGYTHLLVAIDKFSKWIEVRPLNSIRSEQAVAFFTNIIHRFGVPNSIITDNGTQFTGRKFLDFCEDHHIRVDWATVAHPMTNGQVERANGLILQGLKPRIYNDLNKFGKRWMKELPRWSGV

SEQ ID NO: 46587 - protein, 68 aa, Zea mays
  Coding DNA Sequence Number=SeqID_4808
MMLRGAIVNVGAPRSYSAWNLPPLAESSDDDDVVDAGLVDDVEGGGVVKTARYVVEAMEEEEKVLPLV

SEQ ID NO: 46588 - protein, 61 aa, Zea mays
  Coding DNA Sequence Number=SeqID_4809
MEGETMDTVEKAPISEAMRESGIVEPKAGEEANVAEKGVTVLHLEPLPSNRDEVCQCLGLN

SEQ ID NO: 46589 - protein, 58 aa, Zea mays
  Coding DNA Sequence Number=SeqID_4810
MAEEVVIRGGRLQVRLARGSHGQLMDAGSPACPSTRIAGFEFEFNYEYKFCAQTKGGS

SEQ ID NO: 46590 - protein, 85 aa, Zea mays
  Coding DNA Sequence Number=SeqID_4811
MVVHTGEVPTRRAGDLTRRRTLLTQIEVTTNAREGSITVVKASLMPPTARHRFDSRDAGRQGRLGAGVATRALVCGYGARAFEVL

SEQ ID NO: 46591 - protein, 78 aa, Zea mays
  Coding DNA Sequence Number=SeqID_4812
  Subcellular localization annotation: CTP_CleavageSite=55; ConfidenceScore=5.02e-01
MKKTAERLTGVGWVPAKGRGIGHAGRQSRRMRILIGMGSGTGIGSSARSSRPELVACAAWSECTQLRSNTWRIASPHV

SEQ ID NO: 46592 - protein, 100 aa, Zea mays
  Coding DNA Sequence Number=SeqID_4813
MGLLFHKIVLLWARGELLAEWADTGNEQTWDKAARRGLKEKDLKAMKELGYFGGKVKVRLAGDETTSKPKRKEVMVFKSFFQAGLWLLMYQMIAKVLQKY

SEQ ID NO: 46593 - protein, 90 aa, Zea mays
  Coding DNA Sequence Number=SeqID_4814
  Subcellular localization annotation: CTP_CleavageSite=33; ConfidenceScore=5.47e-01
MEFVPTTHIEAMPTPPRPFLAARTPQSMSLLPHSSTRRAPTLTSPHAYNREEPPPSTMFVSPFYSRHGALTMSIASRKLKALSPIHSGLC

SEQ ID NO: 46594 - protein, 83 aa, Zea mays
  Coding DNA Sequence Number=SeqID_4815
MEENLGQNGGHSGEQYPPRWGIIRRIEAGEGLSADRAEGLVEGKTTEDSRCTEAHRGRDDGTTPAMMVERQGRRCELDVIPNL

SEQ ID NO: 46595 - protein, 111 aa, Zea mays
  Coding DNA Sequence Number=SeqID_4816
MGGTLSRIGMPTLADHRGWWHGGGAPAKIAGPIPDTASQSLNFQVGSAQSRKSQHVNSGLLGVCFVAEDTKEREHLRQILSEAAPKLSPIKLRHSDRSQDEGVNRCKDEMT

SEQ ID NO: 46596 - protein, 272 aa, Zea mays
  Coding DNA Sequence Number=SeqID_4817
  Gene Ontology: Mol. function=metalloendopeptidase activity; Cellular component=chloroplast thylakoid membrane; Biological process =proteolysis
  Homolog annotation: Hit_ID=Q653H3; Match level="QueryCoverage=68%, HitCoverage=27%, E-value=2e-72, Identity=70%"; Hit description =Putative mitochondrial intermediate peptidase
MDLIGFTIMRVDRLVPGEGEGEDNPNGGELDDEAEGLALVHFGALSEAPKDPTSFVAIERVVRGELVVEDPLAVYTIFGCARFNENVMNKPGFVDVYPASRITRNIQHHFESVSRFNTSKLMNTEKQKGLRIVTEPRNLSSALRWISDEEVRKQVYIVGNSEPRENIGVLNELIHARDELAKIMGCKSYAEFAIRPNMAASADVVMSFLENLSNTVKHKAEEEFKTIHNFKRRTCNEKSADLEPWDEDYFIGMMKSSVYDLDASVCAKLASP

SEQ ID NO: 46597 - protein, 225 aa, Zea mays
  Coding DNA Sequence Number=SeqID_4818
MAQRHISLSDPPRAPTTPDGKPLHARSTHDRAESLQPHMRRPQAHTQGAVHRDLAAEPQTDARAVTEHPHRPLWSLLHPFSLPPPLLPLPIDGRHSWCLKRRRALSSPHALAYKMDVEPSSLSLSRARSLLSVLSPSPLLHTIVARPFLAYMLFLRVPVVTAHVEMQRRPLFSVAVQIPANHRARNTTSIEPLLATVKFAHAAPGDRAHAVLRHLFIPAHEQTQG

SEQ ID NO: 46598 - protein, 241 aa, Zea mays
  Coding DNA Sequence Number=SeqID_4819
  Gene Ontology: Mol. function=metalloendopeptidase activity; Cellular component=chloroplast thylakoid membrane; Biological process =proteolysis
  Homolog annotation: Hit_ID=Q653H3; Match level="QueryCoverage=82%, HitCoverage=32%, E-value=2e-93, Identity=75%"; Hit description =Putative mitochondrial intermediate peptidase
  Pfam annotation: Domain name=Peptidase_M3; Domain location=2-241; Score=-67.0; E_value=7.2e-07; Accession=PF01432.10; Description =Peptidase family M3
MDCLPADLNSKGIKPWFRAGLVPLTGGGVWAVPDPTPALRKTARLNHGDVETLFHEFGHALHSLLSRTEYQHFSGTRVALDVAETPSNLFEYYAWDYRVLKTFALDETTGDAIPEKLVKALNASRNMFPATELQRQIFYSIMDLTLFGEQSSKPMDTISTVADLRRKHTSGKYAEGTHWHTRFTHLVTYGAGSAIRDKFLRFGGSKDPSSLLKDFAGDAVIRNSGSGIIPNASSLCKEIGL

SEQ ID NO: 46599 - protein, 200 aa, Zea mays
  Coding DNA Sequence Number=SeqID_4820
MSPESPSAAASRESTGLPLDGAPRSRASNYRWGLLGKWPVKGGGAAPRQGRSPGLPANALRPDAGASGPGPRRRAGGTEGAGNGGGWRGRAVEGAWRGGGAPDHRRELRLLEVGAGREDRPGASGGRPAADLAELRVPEKKIRKKSYRRYGPNLVIWARLGHGPGGLESESTLDMISCALRQSCINRSPKFNFSTCPLFF

SEQ ID NO: 46600 - protein, 139 aa, Zea mays
  Coding DNA Sequence Number=SeqID_4821
MAAPPGTTYASRQVSLDNGVVYGLSSLYTVAGRWSVALPPSHWRDMVGVTLDATKRDCCTSKLFAQCAGGGRGGGCAAREGVVAMTRLSQSDRRHFAAPLTDLTEGQRRLRHSDCGLRLGLSPGRRRTPLRPTQGSDSG

SEQ ID NO: 46601 - protein, 100 aa, Zea mays
  Coding DNA Sequence Number=SeqID_4822
MEKCRSVPHEHSSAYYGCGGGYDYEDVGGGPGQAGKSYSFNGPSGRDDPEAKRRRRVAAYNVFATQGRIKTTVRSSVKWLKSKFSDAVGSKDGSDRSRTG

SEQ ID NO: 46602 - protein, 668 aa, Zea mays
  Coding DNA Sequence Number=SeqID_4823
  Gene Ontology: Mol. function=protein serine/threonine kinase activity; Cellular component=nucleus; Biological process=protein amino acid phosphorylation
  Homolog annotation: Hit_ID=Q1S2S9; Match level="QueryCoverage=68%, HitCoverage=77%, E-value=1e-129, Identity=52%"; Hit description =Protein kinase
  Pfam annotation: Domain name=Pkinase; Domain location=138-420; Score =294.9; E_value=1.5e-85; Accession=PF00069.15; Description=Protein kinase domain
  Pfam annotation: Domain name=Pkinase_Tyr; Domain location=138-419; Score=41.1; E_value=5.5e-15; Accession=PF07714.7; Description =Protein tyrosine kinase
  Pfam module annotation: Pfam domain module=Pkinase::Pkinase_Tyr; Domain location=138-420::138-419
MGCAQGKSSRGSPARSDGRGVDRLKRDNDYRPGSSVSRLSDPLPATAESVPAPAAPPTKEHARRAAAVVPGGKTPDDGNGDAAAQQATTAATPATPPLLPPHPPRREDELVDGWPTWLLDNVPREALQGIVPKSADAYDKIEKVGQGTYSNVYKARERGTGRIVALKKVRFDTSESESVRFMAREIRFLQRLDHPNVMKLEGIATSRMHRSIYLVFDFMYSDLGRLVLRSQQRLTEPQIKCYMQQLLAGLQHCHERGILHRDIKGSNLLIDRHGVLKIGDFGLANYYGAGRRHPLTSRVVTLWYRAPELLLGSTSYGVGIDLWSAGCLLAEMFFGKPLMPGSGEVDQLLKIFRLCGSPPDDYWRKMKLSPSFKPPKPYKATTGERFRDLPPSSLGLLATLLALDPAARGTAGQALQSSFFTTPPMPCDLSSLPVVYKEEEEVDSRKPRTRQRSHRRKDGNGKRSETNSGSPPEKEAQPMQPLDITISLSGPGFQRLGLGASPLRAPLNLFQAQTRMAIPVSAISSIANARSHVPQDQEDDELTGTANSVTDTTREHDIGQGSAAAVMTAAKASSGVHDSSSSEKTIVNGSSSTVAKQLPTARHSGSDDDDHGNIHLVPAPDEEEADGEPASGSGVNRVGPESKSSAFVSDFEAAAAALRASEELPSSN

SEQ ID NO: 46603 - protein, 256 aa, Zea mays
  Coding DNA Sequence Number=SeqID_4824
  Subcellular localization annotation: CTP_CleavageSite=39; ConfidenceScore=5.07e-01
MAYVNRTAFKTNRRATKRATQHCARGARPGHRLGQGHARAQPRSRLRAWRGDRGAANGARGTWRGRQRVARARGRAGSPGQGLTGAGEGVAREGARRGGPSRGAGRASRGCERVGRGGARVAELTGARGAEGRARCEPPPPGTGRTREARGRGRARDVARPSRRHGARWGRGGRTARGAAGAGPGRGSLGRGSSAASAQGDGEGARRGGTRQGACATKKGEGRVQGKKKGGGGWREKGRGKLTPGNPNSSDLDSKP

SEQ ID NO: 46604 - protein, 33 aa, Zea mays
  Coding DNA Sequence Number=SeqID_4825
MARLPSLKGRCRGHTRDHQADTREYIRHPPSAR

SEQ ID NO: 46605 - protein, 100 aa, Zea mays
  Coding DNA Sequence Number=SeqID_4826
MARNGTKGKAKVIKEKIPTNNVAKGGETIDSRSDKRNKCKKKKKKRIKKIVYYDNNSSSSSHKDIDDSSSKKKTDYNKVSGLNNAKESWDTLKIFHGSMT

SEQ ID NO: 46606 - protein, 115 aa, Zea mays
  Coding DNA Sequence Number=SeqID_4827
MDNDYVELDVHNLETTDRTGDEGKKNFEGPSAREKVKKTKVPKARGEEDGLQGVKQKYHSRSCLRRNRKAKERMRKRVLSGVVNNHDYGVTVIDIVEDSVYHLVTSLSKQRNDLK

SEQ ID NO: 46607 - protein, 342 aa, Zea mays
  Coding DNA Sequence Number=SeqID_4828
  Gene Ontology: Mol. function=serine esterase activity
  Homolog annotation: Hit_ID=Q010S2; Match level="QueryCoverage=81%, HitCoverage=83%, E-value=3e-39, Identity=33%"; Hit description=[R] KOG1516 Carboxylesterase and related proteins
  Pfam annotation: Domain name=Abhydrolase_3; Domain location=136-338; Score=-59.4; E_value=0.00077; Accession=PF07859.3; Description =alphabeta hydrolase fold
  Subcellular localization annotation: CTP_CleavageSite=27; ConfidenceScore=5.35e-01
MRASVEEAGALLARSDSAGRRRRSPPPVQTASPRPGSLRRQSSSFREDVGHAASETYLVSRLTFTLLQYLGLGYRWMSQLLSLTIYAIVLMPGFIQVGYYYFFSSQVRRSVVYGDQPRNRLDLYIPEDNSRPCPVVAFVTGGAWIIGNFPQGTIGDMVHDASQGISFVCNNIASHGGDPNQIYLIGQSAGAHIAACALMEQAVKESGGNPVSWSLTQIKAYFGLSGGYNMHNLVDHFHERGLNRSIFLSIMEGEESLSRYSPEIVAKTSSAETIALLPLVVLMHGTEDYSIPSSSRWTHEAMHQAEAGLGQTFVDVLQQAGAQARLLLYEGKTHTDIFVQLD

SEQ ID NO: 46608 - protein, 48 aa, Zea mays
  Coding DNA Sequence Number=SeqID_4829
  Homolog annotation: Hit_ID=Q70YJ6; Match level="QueryCoverage=81%, HitCoverage=25%, E-value=1e-07, Identity=65%"; Hit description =Putative immunophilin
MEYKLESCSIQAHKGDNVIMDYPGKITDGTVLNSSYERGNTYLELEQT

SEQ ID NO: 46609 - protein, 158 aa, Zea mays
  Coding DNA Sequence Number=SeqID_4830
  Subcellular localization annotation: CTP_CleavageSite=37; ConfidenceScore=5.49e-01
MSGAPGDSNSNSSPSGKSRGNSTIIHRTVRCTPDSVRCSKGERPSELARLGNSLRLLRYNSPDISGVHRIVRCICGATAISAPTATCSAFIARQRAQRSGTPMLAHQTLYSTCPVRHRTSRRAQKIELQRSEPNNFGDVAGAPDCPGAPYDSQPAPNG

SEQ ID NO: 46610 - protein, 400 aa, Zea mays
  Coding DNA Sequence Number=SeqID_4831
  Gene Ontology: Mol. function=protein serine/threonine kinase activity; Cellular component=membrane; Biological process=protein amino acid phosphorylation
  Homolog annotation: Hit_ID=Q8LQ53; Match level="QueryCoverage=70%, HitCoverage=72%, E-value=1e-153, Identity=92%"; Hit description =Protein kinase 6-like
  Pfam annotation: Domain name=Pkinase; Domain location=114-370; Score =142.3; E_value=1.3e-39; Accession=PF00069.15; Description=Protein kinase domain
  Pfam annotation: Domain name=Pkinase_Tyr; Domain location=113-370; Score=198.4; E_value=1.7e-56; Accession=PF07714.7; Description =Protein tyrosine kinase
  Pfam module annotation: Pfam domain module=Pkinase::Pkinase_Tyr; Domain location=114-370::113-370
  Subcellular localization annotation: CTP_CleavageSite=59; ConfidenceScore=5.69e-01
MDPVDQGAPHPKQRRRSSKSPSTAPPQPQQRRRTSLLAALDAIGRVEPGTFDSRQSTPSASVHRSTVGSADPSTVMPDYRETAGHPLAADFNRFLTVLHKVPPISCHALLPCVLHAHARILVKLLDWGEDGHRSEQEIGALRAAFAQEVAVWHKLEHPNVTKFIGAIMGARDLNIQTEHGQLGMPSNICCVVVEYLAGGALKNFLIKNRRRKLAFKVVVQIALDLARGLCYLHSKKIVHRDVKTENMLLDKTRTVKIADFGVARVEASNPSDMTGETGTLGYMAPEVLNGHAYNRKCDVYSFGICLWEIYCCDMPYPDLSFSEVTSAVVRQNLRPEIPRCCPSSLANVMKRCWDANPDKRPEMAEVVSMLEAIDTSKGGGMIPKDQTQGCLSCFRQYRGP

SEQ ID NO: 46611 - protein, 257 aa, Zea mays
  Coding DNA Sequence Number=SeqID_4832
  Homolog annotation: Hit_ID=Q9FM25; Match level="QueryCoverage=83%, HitCoverage=30%, E-value=4e-65, Identity=59%"; Hit description =Arabidopsis thaliana genomic DNA, chromosome 5, P1 clone:MNF13
MSSHPLVYKTRSSRTKVGEDRSFDQEKSCPTDICNEQSTLCSWRSNYLACFQARIALERRKFLKNANIAVQRQMTWSNLAHEMTAEFRSLCAEEAYLQQELEKLQDMRNKAKLEGELWDERLSGSSGQNSHLVSKATRLWESILARKGQHEVLASGPIEDLIAHREHRYRISGSQLLAAMDMSSSVPHSELLSSKAGETSIILEKQEEFSQLFQEKEEALTRSDDRNGRTQQTVDVAEILRRWTHALQRIHKQSLHL

SEQ ID NO: 46612 - protein, 114 aa, Zea mays
  Coding DNA Sequence Number=SeqID_4833
  Homolog annotation: Hit_ID=Q9FM25; Match level="QueryCoverage=89%, HitCoverage=12%, E-value=4e-33, Identity=72%"; Hit description =Arabidopsis thaliana genomic DNA, chromosome 5, P1 clone:MNF13
MAADREKEREAELEGAMYTNCLLLGLDPAVLGSPSSPAGRVGLFRHSNPRLGEQLLYFLLSSLRGPAQSAKAIRWLFRIFGSLDFDKVWPIFDSAQSREFRKVGFLQFVSHFFV

SEQ ID NO: 46613 - protein, 97 aa, Zea mays
  Coding DNA Sequence Number=SeqID_4834
MEEQSKILCEFSDRLAAQEARWRGQESIIEALKSHIVSSDRCLSELSSGLRIDMEAHLTGSDVHTGTRLCQIEEDAGARVATDVSAPTLAPVVNADN

SEQ ID NO: 46614 - protein, 150 aa, Zea mays
  Coding DNA Sequence Number=SeqID_4835
  Subcellular localization annotation: CTP_CleavageSite=57; ConfidenceScore=5.18e-01
MEERMAGLTGVGLVSAKWSRSSTVEVFWLVGVGRTRFPWRTSSSGGGKMIPQRNLARVGYGSGSTLTGARVWSGKQWRNSGEAWVHGGSEKLSECRCGVEHGPGGLVTVAGVRRRWRGALSSPELARSQAGKGVADRGCRGTRTRGLGAL

SEQ ID NO: 46615 - protein, 168 aa, Zea mays
  Coding DNA Sequence Number=SeqID_4836
MESEGRRLGKGAMADKRGPQTSEGERANGQSALIGRSHRATSENERMRGRISADREEILYPQIQGVTENHTCSHEPPPFPSLVPILLVHLLSVAHAQPRPLLNHLQGLSRRYCHPHRNRRGDEWGDSIAQRRMLRDAGEVSNPLGHAVGTSQQPSDETIDSFQHRTSP

SEQ ID NO: 46616 - protein, 166 aa, Zea mays
  Coding DNA Sequence Number=SeqID_4837
  Homolog annotation: Hit_ID=Q2QMW0; Match level="QueryCoverage=99%, HitCoverage=40%, E-value=8e-70, Identity=81%"; Hit description =Expressed protein
MSSMLIRDGKYPWFFHFMIAWPKSLTCSVKLIGKEENSSREHTILRTAQKLKPFSFNKFSANGYHDFLPSRLRPKFQNIDANECTFSEILCLICGSPFSESELLNLENTKLKAQKKIDLYTAHCCQSCHFQILPAATDMYGHFFSLLPKFWTEKVDAASASHSSLR

SEQ ID NO: 46617 - protein, 156 aa, Zea mays
  Coding DNA Sequence Number=SeqID_4838
MSHPLASEHIVDLTTSLGAIASLADLHAALDVRPTFVGSLLLPHGSSTLSELAVGGDIVVLRLLPNASPTSFATQQRRGSPQGFPTLVAPTWIDVVASSSTPLPASSLLVIAIATVQTVVAFSWDHEHVATLALEHEHTMGTALTIQMPPPRSATC

SEQ ID NO: 46618 - protein, 63 aa, Zea mays
  Coding DNA Sequence Number=SeqID_4839
MSRSVGHEPRAVDADEAVAPPLVELLSPGSLSPLPFPQASSGCCDASRVALEATEVEAELLRT

SEQ ID NO: 46619 - protein, 233 aa, Zea mays
  Coding DNA Sequence Number=SeqID_4840
  Gene Ontology: Mol. function=transferase activity, transferring glycosyl groups; Cellular component=nucleus; Biological process =purine ribonucleoside salvage
  Homolog annotation: Hit_ID=Q6K5Y7; Match level="QueryCoverage=83%, HitCoverage=73%, E-value=3e-83, Identity=82%"; Hit description =Putative adenine phosphoribosyltransferase form 2
  Pfam annotation: Domain name=Pribosyltran; Domain location=64-218; Score=142.8; E_value=9e-40; Accession=PF00156.17; Description =Phosphoribosyl transferase domain
MGEEASCDAVSLTEAGTNAKPVGKEVGREPAAAPAAAADPRLQGISDAIRVVPHFPKQGIMFNDITTLLLRPRVFKDAVDLFVERYRGMGIDAVAGIEARGFVFGPAIALAIGAKFIPLRKPRKLPESCADTGSRKQLLLLLLEGEVISEKYVLEYGTDCLEMRVGAIERSGERVLVIDDLVATGGTLCAAIRLLERAGADVVECACVIGLPKFKDLYKLNGKPVYVLVESRE

SEQ ID NO: 46620 - protein, 338 aa, Zea mays
  Coding DNA Sequence Number=SeqID_4841
  Homolog annotation: Hit_ID=UPI00005271BC; Match level="QueryCoverage =74%, HitCoverage=52%, E-value=2e-36, Identity=40%"; Hit description =HNH nuclease
  Pfam annotation: Domain name=HATPase_c; Domain location=19-103; Score= 22.7; E_value=0.00026; Accession=PF02518.16; Description=Histidine kinase-, DNA gyrase B-, and HSP90-like ATPase
MARSRCPAGSPVGGMILFYDQPQVVTNAIVHTGQPSEVRALLEDGVLTVSVRDQGVGYTSGPVDSDPLRVHGRGLELVDALTARWGSEVDQVGMTVWFVFEQDEAAAELKCVAEARQAVETVAFDASQRAAQAAAGQRRERLGRGVAAQVALARRVSPNRGGKLVGLAKVLEREMPHTMAAWRAGRITEWRASLLARETAMLAREERAEVDTALAADPARLEAMGDRELAGVAASMAARLDPASVAKRRRKAEEERTVTLRPAPDTMTYLTALLPVAHGVAVHAALVQDAAAKRAAGDVRTQGQVMADTLVERTTGQSTAAAVPAAVTVVLSDSALLA

SEQ ID NO: 46621 - protein, 109 aa, Zea mays
  Coding DNA Sequence Number=SeqID_4842
  Pfam annotation: Domain name=ABM; Domain location=21-82; Score=11.9; E_value=0.024; Accession=PF03992.6; Description=Antibiotic biosynthesis monooxygenase
  Pfam annotation: Domain name=Dabb; Domain location=9-102; Score=57.0; E_value=6.3e-14; Accession=PF07876.3; Description=Stress responsive AB Barrel Domain
  Pfam module annotation: Pfam domain module=ABM::Dabb; Domain location= 21-82::9-102
MTALQGSRIRHLVVFTLRHDEDTPEAESFLAALRSLAALDGVEELDVVRQVGRKNDYRLAVTMEFASRAAYDAYNAHPAHVAFVRDRWDVDVADFLEIDLAALRPDDAG

SEQ ID NO: 46622 - protein, 87 aa, Zea mays
  Coding DNA Sequence Number=SeqID_4843
MSFSLGPHAANVGGQVPLSQVVDAHRDCLDPRFDEEFEAADLHWLVPYLVRLLAGEDVTEEIIVAHREQRGRAPGWMEQHRFGETNL

SEQ ID NO: 46623 - protein, 154 aa, Zea mays
  Coding DNA Sequence Number=SeqID_4844
  Subcellular localization annotation: CTP_CleavageSite=56; ConfidenceScore=5.01e-01
MPLPCGPPRGEPGFSLAYTVSGQWDYLSMKFGSSLLRLAAGGWGPIRRRLNNLTVLAAAFSSRRRDSSDLPEPALPIKVVAQGAHRFDSPEAIPRQRSHRGLIGWKAAVDLGIAHRGWRKPWVTRIASKLGATAPNLRSVAGYPFVGVIWAIGG

SEQ ID NO: 46624 - protein, 136 aa, Zea mays
  Coding DNA Sequence Number=SeqID_4845
  Subcellular localization annotation: CTP_CleavageSite=35; ConfidenceScore=5.16e-01
MAGAGDSTQAKKARGGCSWLGGLGSTARYRYRRSPATNRRDRENRGGKKKRSGGEIHLGWGENDGEAMPDGGRARSGTVAELYRRRIRAQEAWRRGSSGELEEWVRVARVRFANSSFTAEGASQRQLLPAAFCAGA

SEQ ID NO: 46625 - protein, 640 aa, Zea mays
  Coding DNA Sequence Number=SeqID_4846
  Gene Ontology: Mol. function=RNA-directed DNA polymerase activity; Cellular component=nucleus; Biological process=RNA-dependent DNA replication
  Homolog annotation: Hit_ID=Q8S461; Match level="QueryCoverage=99%, HitCoverage=36%, E-value=0.0, Identity=77%"; Hit description =Putative prpol
MPEPSTTEGRRIQGELKNLLEGAAARRAESTASRRQGYPSEPHAATSRFMREASVYTGRTRNTAPAAPGHLGNEHHRRDRRAHLDERVHRGYHPRRGGRYDSGEDQSPSPEPPGPQAFSRAIRRAPFPTRFRPPTTITKYSGETRPELWLADYRLACQLGGTDDDNLIIRNLPPVPLRAARAWVEHLPPGCRQQPGESLRDYIRRFSKQRTELPNITDSDVIGAFLAGTTCRDLVSKLGRKTPTRASELMDIATKFASGQEAVEAIFRKDKQPQGRPSEEAPEASTPRGAKKNGKKKSQSKRDAADADLVAAAEYKNPRKPPGGANLFDKMLKEPCPYHQGPVKHTLEECVMLRRHFHRAGPPAEGGRAHDDDKKEDHQAGEYPEVRDCFMIYGGHVANASARHRKQERREVCSVKVAAPVYLDWSDKPITFGQADHPDHVPSPGKYPLVVDPIVGNVRLTKVLMDGGSCLNIIYAETLRLLRVDLSSVRAGAAPFHGIIPGKRVQPLGRLDLPVCFRTPSNFRRETLTFEVVGFRGTYHAVLGRPCYAKFMAVPNYTYLKLKMPGPNGVITVGPTYKHAFECDVECVEYAEALAESEALIADLENLSKEVPDVKRHAGNFEPAETVKAVPLDPSGDTSK

SEQ ID NO: 46626 - protein, 667 aa, Zea mays
  Coding DNA Sequence Number=SeqID_4847
  Gene Ontology: Mol. function=nucleoside-triphosphatase activity; Cellular component=membrane; Biological process=transport
  Homolog annotation: Hit_ID=Q6ZIV9; Match level="QueryCoverage=98%, HitCoverage=74%, E-value=0.0, Identity=68%"; Hit description =Putative ABC transporter
  Pfam annotation: Domain name=ABC_tran; Domain location=441-558; Score= 51.6; E_value=2.6e-12; Accession=PF00005.17; Description=ABC transporter
MEIKFMPHFHIDCVQGLPLWRESASVVNDELFKGYRQNGGGSGGGKTNEFVAGYDFLNTNTNGLEMNIWYNSTYNNNTAYVPISLLRVPRLVNAASNEYIKFLKGSGVEMFLQYVKEMPKVGTKLKFDLSSLLGALFFTWIVELLFPVILTYLVYEKQQKLKIMMKMHGLKDGPYWLISYAYFFALSATYMILFVIFGSLIGLDFFRKNAYSIQFVFYFIYINLQISLAFLVSSFFSSVKIATVVGYIYVFGSGLLGEFLLRFFVEDTGFPKGWVVVMEIIPGFSLYRGLYEFGQYASAGNSMGTTGMKWSNLDDSLNGMRVVLIIMVVEWAIVLPLAFYVDQVSPLGGGFRKNPFFFLGCFKKSPLSLRRYSFGRQGSKVVVEMDNPDAVQEREVVEQLLLEPIANQAILSDNLKKVYHGKDGNPDKLAVRGLSLAIPKGQCFGMLGPNGAGKTSFISMAVDDSLKSVNLFHGGVGDKQVGKYSGGMKRRLSVAISLIGDPKVVFMDEPSTGLDPASRNNLWCVVKEAKKNRAIILTTHSMEEAEVLCDRLGIFVDGGFQCLGNPKELKARYGGTYVLTMTTPSENEQEVEQLVHRLSPNASRIYHISGTQKFELPKQEVKVADVFHAVESAKRRFSIYAWGLVDTTLEDVFIKVAKGAQAFSVVA

SEQ ID NO: 46627 - protein, 320 aa, Zea mays
  Coding DNA Sequence Number=SeqID_4848
  Gene Ontology: Mol. function=nucleoside-triphosphatase activity; Cellular component=membrane; Biological process=transport
  Homolog annotation: Hit_ID=Q6ZIV9; Match level="QueryCoverage=72%, HitCoverage=24%, E-value=6e-99, Identity=74%"; Hit description =Putative ABC transporter
  Subcellular localization annotation: CTP_CleavageSite=18; ConfidenceScore=5.09e-01
MDAPAPTRGPASFLTQANALLRKNLCFQKRNLKTNIGITLFPVLLCVILVVLQGVIDRELDKPKYRCGCVCVDPGPAAVGDACRRTECGVQHSTLDQVGSCPIPNPTPWPALVQVPRPESRAVRTAGQPFDGLPDPTCRDTGSCPAAVLVTGSNRSLAQSLSVGLFPASTSSLNLTDYLDALSKIVAGSDTWPWTTELIESAFIPGNNLYLVQPRCLSNLTQTVSSNAGAIPLQLSVNTYILSTLMFDRIKSNTNSTCTVRQKRSHRRKTNTKILKQPPLPSNLYSHKRRSTQLGLCTRIRNGYMLLSLPSNAGTIKKSK

SEQ ID NO: 46628 - protein, 289 aa, Zea mays
  Coding DNA Sequence Number=SeqID_4849
  Gene Ontology: Mol. function=protein binding; Cellular component =spliceosome; Biological process=mRNA processing
  Homolog annotation: Hit_ID=Q6QP54; Match level="QueryCoverage=21%, HitCoverage=35%, E-value=7e-19, Identity=82%"; Hit description =Putative kinase
MTTAVLSPLRKQGDVSKGNDDASCDVVGPSPGLGEVEAPPRSRSSLSSKAEVESEPLGQARRRPSAEVRAESEPWGRAKRSSSSSEAEPESEPWGRAKRSSSSSEAEPESEPWGRAKRSSSSSGAEPESEPWGRAKRSSLSSGAEPESEPWGRAKRSSSSSGAEPESEPWGRAKRSSSSSEAKPESEPWGQAKWSSLSSGAEPESEPWGRAKRSSSSSGAEPKSEPWGRAKRSFLWRLRPDMATVSLTLSSGTAVRAAQAALSSCQAGQWSGEVTTVTSALSTGGRASG

SEQ ID NO: 46629 - protein, 97 aa, Zea mays
  Coding DNA Sequence Number=SeqID_4850
KGEKSECHRGDEGNSTHHLSLLGVVSWGFSGLGGGRLKQLFRGFVFTLWEFLATRNYPAVDRGSAWPRLSSLLALILARPGDGAAVAGDCSGDWLTQ

SEQ ID NO: 46630 - protein, 447 aa, Zea mays
  Coding DNA Sequence Number=SeqID_4851
  Subcellular localization annotation: CTP_CleavageSite=64; ConfidenceScore=5.31e-01
MVVISGNLRRSWLSHGSRLSALATKHAGAGGCGPAVSSVRVRRVRLCVNRCSEAGFQSLCPIIAAEKVSGRIFYARMEILLVGGEIVVDGHNPTVAAIDDTKLRCRVRSFTRPTAGNIFYLGSLAPAMSIDKTSPRLPATSVCDANHLLARHLNNEMIMCVGAETCVDGRSPRFAANNDDEFLGLLPAESHRVRSAYTATNNDTDHRPFHAGPICRLQHPFRIIAAEKLPGLIFYARPTAAAIDDTKLRCRVRSFTRPIAGNIFYLGSLAPTMSIDKTSLRHLATYETCVDGRSPRFAANNDDEFLGLLPAESSHVRSAYTATDNDTDHRRFHAGPICLLQHPFRIIAVEKLPGLIFYAHRSPSNEHRQDLTETPSYLDGRNPRFAANNDDEFLGLFPAESHHVRSAYTATDNDTDHRHFHAGPLCLLQHPFRIIAAEKLRGLIFYA

SEQ ID NO: 46631 - protein, 121 aa, Zea mays
  Coding DNA Sequence Number=SeqID_4852
MAVRRGNLKCLRKNARAKTQALPSPAQAGAKTIKDSGDRTIRTTKTMHSSNDLLLSHRLSLPDRKLTSSNIWRPSFVLRQSIPAMAPNRPNSKAAIFIDDAAKAELLAEKKGKDPIADAIP

SEQ ID NO: 46632 - protein, 75 aa, Zea mays
  Coding DNA Sequence Number=SeqID_4853
MAESIREEPKAGHYLLVEKATDSLRSYSTKMLGPRALHGSSGALYSALYAPVPFSLPKSSVSLFITLNTVLWVHE

SEQ ID NO: 46633 - protein, 202 aa, Zea mays
  Coding DNA Sequence Number=SeqID_4854
  Gene Ontology: Mol. function=zinc ion binding; Cellular component =intracellular
  Homolog annotation: Hit_ID=Q6H630; Match level="QueryCoverage=99%, HitCoverage=100%, E-value=5e-35, Identity=41%"; Hit description =Putative zinc finger protein
  Pfam annotation: Domain name=zf-B_box; Domain location=1-47; Score =31.0; E_value=4.1e-06; Accession=PF00643.14; Description=B-box zinc finger
  Pfam annotation: Domain name=zf-B_box; Domain location=61-94; Score =10.1; E_value=0.01; Accession=PF00643.14; Description=B-box zinc finger
  Pfam module annotation: Pfam domain module=zf-B_box::zf-B_box; Domain location=1-47::61-94
MKVQCDVCAAEAASVFCCAVEAALCEACDRRVHRANKLAGKHRRLSLLSPAAPSSSAQQTPPPPLCDICQEKRGLLFCKEDRAILCPDCDVPPAARPPPSEEDENDSSSSSISEYLTKTLPGWHVEDFLVDETAAATAIGVSADVSYQAGGLARTGGPQDGYYSAWMAPEQIFCEGKGSRMPQMAMCSSSKRPRATSSYSYW

SEQ ID NO: 46634 - protein, 73 aa, Zea mays
  Coding DNA Sequence Number=SeqID_4855
MGKTNTQAKAQAQVSIEAEDIASHDLKALSASYSSQAKETKTNGITGIFGFVKIRLSFFLLQEFLYSCRLIWV

SEQ ID NO: 46635 - protein, 54 aa, Zea mays
  Coding DNA Sequence Number=SeqID_4856
MKVVAAKMKVVVAASKEKVQQDEPKAAISDVKCDNPKEEGNVQQTKSCCLRCEM

SEQ ID NO: 46636 - protein, 71 aa, Zea mays
  Coding DNA Sequence Number=SeqID_4857
RFRALSHSICGAALYVGDLNRGATRVSYACGLDLGPVPNHPALLRGGVVNLVPLDPRKSPLLRILVSSRLK

SEQ ID NO: 46637 - protein, 149 aa, Zea mays
  Coding DNA Sequence Number=SeqID_4858
  Subcellular localization annotation: CTP_CleavageSite=17; ConfidenceScore=5.03e-01
MGSAISDHHIRDLAHPAAASEPSPPFPKTCATIPPSTPPESSSPISHRRSAWCYLKTMSPGITISPNTDIRCQSPSGTSLPILRRRRSPIQQVAATLSNLASCNANPHPDDLDHPCVLLRAEDDDIEEGEITDNACALASPATNPLEHS

SEQ ID NO: 46638 - protein, 204 aa, Zea mays
  Coding DNA Sequence Number=SeqID_4859
  Homolog annotation: Hit_ID=O81481; Match level="QueryCoverage=24%, HitCoverage=23%, E-value=6e-13, Identity=78%"; Hit description =Eukaryotic translation initiation factor 4E-1
MAPGCCCRKRVDKDLIHTVVLYSARKLLLGRKFSKQQHEQSLKWQSRMQLQAKRSTHLPIFFSLQQPRKKHVSEKSKNLERMNAPPIIPRWWRRCVWGGWSSPGGLLGLALRVVEPEGLGVLERVRGGRGKSAGVVGDLALLNVVVLGPEKNAWVVEVVCSGGLDAPRSHRRRSGVAYGWGMTPGMGHKARLRARWRPTLRHLS

SEQ ID NO: 46639 - protein, 122 aa, Zea mays
  Coding DNA Sequence Number=SeqID_4860
  Gene Ontology: Mol. function=signal recognition particle binding; Cellular component=signal recognition particle, endoplasmic reticulum targeting; Biological process=SRP-dependent cotranslational protein targeting to membrane
  Homolog annotation: Hit_ID=Q1SSS8; Match level="QueryCoverage=58%, HitCoverage=11%, E-value=2e-25, Identity=75%"; Hit description=GTP -binding signal recognition particle SRP54, G-domain
MGGHAFHGRQSRGDWDVTDTPYMENWGGDLRRGRGVEWTFHNDLGLVFVAAYQKILHLLYVDDLLAAVRREFSHIYDPKRTSYDDFGDIFRQLHREAEVRAEEMKKSTARPRHAPSMESGGG

SEQ ID NO: 46640 - protein, 536 aa, Zea mays
  Coding DNA Sequence Number=SeqID_4861
  Gene Ontology: Mol. function=oxidoreductase activity; Cellular component=integral to membrane; Biological process=electron transport
  Homolog annotation: Hit_ID=Q8S220; Match level="QueryCoverage=82%, HitCoverage=81%, E-value=3e-58, Identity=34%"; Hit description =Putative cytochrome P450
  Pfam annotation: Domain name=p450; Domain location=21-523; Score =74.7; E_value=3e-19; Accession=PF00067.12; Description=Cytochrome P450
MQYLVARMQLRPCTGLQEAVMQVLLQLLPLVLSAAAAILIAWRATPPVVKARLAALQSGIARARKPIMLVTDFATAHHLLVRGSSAGSFSNRPPSMAPSAVLSGRRYHNINSAPYGQLWRALRSNLTSGVLHPTRLRHYAAARRRALHRLAADLREQQLADDGVEALAAESIRSAVFGLVSTMCFGDGGVDAAVVRAMADVQTELVLSLSAVRTFAFVPFLAVSKLVYRGRWNKLAAIRRKQEELYLPLIDGCRRRRGRDDDDSDGTPPSYVRTLLDLRVPVELDGDHDSSGGEQTQQRRLEDGELVGLCSEFLGSGTESVSAALQWIMANLIKRPDMQDAVRREIDAAVDADAEEVGEEVLGKLDLLNAVILEALRLHPTIKFGFREVMQEDQVVHDGHRIPVGTKMVFPLEALARDKTAWDEPDEFMPERFHGCCAGGESTKKLLSVAAEMKMLPFGGGRRMCPAIGVSLLHIGYFMANLVREFEWREAEGGEHAGVQLHPDATVEMFNFMERPLRARLVPLRRPGGKKFRYVH

SEQ ID NO: 46641 - protein, 74 aa, Zea mays
  Coding DNA Sequence Number=SeqID_4862
MDILMKDLKVFTSFNRELFKEITQLLPADLREFQMLMGGGSSASGPRKGMHSRLFPNMTFDPISIDFYVSTNFQ

SEQ ID NO: 46642 - protein, 358 aa, Zea mays
  Coding DNA Sequence Number=SeqID_4863
  Gene Ontology: Mol. function=DNA binding; Cellular component=nucleus; Biological process=regulation of transcription
  Homolog annotation: Hit_ID=Q5Y5S4; Match level="QueryCoverage=91%, HitCoverage=89%, E-value=1e-112, Identity=64%"; Hit description=NAC transcription factor
  Pfam annotation: Domain name=NAM; Domain location=30-157; Score =272.5; E_value=8.3e-79; Accession=PF02365.6; Description=No apical meristem (NAM) protein
MGGASGGDHPQQHGGGDDGHLQQGGGGDMVMPGFRFHPTEEELIDFYLRRRVEGKRFNIELINLVDLYRYDPWDLPALASIGDKEWYFYVPRDRKYRNGDRPNRVTPSGYWKATGADRTVYVEVKRPIGLKKTLVFYVGKAPKGLRSSWIMNEYRLPSGEADRYQKEISLCKVYKRPGIEDNFHLSTTTARSSGSKAAATMEKKHHRTSASPRMAPVFDGGHSSGYMNKPYSGANTTMLGMASSAAARAATLAPQTSMFLSTPSLSSTTSTEEDGTSLYHMKGVNPPMLPSSTHALLNANSATMATIPIDELSRAIGCQGDPNQTLPTQAPLLPFPNLEKIWDWNPLLESPKVCTSFK

SEQ ID NO: 46643 - protein, 447 aa, Zea mays
  Coding DNA Sequence Number=SeqID_4864
  Gene Ontology: Mol. function=methyltransferase activity; Biological process=metabolic process
  Homolog annotation: Hit_ID=Q1SW51; Match level="QueryCoverage=64%, HitCoverage=62%, E-value=1e-70, Identity=47%"; Hit description =Generic methyltransferase
  Pfam annotation: Domain name=Methyltransf_11; Domain location=301 -396; Score=20.6; E_value=0.00051; Accession=PF08241.2; Description =Methyltransferase domain
  Pfam annotation: Domain name=Methyltransf_12; Domain location=301 -394; Score=6.9; E_value=0.1; Accession=PF08242.2; Description =Methyltransferase domain
  Pfam module annotation: Pfam domain module=Methyltransf _11::Methyltransf_12; Domain location=301-396::301-394
  Subcellular localization annotation: CTP_CleavageSite=43; ConfidenceScore=5.23e-01
MDDDDLHGNGKNKPLPPTRRRCYCCSCTTAATLLMFLLTNAVSVAVVSSGAGSSLLRRYGGGYRPAATIVRLWDGSAALHADLNATQAALAAGRADLADLHARVRTANELLRTLLHAMREELSATGGGEWKREPAGELRLAVGVGPRHHDVTEAAVPVLGHACVRVQDDLERYMDYAPGGECPSDEQLAHRLMLSGCEPLPRRRCRPRSPKGYPQPAPLPRSLWTTPPDTTVVWDAYACKSYSCLAAARGNITGCGGDGDGGSCFDLRRGRGRWARDDGALSYSIDAVLRARPNGTVRIGLDLGGGSPSGTFAARMLERAGATVLTAAVDSGAPFGSFVASRGLVALHVTPAHRLPLFDGAMDIVHAGHGLGAGDMLEFALYDVYRVLRPGGLFWLDHFVCAAMQLNATLAPMLDRVGFRKLRWNTGHRGKEKDQWYVSALLEKPMT

SEQ ID NO: 46644 - protein, 764 aa, Zea mays
  Coding DNA Sequence Number=SeqID_4865
  Gene Ontology: Mol. function=nucleic acid binding; Cellular component= intracellular; Biological process=DNA integration
  Homolog annotation: Hit_ID=Q8W0X4; Match level="QueryCoverage=97%, HitCoverage=52%, E-value=0.0, Identity=89%"; Hit description =Putative pol protein
  Pfam annotation: Domain name=RVT_2; Domain location=341-596; Score =512.5; E_value=4.6e-151; Accession=PF07727.4; Description=Reverse transcriptase (RNA-dependent
  Pfam annotation: Domain name=rve; Domain location=16-167; Score =108.0; E_value=2.7e-29; Accession=PF00665.16; Description=Integrase core domain
  Pfam module annotation: Pfam domain module=RVT_2::rve; Domain location=341-596::16-167
VYASGGSSWIIDSGCTNHMTGEKKMFTSYVKNKDSQDSIIFGDGNQGKDKSETQGTLKRFLRRAQNEFELKVKKIRSDNGSEFKNLQVEEFLEEEGIKHEFSAPYTPQQNGVVERKNRTLIDMARTMLGEFKTPECFWSEAVNTACHAINRVYLHRLLKKTSYELLTGNKPNVSYFRVFGSKCYILVKKGRNSKFAPKAVEGFLLGYDSNTKAYRVFNKSSGLVEVSSDVVFDETNGSPREQVVDCDDVDEEDVPPAAIRTMAIGDVRPQEQDGQDQPSSSTTVHPPTQDDEQVHQKEACDQGGAQDDHVMEEEAQPAPPTQVRAMIQRDHPVDQILGDISKGEELNNFKRNEVWTLVPRPKQNVVGTKWVFRNKQDEHGVVTRNKARLVAKGYAQIAGLDFEETFAPVARLESIRILLAYAAHHSFRLYQMDVKSAFLNGPIKEEVYVEQPPGFEDERYPDHVCKLSKALYGLKQAPRAWYECLRDFLIVNAFKVGKADPTLFTKTCDGDLFVCQIYVDDIIFGSTNQKSCEEFSRVMTQKFEMSMMGELNYFLGFQVKQLKDCTFISQTKYTQDLLKRFGMKDAKLAKTPMGTDGHTDLNKGDSDYAGCKVDRKSTSGTCQFLGRSLVSWNSKKQTSVALSTAEAKYVAAGQCCAQLLWMRQTLRDFGYNLSKVPLLCDNESAIRMAENPVEHSRTKHIDIRHHFLRDHQQKGDIEVFHVSTENQLADIFTKPLDEKTFCRLRSGMKGKGELGPCKTSTALR

SEQ ID NO: 46645 - protein, 1442 aa, Zea mays
  Coding DNA Sequence Number=SeqID_4866
  Gene Ontology: Mol. function=methyltransferase activity
  Homolog annotation: Hit_ID=Q1SSE9; Match level="QueryCoverage=80%, HitCoverage=73%, E-value=0.0, Identity=38%"; Hit description=N-6 Adenine-specific DNA methylase
MASSSFAPDDQTDADFFDKLVDDDDPATDLPRAVSATSVADDPPPVLEPQVPAPAPSEGSGKGGAGVHTAVKQVQWASFGGGVDDGPDPFADLSGGAGDDDGFLGNTAGTQAALDHAAEVTDQDFFAGSSSSDQQNVHGQHDQGRGSAAVDSADPKSLEAMYPGWKYDEASQQWYQLDGSVNSTGNAAQALDDSAQNAHHHQQQLDAAYLHNSAHAGLGTIAEESTTAAGAANSWGQGAAPEYPPSMLFYAEYPGWYFDTNTQQWHSLESYQQAAVQAGTSSTGQTVVASDDVVATSSLTGHNAGQTEDLVAHNQVTQRNSSSNSFTHQNQWQTTDALGNNVQSESLASSFYGFEQHMNAETTSSSTSQQTGFHTAETITDHYGGRKAFESSSLQSGYSSSDSQQSSHKAFEPSTGYQAGYNGFEPASGHHTAFEPAMHNQSGYKAFDPSTGHHSASWGFMPSTGQQTDFKGSRASTVHQAGYEEFEISRGYNTNFKAFESSSSQNAGYNGSQPSSGHQPNYMGFDTSANHHGYTDVNGVASTQGFVPMQTTYQGQKQANATSQGHLSNSYLGTDNSMNFNQQQFLGANASNLQFGHSPHEGRSSAGRPPHALVAFGFGGKLIVMKETTSMPASFNSGNQGNSSSTVSVLNLLEVVFDKVDPSSVTNGSALSYFHALCRQPVPGPLVGGSAASKDVNKWLDEMIARYESSSSEFHRGDTRKLLISLLKILSQHYGKLRSPFASDPSQEETDGPEMAVTKLFSSCKRSTVHMGDYGSLVPCMKSIPSESQMQAVAQEVQSLLVSGRRKEALHCAQAGQLWGPAIILALQLGDKFYVDTVKKMAHFHFVSGSPLRTLCLLIAGQPADVFNVENNVNSDYGASHQPVEPGPNMLDDWEENLAIITANRTEGDVLVITHLGDCLWKEKNEVAAAHSCYLVAELNIDSYSESARLCLIGADHLKCPRTFASPEAIQPYKLIYAYMLVEVGKVSDSLRYCQASIKVLKASGRAPELEVWKQLFSSLEERIRTHQQGGYGTNLAPGKIVGKIFTSLDKSISRMMGTPSAPLPPLPHGSFSDKESHSIPAAAKFVNSQSSMTEIAEDSGGTGRKIAHNRSVSEPDFGRSSKQGAGGSDGTQSSASGSSSSRFGWLVQKTMGLVSKSHRQAKLGDQNKFYYDEKLKRWVEEGAAVPAEEPPLPPPPTKPSFQNGMLDNKLNGPMSVSHAPNGVTEWKSSNSSEQGLGMPPIPPSQNQFSARGRMGVRSRYVDTFNRSGASGAMPSYNKPAAPSMTPPAGAKFFMPTAAPVAADQMIPHQAAEIHSETIHQDERSASPPAETSFSSTPPPTQFPSPVQSTIYRQSSMENISTPYQGSGVSSLSNDSSFSKSRAASWSGTYSEQFNAFAGTISPDRQTTHSPLMPGKPPHSRSNSNSSGHLNGLAEDLHEVEL

SEQ ID NO: 46646 - protein, 510 aa, Zea mays
  Coding DNA Sequence Number=SeqID_4867
  Gene Ontology: Mol. function=L-lactate dehydrogenase activity; Cellular component=cytoplasm; Biological process=tricarboxylic acid cycle intermediate metabolic process
  Homolog annotation: Hit_ID=P29038; Match level="QueryCoverage=68%, HitCoverage=98%, E-value=1e-173, Identity=91%"; Hit description=L -lactate dehydrogenase
  Pfam annotation: Domain name=F420_oxidored; Domain location=198-392; Score=-50.7; E_value=0.048; Accession=PF03807.7; Description=NADP oxidoreductase coenzyme F420-dependent
  Pfam annotation: Domain name=Ldh_1_C; Domain location=339-508; Score =122.3; E_value=1.4e-33; Accession=PF02866.8; Description =lactatemalate dehydrogenase, alphabeta C-t
  Pfam annotation: Domain name=Ldh_1_N; Domain location=197-337; Score =246.7; E_value=4.9e-71; Accession=PF00056.13; Description =lactatemalate dehydrogenase, NAD binding do
  Pfam annotation: Domain name=NAD_binding_3; Domain location=203-311; Score=-15.7; E_value=0.1; Accession=PF03447.6; Description =Homoserine dehydrogenase, NAD binding domain
  Pfam module annotation: Pfam domain module=F420_oxidored::Ldh_1 _C::Ldh_1_N::NAD_binding_3; Domain location=198-392::339-508::197 -337::203-311
MTTPPQAGDRKEGALKMLTTGMPQLEWAWCDFARDSGARSKPPREKGKGWVGLCLQVGREEKQHADALVQIICPYPVCLKRKQRHFGFSSLEKDRGEVVWWVTVVNRPYLLQFSEALNRTLRNPIRGDLTQPDHITHVIPSHSARNSSTTGGKKKMKKATSLSELGFDAGDASSGFFRPVSGDSSTPTSQHHRRRLTKVSVIGAGNVGMAIAQTILTRDLADEIALVDAVPDKLRGEMLDLQHAAAFLPRTRLVSGTDMSVTRGSDLVIVTAGARQIQGETRLDLLQRNVALFRKIVPPLAEQSHDALLLVVSNPVDVLTYVAWKLSGFPASRVIGSGTNLDSSRFRFLLAEHLDVNAQDVQAYMVGEHGDSSVAVWSSVSVAGMPVLKSLQESHRCFDEEALEGIRRAVVDSAYEVISLKGYTSWAIGYSVASLAASLLRDQRRIHPVSVLARGFHGIPDGNDVFLSLPARLGRAGVQGVAEMELTEEEAKRLRRSAKTIWENCQLLGL

SEQ ID NO: 46647 - protein, 62 aa, Zea mays
  Coding DNA Sequence Number=SeqID_4868
MNHSKNLKEKDADEEVPEEEMLDYEDQESKTNMTLSNVKGDSLIKAKGFLIIKITGPPPMAS

SEQ ID NO: 46648 - protein, 77 aa, Zea mays
  Coding DNA Sequence Number=SeqID_4869
SVKLVYNPVANWYTTPWQTGIQPRGSDGGSDGSKGDGGDDSDGGKGDGSSGDGGKGDGSGDKGDGNGGKAIGIMPLV

SEQ ID NO: 46649 - protein, 120 aa, Zea mays
  Coding DNA Sequence Number=SeqID_4870
  Subcellular localization annotation: CTP_CleavageSite=62; ConfidenceScore=5.21e-01
MTPNTTFVPEIPRGNHILSSSSLKSSSNHLFIVIIQSPLSKRVSPEVSKDLTKRLNSTTKARDSAIQAKELALTEKAKSMHQNEELKKSLVKFKKKLEKERSTNSILANKFRFALKEVDG

SEQ ID NO: 46650 - protein, 109 aa, Zea mays
  Coding DNA Sequence Number=SeqID_4871
MRHRPPAKPPEPRPPRLAHSSHSQSVPAVQLASPDSHEAPQVLGPGRASLETPNHPCRTSFAHQRTWTGKIRKTIEINEQWMNIFFLVHLSNEEHRKNTKNPSSEQIQG

SEQ ID NO: 46651 - protein, 127 aa, Zea mays
  Coding DNA Sequence Number=SeqID_4872
MAKAEGTNIETDSKQIASEITTVGNMKRGRKRQHLSHRLAGKTVEKLLEILLGAYFMMRGSAMVVEVDRHRIVRPGVSIVVRDKASAVGEVDKLLRSLHLDARLKDDEGVMYAEKPDWRPELEEEPL

SEQ ID NO: 46652 - protein, 120 aa, Zea mays
  Coding DNA Sequence Number=SeqID_4873
MPPAPPQGIPSAGGDPDGYGDNDDGSSSHSMELSEEQEPEGWIVRPITRDATRGCHFHDAWLCYEDFHIHFLMLKDCKMSENRRRGGRCAQQEQQAPQEESPQQQLPSPPSMTIEQMFLM

SEQ ID NO: 46653 - protein, 342 aa, Zea mays
  Coding DNA Sequence Number=SeqID_4874
  Homolog annotation: Hit_ID=Q18DN4; Match level="QueryCoverage=48%, HitCoverage=1%, E-value=2e-11, Identity=30%"; Hit description =Halomucin precursor
MAASGYSGSAPITDQGFEGWPPKEGQRRLHHSDCSATRQSKSDRQSGLAKGATANSAPPDPRARTRAKTRKTANSAPPDPRARTRAKTRKTANSAPPDPRARTRAKTRKTANSAPPDPRARTRAKTQKTANSAPPDPRARTRAKTRKTANSAPPDPRARTRAKTRKTANSAPPDPRARTRARTRKTANSAPPDPRARTRAKTRKTANSAPPDPRARTRAKTRKTTKLRLARPQGSDSALASAERLPPRPTPWLGLGHGNRRQTQPRLRRKPHVALPRAQTATSTGGAIIIPPRIDSGQRQQGLDRSNSCPSIRLRRTSNNHDITPAGCPDLSGCHIGMYLGR

SEQ ID NO: 46654 - protein, 339 aa, Zea mays
  Coding DNA Sequence Number=SeqID_4875
  Homolog annotation: Hit_ID=Q5Z5Y2; Match level="QueryCoverage=93%, HitCoverage=90%, E-value=2e-97, Identity=60%"; Hit description =Putative LRP1
  Pfam annotation: Domain name=DUF702; Domain location=107-270; Score =264.7; E_value=1.9e-76; Accession=PF05142.3; Description=Domain of unknown function (DUF702)
MAGFSLRGGGGGRGGDRGGDHPIGADSLFLYARGAAAAAADTAASGGGGGGGIGFQLWHPHQQATAAAVPHTSQFFSSGAVATGVVLGFSSHDGAGGIGGAGGAGAGGGRAGTSCQDCGNNAKKDCTHMRCRTCCRSRGFSCPTHVKSTWVPAAKRRERQQQLAALFRGAANSNSAAAAAAAAASKRPRELVRSLGRLPSANSAMVTTTTSSGDGGGGRFPPELSVEAVFRCVRIGPVDEPDAELAYQTAVSIGGHTFKGILRDHGPADDAAVGQLPPSSAEYHHQLTAGQAREGSSPAGSSEAAATVATSAAVLMDPYPTPIGAFAAGTQFFPHNPRT

SEQ ID NO: 46655 - protein, 180 aa, Zea mays
  Coding DNA Sequence Number=SeqID_4876
MGGLLTSSGDSGALEHDKDAGRPRVDGIRASAAWGETAGERGPGEPEGLGANWKMSHIAGEEAELTEATDVAGAWRWPRNDDGAPRARVQSGRESEGVRLGAQLGEGSEWARAPIKGSSARVMAGKRVVVEASTTESVGGRLGKVDPTGQREGRREVRGHGLALIGGDHLSEGGGRAQGA

SEQ ID NO: 46656 - protein, 45 aa, Zea mays
  Coding DNA Sequence Number=SeqID_4877
MEQGAESTQGGGAELPAARRVEEEDREKKKEKVAARGEQSELEFR

SEQ ID NO: 46657 - protein, 67 aa, Zea mays
  Coding DNA Sequence Number=SeqID_4878
  Homolog annotation: Hit_ID=O24587; Match level="QueryCoverage=64%, HitCoverage=7%, E-value=2e-10, Identity=46%"; Hit description=Pol
MGEKKMFTSYDKNKDSDDTIIFGDGNQGKLCHMGYNCLHTNVDITTTSKNVIISDDFLVTLVTSVTD

SEQ ID NO: 46658 - protein, 155 aa, Zea mays
  Coding DNA Sequence Number=SeqID_4879
  Subcellular localization annotation: CTP_CleavageSite=38; ConfidenceScore=5.53e-01
MGPMGLYNSVTGVASSATVRSPKMRQTWSPGSLGSPRRARTGQKDLANSQADYRPQEQDQKRKNDEGKSGIGRNRAWERTSHLGTELGVTWHGTRRLRLAGRQMIATAANSGLRKEEAERGPGGRVEERGNHCGFPVRQAQAKLTVAKALAKVQW

SEQ ID NO: 46659 - protein, 88 aa, Zea mays
  Coding DNA Sequence Number=SeqID_4880
NRQTSFGDQMIQLFEFYEAEDPEHLFGEGKIWGVVRFAVVPSMGLGVCGSLCQDDDEEDGYDYAYGNGKEEGVEVDLQEFQDVDEFED

SEQ ID NO: 46660 - protein, 95 aa, Zea mays
  Coding DNA Sequence Number=SeqID_4881
MEDTPNVIEYTEANVSLKELFPYKALCQPLRYGQPLLGALGHDRALDLGFGSQRAISRLKVNNKVQKAMMSTGHEDTPHGREATSVYKATLPLDV

SEQ ID NO: 46661 - protein, 68 aa, Zea mays
  Coding DNA Sequence Number=SeqID_4882
  Gene Ontology: Cellular component=extracellular region; Biological process=sexual reproduction
  Homolog annotation: Hit_ID=Q7XBA3; Match level="QueryCoverage=98%, HitCoverage=65%, E-value=5e-17, Identity=60%"; Hit description=Group 3 pollen allergen
MASRSSIVLAMEILVALFGVVGKGSKPSHLILTPNIATISNMENKEHSNNDFSFTPKEGPTGTWMFDT

SEQ ID NO: 46662 - protein, 166 aa, Zea mays
  Coding DNA Sequence Number=SeqID_4883
MVSSKKGKKGRHHADGKWKHPPGPPSKDYRDSEYSEEVSSEYDRSPTPASPVASSEDSDDSMGLSIAARGDPSSTRGLVEEIEDSSDSEEGSGDEGNGVEGNSSSDDDSGKGSGDNISEGSGDGDGDRSDGSGDDCDGKGDGQGDGDDEGGSNGGDGKAGGIMLST

SEQ ID NO: 46663 - protein, 124 aa, Zea mays
  Coding DNA Sequence Number=SeqID_4884
MAHRIALPTSGGGRAKSGEGEFASPLRQCLGSSSEKLHGFMGKRSRGWGEAEGQQKGLATTAVLGQRWRAVVLAFHGELRRAGQGDHARGTRCCGQSALGRPDTASSTWLFASARVQTLIGWRS

SEQ ID NO: 46664 - protein, 85 aa, Zea mays
  Coding DNA Sequence Number=SeqID_4885
  Subcellular localization annotation: CTP_CleavageSite=72; ConfidenceScore=5.28e-01
MGTNSTFATTLATTTRIALGTSRGLDQMQLKTNVKSKRNSDWNNALNKIRITAHRRRQESALVARSIVQCIVDNQRRSGAAIAGF

SEQ ID NO: 46665 - protein, 84 aa, Zea mays
  Coding DNA Sequence Number=SeqID_4886
MARVVCTLCGKRLDGGVSVLSVGVNPGLFLSMALRNKRNVEGAAVKREIVKLRSEVSKLRFDCEEKEKSFKILEKDFIESRTKV

SEQ ID NO: 46666 - protein, 136 aa, Zea mays
  Coding DNA Sequence Number=SeqID_4887
MVLSVAARAYCRSIERAGLSGSDDSEKVSSEEMEDSEEWSDVEGNDSEGDCSIGDDDGKGSNDDGGGGSGNDGKGKGSYGKGNGEGGNGDGKVEGKGDGKGDSSDGDGGDGKAGGRCWHKYYYSVAVVVVVSCRIM

SEQ ID NO: 46667 - protein, 159 aa, Zea mays
  Coding DNA Sequence Number=SeqID_4888
  Subcellular localization annotation: CTP_CleavageSite=55; ConfidenceScore=5.44e-01
MNTNVAGFPPLSCRSPAASLPPFALGLALDPSGLGHATTFTRRPRDPPLRRITRKASLEVSGGIHPKGGPNSSPHFNPAAELHCCVGREVTAPIQGKTTPIVFSYASSTRRVIWEGYWNRWSLLRGSLALFHWAQGRHRPRPCPELEDNRGSLDVPWAV

SEQ ID NO: 46668 - protein, 218 aa, Zea mays
  Coding DNA Sequence Number=SeqID_4889
  Homolog annotation: Hit_ID=Q6Z797; Match level="QueryCoverage=93%, HitCoverage=54%, E-value=4e-64, Identity=64%"; Hit description =Putative BRI1-KD interacting protein
  Pfam annotation: Domain name=TPX2; Domain location=25-75; Score=67.1; E_value=5.7e-17; Accession=PF06886.2; Description=Targeting protein for Xklp2 (TPX2)
MKNSQMVRVQKPRKVGSTPSYGFTFKCDERSEKRREEKIHARELEISNLQAKSKETEEAELKMLRKSLNFKATPMPSFYKEPTPAKVELKKIPPTRAKSPKLGRSKNKSISETEENTTTDQPARLSLDEKVSQNGVKKPTPSSSAKKPQRKSLPRLPSEETCPLDATSRQLKNNKLDEVNAQETGSATGQVQGSETETDSVQSATQAGANPDEQSVAQ

SEQ ID NO: 46669 - protein, 35 aa, Zea mays
  Coding DNA Sequence Number=SeqID_4890
MAGFTEFGPQNSAAMVSEGISGGTWHHNEGFRSHQ

SEQ ID NO: 46670 - protein, 225 aa, Zea mays
  Coding DNA Sequence Number=SeqID_4891
  Gene Ontology: Mol. function=cAMP-dependent protein kinase regulator activity; Cellular component=protein serine/threonine phosphatase complex; Biological process=protein amino acid dephosphorylation
  Homolog annotation: Hit_ID=Q6K3D4; Match level="QueryCoverage=80%, HitCoverage=16%, E-value=2e-68, Identity=72%"; Hit description =Putative PKG-Ib
  Pfam annotation: Domain name=Pkinase; Domain location=9-218; Score= -44.5; E_value=6.5e-06; Accession=PF00069.15; Description=Protein kinase domain
VKLDLPFGYCRLLRPTTGVLDDDTLFLVTSARPQQGINRAESLCSGDQSWVVRLLSTTKARYLEAAAFDDLCLRHDEVKKSIIYRGVSADILMLDRSGHLQLVDFRFAKKLEGQRTYTICGIADSLAPEIVLGRGHGFPADWWALGVLIYFMLQSDMPFGSWRESELEPITKIAKGHLVMPVSFSAEVVDLITKLLVIDENARLVTSGAEAVKKHPCFDGTDWER

SEQ ID NO: 46671 - protein, 88 aa, Zea mays
  Coding DNA Sequence Number=SeqID_4892
MNVSVLFIFNTVDIGSITNILYLQKSWFPEQGFGVMGHNTPPLVIPAPGGAYAGEEATPGENPNQLHDFVNEFFASEGSGHNFNDSDM

SEQ ID NO: 46672 - protein, 59 aa, Zea mays
  Coding DNA Sequence Number=SeqID_4893
MAPEAGLGCCQPHPGGWHSSRSRAGGTVFLSACADGDYQPSLGVLGVPLIMVPEVAPEP

SEQ ID NO: 46673 - protein, 202 aa, Zea mays
  Coding DNA Sequence Number=SeqID_4894
  Gene Ontology: Mol. function=transcription factor binding; Cellular component=intracellular; Biological process=regulation of transcription, DNA-dependent
  Homolog annotation: Hit_ID=Q7XDQ3; Match level="QueryCoverage=89%, HitCoverage=74%, E-value=1e-78, Identity=81%"; Hit description=Ras -related protein Rab-18, putative, expressed
  Pfam annotation: Domain name=Arf; Domain location=10-166; Score= -103.2; E_value=0.086; Accession=PF00025.11; Description=ADP -ribosylation factor family
  Pfam annotation: Domain name=Ras; Domain location=17-168; Score =155.9; E_value=1e-43; Accession=PF00071.12; Description=Ras family
  Pfam module annotation: Pfam domain module=Arf::Ras; Domain location =10-166::17-168
MDPEVSPLGRVFERVKAAVGGVDFKIKFLTVGGKKLKLTIWDTEFILLFSQYCKWFENQAGQERFRTITSSYYRGAQGIILVYDVTKRESFSNLADVWTKEIEANSTNKDCIKMLVGNKVDKDDERMVTKEEGLAFAEEYGCLFLESSAKTRENVEKCFEELALKILEVPSLLEEGSSSVVKRNILKQKQESDAKNGSGCCQ

SEQ ID NO: 46674 - protein, 242 aa, Zea mays
  Coding DNA Sequence Number=SeqID_4895
  Gene Ontology: Mol. function=nucleic acid binding; Cellular component= spliceosome; Biological process=nuclear mRNA splicing, via spliceosome
  Homolog annotation: Hit_ID=Q7XDP6; Match level="QueryCoverage=65%, HitCoverage=57%, E-value=2e-78, Identity=75%"; Hit description =Splicing factor 3B subunit 4, putative, expressed
  Pfam annotation: Domain name=RRM_1; Domain location=68-140; Score =98.0; E_value=2.9e-26; Accession=PF00076.12; Description=RNA recognition motif. (a.k.a. RRM, RBD, or
MTTRIAPGVGANLLGQHSAERNQDATTYVGNLDPQAIKTLNMIKLYGKPIRVNKASQDKKSLDVGANLFIGNLDPDVDEKLLYDTFSAFGVIVTNPKIMRDPETGNSRGFGFVSYESFESSDQAIEAMNNQHLCNRPITVSYAYKKDTKGERHGTPADARATNLARSTFYAASHAIATPVQAPNEATTTKYDASSGWHGKAATSSHWYVSTTYVDATPTPTTSRWWNASASHVYATTASTTI

SEQ ID NO: 46675 - protein, 1613 aa, Zea mays
  Coding DNA Sequence Number=SeqID_4896
  Gene Ontology: Mol. function=nucleotide binding
  Homolog annotation: Hit_ID=Q2QQZ4; Match level="QueryCoverage=74%, HitCoverage=99%, E-value=0.0, Identity=47%"; Hit description =Expressed protein
  Pfam annotation: Domain name=zf-CCHC; Domain location=1562-1579; Score=16.2; E_value=0.0021; Accession=PF00098.13; Description=Zinc knuckle
MASSSSAARAHVERIRRERFYIGREERNPLAEDIHQAVSYLSEELYSKDVHFLMELIQNAEDNEYPLDVSPALEFVITEKDITGIGFKSVFLVSSQPHIFSNGYQIKFSEKPSAVCDIGYIVPEWVDGKPNIDDIRTVYGPSRSLPTTVIILPLKTDKILAVKKELSSTHPEILLFLSKIRQLSVKEMNNDPKASKISQISISSEVDYWSSKDIDAESYTLHLAMQENSKGETEECTYYMWRQKFAVQPDCRIQKRMEVDQWVVTLAFPHGQRLSRGAKSPGVYAFLPTEMVTNLPFIIQADFLLASSRESILFDSQWNRGILECVPSAFINAFGALLKSSRDAPHFALPPIFRFLPIQESSISLFDSIRLSIKTKVQAEDIMPCEPCTAQKVFCKPAEVSRLDSAFCRILNLAQKQGIGLQNLSSYGTFVLSSYLDNLEYDDVLEFLGVGYANREWYTFYGVDITDFRSELRLFGVVVDFKRNYQLVVDNFRFSIDTITPGATILMLNCIRYVEECHDFVERLKDLRWVKTNVGFRAPHETFLIDDDWKCLLEVIDKTPLLDLEFYGDEIKLYKEELCKTGIIAGFKEASKKIVCHVKKLVNTSITKELAFALLKCYSDLTTRHGRLPVALANFMQHERWLHTTFGFRSPKEAILFSSEWESIALVSCLPFVDDSDAQYGLGKEIYCYSNELKALGAKTRLEQGAAFVISGLRIPTDPSAVTPQAVISLLKCIRIWRQNGSDLPKSFMSAINLKWVKTTAGYRHPNGCVLFGSVCSSHVYRDDGPFVDEVFYGQELVSYESELQKIGVNVDPRAGCACALMAQHLKGLSNADAISRIYSYLEVYRWKPRFTSDDWIWIPHAANQGQWVNPASCVLYDTHGLFGSQLYVLVKWYSSKLLRYFNTAFGVKHRPTVSDYCKLWSMWQGSNSTLTQKECVAFWEFFGKNWSTDMGKFIAGCVDKVPVSSGDQILLLEKQDVFIPDDLLLEDLFKKQAQKPLFVWYPSTSLPCLSPARLNDIYSSIGVQKISKSVVSNQYDHLEIESVTLVHKGTVIKLGLLKIVLAFLTDPILDISVEKRYEMVTSLTNVAVYETRGPLNVSYQVGLSSGRSLHVTCARFFRWERESSRLFVTEADEPGSMTYAMKMEYASCFAEEISKGLLSENKEQIPALAELVRTGFLLEFDVPAVQILLNLKNLRLFEQDEQFLLKLSQHCDDGLGEHAKRDMVTEEKAGSLGKKIEERTPSKEAGDKHNKHKEESADSIKSHRKGGKKKKKMKKVVYYETDSSSPSTFGAESTSSKRQERKKYSNMPLRYPRISKRAPLLFVPLEKPPYFDGEDYCMWSDKMRHLLTSLHESIWDIIEFGVQAPHVGDEDYDSDESAQIRHFNSQATSILLASLCREEYNKVQGLKSAKEIWDVLKMAHDGDEVTKITKRETIEGELGRFVLNKGEEPQAMYNRLKTMVNQVRNLRSNKWEYHKMVKVILRSLVFHSKHIVNLEQGATSIPEVHLVAFKAMEEKKEEPTPNRLPIDASKLDNEEMALIIKSFRQILKQSKGKDYKPHSKRVCYRCGKSSHFIVKCPYTSDSDRDDDKKEKKKMDKKRYYNKKKGGEAHIGR

SEQ ID NO: 46676 - protein, 106 aa, Zea mays
  Coding DNA Sequence Number=SeqID_4897
MGLTRVMVRSQPIRVRVTRGLTSSHKIIVSQQEPRRQKKVTSQIIYIEELSWCGAQERWSMAEVKVMRARADRPGAVKGECWVLTDGSEQPGDQPQWLTHLGHALM

SEQ ID NO: 46677 - protein, 127 aa, Zea mays
  Coding DNA Sequence Number=SeqID_4898
SPIPFYCECYTMRIKRGSRSRPHTGVWNSDDAQSTVRLNLRYNKRPVEKFRRLRSKIPQPERMYGSPEVKRVPPDSHTAKAMWRRSSGIALSAQLGISCARTESSAEVGEEAADKWGPWIGDRVAGE

SEQ ID NO: 46678 - protein, 60 aa, Zea mays
  Coding DNA Sequence Number=SeqID_4899
MATRWNTDEEFPATRQRPMKKIVDGQAFENKSPTIPDKSKDNGLEEESTSVDQDVDVPRW

SEQ ID NO: 46679 - protein, 180 aa, Zea mays
  Coding DNA Sequence Number=SeqID_4900
MKFSKLRMASRDANQSPRMTTRFGSLDFSFNEEGKAVKAAEARPPPRNLDMTTRASDGPRIEYTPGATICFGSLYFVINLEGDMVREAPVRELFASYDVEASSYYGSSSSGSGAFLPRLRHAPVVIAALVVCDVSPPPTTWSSWGWPTAAGTSSSTHFTWTRTRILVPLRAATKNFPVAS

SEQ ID NO: 46680 - protein, 82 aa, Zea mays
  Coding DNA Sequence Number=SeqID_4901
MALEEDLGDRTKEEEKLLVSLQDQIRFRRGEFIEVQSYLEELEKERHLLSEVVRAMCGHFGAPSSAGSKLLVSCLKGLTCWF

SEQ ID NO: 46681 - protein, 124 aa, Zea mays
  Coding DNA Sequence Number=SeqID_4902
MAQAHVAARFMTEVAPPQVVSVMRQRRKKVPRSLDTIAEDDDREQQLACGPPSDHGFAAAWSLPTPTPTPPQPRERAGGFVARGLVGKYLSDAHDGCQASGWEGGHMLGHRRAVHAQELHEVGA

SEQ ID NO: 46682 - protein, 200 aa, Zea mays
  Coding DNA Sequence Number=SeqID_4903
  Subcellular localization annotation: CTP_CleavageSite=48; ConfidenceScore=5.08e-01
MTPRVLGASLLVLLLSVPINSACRAAPPHSTPQLGLLDSASARLGAPPAQLGSVCAIDGDVASALSALPVGALTAVEPLFMLFLAARISGLPPIAHRTLSPAVVPLHAVGEGYLRRSQSSCWSGGNRMIVSILVVAPSDGESHQLQQNFSSEASLRRVTTRVVDSFTPPPNPRGIGLDRGFIKSWSSICDPTVTVPYPFG

SEQ ID NO: 46683 - protein, 118 aa, Zea mays
  Coding DNA Sequence Number=SeqID_4904
MGADPRRGETLEPGFLTIGIKALHPWRKNGREDDENRSLKEARKGAQIFFITAPSFKPSVQPRLVIEAFTMKAKEGGGHGRGEDIASQTNGGNRNWSSLVASGLVEARLGRLEKFAQT

SEQ ID NO: 46684 - protein, 96 aa, Zea mays
  Coding DNA Sequence Number=SeqID_4905
MTAVGPGQCRRSTRHSQSCARSRRRALELRIGVHGGVRVEEPVDRKSGEQREDKKHKDRHRLDHGSHERKVVLEAPTTAEGTVRQAHGFLKENMVD

SEQ ID NO: 46685 - protein, 233 aa, Zea mays
  Coding DNA Sequence Number=SeqID_4906
  Subcellular localization annotation: CTP_CleavageSite=65; ConfidenceScore=5.12e-01
SYTLPPRATLLSPCSRRAHALPLAGSAVPPDHCSRDGAPRPSPAPARRRPRPTLTRGGAPPPPARAAARGPRPLPARRPPGPAPCFPSVARPPARPLRAAARPRPASPRGGARGPARPPLASAPAAPPCSPRGARPRPRPRPGLPAAALAPVPAPCAAARPRRAPGVARRGPGAVRPPARPLAGSTAPPVQPPSAPARPLPSCPGPVAPPPSRPRPTVSSLARARDDYLLVDS

SEQ ID NO: 46686 - protein, 188 aa, Zea mays
  Coding DNA Sequence Number=SeqID_4907
  Gene Ontology: Mol. function=electron carrier activity; Cellular component=anchored to membrane; Biological process=electron transport
  Homolog annotation: Hit_ID=Q6H7T2; Match level="QueryCoverage=54%, HitCoverage=48%, E-value=3e-29, Identity=66%"; Hit description =Phytocyanin protein-like
  Pfam annotation: Domain name=Cu_bind_like; Domain location=10-80; Score=32.1; E_value=2.6e-08; Accession=PF02298.8; Description =Plastocyanin-like domain
MAGACPPPAPSPSTLGRRGRVFVYPKDQDSVLLVEPADYNACDTSSYVRKFDDGDTVVTLDRSGPLFFISGVEANCRANEKLIVMLHPAPAVVARSQGRVAAPGLCSHNDTGYAAAPCSERVVACSGVVNPTAAICPAGTAAAPCFERVVACSGIDDPAAAICHGECPAGTAAALGELSVSERTWSNG

SEQ ID NO: 46687 - protein, 88 aa, Zea mays
  Coding DNA Sequence Number=SeqID_4908
  Subcellular localization annotation: CTP_CleavageSite=45; ConfidenceScore=5.25e-01
MRPSSLFEPRPCPHSLPRLISHSPALSRALPTPSDLAEDPRSPPRSTSSSEATPSDPELRPKTTSSLRFPSVLLETSQSNNLVKASVR

SEQ ID NO: 46688 - protein, 157 aa, Zea mays
  Coding DNA Sequence Number=SeqID_4909
  Homolog annotation: Hit_ID=Q6QP51; Match level="QueryCoverage=39%, HitCoverage=28%, E-value=8e-14, Identity=62%"; Hit description =Putative growth-regulating factor 1
MTLGTSDTWPRLGLRSRGTLGHFRDQQERFCNGVPSEGGIEPSDPIEWDRVQQITCRVRLTAVESSLRRHRKLRLARPWALASGEVSASPDPRARPQTSTSEGGLRLARPQGPASTSTSEGITSSPDPGLGLRRSLRLARPWARADHAAGGTSLPYP

SEQ ID NO: 46689 - protein, 780 aa, Zea mays
  Coding DNA Sequence Number=SeqID_4910
  Gene Ontology: Mol. function=catalytic activity; Cellular component =intracellular; Biological process=metabolic process
  Homolog annotation: Hit_ID=Q8W0Q5; Match level="QueryCoverage=99%, HitCoverage=100%, E-value=0.0, Identity=92%"; Hit description =Putative vegetative storage protein
  Pfam annotation: Domain name=PPR; Domain location=167-201; Score =25.1; E_value=0.00025; Accession=PF01535.11; Description=PPR repeat
  Pfam annotation: Domain name=PPR; Domain location=272-306; Score =29.9; E_value=9e-06; Accession=PF01535.11; Description=PPR repeat
  Pfam annotation: Domain name=PPR; Domain location=374-408; Score =43.5; E_value=7.2e-10; Accession=PF01535.11; Description=PPR repeat
  Pfam annotation: Domain name=PPR; Domain location=475-509; Score =41.7; E_value=2.6e-09; Accession=PF01535.11; Description=PPR repeat
  Pfam annotation: Domain name=PPR; Domain location=510-544; Score=9.7; E_value=0.53; Accession=PF01535.11; Description=PPR repeat
  Pfam annotation: Domain name=PPR; Domain location=546-580; Score=5.1; E_value=1.9; Accession=PF01535.11; Description=PPR repeat
  Pfam annotation: Domain name=PPR; Domain location=66-100; Score=30.0; E_value=8.4e-06; Accession=PF01535.11; Description=PPR repeat
  Pfam module annotation: Pfam domain module=PPR::PPR::PPR::PPR::PPR::PP R::PPR; Domain location=167-201::272-306::374-408::475-509::510 -544::546-580::66-100
MGLPRGHLRPFSAATAARLHRPPSGSISYEVKDKKQWQQELEQHISRGQLALARQVFDRIPAPDARAYNALIRAYSWLGPFHAAIDLYRSMLRFRVAPNKYTFPFVLKACSALVDLRAGRTIHAHAAAAGLHTDLFVSTALIDLYIRCARFGPARNVFAKMPMRDVVAWNAMLAGYANHGMYHHAIAHLLDMQDHGGLRPNASTLVSLLPLLAQHGALFQGTSIHAYCLRACLEQNEEQVLIGTALLDMYAKCKQLVYACRVFHGMPVRNDVTWSALIGGFVLCDRMTEAFNLFKDMLVEGLCFLSATSVASALRVCASLADLHMGTQLHALIAKSGIHADLTASNSLLSMYAKAGLINEATMFFDEIAVKDTISYGALLSGCVQNGKAEEAFLVFKKMQACNMEPDIATMVSLIPACSHLAALQHGKCSHGSVIIRGLALETSICNSLIDMYAKCGKIDLSRQVFDKMPARDVVSWNTMIAGYGIHGLGKEATTLFLGMKNQGFAPDDVTFICLIAACSHSGLVTEGKHWFDTMTHKYGILPRMEHYICMVDLLARGGLLDEAYQFIQSMPLKADVRVWGALLGACRIHKNIDLGKQVSRIIQKLGPEGTGNFVLLSNIFSAAGRFDEAAEVRIIQKVKGFKKSPGYSWIEINGSLHAFVGGDQSHPCSRDIYHELDNIMVDIKKLGYQADTSFVLQDLEEEEKEKALLYHSEKLAIAFGVLSLNEDKTIFVTKNLRVCGDCHTAIKYMTLVRNRTIIVRDTNRFHHFKNGQCSCGNFW

SEQ ID NO: 46690 - protein, 47 aa, Zea mays
  Coding DNA Sequence Number=SeqID_4911
MERMASTCKNIFIWSKSGILLQSWLRINAYVGVLTEDPLTGHMPRHG

SEQ ID NO: 46691 - protein, 60 aa, Zea mays
  Coding DNA Sequence Number=SeqID_4912
MANSMAGKRPRIHEQRRGNGSEKVSGGLEKLRGWLNDSEDIHSHESVLEYNYMRRHQWAR

SEQ ID NO: 46692 - protein, 414 aa, Zea mays
  Coding DNA Sequence Number=SeqID_4913
  Gene Ontology: Mol. function=protein binding; Biological process =protein metabolic process
  Homolog annotation: Hit_ID=Q6Z517; Match level="QueryCoverage=99%, HitCoverage=39%, E-value=1e-171, Identity=74%"; Hit description=101 kDa heat shock protein; HSP101-like protein
MQKAKIAGISDIESFKRLLKALTEKVSWQSDAASAIAAAVIQCRTASGKRRNIGTRGDIWLLFVGPDQAGKRKMANALSEQMVNAEPVVINFGGDSRWGKDGNGRPNPGFWGKTSLDRVTEAVRQNPCSVIVLEGIDQVDAVVRGKINRAMDTGRLPDSRGREVSLGNVIFVLTTDWLPEELRRPKFDTPLQDEGKMLEAAHSDWQLELSIGDKQQLKHQADWLCNDARPAKVARELSGGHGLSLDLNLAVGASDDTEGSRNSSDLSVEQEQEKGHVAVKCSTPAPDSDLLNLVDDAIVFRPVDFAPFRKAVTDCVSAKFDSVTRGSSSFRVDEDAVDRMAASVWLTDEKLEDWAEEVLTPSIERLWRNVKRCSGRAVVRLAAVAVTADRAMPRWGGGREGRLPGTVPIAVDGM

SEQ ID NO: 46693 - protein, 231 aa, Zea mays
  Coding DNA Sequence Number=SeqID_4914
  Gene Ontology: Mol. function=4-coumarate-CoA ligase activity; Cellular component=peroxisome; Biological process=phenylpropanoid metabolic process
  Homolog annotation: Hit_ID=P17814; Match level="QueryCoverage=95%, HitCoverage=35%, E-value=2e-85, Identity=74%"; Hit description=4 -coumarate--CoA ligase 1
MTEAGPVLSMCLAFAKEPFRVKSGACGTVVRNAELKIVDPDTGRSLARNLPGEICIRGQQIMKGYLNNPEATRNSIDAGGWLHTGDVGFVDDDDEIFIVDRLKEIIKYKGLQVAPAELEALLITHPGIADAAVVGKQVEPEIGEIPVAFVARAKGRSDDGLTEDDVKQFVAKELSSHDPPLRLTESVLQVVYYKKVREVVFVDRIPKAPSGKILRKELRKRLQQHQHQQAV

SEQ ID NO: 46694 - protein, 73 aa, Zea mays
  Coding DNA Sequence Number=SeqID_4915
MAPWWPRCAPDPPAAQPKYSPVARKLGLPFHEGPTRLLSLQPRRYQNRNHGELLYSKSDSAQQITMCRAFLVT

SEQ ID NO: 46695 - protein, 114 aa, Zea mays
  Coding DNA Sequence Number=SeqID_4916
MAPWWPRCAPDPPAAQPKYSPVARKLGLPFHEGPTRLLSLQPRRYQNRNHGELLYSKSDSAQQITMCRAFLGRWIEAIDLLMDGSDLKMVYPWPLIRFGRPGLHFAYRFALRDL

SEQ ID NO: 46696 - protein, 88 aa, Zea mays
  Coding DNA Sequence Number=SeqID_4917
MGERLGGAGRRVPLAGRRGQACAPCADDLEGREAGTGRGATATVKENIAYARLGVHILETTSQAKDGGKKSFEGVELIDGNLDQVLET

SEQ ID NO: 46697 - protein, 114 aa, Zea mays
  Coding DNA Sequence Number=SeqID_4918
MAMMGSTLEKMYLCQVPNFVFEMIKLKPVSLSESIKDRLDVGLLTEDPLTGHMPHHGKTNMQWEWRDGESSVYPPWQEAGRWCICALGWREPGLVLRTPVASLHMQGLAAPYVV

SEQ ID NO: 46698 - protein, 92 aa, Zea mays
  Coding DNA Sequence Number=SeqID_4919
MAPKRATSKATASIDDAAKTTLLAKNKGKALADTTPKSFEDDAVPTPPLMTLMRNRELGSLNKRSRSCKAKANTTYSADPSCNTPGVTVTKT

SEQ ID NO: 46699 - protein, 123 aa, Zea mays
  Coding DNA Sequence Number=SeqID_4920
  Gene Ontology: Mol. function=hydrogen ion transporting ATP synthase activity, rotational mechanism; Cellular component=proton -transporting two-sector ATPase complex; Biological process=ATP synthesis coupled proton transport
  Homolog annotation: Hit_ID=Q69XX8; Match level="QueryCoverage=69%, HitCoverage=23%, E-value=6e-23, Identity=68%"; Hit description =Putative FKBP12 interacting protein
MASEGKIFTITKTETVYLIHELGMKIAVLKSQNNELRNQFDVLYKHMDGVTNDVERSNELVAILQEELEAKELEVTRLKEETLSQKEGTQEAPAPAPAPVEEGDGAGNDLKPASDPLQVKLES

SEQ ID NO: 46700 - protein, 1265 aa, Zea mays
  Coding DNA Sequence Number=SeqID_4921
  Gene Ontology: Mol. function=DNA-directed DNA polymerase activity; Biological process=transcription
  Homolog annotation: Hit_ID=Q6Z0Z0; Match level="QueryCoverage=93%, HitCoverage=92%, E-value=0.0, Identity=68%"; Hit description =Putative DNA polymerase V
  Pfam annotation: Domain name=DNA_pol_phi; Domain location=231-1008; Score=265.3; E_value=1.2e-76; Accession=PF04931.4; Description=DNA polymerase phi
MAGKKRTQTDRAVLEAVPASDAIRNEAAAAEAPAKKKLAMERKKERKEMDKERHRQSAEFAKPQPPAAESAAPVNPPAAPVAVGPGLHMNVFRDLASPEASVREAAAEALVVELRQVQKAYEKSARNGERDAGDGDTQMEAEKDDGLDNCAPSVRYAIRRLIRGISSSREYARQGFALGLAAVLESIRAIKVEAIMKLIPNLLEHSSSMKGPEAKDNLLGRLFGFGAIERSGRVSRQWSRDKSSPIVKEFVSVVVELGGKKRYLTEPAVAVILDLVRKLPDEAILSEVLEVPGVQDWFNKAAEVGDPDALFLALKLQERTIVQKEIFGKLLPYPFSSDNFFAEQHLRSIAACFKESSFCLPRIHSLWLVITEMLVREATSQHDISTSSGKKHKKNKKASSCEDNRRNLRNFCEVIIEGSLLLSSHDRKHLAFSILVSLLPKLSPSAIQVVLSSKVVQGLMDILSNESSWLYNAGKHFLKELMSVASHDNDRCAAVIINLQKYSGGRFDSMTKTKTVKELLLKFHNVEDCLYLVQNLMALFVDEESVTDEPSDQSQTTDDNSENGPTEEQDLFSQGNADLLKSWVVNTISCVLKNLKLTSKGNSDSEMARCIEEKFQVQTEILKFLAVQGLFSASLGTEVTSFELQEKFKWPKNPISTSLRKECIERLQFLLEDAQKDASLHVPNEVKSNDLGYYLMCFINTVCNIPSVSLFRILSGHDDNAFKKLMAVESMLFHEERKTGPGLESTKMHAMRYLLIQLLLQVLLHPDEYWEAAVDVTICCKKSFPVIAQGDNSSAQESAEHGSQESDEDGFEESDEDGSEDPNEEVSLEFMDVLVQTFLSILPHASGPVFRVFCDDITETGLLDMLRVVKIDLKDRHQTDSDDEDDGRVDIEDDDETVMEDEEVGEIDNVTDGLDENTDDDSTDEDDLDQDDFNKTVPNETKGGGKTETTKDGDDSDDSDGMDDDAMFRIDPYIARIFKERNLPGSDTKQSQLMRFKLRVLTLLDIYLQRNPGKVLVLEVYSFLMQAFVKSHGADGTEQFRQRISGILQRRVFKGNEYPKGDAVEFGKLESLLEKALRLTSRSRYNTVASVAQNATFWILKIINSKHCSEQELARVVDLFRSILSDYDRKKSRLKLGFVKQVAKRNPWIGQKLFGFVLQRAENTKAQYRRNQLLELAEFILKSWADGTSEMFLNHLSQLCGLIQAALSAVAENKSRRKEVRNFCTGILQTVLKLGLKDQFQKALSPETYSLCEAKLGAAFTAFKK

SEQ ID NO: 46701 - protein, 309 aa, Zea mays
  Coding DNA Sequence Number=SeqID_4922
  Homolog annotation: Hit_ID=Q9FML3; Match level="QueryCoverage=84%, HitCoverage=79%, E-value=6e-52, Identity=44%"; Hit description =Arabidopsis thaliana genomic DNA, chromosome 5, P1 clone:MDC12
  Pfam annotation: Domain name=Methyltransf_11; Domain location=119 -226; Score=2.8; E_value=0.029; Accession=PF08241.2; Description =Methyltransferase domain
MALLALKPNPLPNGFRLCPKRTNASAAAAAARSPSVHPLPDELQLVADIRSPYNHIRVADVSPRAAGHPLAGARLLLLDGPGNIHSLTFPRRGDRPPLTGTYLDAFATLPPLLPRPSLAVLGFGAGAAARALLHFYPDISVHGWELDPAVVAVARDFFGLADLERRHAARLSVHVGDALEARAPPGGFGGAAVDLFARGSVLPALQEPGTWRRLGALVAPGGRVMVNCGGAGVEAEDEGRDGAAVKDATLRAMAAAFGEGAVSVLHVDGSWVAMTGPPVTAAAWRARLPPELRHFVDAWRPYGGGASGE

SEQ ID NO: 46702 - protein, 262 aa, Zea mays
  Coding DNA Sequence Number=SeqID_4923
  Gene Ontology: Mol. function=transporter activity; Cellular component= integral to membrane; Biological process=transport
  Homolog annotation: Hit_ID=Q6ZAK1; Match level="QueryCoverage=71%, HitCoverage=51%, E-value=2e-37, Identity=74%"; Hit description =Transporter-like protein
MALRAPVVRWTCKTGSRRRQSGRGAQGWTAGGAGAGLLRHAAVRSGGTRPSQHWTGSLQSWAHARQKAIVESGEQLLRKSAWVEMKELVREAKAVVKISSLQIIVAQGVTGSFPWSALAFCPNVAGVDGVYAQQNWAPDDNICTGKLTWRAASPIFAKIVPERSRTSIYALDCSFESVLASFAPPVVGFLAEHVYGYNPVPYGAADNNVGRDKSNVGALAKALYTSIAIPMLLHLLPVVPDVPTRQGEGKDGLSDRSRAPAD

SEQ ID NO: 46703 - protein, 496 aa, Zea mays
  Coding DNA Sequence Number=SeqID_4924
  Gene Ontology: Mol. function=oxidoreductase activity, acting on paired donors, with oxidation of a pair of donors resulting in the reduction of molecular oxygen to two molecules of water; Cellular component=membrane; ...
  Gene Ontology: Cellular component=Biological process=fatty acid biosynthetic process
  Homolog annotation: Hit_ID=Q6ERL2; Match level="QueryCoverage=97%, HitCoverage=88%, E-value=8e-91, Identity=52%"; Hit description =Putative delta-6-desaturase
  Pfam annotation: Domain name=Cyt-b5; Domain location=22-95; Score =87.8; E_value=3.3e-23; Accession=PF00173.18; Description=Cytochrome b5-like HemeSteroid binding doma
  Pfam annotation: Domain name=FA_desaturase; Domain location=232-482; Score=146.2; E_value=8.4e-41; Accession=PF00487.14; Description =Fatty acid desaturase
  Pfam module annotation: Pfam domain module=Cyt-b5::FA_desaturase; Domain location=22-95::232-482
MVAVKGPAATEDQKASEKTTKRVTSAEMARHCGEGDVWVAVQGKVYDVTAWLPHHPGGDLPLLSLAGQDVTDAFVAYHPASAWRVLDRYRVATLSDYAVSEVSRDYRRLVAEFAKAGLFDRKGHGCAASLCAMAALLAGAIWLVLATTNVAAHMAAAIMLGFLWMQSGFLGHDSGHYGSVWLSGWSLALEKRPISTYLGSQAQEEFLHPASQTEEANQATKQKKVVSREPGQTIYRQPNAPYMVMRSGLLNRVVQLVAGNCVAGISIGWWKRNHNAHHIACNSLDHDPDVQHMPLFAVSPRLFASITSAFYRRAMRFDAAARFLVSYQHWTFYPVMCVARVNLFAQSLLLLLAADTRTRVPGRLAELAGVAVFWVWYPWLVSRLPGGVHEHAAFVLLSFAVTGIQHVQFCLNHFSAGTYTYVGRPRGDDWFQKQTRGTLDVACPPWMDWFHGGLQFQVEHHLFPRLPRCHLRRVAPLVRDLCRKHGLPYERCGFWC

SEQ ID NO: 46704 - protein, 79 aa, Zea mays
  Coding DNA Sequence Number=SeqID_4925
  Subcellular localization annotation: CTP_CleavageSite=53; ConfidenceScore=5.12e-01
MRAHATGWFAARWDLWVSAFFTSTQTEPANAASTSPRTLGGILVCAPEWALVRCSNGAAVCGSGAVGVWPEKLGKLRRL

SEQ ID NO: 46705 - protein, 331 aa, Zea mays
  Coding DNA Sequence Number=SeqID_4926
  Gene Ontology: Mol. function=ATP binding; Cellular component=nucleus; Biological process=multicellular organismal development
  Homolog annotation: Hit_ID=Q2R4Z0; Match level="QueryCoverage=64%, HitCoverage=33%, E-value=5e-61, Identity=51%"; Hit description =ATPase, histidine kinase, DNA gyrase B-, and HSP90-like domain containing protein
MSLGAEVIELSSDEDEEPVPSTTALIHHAPSSPPDVKPHLLADVDVKPLLLLPPPLHPPGYGALVPVKTEEPVPVATVSSPPRALPPPRLCRQFWKSGDYVVARRNPDVAGPGGRNRLRINPKFLHSNATSHKWAFGAIAELLDNAIDEVNNGATFVRVNKFKNPRDGNPSLLVQDGNGFKTSTMRLGADVIVFTQNQNNWVPTRSIGLLSYTFLMETGCDDVLVPTVDYQYDLTTTSYVQMLRHDQKLFSSNLAILLKWSPFSTEAELLKQFDDMGDHGTKIIVFNLWFNDDGDMELDFNSDKKPASTCVGLKGFAVMLASNRAIVVAAR

SEQ ID NO: 46706 - protein, 149 aa, Zea mays
  Coding DNA Sequence Number=SeqID_4927
MDVTAWENLFKILGCLPKWVCPRDVLYSEEEFSESEGLPVYASPPVLSDDSDDSQGIAAEVWTYIRAVERSGLEGSDESEVSSDEENSSDSSEEGDRGDGNDEGDSGDGGGDGGGDDNDGDKGDGGDDGKGDGRGSGSSSKASGKTPLV

SEQ ID NO: 46707 - protein, 89 aa, Zea mays
  Coding DNA Sequence Number=SeqID_4928
  Subcellular localization annotation: CTP_CleavageSite=24; ConfidenceScore=5.01e-01
MVPSGCWVGGTSLKGGAGPMTVASAMHAAAAEGVRVGAVAGDARAGLRRLVVAQRMPEARWWVTARVRGAGEAGRRDFPTAVKRKGISF

SEQ ID NO: 46708 - protein, 93 aa, Zea mays
  Coding DNA Sequence Number=SeqID_4929
MFSMNFHDGGGHTAALVAALSEVPSADVEGILVDLAAFYSTVMPTATTDVYAQVRENTASVHDETIVGAGVATQGVEYNGVVQVDDSELLAWS

SEQ ID NO: 46709 - protein, 147 aa, Zea mays
  Coding DNA Sequence Number=SeqID_4930
  Gene Ontology: Mol. function=nucleotide binding
  Homolog annotation: Hit_ID=Q5JKF4; Match level="QueryCoverage=81%, HitCoverage=36%, E-value=1e-59, Identity=90%"; Hit description=TP -binding region, ATPase-like domain-containing protein-like
MACTFVSEQLISAYYLRISSLLGPTRRIILRGCDVEPHNVVNDLMYRECVLYKPQIAGLTESSVITTIGFVKGAPDIDVQGFNVYHKNRLILPFWKVANNSYGKGRGVVGILEANFIKPTHDKQDFEKSVLYQRLEFRLKEMTYEYW

SEQ ID NO: 46710 - protein, 140 aa, Zea mays
  Coding DNA Sequence Number=SeqID_4931
MTSEVVKVYGKLVLGSTELWERSDIGYVQPKNEANTTGTPVAARLKGVLSPVCPLYPSTPPHSADSPAFTFYVIGCLLLGSQALDSDLTRDLNRVYHVRQAPVFGSGSVPSIPQRSFNFRVQPMVQQRGAVGDLFSNAMS

SEQ ID NO: 46711 - protein, 169 aa, Zea mays
  Coding DNA Sequence Number=SeqID_4932
  Subcellular localization annotation: CTP_CleavageSite=75; ConfidenceScore=5.45e-01
MNSNGAAIGPILARCSSKSPGELSSSSVSHSPLACKDVAMAAPSSRIPVDPGARRAQCRSPFAPLPAFSLAMVICSSQVPCALPCRSVRVPGKPLALTCPTFFPSPSSGEPTLAVSPAPQMPLLSASQLSRVSEPQRGSPSLPCAAKLLPWLLAGALQPTELPYTLRKA

SEQ ID NO: 46712 - protein, 128 aa, Zea mays
  Coding DNA Sequence Number=SeqID_4933
  Subcellular localization annotation: CTP_CleavageSite=30; ConfidenceScore=5.39e-01
MASVGGGSQTRSCRGHDMRSSRGLNRRSMRGMSPGRRLIARRGAVECRGQSGSLNRHGELLEKKLVPHVMEGGKGHDPLDQNLKVPVVGAEAMQEVQHQGAVSHRLTEVAEGPLGPSSSGSTPIERPP

SEQ ID NO: 46713 - protein, 453 aa, Zea mays
  Coding DNA Sequence Number=SeqID_4934
  Gene Ontology: Mol. function=protein binding; Cellular component =nucleus; Biological process=mitotic cell cycle
  Homolog annotation: Hit_ID=Q564K3; Match level="QueryCoverage=88%, HitCoverage=60%, E-value=2e-95, Identity=48%"; Hit description =Chromosome associate protein subunit H
  Pfam annotation: Domain name=Barren; Domain location=1-449; Score= -137.9; E_value=1.1e-06; Accession=PF05786.4; Description=Barren protein
MALWQFWVSALHDFGSSGFGFRDPNFIGFGFHPRMYNGDLEEGSNVEPAQDEAINKKDADRRISPASTLESSFEALNVKKFDVAFTVDPLYHQTTAQFDEGGAKGLLLYNLGVYGSCRVLFDSFEAPDKCILSDMQTEQAETIDLSFAKEQIEEMVTQMRLCNDISPTLRDIVAQFDEENQRPSHRLSPGQMPVMEDQMDDGNEADDNDSMLPDSGTWDFGDCHDHEDTYDQNCNPMDSISTNFQEEFNEYTVEIPQGTIVNDRVDKIASLVLLGMASSKANAWAGPEHWKYRKAKDLEAAPTSSGDSEITNKIKKRTKDKPDIGFTKALDNELPNIFAAPKNPKTLLFPANRAICSNKLPEDCHYRPESLVKLFLLPDVLCLAKRRKSLDAPVDNNDDFIPSEPWEDDNFCNDHIDEGHVCSDVEEPVNLINKPRQFRGVLFLPIFLYGQRK

SEQ ID NO: 46714 - protein, 196 aa, Zea mays
  Coding DNA Sequence Number=SeqID_4935
MWLRPRQKRRGIDGSSRESHDNDESSHEDDDPAKGRTDLAGKVATEGPAPGLTGRLDADNGRSLKEPHRALLGGRAVHREGSPPREGQRRGGRSGEGHLRRQWRAVELGCGSGVRALAHPSGSGVHARAPAAAMQRLVPARLLAAAEGREGERTTGAGRFGGTGNRDGGAAPEGDGEPLGDDRGRSELCCRWRSRG

SEQ ID NO: 46715 - protein, 142 aa, Zea mays
  Coding DNA Sequence Number=SeqID_4936
  Subcellular localization annotation: CTP_CleavageSite=74; ConfidenceScore=5.59e-01
MAPAPGSAALAVLVPGEPRARPGRPRRRPCSPDRPGVPPACLARVVMAPARPRARPSVPLARGLELGQRAAPTRARLVRGTLSVALRVHVPTQRLGVAHRARDATHSALSHPRHDRLPPRRPVYPPPPRILCALITLFILIR

SEQ ID NO: 46716 - protein, 166 aa, Zea mays
  Coding DNA Sequence Number=SeqID_4937
  Homolog annotation: Hit_ID=UPI0000DA43ED; Match level="QueryCoverage =98%, HitCoverage=98%, E-value=5e-09, Identity=31%"; Hit description =PREDICTED: similar to keratinocytes proline-rich protein
MGRREAEREGGKRQPETGVREVEIPRPSCSSRAQVRLGVVDAPPRSRSSLSSVAEVESEPLGRARRRPSAEARAESEPWGRAKRSSSSSGAEPESEPWGRADRRSSSSGAVPESEPWGRADRSSSSSGAEPESEPRVGRSGVRRLPGLNPSPSPGSGGAEFAVFRD

SEQ ID NO: 46717 - protein, 313 aa, Zea mays
  Coding DNA Sequence Number=SeqID_4938
MEHAGRHHYLFYRGEPDGTPVLFPVARVEVESEPLGRARRRPSAEAEVESEPWVGRGGARRLPGPSPSLSPGSGEAEFVVFRGRARVRALGRARRSLSSSGTEPESEPWVGRGGVRRLQGPSPSLSPGSGEAKFVVFRGRARVRALGRARRSLSSSGAEPESEPWVGRGGVRRLQGPSPSPSPGSGEAEFVVFRGRARVRALGRARRSFLWRLRLDLAAVSLTLSSGTAVGATRAALSFSQTGQRSGEATFALNASAIRSVGMAIWPRLLLGEDWASGEPKLCADGGYQLRFRSLGVGFPFRRYAEALLRIAS

SEQ ID NO: 46718 - protein, 92 aa, Zea mays
  Coding DNA Sequence Number=SeqID_4939
MHRTGVSAWFLAYACPPVLEVVMLLLVLLELELFISQQAESPKSVLTPILGPITALRTGGSALYTGADGGGEGRRRRLDLTLGRDPVGEEGS

SEQ ID NO: 46719 - protein, 141 aa, Zea mays
  Coding DNA Sequence Number=SeqID_4940
MAGRYPCFHYARDGLGEQRSVGQGSSVHRGMGWGSSAAWLAGSGQLARRAGPRDGREAMGEGEGAWVGVAERPRRGALVERRGKKLQDSDMLISSFPIFLEVLNRFLKTFDKIFSKLFAYGLRNKNEILRACLRCKDSPPF

SEQ ID NO: 46720 - protein, 74 aa, Zea mays
  Coding DNA Sequence Number=SeqID_4941
  Gene Ontology: Mol. function=peptidase activity; Biological process =proteolysis
  Homolog annotation: Hit_ID=Q2QWY6; Match level="QueryCoverage=88%, HitCoverage=14%, E-value=1e-19, Identity=68%"; Hit description =Eukaryotic aspartyl protease family protein, expressed
MAPTVETLKGELSRTLEEVSGCSLPLCWKGKEPFKSVLDVIKEFKSLVLNFASGKKTLMEIPTKNYLIVTVNIA

SEQ ID NO: 46721 - protein, 133 aa, Zea mays
  Coding DNA Sequence Number=SeqID_4942
MAQLWSRVADPLPQMRKVIVARETKIEKVLKICIFFMWMDDYVKMFEGAGVVCGSREMMASNMWDERAVANRADVTTNWDKFVVELKKMNDNMVELKKIKDNMVELKKMFGAFYASMIFIVFLFFVMNYNCKR

SEQ ID NO: 46722 - protein, 98 aa, Zea mays
  Coding DNA Sequence Number=SeqID_4943
MESHDLRAEWESRLVGGYEIDGSGYGYGIDRFSPPQAEIGQSTNSGHSTGKLGKGHGLGRVVRSSLSALWGTGGKGLVLGLSPSPDPQGNLQGYKKRQ

SEQ ID NO: 46723 - protein, 118 aa, Zea mays
  Coding DNA Sequence Number=SeqID_4944
  Subcellular localization annotation: CTP_CleavageSite=43; ConfidenceScore=5.59e-01
MVNGPCKLTSSSKLGTPSMTRTKTTQRKATGPRGVPRHQLAPRHEGSSSGSNDPIGDLELHPNVPSEVAAMGAETSGAADGGDYGELDLFGAPPFMNLTDECSPEVGSGVGAAKDEDN

SEQ ID NO: 46724 - protein, 83 aa, Zea mays
  Coding DNA Sequence Number=SeqID_4945
MDEGLKLKLLLTSARKIFKLSELRLKDTFSPCVETKLTEEAKLFEEKEAIDPYVVGFVESMAKTNTEKITKGIVGDLFSNAKS

SEQ ID NO: 46725 - protein, 86 aa, Zea mays
  Coding DNA Sequence Number=SeqID_4946
  Subcellular localization annotation: CTP_CleavageSite=44; ConfidenceScore=5.85e-01
MASSSALAVPSIPLPPSSAYKRTHPSPAFTTPAPANSSAFPRAKQASVAVLPPSLRALLSPSIAPDNRTDDITAVDTRHRATDRPP

SEQ ID NO: 46726 - protein, 197 aa, Zea mays
  Coding DNA Sequence Number=SeqID_4947
MVLSPAFAIEEWGWDAAAFVREVEAEAVKIIGKYSAKTELTRSWDIRGLNVRLNHVFESNGLRYGPYPKEGSTDGGDERGKKKVTVRENEGCSKGKAVVAATRKRKIEVKGGERRRLSLKRPASDKPRGMRPGSGMAELDRGQTNQRETNRVDPSPSSRLTHSTDDPAAMIAGGDSGDRRRGFDWQQPQPAASLTET

SEQ ID NO: 46727 - protein, 99 aa, Zea mays
  Coding DNA Sequence Number=SeqID_4948
MGVTVNAAALTTLLLYGRVDVGEPAAESRPAVPARSLDSELLRHALAEPRHRRACPSPILCVCVMRSGEEANRTLASMSGSRFGLKLADDIVGWLGGTE

SEQ ID NO: 46728 - protein, 152 aa, Zea mays
  Coding DNA Sequence Number=SeqID_4949
  Subcellular localization annotation: CTP_CleavageSite=16; ConfidenceScore=5.02e-01
MSLYRPYPATTGAPVRQTPNWTPLNHFPSLKFTNEALHQLVHGDSVNKRMSERVPGDLRPPSLIGWVSEYQQQVDLGEIPNWGTLEDDSRHGLLDEGLDYLTEPWVCAIYSRLERWPVNLRKSRGGRRKRGSLARAIGGNYRGKLPGNHRMG

SEQ ID NO: 46729 - protein, 149 aa, Zea mays
  Coding DNA Sequence Number=SeqID_4950
MARMDLIWASHGELDFTATETELGNTQNSGTLVIDWGQCLVAGRTRDGRRRDRSLAQWLGVQRRGNRSGDQRRARAGYGDAVERVRHAADNGDGLTTMYENRRRGARRAQPEQQAPQEEAAPQQHLPPPPPMTIEQLFLMQTQAVQAIG

SEQ ID NO: 46730 - protein, 55 aa, Zea mays
  Coding DNA Sequence Number=SeqID_4951
  Homolog annotation: Hit_ID=Q6ETL3; Match level="QueryCoverage=55%, HitCoverage=8%, E-value=5e-09, Identity=93%"; Hit description =Putative RAD23 protein
  Pfam annotation: Domain name=UBA; Domain location=1-29; Score=16.7; E_ value=0.039; Accession=PF00627.21; Description=UBATS-N domain
MGFDRARVIEAFFACDRNEELAANYLLEQAAFRQHLSHIDQDWKFRVDYSELIWS

SEQ ID NO: 46731 - protein, 104 aa, Zea mays
  Coding DNA Sequence Number=SeqID_4952
  Subcellular localization annotation: CTP_CleavageSite=48; ConfidenceScore=5.06e-01
MGQGTPLLECGRLLWIASPQSSLHSNLVVPMGLRNSGVSLARPYFGGSAASVGACDRGRRQHRVVDLGINGFGWMKGWYAQDRWIYVGRMGLDLGESHRGPLVD

SEQ ID NO: 46732 - protein, 241 aa, Zea mays
  Coding DNA Sequence Number=SeqID_4953
  Gene Ontology: Mol. function=receptor activity; Cellular component =integral to membrane; Biological process=response to sucrose stimulus
  Homolog annotation: Hit_ID=Q6ETK9; Match level="QueryCoverage=90%, HitCoverage=99%, E-value=4e-81, Identity=67%"; Hit description =Putative adiponectin receptor 1
  Pfam annotation: Domain name=HlyIII; Domain location=3-219; Score =152.8; E_value=8.9e-43; Accession=PF03006.10; Description=Haemolysin- III related
MDRVLICSRAVDSETSTTWLGGQPRHDDAGASLPSVPRWPRTVFLVGAMSCLAISAAAHLLACHSRRASAVFWQLDYAGISVMIVASFVPPVYYAFLCHPPARAAYLCAIAALGALVVAALLSPSCSSPRYRRLRAALFLAMGLSGVVPALHALWLNWGHAACYLALGIEVVMGLTYATGAWFYVSRVPEKWRPGVFDVVGHSHQIFHVLVLVGAVTHYVAVAVLIHWREKVAVACGAASA

SEQ ID NO: 46733 - protein, 207 aa, Zea mays
  Coding DNA Sequence Number=SeqID_4954
MPAPAPAPVPAMPAAIVPPPFDALCGLQMRVRGSLSVEGEERRCIGSRSALYMEGEADQGEWLRAVASMSSNAPSGEVSSKHDGGYGIVGGPNGNTVAPATKSTVVETIIERESLSLEKLCLVMGLHDGSTKCLYPVLEYSSKKNAKGNKPRKERNIILKVSERLEKLLKIYHGYLIVRCQSIIMVTNVAIRACQLPELVLKKNMPI

SEQ ID NO: 46734 - protein, 33 aa, Zea mays
  Coding DNA Sequence Number=SeqID_4955
MNSELRETMGGSDGMADPVVRAVGAGPQVEMAM

SEQ ID NO: 46735 - protein, 160 aa, Zea mays
  Coding DNA Sequence Number=SeqID_4956
MRPWIHGRMNVLYVNVFPMPLFEGKQLLKIGGMSGVRSQRRSKTQLLHGQSRSCRRSAGKGLHVVGQKLVAQAQRHVGMAMLHPSRPQPLRCGGRAVAIHRLELFHMQITILLVSIRAVPPLPLVSGASICPERTSEQVRDGREAQSCRQTGVAGGAVSQ

SEQ ID NO: 46736 - protein, 83 aa, Zea mays
  Coding DNA Sequence Number=SeqID_4957
MVTNENPEASRRKNEEHTPSKEACDKHKEESVGSIKSQRKGNKKKKKMKKVVYYETDSSSPSTSGAENHRWAMRIMTPMRPLK

SEQ ID NO: 46737 - protein, 140 aa, Zea mays
  Coding DNA Sequence Number=SeqID_4958
MGKNNKRKREPTPPSEEFGDSEYSEKEFSSESEGSPAPVPLRESSDDSDDSQGLAVEVWTYIRAVERSGLKGSDESEYSSDEEDSDGGGEDDDDDDGDDDDDGDGDGDGSGRGSGGGSNKDGDGGGSRGSNRGGSSRASG

SEQ ID NO: 46738 - protein, 87 aa, Zea mays
  Coding DNA Sequence Number=SeqID_4959
  Homolog annotation: Hit_ID=Q655F0; Match level="QueryCoverage=39%, HitCoverage=5%, E-value=2e-10, Identity=82%"; Hit description =Putative CLB1 protein
MATPPKRTSGGGALQARWRRWLREARMFLKTPEDPRPHHSGPKIKILSASLEKDPVIKPLRDLDSETLQATIPHIPLWVKSPDYERV

SEQ ID NO: 46739 - protein, 196 aa, Zea mays
  Coding DNA Sequence Number=SeqID_4960
  Subcellular localization annotation: CTP_CleavageSite=70; ConfidenceScore=5.22e-01
MTIACPGVVALILHRITPVLVVPSLRSPGGQGGRNFSLEQPQSRSPMESRNPALPPQDPTSQNLGGRITRTMLLQSWRHRGSGRHRSWVAGVKDGGVSVVRFGVEGGDPIHAYPFNNRIRFINYASHGVDLITTWTSLEPRIYDPRARKAYQFNSFGVLIWCFVRKSDGCHASIHLRPMVFLSRVPNVLRKQPTVC

SEQ ID NO: 46740 - protein, 88 aa, Zea mays
  Coding DNA Sequence Number=SeqID_4961
MSREHAKREMVTAKSVKSWEGRTMKRTPSKEVGDKHKEESASSIESHRKGDKKKKKMKKVVYYETDSSSPSTYARRVYHFEVPRAQEV

SEQ ID NO: 46741 - protein, 116 aa, Zea mays
  Coding DNA Sequence Number=SeqID_4962
MSEQYTILVKKRAWAITTSTVPSQQGHNRAPSHHQPQEVEGDETSEEDSTLNQEEYVGNQQPFSQPTISVASASHSPAAWALPQPPALAPTSSHIQQPKGQHQVQQQREAREESEA

SEQ ID NO: 46742 - protein, 149 aa, Zea mays
  Coding DNA Sequence Number=SeqID_4963
MDVFLPKIVVQNHRPTTGISSTVDEDPHRGIARAPKVPTVGSPPHAFHCSECHTLTPSVKLRQQYAPRWMPAVEASLPSSANPPPSLLCRPQSDQLDVDEGGLCHDLYMEPGAYPNDPRHAHDSVEIHTVELGHRGEGKVFQVGPTCEW

SEQ ID NO: 46743 - protein, 149 aa, Zea mays
  Coding DNA Sequence Number=SeqID_4964
METTNVERITDDILAGLSEDSRDNKDFDVDSGADDAEVVGPSCRNHAPAVHEGVVSFPLTLWAPVSMSRAHPRSSDSVARIVSHWTSGPAAPNDPRASAIKLGPYDVPIPLNQASLTPMLGSSAEGVRSLALGGVGGKILRPGGGMHPP

SEQ ID NO: 46744 - protein, 62 aa, Zea mays
  Coding DNA Sequence Number=SeqID_4965
MAPPKPGAPKAALPTAAEPMLESCNSTIPASMFGPGPPLVRTEPLEWDLDPCMGFGRPTVGS

SEQ ID NO: 46745 - protein, 43 aa, Zea mays
  Coding DNA Sequence Number=SeqID_4966
MKGRKRAATPQRGTYTRDWRERRRQAEEKRELQAFRRSQAGEG

SEQ ID NO: 46746 - protein, 273 aa, Zea mays
  Coding DNA Sequence Number=SeqID_4967
  Subcellular localization annotation: CTP_CleavageSite=41; ConfidenceScore=5.12e-01
MAAVVAAVEAGVVAVASGRGCSSRLVRGLYWRLRAVLRRLRSERARRGRRFSFHYDALSYALNFDDGRAAPAPAPAAADLVLAPGDNDALRHDGSDTSEAWYEYGPAWALGAAKSTIDGEIGRSGRCNTRLTCQLPLPPTLFNDAVSVSLFGHYILAVDRRGATAAPGDSWIVSSRIPEQKKRRKKLARHESDSLHPSITVKSADRQILVQRVRQYSGREARVPAFPVLQGKGTRHASHDEWKYSQPVQAMLPLFHTGHSNQCSTSIRSSPAT

SEQ ID NO: 46747 - protein, 105 aa, Zea mays
  Coding DNA Sequence Number=SeqID_4968
MPPLAVCLPRVWLPTSDHLVVADGASSAVPLVKLGIKPDLEVAAQAARAAQAAQGRSAGRRTGSRIRHHPGAILARSDDEDEVDGPAKNKATDKNEEKVKEEAEI

SEQ ID NO: 46748 - protein, 308 aa, Zea mays
  Coding DNA Sequence Number=SeqID_4969
  Gene Ontology: Mol. function=transposase activity; Biological process= transposition, DNA-mediated
  Homolog annotation: Hit_ID=Q2R337; Match level="QueryCoverage=75%, HitCoverage=57%, E-value=1e-58, Identity=47%"; Hit description =Transposon protein, putative, CACTA, En/Spm sub-class
MAEDSVQVIGEVQEVVEVHAGTDQRGRGAMRWTSVMSAFVLRRMCQLISSGVRTDKGFKEVHLNQVAKALQEFIGSEVTGTQVYNHLRKWRQRWMRVAKLRELSGANWDEDLCMISLEDEHYNGHIKAHPKDAEFLNKPIENYKEMMTIFGTGLATGKYAMGSNEALGSPCEVATSSVKTDSLDEDKSGKSVKTDSLGEATKDMKEGSSGVGNKRKRGVLTDEDTLMLSKMTDAVKDVAAAIRETKVEVINPDLYVAVMYMPGFSEEALICAFSHLVDNKAQGDAFVHMTDSHRVLWLRTWLAKNYFL

SEQ ID NO: 46749 - protein, 196 aa, Zea mays
  Coding DNA Sequence Number=SeqID_4970
  Subcellular localization annotation: CTP_CleavageSite=54; ConfidenceScore=5.16e-01
MASSSCYAFLSTSACWISSANAHSTVLDVVEIKKATPNKSSNAPPPPVYGRNARSSYGSASRDHPSADNYEFLDGRLLNLAIPINHCFLCNRVLEEGSFESRKRNQINPPIHQTTTATTTTNDSPFRRLHSYARVLSVSLGPLSLSDDWWAAAGAAALTQREYSFHKHKDLLHEHNGTTGAMVATLLPAASTLLLV

SEQ ID NO: 46750 - protein, 348 aa, Zea mays
  Coding DNA Sequence Number=SeqID_4971
  Gene Ontology: Mol. function=phosphoric monoester hydrolase activity; Cellular component=cytoplasm; Biological process=protein amino acid dephosphorylation
  Homolog annotation: Hit_ID=Q6H5V3; Match level="QueryCoverage=99%, HitCoverage=99%, E-value=5e-98, Identity=57%"; Hit description=ALG2 -interacting protein X-like
  Pfam annotation: Domain name=BRO1; Domain location=7-344; Score =199.7; E_value=6.7e-57; Accession=PF03097.8; Description=BRO1-like domain
MLRPPSPVLYVQEKKTAVAGIFGDRHFFDAASFSDIRAARVAVAVPNPQAQPPASRRALLLRYHRLLSSARNDTCAFDETLYITWHDAFRPHLKHTAASLRLEKAAIVFNVGAAASRIAATVSRATEEGVRAACGEFQRAAGAFRAVGEMMEEEEATTVDMSSQASAMLERLMLAQAQECCFERALDAGKSQTVCSKVARQAALYYEEAYAALVAPPLQNHFERSWISHIQLKAALFNAEACYRYTIELHGKTEIGEEISRLQVGIKALVDAKRTARGAPGPLYDYAFRLEQDMNKNMETAKEENFRVYLFRIPAAESLASLPSASLVRSASLSEILNPKTENTTQSP

SEQ ID NO: 46751 - protein, 139 aa, Zea mays
  Coding DNA Sequence Number=SeqID_4972
  Subcellular localization annotation: CTP_CleavageSite=63; ConfidenceScore=5.08e-01
MAAAVAHPALTSFLLAHRTDVAVAAAPAGSRDYAAHRCSSMNRPWAGAVPTADPMPEPSVRSRASSGNGNGHYRGCSAHRASGRVVWWFLEWILYWYDSQRKQFLGAILFSIFLVRLVIPRRDQVWWFLEWILYWFDSQ

SEQ ID NO: 46752 - protein, 175 aa, Zea mays
  Coding DNA Sequence Number=SeqID_4973
MEYERGGGGGRGRGRGRGGGGGGGRGGGGGYGRQHGGGGDARGGRDEYGGGGGGYGYDEGEGYGGGRRGGGGGYGYDVGGRRGGGGYHQGPRGGYGTGGGGYHQGPRGGYGTGGRGGNAWAPAPGAGRGRGVGGGAAEYAPVRGPAPAQAPVASPLAPKDKEAPRSSGSVVSSVL

SEQ ID NO: 46753 - protein, 651 aa, Zea mays
  Coding DNA Sequence Number=SeqID_4974
  Gene Ontology: Mol. function=protein serine/threonine kinase activity; Cellular component=integral to membrane; Biological process=protein amino acid phosphorylation
  Homolog annotation: Hit_ID=Q4PLL4; Match level="QueryCoverage=91%, HitCoverage=58%, E-value=0.0, Identity=59%"; Hit description=SHR5 -receptor-like kinase
  Pfam annotation: Domain name=Pkinase; Domain location=303-571; Score =167.5; E_value=3.3e-47; Accession=PF00069.15; Description=Protein kinase domain
  Pfam annotation: Domain name=Pkinase_Tyr; Domain location=303-571; Score=138.4; E_value=1.9e-38; Accession=PF07714.7; Description =Protein tyrosine kinase
  Pfam module annotation: Pfam domain module=Pkinase::Pkinase_Tyr; Domain location=303-571::303-571
MVMNLDVAMDGEHYIVRKNHTPRDISLYVPCNLIYHQGKKIPIKQYSENLDAAASFAVDCGGSRAISGSDNSVYQADNANLSAASYYVAGAPTWAVSSVGLFLDADAPNASYIIYSSRQFENTLDSALFQTARMSPSSLRYYGIGLENGNYTVTLQFAEGERKEQNFDIRKAAGGKSFTAVKKQYVVPVTKNFLEIHLFWAGKGTCCIPYKGYYGPAISALSATPNFVPTVRSSEDSKSSHKTGVIAGVAVGVSVFALIALAGIFLWCQKRRKLLLELEELYTIVGRPNVFSYSELRSATENFCSSNLLGEGGYGSVYKGKLSDGKVVAVKQLSQSSNQGKMQFAAEIETISRVQHRNLVRLYGCCLESKTPLLVYEYLENGSLDHALFGKGSLNLDWPTRFEICLGVARGIAYLHEESTIRIVHRDIKASNVLIDADLNPKISDFGLAKLYDDKKTHVITNVAGTFGYLAPEYAMRGHMTEKVDVFAFGVVALEIVAGESNYQNALDEGTTYIFERVWELYENGRPLEFVDPKLTEYDAYEVLRVIRVALHCTQGSPHKRPSMSRVVAMLNGDADAAEDVAKPSYITEWQVMAADVSGSFASSHVGSSSTQTQPTSSSGGHGGAQASPEPGDLTPAVPSPLYTSIIEEGR

SEQ ID NO: 46754 - protein, 257 aa, Zea mays
  Coding DNA Sequence Number=SeqID_4975
  Gene Ontology: Mol. function=protein serine/threonine kinase activity; Cellular component=integral to membrane; Biological process=protein amino acid phosphorylation
  Homolog annotation: Hit_ID=Q7F106; Match level="QueryCoverage=87%, HitCoverage=30%, E-value=2e-54, Identity=41%"; Hit description =Putative Receptor-like serine/threonine kinase
  Pfam annotation: Domain name=LRR_1; Domain location=133-155; Score =8.4; E_value=7.5; Accession=PF00560.23; Description=Leucine Rich Repeat
  Pfam annotation: Domain name=LRR_1; Domain location=157-179; Score =9.8; E_value=4.1; Accession=PF00560.23; Description=Leucine Rich Repeat
  Pfam annotation: Domain name=LRR_1; Domain location=181-203; Score =9.3; E_value=5.3; Accession=PF00560.23; Description=Leucine Rich Repeat
  Pfam annotation: Domain name=LRR_1; Domain location=205-227; Score =17.2; E_value=0.061; Accession=PF00560.23; Description=Leucine Rich Repeat
  Pfam annotation: Domain name=LRR_1; Domain location=229-251; Score =19.9; E_value=0.009; Accession=PF00560.23; Description=Leucine Rich Repeat
  Pfam module annotation: Pfam domain module=LRR_1::LRR_1::LRR_1::LRR _1::LRR_1; Domain location=133-155::157-179::181-203::205-227::229-251
MRKPRLSVGGGGGLLHGFPSPVLLFLLLLLLSSWRVAAQAQQAPQTDPVEAAAVNAILSKLRLSAPPSWNISGNPCSGAATDDTSIDDNPAFNPAIKCDCSDQNNTLCHVTRLKINTLDAVGPIPEELRNLTHLVKLTVGINALSGPVPKELGNLTNLLSLALGSNNFNGTLPDELGKLTKLRQMWASDNNFSGQIPDYLGSLTNLTQLRLQGNSFQGPIPTSLSNLVNLKKLDLSFNNITGQIPQSILNLTSLSYL

SEQ ID NO: 46755 - protein, 665 aa, Zea mays
  Coding DNA Sequence Number=SeqID_4976
  Gene Ontology: Mol. function=protein serine/threonine kinase activity; Cellular component=membrane; Biological process=protein amino acid phosphorylation
  Homolog annotation: Hit_ID=Q4PLL4; Match level="QueryCoverage=89%, HitCoverage=58%, E-value=0.0, Identity=61%"; Hit description=SHR5 -receptor-like kinase
  Pfam annotation: Domain name=Pkinase; Domain location=333-603; Score =157.4; E_value=3.8e-44; Accession=PF00069.15; Description=Protein kinase domain
  Pfam annotation: Domain name=Pkinase_Tyr; Domain location=333-603; Score=111.2; E_value=3.1e-30; Accession=PF07714.7; Description =Protein tyrosine kinase
  Pfam module annotation: Pfam domain module=Pkinase::Pkinase_Tyr; Domain location=333-603::333-603
MSAAGATRGAVGSAGVAHEGIGGADAMHGSAGTGAAQGAAGVGGTARGRNLEGTVGAGRGVVGGSNPRAASLAVDCGSSRSISGSDKSMYQRDDANLGAASYYVTGAQTWGVSNVGKFTEAVYESYIISSSRQFYNTLDPELFQTARMSASSLRYYGIGLQNGNYTVALQFADFDFEDSQTWQSVGRRIFDIYLQGERKEKNFDIMKAAGGKSYTAVEKQYIVPVTRNFLEIHLFWAGKGTCCIPFRGYYGPAISAFSVTPNFNPTVQTSRKTGIIVGVVVGAAVLGVLALAGLCMRRQKRRKLLLEQQELYSIVGRPNVFTYGELRTSTENFSSNNLLGEGGYGSVYKGKLAEGRVVAVKQLSETSHQGKQQFAAEIGTISRVQHRNLVKLYGCCLEGNKPLLVYEYLENGSLDKALFGTSSFHFHATVTLGVQICLGIARGIAYLHEESSIRIVHRDIKASNILLDANFNPKISDFGLAKLYDDKKTHVSTKVAGTFGYLAPEYAMRGHMTEKVDVFAFGMVILETLAGRPNFDNMLDEIKVYILEWVWQLYEDKHPLDMVDPKLEEFNSGEVIRAIHVALLCTQGSPHQRPSMSRAVSMLAGDVEVGEVVNKPSYITEWQIKGGNTSSFMSNNVSGQSSMAPRSSASHTSSPFLNSVIEEGW

SEQ ID NO: 46756 - protein, 351 aa, Zea mays
  Coding DNA Sequence Number=SeqID_4977
  Gene Ontology: Mol. function=binding
  Pfam annotation: Domain name=TPR_1; Domain location=173-206; Score =15.0; E_value=0.086; Accession=PF00515.18; Description =Tetratricopeptide repeat
  Pfam annotation: Domain name=TPR_1; Domain location=9-42; Score=3.3; E_value=2.2; Accession=PF00515.18; Description=Tetratricopeptide repeat
  Pfam annotation: Domain name=TPR_2; Domain location=173-206; Score =20.1; E_value=0.0078; Accession=PF07719.7; Description =Tetratricopeptide repeat
  Pfam annotation: Domain name=TPR_2; Domain location=9-42; Score=11.2; E_value=1.7; Accession=PF07719.7; Description=Tetratricopeptide repeat
  Pfam module annotation: Pfam domain module=TPR_1::TPR_1::TPR_2::TPR _2; Domain location=173-206::9-42::173-206::9-42
MAGAAEGAGAEAVERAHGLYRGGRHREALELYSAALAAARGPAQRIALHSNRAACYLKLHDFHKVPLPAPSALGGFGLLSCTDCVVAFGPHLASVVTSGKGRSFGASKCQFWSKYSCPVPGSGFRGSCDFGLVDCVFCSSYNNMHAQFVLGICAHGLAAQECTSVLELDTEHAGALMLRAQTLVTLKDYQSALFDVNRLVEINPSSEVYRNLQARLKTQLSLAPIPECEEESLCREEEDEELPPRVQKTDTSSIAKPDQPATKLVLENKPSAGPILHRKPATEPLKAVVPSTSPSKPQGWEAIPKPKSHSGLDYSKWDKIEEDSSEDEDDEEDELPQYKFKVRSVGVRSVK

SEQ ID NO: 46757 - protein, 144 aa, Zea mays
  Coding DNA Sequence Number=SeqID_4978
MGKNNKRKREPTPPSEEFGDSEYSEEEFSSESEGSPAPIPLRESSDDSDDSQGLAAEVWTYIRAVERSGLEGSDESEFSSDEEDSDGSEGEDDDDDDGDDGGDGGGDGGNGSGGGGGKGGTKGGSSVGSTGGGGSEGSGSRASG

SEQ ID NO: 46758 - protein, 157 aa, Zea mays
  Coding DNA Sequence Number=SeqID_4979
MAHRTVSGVHQTIRCTRPSSTRTAQSREFPRSAPEREIGCQRFTTNQYKSKERVQTKGAKDNRSVPGLAHRTVRCTRKSNSELATFGNSGSRSAIIHRTVLCCTALSGVPAEQRLLRANGRLQNAFNALQCAPESEQRQKAHRTVYSDCPVRHRTVR

SEQ ID NO: 46759 - protein, 145 aa, Zea mays
  Coding DNA Sequence Number=SeqID_4980
MGGARSRTQQWAPGETRQEAPLRAGSNRAGGRAEHDACAGNNREGAQGEFHRRSEQPSEQRSWGSRRWEQGPRLGRARRAPWQAAEQERAQQGDAALEAGEYREMDAIGGRRASCREEEQLVWACSRDKHARRGSSIRRAGAGAS

SEQ ID NO: 46760 - protein, 302 aa, Zea mays
  Coding DNA Sequence Number=SeqID_4981
  Gene Ontology: Mol. function=protein serine/threonine kinase activity; Cellular component=integral to membrane; Biological process=protein amino acid phosphorylation
  Homolog annotation: Hit_ID=Q6ZKW6; Match level="QueryCoverage=54%, HitCoverage=16%, E-value=8e-50, Identity=57%"; Hit description =Putative Receptor-like serine/threonine kinase
  Pfam annotation: Domain name=LRR_1; Domain location=112-134; Score =0.7; E_value=2.1e+02; Accession=PF00560.23; Description=Leucine Rich Repeat
  Pfam annotation: Domain name=LRR_1; Domain location=136-158; Score =15.4; E_value=0.21; Accession=PF00560.23; Description=Leucine Rich Repeat
  Pfam annotation: Domain name=LRR_1; Domain location=160-182; Score =4.2; E_value=46; Accession=PF00560.23; Description=Leucine Rich Repeat
  Pfam annotation: Domain name=LRR_1; Domain location=184-206; Score =10.1; E_value=3.7; Accession=PF00560.23; Description=Leucine Rich Repeat
  Pfam module annotation: Pfam domain module=LRR_1::LRR_1::LRR_1::LRR _1; Domain location=112-134::136-158::160-182::184-206
MRPGSTSRPSPRRCLYVYGSASALPKLLLLLLAASSSAQAQQAARMKTDPVEAAAVNAVFAKLRQTASSEWNISGDPCTGIATDGTVIEDNGNFNPGIKCECSDQNNITVCHVTKLKIYALNAVGPIPQELQNLTRLINLDLSKNYLTGSLPSFLGNLTAMQYMTLGTNALSGSVPKELGNLVNLVSLGFGSNYLNGPLPWELGNLAKLEQLDNNMGKGCFCFEAFWSKLEGFYDAVQEVWESVAAVNCPFKTLDLKLKATARKLQSWIGKHVGHRTIARSRLRISWLKVGDANTKLFHMHS

SEQ ID NO: 46761 - protein, 131 aa, Zea mays
  Coding DNA Sequence Number=SeqID_4982
MRHQTGRNGRNDGDEAVRATETTWRPRGRAEDRRHDAGKEVEGEGGEDDARREGEEDSRYDIVIANERHKAKKTRRTTFREESRGHFCKSVGNALIASTCSNMSMVTAQTNKARSNPPQYGNLEWIEETEN

SEQ ID NO: 46762 - protein, 137 aa, Zea mays
  Coding DNA Sequence Number=SeqID_4983
MAPPVDVAGLRPRLGDVEAPPKPRSSLSSVAEVESEPLPKSEPWVGRSGVRRLPGLSPSPSPGSGGAEFAVFRGLARVRALGRAERSFLWCLRSGLTACQPHSVKWHRSRSGAGGAVFLSGRSVERRSDGGHFGSVG

SEQ ID NO: 46763 - protein, 130 aa, Zea mays
  Coding DNA Sequence Number=SeqID_4984
MRGKANCCCLARVQHSVLRPGDCGRLHRGSHNMSYAVRAVDAAVGAEVVAAGEGFSADDTVNATRALDLQLFGFNGWFSSPARDVNEGLPAVEILPPVSPSKAGPDPAEGGNNAEGAAVPSVEGAGTVCL

SEQ ID NO: 46764 - protein, 61 aa, Zea mays
  Coding DNA Sequence Number=SeqID_4985
  Gene Ontology: Mol. function=ATPase activity, coupled to transmembrane movement of ions, phosphorylative mechanism; Cellular component=integral to membrane; Biological process=proton transport
  Homolog annotation: Hit_ID=Q7XPY2; Match level="QueryCoverage=87%, HitCoverage=5%, E-value=1e-16, Identity=74%"; Hit description=Plasma membrane ATPase
  Pfam annotation: Domain name=Cation_ATPase_N; Domain location=5-61; Score=12.9; E_value=0.00018; Accession=PF00690.16; Description =Cation transporterATPase, N-terminus
MAGLEEIKNEAIDLENIPVEEVFQSLKCSKLGLSSEEAEARLAVFGPNKLEEKKVVAPPFF

SEQ ID NO: 46765 - protein, 477 aa, Zea mays
  Coding DNA Sequence Number=SeqID_4986
  Gene Ontology: Cellular component=integral to membrane; Biological process=peroxisome organization and biogenesis
  Homolog annotation: Hit_ID=Q53LH2; Match level="QueryCoverage=83%, HitCoverage=87%, E-value=1e-149, Identity=63%"; Hit description =Transmembrane amino acid transporter protein
  Pfam annotation: Domain name=Aa_trans; Domain location=31-442; Score =338.3; E_value=1.3e-98; Accession=PF01490.8; Description =Transmembrane amino acid transporter protein
MEVAGNHVQSCRTELPEPQKPLVDDDGRPLRTGTLWTASAHIITAVIGSGVLSLAWGVAQLGWAGGPAAMVLFAAVIYYTSTLLAECYRCGDPTFGPRNRTYIDAVRATLGDSKERLCGAIQLSNLFGIGIGVSIAASVSMQAIRRAGCFHYRGHEDPCHASTSPYIAVFGVMQIVFSQIPDLDKVWWLSTVAAIMSFSYSTIGILLGVVQIVEHGGPRGSLAGVIGAGARVTMMQKDTIKSPPPSEAKVMKKATAVSVAVTTVIYLLCGCVGYAAFGGAAPDNLLTGFGFYEPFWLLDVANAFVVVHLVGTYQVMSQPVFAYVERRAAAAWPGSALVRDRHVRVGRAVAFSVSPARLAWRTAYVCVTTAVAMLLPFFGSVVGLIGAASFWPLTVYFPVEMYIAQHRVARGSMRWLLLQGLSAGCLVVSVAAAAGSIAGVVERPQGAQSLLLVVLTEPTLMYEGCFSAPHYFVKEHY

SEQ ID NO: 46766 - protein, 133 aa, Zea mays
  Coding DNA Sequence Number=SeqID_4987
  Subcellular localization annotation: CTP_CleavageSite=72; ConfidenceScore=5.75e-01
MALLALAHGPVPACSPALTRSPRPAPSQRGGPGSLAQRGAAALASPPLPATASPGSPAPPCARSRRRDPAARAARRVRGLSRSAPVWPHCLLAASSAARGNENDGFGIDYGNGKEEGAEADLREFQDFGEFED

SEQ ID NO: 46767 - protein, 98 aa, Zea mays
  Coding DNA Sequence Number=SeqID_4988
  Gene Ontology: Mol. function=metalloendopeptidase activity; Cellular component=membrane; Biological process=proteolysis
  Homolog annotation: Hit_ID=Q6EPN8; Match level="QueryCoverage=79%, HitCoverage=18%, E-value=6e-37, Identity=94%"; Hit description =Putative Ste24p
MPSGNQTMTFVAVQLLMILQFGGYTLVRNSKDLFESFGFEDQPIIIGLIIFQHTIIPIQHLLSFCLNLVSRAFEFQADAFAKNLGYALSSERPLLNYR

SEQ ID NO: 46768 - protein, 126 aa, Zea mays
  Coding DNA Sequence Number=SeqID_4989
MKNKPVALGLNFDMTVSLQQRRPAISSIAVLVDVVGHDSQHRHLPSLAFVLPTPMSSASSPGFDLQLVRAAIKLSRPWRSRPSRSPAPRTVIAEFTGNRSLIVPQTVSWDSAVFGYRLARQGDFHQ

SEQ ID NO: 46769 - protein, 162 aa, Zea mays
  Coding DNA Sequence Number=SeqID_4990
MVRPQSCAHIPQNDPRPPDDTPRDLPRHELNNFGGRRRAPRSAARREGWVWGWLCDREIRRCFNESSGENGVCYAHYRFVRRWTCSVLLEGDRCKEDAEPQGNPVRSREGQLSTDSEDRARMELARVARAKEGGESDALGPRAEGAEKGRAERRPLGKELGH

SEQ ID NO: 46770 - protein, 155 aa, Zea mays
  Coding DNA Sequence Number=SeqID_4991
  Subcellular localization annotation: CTP_CleavageSite=30; ConfidenceScore=5.11e-01
MWGPPPPRSLPACVVFVLMLLVWPARGGPAQRARRGRLGADPWPTRGPCPGSTLARPRPGAPMARDLELGRRMRGASGPGVASLRVARPLPARGAQRDVRAAWPPAWLVRGASARPACDVHVWSARSACSGLLATAPTRPAHGAPGPGVCGLACD

SEQ ID NO: 46771 - protein, 541 aa, Zea mays
  Coding DNA Sequence Number=SeqID_4992
  Gene Ontology: Mol. function=transferase activity, transferring hexosyl groups; Cellular component=integral to membrane; Biological process=carbohydrate biosynthetic process
  Homolog annotation: Hit_ID=Q6ZGT9; Match level="QueryCoverage=81%, HitCoverage=89%, E-value=0.0, Identity=70%"; Hit description =Putative glycosyl transferase protein A
  Pfam annotation: Domain name=Glyco_transf_8; Domain location=221-515; Score=242.0; E_value=1.3e-69; Accession=PF01501.10; Description =Glycosyl transferase family 8
MGVPDFCALARIQCAAAGEFLRPLFPGAPNIVRCTPDSPGQALSNSHDALAMAGARASARRRVALAAVITLILLASVSFLLSATATSSAAAASPASRLAIVQRHAEDHAAVLAAYTAHARHLSAASASQTDAFLSISSRLSALAARLSVSTVAALEKEIKAQVKRARSLAGGAKEAFDTQSKTQKLSDTVFAVGQQLLRARRAGVLNSRIAAWSTPKSLHCLAMRLLEARLANASAIPDEAPVAPPQLADPSLYHYAVFSDNVLAVSVVVASAARAAAEPSRHVFHVVTAPMYLPAFRVWFARRPPPLGAHVQLLSVSDFPFLNATYSPVLRQVEDGNRDVALLDYLRFYLPEMFPALRRVVLLEDDVVVQRDLAGLWRVDMGANVNAALHTCFGGFRRYGKYLNFSEPVVRESFSDRACAWSYGVNVFDLQAWRREQCTEQFHRFMEMNENGTLWDPTSVLPVGLMTFYGKTKPLDKSWHVMGLGYNPHIRPEDIRGAAVIHFNGNMKPWLDVAFNQYKHLWTKYVDTEMEFLTLCNFGL

SEQ ID NO: 46772 - protein, 331 aa, Zea mays
  Coding DNA Sequence Number=SeqID_4993
  Gene Ontology: Mol. function=transporter activity; Cellular component= integral to membrane; Biological process=transport
  Homolog annotation: Hit_ID=Q19KC1; Match level="QueryCoverage=91%, HitCoverage=100%, E-value=1e-140, Identity=83%"; Hit description =NOD26-like major intrinsic protein
  Pfam annotation: Domain name=MIP; Domain location=41-254; Score =205.2; E_value=1.5e-58; Accession=PF00230.10; Description=Major intrinsic protein
MSTNSRANSRANFNNEIHDIGTAVHNSSSLPPAYYDRSLADMFPPHLLKKVVSEVVSTFLLVFVTCGAAGIYGSDKDRISQLGQSVAGGLIVTVMIYAVGHISGAHMNPAVTLAFAVFRHFPWIQVPFYWAAQFTGAICASFVLKAVLHPIAVLGTTTPAGPHWHSLIIEVIVTFNMMFVTLAVATDTRAVGELAGLAVGSAVCITSIFAGAVSGGSMNPARTLGPALASNLYTGLWIYFLGPVLGTLSGAWTYTFIRFEEAPSKDASSSHSQKLSSFKLRRLQSQSVAADADDDEELDHIQVHVALIMSSSRNMGPSLPDIYMRTYGSNL

SEQ ID NO: 46773 - protein, 223 aa, Zea mays
  Coding DNA Sequence Number=SeqID_4994
  Subcellular localization annotation: CTP_CleavageSite=43; ConfidenceScore=5.12e-01
MGPPYRISHWAPKKSETALVVSQFSQLAKVLLTCLPVMFTGDSCMKNWPCRTSECCRHKSKPRTKREGVQNSVSLHTFTTGVPETRSSAESFVTASAQPVCKCKAKQIYDLAHHLNPAIGPAIKNNGGNALRRTNGRSRRYGWLARVVYSSYEAEYMLNANLYNKVRSGDDVPAIAFSRSGESGSSRRDLPILEFVRHHCYIAVVTSTSRFIPRYIRLPPARR

SEQ ID NO: 46774 - protein, 259 aa, Zea mays
  Coding DNA Sequence Number=SeqID_4995
  Gene Ontology: Mol. function=nucleic acid binding; Cellular component= intracellular; Biological process=DNA integration
  Homolog annotation: Hit_ID=Q8H6I0; Match level="QueryCoverage=99%, HitCoverage=16%, E-value=2e-99, Identity=68%"; Hit description =Putative gag-pol polyprotein
MSGAHAKKEMVTGEKPATSHGKAPSGESGNKKREESPPHVKSHRSRDKKKKMKKVVYYETDSSSPSTFGSDTSSVTSKRHERKKFSKIPLHYPRISKHTPLLSVPLGKPPVFDGEDYCMWSDKMKHHLTSLHASIWDIVEFGAQEPSVGDEDYDSDEVAQIRHFNSQATTILLASLSREEYNKVQGLKSAKEIWDVLKTAHEGDEVTKITKRETIARELDRFMLHQGEEPQAMYNRLKTLVNQVHNLESTKWDDHEMVK

SEQ ID NO: 46775 - protein, 112 aa, Zea mays
  Coding DNA Sequence Number=SeqID_4996
  Subcellular localization annotation: CTP_CleavageSite=51; ConfidenceScore=5.48e-01
MVSTAASCLTITLELTSPSPLPPRCTPSCTPPCPTPPSQQQQRWFESKVVPAAWSSGYLRVRRRLPVLQRQDLVGVGAPVRWKPGCAIKTRTVKIDWQGQITILTPNYSIRL

SEQ ID NO: 46776 - protein, 240 aa, Zea mays
  Coding DNA Sequence Number=SeqID_4997
  Homolog annotation: Hit_ID=Q8LQ55; Match level="QueryCoverage=84%, HitCoverage=51%, E-value=2e-40, Identity=43%"; Hit description =Integral membrane protein-like
  Pfam annotation: Domain name=DUF588; Domain location=109-224; Score =28.8; E_value=1.9e-05; Accession=PF04535.3; Description=Domain of unknown function (DUF588)
MASTPRTPAPERSPPPVPTPPPPLEDEPPPYLADGKRSGQSTPKRAETKLPLSSPAVAVHFDPVEEAVTSPLRLGKARLDQQQQQQHAAGAAESGASVVPGVAAAVAAVAERRELLLALRLATAVLSLAAFSVIASARTSGWAGDYYARHLQYRYAVAVNVIVFAYSVAQSLGKIRHLVLAYLLMSASSAAASRNDLWVSRFGTDAFVRKITGALWLSFVAFLVLALNAVISTANLFSMV

SEQ ID NO: 46777 - protein, 301 aa, Zea mays
  Coding DNA Sequence Number=SeqID_4998
  Gene Ontology: Mol. function=carbonate dehydratase activity; Cellular component=chloroplast; Biological process=carbon utilization
  Homolog annotation: Hit_ID=Q41728; Match level="QueryCoverage=54%, HitCoverage=66%, E-value=1e-81, Identity=89%"; Hit description =Carbonic anhydrase
  Pfam annotation: Domain name=Pro_CA; Domain location=1-164; Score =271.9; E_value=1.2e-78; Accession=PF00484.9; Description=Carbonic anhydrase
YMVFACSDSRVCPSVTLGLQPGEAFTVRNIAAMVPAYDKTKYTGIGSAIEYAVCALKVEVLVVIGHSCCGGIRALLSLQDGAPDNFHFVENWVKIGFPAKVKVKKEHASVPFDDQCSILEKEAVNVSLENLKTYPFVQEGLAKGTLKLVGAHYDFVSGNFLPTEEAHQYSSNRAGLGRIVGLRLVKDYLLRRPAYKKKRMTSPPGMMNENNKVPTPTFFFYLCHPLCIFPSSYLLFVVVLPFSEVLDWSTFSVVLAERRAYRRTSRTSCGTPHATPIKYDFFHMILHSIWLSRANQVELDG

SEQ ID NO: 46778 - protein, 109 aa, Zea mays
  Coding DNA Sequence Number=SeqID_4999
MARAGKGRLVVDLGRGQGREKKSQGEALEILGAIVGAEGPVPMEQGGSSSAPWTTEGWMGVVSAAKPKGGAPMGKEDRERRPWRGCWRPWSSCALGKKARRKRVAARKI

SEQ ID NO: 46779 - protein, 63 aa, Zea mays
  Coding DNA Sequence Number=SeqID_5000
MEAESGSLKMLSECLVFCYMRRRVPFIAPRQATVSRKRHWLTVQSGAPPDSPVNFSHGAFGFS

SEQ ID NO: 46780 - protein, 104 aa, Zea mays
  Coding DNA Sequence Number=SeqID_5001
MSERPPGKLHELEANARGWARAQELGVVAMAEQREQRAMDGGAEAELENGARREEHATGLEKGDGRAHGARLRAKPEHRTQMHRVARQASMARAPKARGMQGEG

SEQ ID NO: 46781 - protein, 171 aa, Zea mays
  Coding DNA Sequence Number=SeqID_5002
  Gene Ontology: Mol. function=protein binding; Cellular component =nucleus
  Homolog annotation: Hit_ID=Q8LNU5; Match level="QueryCoverage=99%, HitCoverage=25%, E-value=7e-66, Identity=76%"; Hit description =Nucleolar complex protein 2 homolog
MTDEQMIAFIVHRVRASAVFLTAFPSLLRKYVKALFHTWARGLGAMPLVSFMFLRDLCIQVGSNCLDTCLKGIYKAYLVNCKLSKSISGSKQQHIQFLGNCVRELYSLDPQSAYQHAFIFIHQLGVILRGALTERGPKKSYQKIMIGNTYSALSFGPVLCADIVPRKNSDL

SEQ ID NO: 46782 - protein, 139 aa, Zea mays
  Coding DNA Sequence Number=SeqID_5003
  Subcellular localization annotation: CTP_CleavageSite=59; ConfidenceScore=5.12e-01
SGLGGAPGPGAGGASVAAASTVNDTATQSGVGGAPAWLRCADACCGGGPRLIKNAAALFAAAVSPLHSCEQSTNARACRMPAFPVRASASSSVVGSLTGTRRPRLIKNTTVIFATAPSTLVGWDNKSARTLMYDLAGRE

SEQ ID NO: 46783 - protein, 142 aa, Zea mays
  Coding DNA Sequence Number=SeqID_5004
MSVTLWCAGLEHRYGGRQDDNEVINLRKGGRYRPRLWLVLNLSLCLAEVFESFYSRVLSFPLFVIVLRTIEFLCEDLVWGLICVPPASLPLCWAWESHLQAKKDGVGSGWRQRDTSTIGEPSTTGVDRRRGGQGSWFASSIV

SEQ ID NO: 46784 - protein, 70 aa, Zea mays
  Coding DNA Sequence Number=SeqID_5005
MAPTTLTTDDLLKRVKGTVGKADYTVPFPMCPERGNISLPGAQSVCADPTPAKAVKGAEAVRLALGGKTG

SEQ ID NO: 46785 - protein, 133 aa, Zea mays
  Coding DNA Sequence Number=SeqID_5006
MRKAWLREGLHGAADFGDNSVQRGRGCMAWGWDEQHTAMAENASEGGYATLDARRRTMMQHDTRLLRGISSDTWRASQRKMCIDDKGAQHLETSLGIDDEASSPICSARRGGSSLPVNSRRRLLTPTTRGVKS

SEQ ID NO: 46786 - protein, 109 aa, Zea mays
  Coding DNA Sequence Number=SeqID_5007
MAPKKVTTRASSSLDEATKVALVDKKGKATPAEETLPTTTKNKIEAVNNKNARSKYPPTPKGNIHTCIFGDLPHDDPPAGFAPIAHLTAQEILQEGEDMGILVEDQIKL

SEQ ID NO: 46787 - protein, 68 aa, Zea mays
  Coding DNA Sequence Number=SeqID_5008
  Subcellular localization annotation: CTP_CleavageSite=45; ConfidenceScore=5.48e-01
MKAAGFPPLSLAPAALFPPFALCLTPTHLGWGTRRHFTRRSRDPSVSKRRHQQIEFAEQELIEGKLCP

SEQ ID NO: 46788 - protein, 38 aa, Zea mays
  Coding DNA Sequence Number=SeqID_5009
MTQHLRIYPTQASCQHRACDPDASRASALRLCGSTDPE

SEQ ID NO: 46789 - protein, 294 aa, Zea mays
  Coding DNA Sequence Number=SeqID_5010
  Gene Ontology: Mol. function=RNA-directed DNA polymerase activity; Cellular component=intracellular; Biological process=RNA-dependent DNA replication
  Homolog annotation: Hit_ID=Q8W0Y2; Match level="QueryCoverage=99%, HitCoverage=14%, E-value=1e-153, Identity=91%"; Hit description =Putative gag-pol
  Pfam annotation: Domain name=RVT_1; Domain location=1-152; Score=7.5; E_value=2.6e-05; Accession=PF00078.17; Description=Reverse transcriptase (RNA-dependent
MCVDYNGLNQACPKVPYPLPRIDQIVDSTAGCETLSFLDAYSGYHQIRMKESDQLATSFITPFGMYCYVTMPFGLRNAGATYQRCMNHVFGEHIGRTVEAYVDDIIVKTRKASDHLSDLETTFRCLKVKGVKLNLEKCVFGVPRGMFLGFIISKRGIEANTEKIAAITNMGPIKDLKGVQRVMGCLAALSRFISRLGERGLPLYRLLRKAECFTWTPEAEEALGNLKALLMNMPILVPPAAGEALLIYIAATTQVVSVAIVVERREEGHALPVQRLVYFISEVLSETKILYPQI

SEQ ID NO: 46790 - protein, 109 aa, Zea mays
  Coding DNA Sequence Number=SeqID_5011
  Homolog annotation: Hit_ID=Q9FPQ5; Match level="QueryCoverage=80%, HitCoverage=23%, E-value=4e-07, Identity=39%"; Hit description =Gamete-specific hydroxyproline-rich glycoprotein a2
MEEADRLFLSLVAEPSPLPLFPYKRPSQAPPLPYRTGPGSPSPLSLLMQECRSDHPLVSAPSPYSPESLLPDRPRPSLAVEPSGAAPRHLPYTCTSISLPLAELSPVTP

SEQ ID NO: 46791 - protein, 113 aa, Zea mays
  Coding DNA Sequence Number=SeqID_5012
  Subcellular localization annotation: CTP_CleavageSite=55; ConfidenceScore=5.40e-01
MDSKTASKTLSIHLFLGVTVAVLNGFGSRITDGGLSTFGCSAVFSDPGSFTGSILASIDVEGAVFMAEGAASALSISFGTSVVLIGFSLRVKTLALFSFGALEEVEAATFEST

SEQ ID NO: 46792 - protein, 134 aa, Zea mays
  Coding DNA Sequence Number=SeqID_5013
MPPCGLLPVTFNGRHASYFYKRPLPILLPINPSIISHVCVTVLQKHPSIPADPRAIPADPASTIPADPAAAIPAAAIPVAKRRSPVPKRRRTPSLFLPPSPLRADSSARQNPVVPQPDRFLSELTSTMKQYWSG

SEQ ID NO: 46793 - protein, 122 aa, Zea mays
  Coding DNA Sequence Number=SeqID_5014
  Gene Ontology: Mol. function=structural constituent of ribosome; Cellular component=ribonucleoprotein complex; Biological process =translation
  Homolog annotation: Hit_ID=P60039; Match level="QueryCoverage=56%, HitCoverage=30%, E-value=3e-11, Identity=48%"; Hit description=60S ribosomal protein L7-3
  Pfam annotation: Domain name=Ribosomal_L30_N; Domain location=14-73; Score=22.0; E_value=2.3e-05; Accession=PF08079.2; Description =Ribosomal L30 N-terminal domain
MSSTEAKAVAVLESVLRLEKWAAYKKALADRKKALESRTIIFTHSKQYAQEYDTEEMELVQLKHEARLKGGFYMMTLSLAALGSLMWLRKNKPRTLVPIIYAYALLSATMPSITSFLPVNIF

SEQ ID NO: 46794 - protein, 109 aa, Zea mays
  Coding DNA Sequence Number=SeqID_5015
  Gene Ontology: Mol. function=RNA binding; Cellular component=nucleus; Biological process=rRNA processing
  Homolog annotation: Hit_ID=Q6AT27; Match level="QueryCoverage=51%, HitCoverage=25%, E-value=3e-13, Identity=51%"; Hit description =Putative fibrillarin protein
MGATVAADLVVVEVREVKGGRGGRTHRGGRGGGMNGGSKAVVVVHKHVGVFISKSKEDALCTKNMVSGESVYGEKCASVQAPGTRVLYLGAASSTIVSHMSDIQNPSLS

SEQ ID NO: 46795 - protein, 165 aa, Zea mays
  Coding DNA Sequence Number=SeqID_5016
MVATGDDKSPWQNSCTQAGHAHNRSFAHDQGLLANVPNHPATTIEDNGNHSLYLSRTSGVFHGENWWRLGVMTGIRRFTPSWRGLLQWIADIAEISYAPGLVCARKIYSGRMRHYQAGPNCQRLLTVLVGTGLQRLSLELECGSKLRHTTYGGARTEETHVHLAF

SEQ ID NO: 46796 - protein, 181 aa, Zea mays
  Coding DNA Sequence Number=SeqID_5017
MEATRWEGLLVWRKRHERGGEGGEDAGDWGGEAGGDTATDKLCLTTARGRWRLNYVMAVMASNGSYSVMSDGAFPLRISKSEPGLGEAEVRPRSQPNPFWIQRREAEFALEGLPVLRSYSLRGVGELGRGGDHRYGVRAPCPKPGFSREHTPFEAEFVETPERGLGRSATYDPSSSWTYLD

SEQ ID NO: 46797 - protein, 125 aa, Zea mays
  Coding DNA Sequence Number=SeqID_5018
  Subcellular localization annotation: CTP_CleavageSite=32; ConfidenceScore=5.08e-01
MVGIPRRSYPTHPEHLPSPFSRLWSRSRGQSLANEFVGPCSPVPALAGDPRAPSEAICPVSGGLAAAKGAVPVTESHPCRALTRAVDFVCASPEPADSLAPRVSVSTRPEPRLLGTRVRAIAPQI

SEQ ID NO: 46798 - protein, 142 aa, Zea mays
  Coding DNA Sequence Number=SeqID_5019
MGEGAAPGWGRGWAARRGRVARQGRGEGGAGEGARAAPGRVAVFRAAGKLGGGDESRGREGVTRCEHSEVFIDWDALQIVESQDEEGRIEIVDDDRMYELIRLRAKDEAAEKAGEAFKRQENEPSSGGKETVDVAIHVMMKF

SEQ ID NO: 46799 - protein, 192 aa, Zea mays
  Coding DNA Sequence Number=SeqID_5020
  Gene Ontology: Mol. function=phosphoinositide binding; Biological process=intracellular signaling cascade
  Homolog annotation: Hit_ID=Q2RAA5; Match level="QueryCoverage=67%, HitCoverage=12%, E-value=6e-51, Identity=74%"; Hit description=Phox domain-containing protein, putative, expressed
MARAGVDLGQKTPPAHLGGSNAEDDSGVACSVDPAWKMTAACPAVPATTAESMPPWHYCLQTLWPNGIFFTKLDEYKGNAGTSEFDKQSLGSPTLAVGNKKGRTSSFELHLEASRNASEVKKLILDGTPSALVSIIGYKQYRRSARDMYYFLQLAYAMLEQVLVTVFPELRQLIEDIHEKGRKEQASFTYQL

SEQ ID NO: 46800 - protein, 105 aa, Zea mays
  Coding DNA Sequence Number=SeqID_5021
  Subcellular localization annotation: CTP_CleavageSite=28; ConfidenceScore=5.43e-01
MAVMGSTSKKMYLHQPVSVIARSPSHARASTPRAPLASHLAHAAADVPTSLLIPVFLTTVARLAHMKVERDDPFAALELDDDACSPCRLLRASHVALIPLERRLE

SEQ ID NO: 46801 - protein, 845 aa, Zea mays
  Coding DNA Sequence Number=SeqID_5022
  Gene Ontology: Mol. function=helicase activity; Cellular component =mitochondrion; Biological process=translation
  Homolog annotation: Hit_ID=Q94HS0; Match level="QueryCoverage=79%, HitCoverage=81%, E-value=0.0, Identity=52%"; Hit description =Putative salt-inducible protein
  Pfam annotation: Domain name=PPR; Domain location=149-183; Score=7.4; E_value=0.98; Accession=PF01535.11; Description=PPR repeat
  Pfam annotation: Domain name=PPR; Domain location=184-218; Score =23.4; E_value=0.00081; Accession=PF01535.11; Description=PPR repeat
  Pfam annotation: Domain name=PPR; Domain location=219-253; Score =31.6; E_value=2.7e-06; Accession=PF01535.11; Description=PPR repeat
  Pfam annotation: Domain name=PPR; Domain location=254-288; Score =41.5; E_value=2.9e-09; Accession=PF01535.11; Description=PPR repeat
  Pfam annotation: Domain name=PPR; Domain location=289-323; Score =44.9; E_value=2.8e-10; Accession=PF01535.11; Description=PPR repeat
  Pfam annotation: Domain name=PPR; Domain location=324-358; Score =48.0; E_value=3.1e-11; Accession=PF01535.11; Description=PPR repeat
  Pfam annotation: Domain name=PPR; Domain location=426-460; Score =33.6; E_value=7.1e-07; Accession=PF01535.11; Description=PPR repeat
  Pfam annotation: Domain name=PPR; Domain location=461-495; Score =33.8; E_value=6.1e-07; Accession=PF01535.11; Description=PPR repeat
  Pfam annotation: Domain name=PPR; Domain location=496-529; Score=9.7; E_value=0.53; Accession=PF01535.11; Description=PPR repeat
  Pfam annotation: Domain name=PPR; Domain location=530-564; Score =32.7; E_value=1.3e-06; Accession=PF01535.11; Description=PPR repeat
  Pfam annotation: Domain name=PPR; Domain location=565-599; Score =51.7; E_value=2.4e-12; Accession=PF01535.11; Description=PPR repeat
  Pfam annotation: Domain name=PPR; Domain location=600-634; Score =36.7; E_value=7.9e-08; Accession=PF01535.11; Description=PPR repeat
  Pfam annotation: Domain name=PPR; Domain location=635-669; Score =47.7; E_value=3.8e-11; Accession=PF01535.11; Description=PPR repeat
  Pfam annotation: Domain name=PPR; Domain location=670-704; Score =29.9; E_value=8.7e-06; Accession=PF01535.11; Description=PPR repeat
  Pfam annotation: Domain name=PPR; Domain location=705-738; Score =11.9; E_value=0.29; Accession=PF01535.11; Description=PPR repeat
  Pfam annotation: Domain name=PPR; Domain location=739-773; Score =10.9; E_value=0.38; Accession=PF01535.11; Description=PPR repeat
  Pfam module annotation: Pfam domain module=PPR::PPR::PPR::PPR::PPR::PP R::PPR::PPR::PPR::PPR::PPR::PPR::PPR::PPR::PPR::PPR; Domain location
  Pfam module annotation: Domain location=530-564::565-599::600 -634::635-669::670-704::705-738::739-773
MRLLAAAARQSNTPQRILVTLHHFISTATTTTSSSAYDPTAQFIHPDQHRLLPLPASLRRHAVLALADLLKTSLQCHLALHAVSPLSGSPYSTPFASRFAAAAHLATSDPALRPFAAILIAALLPVASSDLLLWSSSDSASGSARAHYCALRLALHAFLAAGMAAEALDVLARVRRSGNTPSLSALSALLRLLFRSGEVRAAWNVFEEMTAEGPRPSLATFNAMLLGFCHRGMVRVASGLLGIMGKSGIAPDVCSYNILIKGHCVFGWSRDAFKMFEGMHRSGCEPTVVTYNILVDVLCHEGRMPEARRLFDEMAQVGIQVNTITFNVLIDGYAKSGQMDQASAAYREMQARGLVPDSCTFNIIAARAHKFGYAAQLVHDHDMFSSHMSADGLDMLVCRLCWDHRLDDAWELLLGAIEQGVPLRVTGFNALIAAYSKEGLHEEASELYRIMNKLGLAPSSSTFNYLIMGLCNQGRLDEAQLLLEHMVSKGYCLSTSFTICLDAYFRDGNAVGALKCWDDMGNIGLQTDFIAFSAYINGLCRLDCVNEAYQAFAEMTSRGIVPNNITYNSIISALCKAGNMTEALKLVQNMRQSGLVPDIYTSNILIDGLCREGKLKMVDNLLLDMCSNGLTPDTVTYNTIINAYCRAQDMNSAMNFMNKMLVAGCEPDIFTYNIWMHSLCRNHMLNQAGKLLDELVAVDCSPNSVTYNTLMDGICSDVLDRAMILTGRLIKMAFKPNTITLNVFLSHFCKQGFGNRALMWAEKLREDSFVFDGATRNIIDWARREMEDDPKANNEDIGRCMFLEFLMFMTYEAMLNSRSSKATHMLTEKGFDPASSSMIRILDTG

SEQ ID NO: 46802 - protein, 311 aa, Zea mays
  Coding DNA Sequence Number=SeqID_5023
  Gene Ontology: Mol. function=binding
  Homolog annotation: Hit_ID=Q10P70; Match level="QueryCoverage=99%, HitCoverage=47%, E-value=1e-115, Identity=71%"; Hit description =Armadillo/beta-catenin-like repeat family protein, expressed
  Pfam annotation: Domain name=Arm; Domain location=174-214; Score=7.1; E_value=1.6; Accession=PF00514.13; Description=Armadillobeta-catenin -like repeat
  Pfam annotation: Domain name=Arm; Domain location=220-259; Score =11.0; E_value=0.52; Accession=PF00514.13; Description=Armadillobeta -catenin-like repeat
  Pfam module annotation: Pfam domain module=Arm::Arm; Domain location =174-214::220-259
  Subcellular localization annotation: CTP_CleavageSite=67; ConfidenceScore=5.53e-01
MSNGTPGCDQDTKRNPQMQSVVHSAMSAKTNTNGSLVPPFRPQLGTSGSSGRGAREVEDPETKAQLKAMAAKALWKLAHNHLGVCKSITESRALLCFAVLLEKGDGDMGTDVQYFSAMAIMEIARVAEHSLVLRQSAFKPSSPAAKAVVDQLLGVVCRGEYDTLLLPCITGLGCLARTFTASETRIVAPLVQLLDEREPPVIKEAVVALTKFACTENHLHVNHCKAIVDDGGARHLVQLVYLGDEVQIEALILLCYIALYVPESEELAQAGVLAVLLWASKQAQMVQDTRVEALLPDAKGRLELFQSRASR

SEQ ID NO: 46803 - protein, 236 aa, Zea mays
  Coding DNA Sequence Number=SeqID_5024
  Gene Ontology: Mol. function=binding
  Homolog annotation: Hit_ID=Q10P70; Match level="QueryCoverage=90%, HitCoverage=37%, E-value=1e-32, Identity=49%"; Hit description =Armadillo/beta-catenin-like repeat family protein, expressed
MEVSQSPLWRMLSVLASTTEWSDFMCCCAVAAAAALFLELLEPTEYRLCSWIVPEASLHAHGRLLERGSEGGANPGLHELVHVLGVTAEEAQSPCRGLLAFVGAVLEQLEQRRHAVLLDDELGKVLVVAGERGEVGGRVSAGGGGTRVQARDVVPRLRRGWGSFCAMLGEAQERVVRPLSPVAPGEENAEQPTRRPRSAVSSAAHGPGEPGGGAEREEAAQPAGGPERTGRRGPRL

SEQ ID NO: 46804 - protein, 171 aa, Zea mays
  Coding DNA Sequence Number=SeqID_5025
MAWWEETRQYKGATVRIANRFLCSLHHHYYSKWRPQSNVASGATNNRAEATSGTAASPVAMLASQETLPSLLLPPRSTLPWPPPSMPRPPIGIIALSGVASVNVAPGGIMVPVGIAGVAPGIGVASGTVVVIVPGTVAGVAPGVVVDFWLRSCHGYIQEQRIHPVRSSRAQ

SEQ ID NO: 46805 - protein, 315 aa, Zea mays
  Coding DNA Sequence Number=SeqID_5026
  Gene Ontology: Mol. function=metal ion binding
  Homolog annotation: Hit_ID=Q53MH1; Match level="QueryCoverage=54%, HitCoverage=82%, E-value=1e-45, Identity=58%"; Hit description=Zinc finger, C3HC4 type (RING finger), putative
  Pfam annotation: Domain name=zf-C3HC4; Domain location=201-236; Score= 12.4; E_value=0.0081; Accession=PF00097.15; Description=Zinc finger, C3HC4 type (RING finger)
MGWWWWPLASWVEVAGLGRGDEGLGVGDEELGVGDEELGAGRGVGDEGLIPPSPVLDYPQKKDLHTRQQNLEEHEPLSSAFDGSSPPSSIVAVDTNLDTSTPDTYRAPPAPLPYDVVLAVPTTPGLEKLDNKSKTDDQQESINDQESLKVDESSPRPDAIVLWPCGNGGERLKIVPKSKKKCFNSITALFAEWSLNMDMGMEYDEENPRSVTKCEHHFHLCCILEWMERKDTCPVCDQFKSLRVGTFAFAQIIASRHGFPSLLVSDICWFFQESSQLFTWYIRWLQCCKVLAQIRWRVNSVYQSGLASSPEVLVG

SEQ ID NO: 46806 - protein, 102 aa, Zea mays
  Coding DNA Sequence Number=SeqID_5027
MPPPVRPAIVVVMLQFLGAMKALRNATEATKSTFEQLHYVGAFTSQVASGAFIKSITSQLRSRRAVLFKKGTNRPKEMDPKGKGIVINDKEKESLVNEPGDD

SEQ ID NO: 46807 - protein, 47 aa, Zea mays
  Coding DNA Sequence Number=SeqID_5028
MKFQAVKDGGCFLLSSSSRLARERPKETILLQQKSLSSKGKNISGLR

SEQ ID NO: 46808 - protein, 71 aa, Zea mays
  Coding DNA Sequence Number=SeqID_5029
  Subcellular localization annotation: CTP_CleavageSite=42; ConfidenceScore=5.08e-01
MNHGKVLTVSQPQRDLLIPLEIVATPFSPFQTPLSMNSPCSVASRLQGPLCKSGNEGVRAGVFCLSWAGSG

SEQ ID NO: 46809 - protein, 52 aa, Zea mays
  Coding DNA Sequence Number=SeqID_5030
MGHHFGAERGGEDGPTVGVLVRPQINRSRAFDDVVPWLVWALGWPSVAVGAN

SEQ ID NO: 46810 - protein, 90 aa, Zea mays
  Coding DNA Sequence Number=SeqID_5031
MGSEGAGGDGSYRDRETSVRRTLGRRRLWRKWRNGGVPRNPREAVQVSVMEKWLAAGSVRGQRENRRRETGQVKDRYRKIRNMKDVAMSS

SEQ ID NO: 46811 - protein, 115 aa, Zea mays
  Coding DNA Sequence Number=SeqID_5032
MATTVGGVWADLPKNLQRWDGRSFPFYDHLHEIYNGKIAEGKNCRRSLEKECKVANKTEQEDYVQISTPSPTINGMQSSFFDLLEDGADLNNENGFNMDINTSQYRALEEEQFGT

SEQ ID NO: 46812 - protein, 141 aa, Zea mays
  Coding DNA Sequence Number=SeqID_5033
MGKNKKGETSSHHFGNKRKREPSPPSEDFGDSESEGSPVYASPPVSSDDSNDSPGIAAEVWMYIWAVERSGLEGSDESEISSDEEDSSNSSEEGSGGDDDDEGDNGDGVMATVEAMGRQGRQRQQQGQWQSATGLNVSIDK

SEQ ID NO: 46813 - protein, 59 aa, Zea mays
  Coding DNA Sequence Number=SeqID_5034
MTAVHDVFHVSELRKCVRLPAEVLPEPEIEIEPDLSYREYPVKRGNIAKRPLKNPKSIP

SEQ ID NO: 46814 - protein, 305 aa, Zea mays
  Coding DNA Sequence Number=SeqID_5035
  Gene Ontology: Mol. function=hydrolase activity; Cellular component =integral to membrane; Biological process=metabolic process
  Homolog annotation: Hit_ID=Q6PPF8; Match level="QueryCoverage=99%, HitCoverage=100%, E-value=1e-157, Identity=86%"; Hit description =Putative inosine-uridine preferring nucleoside hydrolase
  Pfam annotation: Domain name=IU_nuc_hydro; Domain location=10-302; Score=160.9; E_value=3.3e-45; Accession=PF01156.9; Description =Inosine-uridine preferring nucleoside hydrolase
MERDGQQTRRDKLIIDTDPGIDDSMAILMAFRAHTLEIIGLTTIFGNVDTEGATCNALLLGGKPRIADFVHGSDGIGNLFLPAPSAKKVEESAADFMVNKVSEFPGEVSVLALGPLTNVALAIKRDPSFASKVNKIVVLGGAFFVAGNVNPAAEANILGDPEAADIVFTSGADVIVVGINITTQVCLTDEGLLELRNSKGKHAPFLSETCKFYRDWHVKSDGFHGIFLHDPVSFTAVLHPEYFTFKKGVVRVETQGICTGHTLMDQGLKKWNSENPWSGYKPISVAWTVDVPKVIGFVKKLLMAP

SEQ ID NO: 46815 - protein, 112 aa, Zea mays
  Coding DNA Sequence Number=SeqID_5036
MARIRSERERAHRRALTGEPEESATGKGKRADQSGPAPGGAGDRQMGPKGRARARNSIRESRPRNRDWTVEIKRQGSKAAGGAALAHSDEVTEDAAGAGFRGFEVVGVGHWR

SEQ ID NO: 46816 - protein, 519 aa, Zea mays
  Coding DNA Sequence Number=SeqID_5037
  Gene Ontology: Mol. function=transferase activity, transferring acyl groups, acyl groups converted into alkyl on transfer; Cellular component=intracellular; Biological process=carboxylic acid metabolic process
  Homolog annotation: Hit_ID=O04973; Match level="QueryCoverage=95%, HitCoverage=86%, E-value=0.0, Identity=67%"; Hit description=2 -isopropylmalate synthase A
  Pfam annotation: Domain name=HMGL-like; Domain location=1-252; Score =277.9; E_value=2e-80; Accession=PF00682.9; Description=HMGL-like
  Pfam annotation: Domain name=LeuA_dimer; Domain location=351-496; Score=166.9; E_value=5e-47; Accession=PF08502.1; Description=LeuA allosteric (dimerisation) domain
  Pfam module annotation: Pfam domain module=HMGL-like::LeuA_dimer; Domain location=1-252::351-496
MTSAEKLVVARQLARLGVDVIEARVGNPPPGDDGGAHVPVICGLSRCNRRDIDAAWEAVRHARRPRIHTFIATSEIHMQHKLRKTPDQVVAVAREMVAYARSLGCADVEFSPEDAGRSNREFLYHILEEVIKAGATTLNIPDTVGYTLPYEFGKLISDIKENTPGIENAIISTHCQNDLGLATANTLAGAHAGARQLEVTINGIGERAGNASLEEVVMAIKCRGELLDGLYTGINSQHITLTSKMVQEHSGLHVQPHKAIVGANAFAHESGIHQDGMLKYKGTYEIISPDDIGLARANEFGIVLGKLSGRHAVRSKLVELGYEISDKEFEDFFKRYKEVAEKKKLVHHLQRVTDEDIEALLSDEIFQPKVIWSLADVQATCGTLGLSTATVKLIGPDGEERIACSVGTGPVDAAYKAVDQIIQIPTVLREYGMTSVTEGIDAIATTRVVVTGDVANNSKHALTGHSFNRSFSGSGAAMDIVVSSVRAYLSALNKMCSFAGAARASSTEVPGSASVQRAE

SEQ ID NO: 46817 - protein, 369 aa, Zea mays
  Coding DNA Sequence Number=SeqID_5038
  Gene Ontology: Mol. function=strictosidine synthase activity; Cellular component=cellulose and pectin-containing cell wall; Biological process=biosynthetic process
  Homolog annotation: Hit_ID=Q2QXZ1; Match level="QueryCoverage=91%, HitCoverage=80%, E-value=1e-119, Identity=62%"; Hit description =Strictosidine synthase family protein, expressed
  Pfam annotation: Domain name=NHL; Domain location=205-233; Score =12.7; E_value=0.37; Accession=PF01436.11; Description=NHL repeat
  Pfam annotation: Domain name=NHL; Domain location=94-123; Score=9.2; E_value=1; Accession=PF01436.11; Description=NHL repeat
  Pfam annotation: Domain name=SGL; Domain location=47-297; Score= -59.9; E_value=1.3e-05; Accession=PF08450.2; Description=SMP -30GluconolaconaseLRE-like region
  Pfam annotation: Domain name=Str_synth; Domain location=149-238; Score=122.6; E_value=1.1e-33; Accession=PF03088.7; Description =Strictosidine synthase
  Pfam module annotation: Pfam domain module=NHL::NHL::SGL::Str_synth; Domain location=205-233::94-123::47-297::149-238
MAVLAGAAVVAVAAAAMVAALLSSPDALRDVAVLEIGGGEGRVELVPVDAGAAGPESLAFDPAGGGPYAGVSDGRVLRLDSCRGSQDPGREHECGRPLGLKFNPDTGELYVADAYHGLRMVAPGPGGGKASRPVAPEWWQGARAFSFANGVEVDPGTGAVYFTETSTRFQRREFLRIVVSGDTTGRLLRYDPRGGGGVEVLADGLAFPNGLAMSSDGTHLLLAETTTGRILRYWLRPTAPKAPALLEEVARLPWFPDNIRMSPRGGFWVGLHARRGKLAQYCISYPWLRRLVLALPPRHVQRASSLLSRLGRQVIALRLSEEDGRVVEMASVHGDLRRVFRSVSEVAERNGSIWIGSVMSPFLGVYKLQ

SEQ ID NO: 46818 - protein, 45 aa, Zea mays
  Coding DNA Sequence Number=SeqID_5039
MGTPLADSLLSAVRQTLSKGYDHELDYPPPYMMFAAAGLKLFELL

SEQ ID NO: 46819 - protein, 101 aa, Zea mays
  Coding DNA Sequence Number=SeqID_5040
  Homolog annotation: Hit_ID=Q6KAK1; Match level="QueryCoverage=67%, HitCoverage=8%, E-value=1e-17, Identity=46%"; Hit description =Protein kinase-like
MEDNLPVNVQEYQELAKKLILKKARIPLLVLQEHERRLERIRNAFKGIEGSHVWPFQLIHAVEQSHSKGILHGDIKCENVLVTSWNWLYLADFASFKPTAT

SEQ ID NO: 46820 - protein, 122 aa, Zea mays
  Coding DNA Sequence Number=SeqID_5041
  Gene Ontology: Mol. function=two-component response regulator activity; Cellular component=nucleus; Biological process=two -component signal transduction system (phosphorelay)
  Homolog annotation: Hit_ID=Q9FRY9; Match level="QueryCoverage=99%, HitCoverage=49%, E-value=2e-29, Identity=60%"; Hit description =Response regulator 6
MPGYDLLRKVKDSSSLRDIPVVIMSSENNPSRINRTRCLEEGADESFLKPVRLSDMSNIKLHILKSRCREQHHHQSDSDGDNHGHGCGSAANKSGGDHSRKRKAEEEENEDVLLQNNRPRHS

SEQ ID NO: 46821 - protein, 647 aa, Zea mays
  Coding DNA Sequence Number=SeqID_5042
  Gene Ontology: Mol. function=oxidoreductase activity; Cellular component=integral to membrane; Biological process=electron transport
  Homolog annotation: Hit_ID=Q5CCK2; Match level="QueryCoverage=61%, HitCoverage=85%, E-value=1e-166, Identity=72%"; Hit description =Cytochrome P450
  Pfam annotation: Domain name=p450; Domain location=42-471; Score =65.3; E_value=1.9e-16; Accession=PF00067.12; Description=Cytochrome P450
  Subcellular localization annotation: CTP_CleavageSite=28; ConfidenceScore=5.07e-01
MDAGGPPPLFLLGAVLAAALGWLLVVWRAAAGRRRSASARLPPGSTGLPLIGETLRLIAAYKSPNPEPFIDERVARHGSGVFTTHVFGERTVFSADPAFNRLLLAAEGRAVSCSYPSSIATLLGPRSLLLTSGPAHKRLHSLTLTRLGRPASPPLLAHIDRLVLATMRGWDRPGAGAMRLPRRGQEDHLQPHRVAARQHRAWAVDRERPARARKKVAGALREVVRKRMDDKAEDDCGASKKNGEKKDMVEELLEAEGGSFSVEEMVDFCLSLLVAGYETTSVLMTLAVKFLTETPTALAQLKEEHDSIRGVKGKGQALEWSDYKSMPFTQCVISETLRVANLISGVFRRANTDIHFKGYVIPKGCKIFASFRAVHLSLDHYENARTFDPWRWQQGKSKLQSAEGASLFTPFGGGPRLCPGYELARVVVSVFLHHLVTRFSGPVRFSCKQPLGNSLRNRGITKQPPGNYHGEYLSGTIIRGTLKAPNSQLKDSAACATPTAVPLDRVSLTGNQALPKAPRRTPLRPTPGLGLGLRPGRRRNSAPPDPRARTRAKTRKTANSAPPDPRARTRAKTRKTANSAPPDPRARTRAKTRKTANSAPPDPRARTRAKTRKTANSAPPDPRARTRAKTRKTTKLRSARPQGSDSG

SEQ ID NO: 46822 - protein, 127 aa, Zea mays
  Coding DNA Sequence Number=SeqID_5043
MALLYPRVVHYMEVDEDFAAKIDDEITSLNQDVVAINKWRFMELKEDMQGDFVAKNEAYEMQTLKPEAEAIFLQRKEGQTCLFRGAKDCDTASEDGSKRFVDASVASATTGAESFRKEEKLVKIKES

SEQ ID NO: 46823 - protein, 42 aa, Zea mays
  Coding DNA Sequence Number=SeqID_5044
MALAVVWGGEVNIERGSDYMVKGIKVQFLDMKFMVTVQKKAL

SEQ ID NO: 46824 - protein, 89 aa, Zea mays
  Coding DNA Sequence Number=SeqID_5045
MACASSPLVSYPQGHLEEECIPRLCRARVATGFGGGAVGAEDVAAEAEVDGNEATKKDADARRWAREAGRRRLAQRGREAGHRRLWKEE

SEQ ID NO: 46825 - protein, 80 aa, Zea mays
  Coding DNA Sequence Number=SeqID_5046
MAWQTDLGWLPLFLFFSCSVLCFFLPHRTAQTDLIYYLLRGTGKHTFIVVAIFIPSPCREAAGIGIRAAVGCRVSKHSDV

SEQ ID NO: 46826 - protein, 210 aa, Zea mays
  Coding DNA Sequence Number=SeqID_5047
  Gene Ontology: Mol. function=peptidase activity; Cellular component =intracellular
  Homolog annotation: Hit_ID=Q655R7; Match level="QueryCoverage=74%, HitCoverage=76%, E-value=5e-69, Identity=74%"; Hit description=OTU -like cysteine protease-like
  Pfam annotation: Domain name=OTU; Domain location=94-191; Score=88.3; E_value=2.4e-23; Accession=PF02338.9; Description=OTU-like cysteine protease
MTEQQEGVSKSSSSSISSSTQESEEELTIGTLITEATNTTNSAKSLGKRLSHLDSIPHTPRVNGKIPDFNNATIDHESLLERLGTYGLAEYQIEGDGNCQFRALADQIFRNPDYHKHVRKAVVKQLKEFRKHYEGYVPMEYKVYLKKMKRSGEWGDHVTLQAAADRSFVKFLESTCTIQELWLSFWCEVHYNSLYAVEGEGFILLLLADI

SEQ ID NO: 46827 - protein, 100 aa, Zea mays
  Coding DNA Sequence Number=SeqID_5048
  Gene Ontology: Mol. function=transferase activity, transferring glycosyl groups
  Homolog annotation: Hit_ID=Q7XAG0; Match level="QueryCoverage=92%, HitCoverage=27%, E-value=4e-43, Identity=87%"; Hit description=GDP -fucose protein-O-fucosyltransferase 1
MKLGVLIPYLIKSAIDFEVCSRADVFVGNSFSTFSNLVVLSRTERLYNLGKASSCGENIGLSSYAYNVMGDDGGPQRWMTDMSDTSLQRLSYGTNNVSCH

SEQ ID NO: 46828 - protein, 33 aa, Zea mays
  Coding DNA Sequence Number=SeqID_5049
MVPGIIIMVTPTHGLRTLGLDIARRVVPCGRHG

SEQ ID NO: 46829 - protein, 1116 aa, Zea mays
  Coding DNA Sequence Number=SeqID_5050
  Gene Ontology: Mol. function=binding; Cellular component=ubiquitin ligase complex; Biological process=protein ubiquitination
  Homolog annotation: Hit_ID=Q6H6D6; Match level="QueryCoverage=82%, HitCoverage=89%, E-value=0.0, Identity=60%"; Hit description =Transducin-like
  Pfam annotation: Domain name=Arm; Domain location=668-708; Score=2.2; E_value=6.4; Accession=PF00514.13; Description=Armadillobeta-catenin -like repeat
  Pfam annotation: Domain name=Arm; Domain location=802-844; Score =17.1; E_value=0.063; Accession=PF00514.13; Description=Armadillobeta- catenin-like repeat
  Pfam module annotation: Pfam domain module=Arm::Arm; Domain location =668-708::802-844
  Subcellular localization annotation: CTP_CleavageSite=73; ConfidenceScore=5.05e-01
MMLPPPPPPSSLRDLLSRERVDEDEAPHLSPRRASGRSPPRRGASSRSSRHTSSPPLATTTTTTREAEGEAAAADAVVAVLSAYAGRLLRDAEFRRALRDKCAACLAPAAGAGEDDDAAAGRPVLANLELGIESIERLAADGSAAQPQAPRDAKIRSLRNSIRLLSVVASLHSPPPPPRPGAAAGDGGGRTCGVPNSHLAACAQLYLAVVYKMERNDRVAARHLMQVFADAPGLARRELLPDLWDHVFLPHLLHLKVWFAREADDLVAGRDADDRRTRMKALQRLYSDHMDSGTAQFAVYYKEWLQSGAAAPPPVPSVPLPSTPRSFDGREKSSASVHRTSINRDLWVNREPSHPTDCIARAQEFLRVYLNSASRYNAVFGTALALGQEDVKDTKLDDGTGLALDLDVELDHDAAGFKTQKLAHSKMGLQEKHSRSRKEGAALAETAPAQRKSYSFRLFSCQGDISRNVISHPKAAKKEPVVSVEKELDSSELAPAVVPLLERAVSVVSSSDSLSQCEDAVHEVARACSAWDPSLVNLLSCASFIQGLLEVTLTSKDDAVLESAMSIMGKLVLGNEVIRQLVLNADPQLEVFLRLLRSSELFLKAAVVLYMMKPKAKQMLSLDWVPLVLHVLECGDEVQSLFSVRCAPKIAAFYFLDQLLMGFDVDRNVENAKQMIALGGLDLLIGRLGAGDARESRHCIALLTTCVQADGSCRHYLADSLKKEPLVQLLAGNQRKASAASLNLMSELVCLNRTSKIVEFVKELKNSGCLNTMHVLLVYLQQAPLVQHPLAATMLLQLDLLGDPSQYSVYREEAIEAIVAALEHSSQSRKVQEQCARALLILAGRFSSSGEPVAEAWLLKRAGLDDSLSESFRRSEVFKDKSVRAEEEKLVEERQKNLALMLLKSGGRRFLTALSSCISDGTPSLSRSCLVSVAWMSSSLSPLRGCNDFQPLACSVLASKLLDSLSYDRVLEERVLASLSLLNVVRHPDEMQDQIVLSDEELDTSIAACAAPTAVPLDRVRLTAARPGLRRHRKLRFARTQGSDSGSAPEDDELRFARPQGSDSGSAPEDDELRFARPQGSDSGSAPEDDGLRFARPQGSDSGSAPEDDEPRFARP

SEQ ID NO: 46830 - protein, 132 aa, Zea mays
  Coding DNA Sequence Number=SeqID_5051
METAGVEMLHMTSISGARRRYGPTCGFATSPEVGLGTSTGTLNMGYPLLLGQGKTPMAAHSHGTTRWLARLRVEAHHMWSRAIWARFLGWTMVVTSPRVISNLDYRSKSPRVGPGPSHGPIRSLERGFERAP

SEQ ID NO: 46831 - protein, 708 aa, Zea mays
  Coding DNA Sequence Number=SeqID_5052
  Gene Ontology: Mol. function=protein dimerization activity; Cellular component=nucleus; Biological process=negative regulation of cell proliferation
  Homolog annotation: Hit_ID=Q2QNH1; Match level="QueryCoverage=99%, HitCoverage=89%, E-value=0.0, Identity=65%"; Hit description=HAT family dimerisation domain containing protein, expressed
MAPRKHPSGSKKRKRRKEVEEFIESQRGAMDKFVRTNTRTSSNENQPNLAIVVVAEQPNTNEEDHDPTLEENVDINTNGNDVTGHDPIFDSSHIGNDSFDEQSVPTEDIYDPRNWGNLDNKSRDILVEKGPIREENIVFPLDANEKCKSSLGHDGFGDWRHTSERLKEHEASMEHITSMNSWNELRVRLRKTETIDKEFQHQIAKEKERIRQVLLRIIAVVKFLGKRTLAFRGSSERLYNDQNGNFLACLEMIAEFDVVMQDHLRRIQNNDIQYHYLSHKIQNELISLLASDITKSIIKIVKEAKYFSVILDCTPDVSHQEQMSLLVRCVNMSSGKVEEYFLGFMKVDDTSGEGLFNSLLDSIKYFGLNIEDVRGQGYDNGSNMKGKHKGVQRRLLDINPRALFMPCACHSLNLTLCDMAKSCAKAISFFGIVQRIYVLFSSSTKRWDVLKGHVESLTVKSWCNTRWESRIKSVRAIRFEAPNIRSALLQLSTDKDVESKDRSDAKNLFDVLGTFEFILGMVIWYEILFTVNKVSKQLQSPSMCLDATLKNIEGAMKFFEYYRNEGFASSLIIAREIASELGVEPSFPVKRHAKRKKQYDETEFEEAKLEAEKAFEVNYFLVMVDVAISSLKSRFEELQSFKSIFGFLMSSTTLKALDTTELRDSCIKFANTFSLDGSSDVDLNDLFSELSVMRFSISDKPMSAMKIF

SEQ ID NO: 46832 - protein, 51 aa, Zea mays
  Coding DNA Sequence Number=SeqID_5053
MYRAAASLASKARQAGNSLATRQVRADSLMCVQVVTGSDEDLALRFGNDGF

SEQ ID NO: 46833 - protein, 312 aa, Zea mays
  Coding DNA Sequence Number=SeqID_5054
METPSGGTQQASATGPPTMVVESSSEQEDIPASSGSKRKLRFDVWKDFDQVEVDGVGKAKCNQRALSLLLGARRAATTTSRSPVPSVTVAPIHTRTRCRGACLLIIFPSRRYCATPCPVARSSRPKAVRARAPNRLMSSAARRPDGRPAGVVARIETIAPQRPELLSSNEHAAPIHQAFRRLPSGRVPVFHYSLAAVSEEAGRGRARFRAGLVRCGVAHGGSATQARETGARTADGEQKAAQQVAMVGYHWRVLAQCRRIQIYWSQATAVSSPGRARSVPYHRSPFDSPDDMRESSRANNEHASAPCPPLSS

SEQ ID NO: 46834 - protein, 69 aa, Zea mays
  Coding DNA Sequence Number=SeqID_5055
MASRGNWSKAPREAFLPSSGLRGYLSPTINTIEDRVKTGPASGKEEGTFGLGSRPKCEEVQGIRRMVQS

SEQ ID NO: 46835 - protein, 156 aa, Zea mays
  Coding DNA Sequence Number=SeqID_5056
MEKSRGSTTHGGWRSSGDDELWRTPAVVLTAMRVREMGASLGRGKMERGFAAFYREQEGEERPPVVFNGHHMRQFLTRVMERNGRGSNGGFDAPLTARNRTDARGRRAVGWGLRSASVGCAWASRGWPDLHVGAGASSQLGACAVQGARRLGCCAG

SEQ ID NO: 46836 - protein, 144 aa, Zea mays
  Coding DNA Sequence Number=SeqID_5057
MKEQIETVLHESPELESFVERLVPWYFFVVDKIIRYTPGIQPYLLVAQATPSVSLKMKSQLLKAEMKSLMKEQRQNIQYLYYWDYEGDQRIVCNKVSTGSNLPNLGAAWVGLWSAQTPTIASSSTPHAFFKSYIRSICSDNVMI

SEQ ID NO: 46837 - protein, 150 aa, Zea mays
  Coding DNA Sequence Number=SeqID_5058
  Subcellular localization annotation: CTP_CleavageSite=25; ConfidenceScore=5.49e-01
MARGAASVAGVASATSSQRVPWHGRAAPAACGRGPWWPGAASSPGVARPLVQPWRPGTARAARLARPGLRDTASLPAARSQQRPVARLTACETACLAWRLAAPERSSAWPSVALRALAQCLCPGVLPAGPGRHPAVVVDRKATLAELLPS

SEQ ID NO: 46838 - protein, 263 aa, Zea mays
  Coding DNA Sequence Number=SeqID_5059
  Homolog annotation: Hit_ID=Q10QQ9; Match level="QueryCoverage=37%, HitCoverage=8%, E-value=1e-35, Identity=73%"; Hit description =Expressed protein
MPHNLSQPCCTPACLCTLPRAMEAVRHAPPTTTAQHRPGHGAPHGALLGPHLLAEIGLDEEGLGGGRGGERREGDEKRVGGGEEDRRGDEEQEKQQAKTSTTSSLPSSNERSSSSACNNLTKGGAESDEEIRRVPEMGGASASASSGAGADELPKGEDDKQGQVAAPNPLLVIDVSGKEFKFTWASERGELCDIYEERRSGEDGNGLLLECGSAWRKVNVQRILDESTKNLVKMRSKEAERLSKSRKFVCFPCSIILLVSIDL

SEQ ID NO: 46839 - protein, 189 aa, Zea mays
  Coding DNA Sequence Number=SeqID_5060
  Gene Ontology: Mol. function=pepsin A activity; Biological process =proteolysis
  Homolog annotation: Hit_ID=Q651C2; Match level="QueryCoverage=52%, HitCoverage=25%, E-value=6e-19, Identity=46%"; Hit description =Aspartic proteinase nepenthesin II-like
  Subcellular localization annotation: CTP_CleavageSite=57; ConfidenceScore=5.09e-01
MGGMVVARFVNGVADISVVWHLSRPSITRQSPLALCTTPIKCSITLGQSSELEKLVVSSPKASTNPLNISLTTEGGSVFPINDPIITITDTVSNPMAYCLAAMKSEGVNLIRGYSVGNSRSNLPVNSNPSCVPPRPALGPNSYTREATKGASPNGTQVNVLQPSASFSPKLHCNRNVLVAAALLFLLIL

SEQ ID NO: 46840 - protein, 83 aa, Zea mays
  Coding DNA Sequence Number=SeqID_5061
MVKNFGSKTMQIAMNAVVTSHLLVCLYSTADCNLADGEYVLVPEQGVAQEVAPDPAPEDLPATALEGKPRFMHNLLFMLFYYT

SEQ ID NO: 46841 - protein, 96 aa, Zea mays
  Coding DNA Sequence Number=SeqID_5062
MAVMGSTSEKMYLLQASNTEKYRGPGVKWTKTQASSAVDCGSNGQEPSPTLHDATDGSTVPRDKDLTGDHRPDYSEHLTSITLAQNKEDDCTNTEV

SEQ ID NO: 46842 - protein, 755 aa, Zea mays
  Coding DNA Sequence Number=SeqID_5063
  Gene Ontology: Mol. function=nucleoside-triphosphatase activity; Cellular component=membrane; Biological process=transport
  Homolog annotation: Hit_ID=Q6H8C3; Match level="QueryCoverage=91%, HitCoverage=70%, E-value=0.0, Identity=51%"; Hit description =Putative ABC transporter
  Pfam annotation: Domain name=ABC_tran; Domain location=463-652; Score= 148.9; E_value=1.4e-41; Accession=PF00005.17; Description=ABC transporter
MAQNIAISLLVLNVIKKRLITWKDRVTKAIEKIKSARNKSSQGSIYVANFKAVMLLFCTLPAYDFTSSDLKHYNMVLQYNPDESNVLRVPRLMNLASSAYLRLRGNDTNMRFVFVKDMPRDGHPMKAPDMSFIVGKMVFVWIIMLLFPVILSSLVYEKQQKLRAMMKMHGLGDMAYWTISYCYFLVISLLYMFLLVVFGAVVDIKLFAVNSYVLQFLLYFIYMNLQISFAFLMTTYFSTSATATEKMAAGTFYLPRAVTGYLYVIGSGLIGEYLFRPFVEDTSVSRSLITLMEFFPPMSLYRIIYELSPPPSPSGPFSDFSGVRVGDLSDPENGILVLMVVMVLEWPTFLFLTLYLDGFGWLQTRVRKLPPAAAASSHQTLQKPSTTRPQERPEASIEIDGTTDIPGEVARACAEREIVDRFLQQPDQSYAVIVDNVRKVYPPRDGNAEVVAVNGFSLSIKRGQCFGLLGSNGAGKTSLIGMVWYGMVMLTGFTKPTSGTAYIDGMDIRTDMSEIYTRIGVCPQFNLLWETLTGREHLMFYGRLKRLNGAALTEAAEQSMKVLKIFEGGVADTLVSQYSGGMKRRLSVAISLIGDPKVVYLDEPSTGLDPASRSALWDAVKLAKKDKAIILTTHSMEEAEALCDRIGITAHGRLRCTGTSKELKAKYGGTFVFTVTTAAAGEDEAVERLVRGSISPDAKRTYHIAGTQKFELPKQGVRIAEVFRAMEQAKRSLSIAAWGLVDTTLEDVFIKVAAC

SEQ ID NO: 46843 - protein, 66 aa, Zea mays
  Coding DNA Sequence Number=SeqID_5064
  Gene Ontology: Mol. function=transporter activity; Cellular component= membrane; Biological process=transport
  Homolog annotation: Hit_ID=Q7XHQ9; Match level="QueryCoverage=65%, HitCoverage=14%, E-value=7e-15, Identity=93%"; Hit description =Putative permease
MNRVNPTIIKFLELAAWVYRNVDKPSATISAQVKHRTEAAKARAINIETPSSPIALLTTPRVKGED

SEQ ID NO: 46844 - protein, 313 aa, Zea mays
  Coding DNA Sequence Number=SeqID_5065
  Gene Ontology: Mol. function=protein transporter activity; Cellular component=membrane; Biological process=intracellular protein transport
  Homolog annotation: Hit_ID=Q6H8D0; Match level="QueryCoverage=99%, HitCoverage=100%, E-value=1e-108, Identity=68%"; Hit description =Putative syntaxin-related protein Nt-syr1
  Pfam annotation: Domain name=SNARE; Domain location=216-278; Score =66.9; E_value=6.4e-17; Accession=PF05739.9; Description=SNARE domain
  Pfam annotation: Domain name=Syntaxin; Domain location=38-145; Score =89.2; E_value=1.3e-23; Accession=PF00804.15; Description=Syntaxin
  Pfam module annotation: Pfam domain module=SNARE::Syntaxin; Domain location=216-278::38-145
MNDLFSSASFKKYADLKQQVVLDDMEAGGGGGEAEGAGLDGFFEDVEGVKEDLRGMEALCRRLQSAHEESKTAHDARAVKALRARMDADVDEVLRRAKAVKDRLEALDRASAASRKVAGCGPGSSTDRTRTSVVTGLGKKLKDLTDDFQSLRTRMAAEYRETVARRYYTVTGEEAADSTVEALISSGQSETFLRKAIQEQAAGRGQVLDTVSEIQERHGAVVEVERSLRELHQVFLDVAALVEAQGHQLNDIESHVARASSFVLRGAVELEAAREYQRSGRKWACVAVVAGAVLVVVIVLPVLVNFHLLSLRR

SEQ ID NO: 46845 - protein, 137 aa, Zea mays
  Coding DNA Sequence Number=SeqID_5066
  Homolog annotation: Hit_ID=Q9LU78; Match level="QueryCoverage=26%, HitCoverage=58%, E-value=5e-09, Identity=75%"; Hit description =Arabidopsis thaliana genomic DNA, chromosome 5, P1 clone:MUL3
  Subcellular localization annotation: CTP_CleavageSite=50; ConfidenceScore=5.09e-01
MPSWGYGDMPTVAIWYRRRTPRRMTGGKRFGGGRVPTGTPSLAWSSVVIVASLLVGASIVHNIYKPDMVCSDGPRTPRHTAHCTPPVRPNVYTGSSIHFPALADHSTCGGCRRRRRPRKLSYEWLDTACKRGGWAWE

SEQ ID NO: 46846 - protein, 90 aa, Zea mays
  Coding DNA Sequence Number=SeqID_5067
MAEAQIVEEERGRWGKRRGGLEGEEVVADSPDLTDDGGRAELLTAAVAQGCTARSHEKCNNLDTYSTTLIALFLASCHWHHEGPMIFRRP

SEQ ID NO: 46847 - protein, 430 aa, Zea mays
  Coding DNA Sequence Number=SeqID_5068
  Homolog annotation: Hit_ID=Q7XIE1; Match level="QueryCoverage=25%, HitCoverage=20%, E-value=9e-35, Identity=66%"; Hit description =Putative alpha 3 glucosyltransferase
  Subcellular localization annotation: CTP_CleavageSite=33; ConfidenceScore=5.23e-01
MHTFGTFPKLCLRATKKLIKTTFISSGLADLLCSNMRETPRFGRSTAAQPNSPNLVALTFRAPDRAQVHRSLPPDRAQVHPLCPQAAPGRRSSPCSLLQAAAAPPVLRRRSRPQLLRHSSRPPLGRARPLLGRARPPLSRQQLQAALQAAPAVCRPLQRQPTLQPCFTGDWLEDDEDEDDVDEGDENEDDDDAVDEGDENEDDDNFVLDDLDMDDEEETNNSGGRGDEQDKDDVGLDDLDDDCPRLYTRHPARTSQSRRGRREPLARTPYAHPPARTLQTQPRPWRTARPTARSGQAACQSLRSTGTHDAADGETRKIRTSAPDPPVAAVRLPWNPPAPAVPTIILISLAALLIRMLVSVGPYSGQGAAPKFGNYEAQRHWMELTLHLTPADWYRNTSDNDLAYWGLDYLSLSAYQSLVHGQVAVEAPPS

SEQ ID NO: 46848 - protein, 138 aa, Zea mays
  Coding DNA Sequence Number=SeqID_5069
  Homolog annotation: Hit_ID=Q2HV96; Match level="QueryCoverage=51%, HitCoverage=46%, E-value=7e-12, Identity=50%"; Hit description =P8MTCP1; CHCH
  Pfam annotation: Domain name=CHCH; Domain location=32-73; Score=44.8; E_value=2.9e-10; Accession=PF06747.3; Description=CHCH domain
MAHRAVDAVMGLRTVRHEIVISEAAAAAPPAPVMNANACSIHSKAFQDCLNNYGSEISKCQFYLDMLNECRRGVVCLSFCSNWDYSWILFSLPYWKAEFSSTRFFQLGMKVAVVDMSASSLLNRHGLKATDKAYWALW

SEQ ID NO: 46849 - protein, 103 aa, Zea mays
  Coding DNA Sequence Number=SeqID_5070
MDLVGVEVPSVLQIFFPMLPPEKSQQTRQIHRELNMGSSPAQQRNDCRLRASRGRGGYDIGGGFVTLTYGGGDATVRNRMLGHWRFVRAATGIGRRVEAIYDT

SEQ ID NO: 46850 - protein, 162 aa, Zea mays
  Coding DNA Sequence Number=SeqID_5071
MDERITAKAAVPSRPCIDEQTGRTASPGPGPAQLGMARHDQAHGSIGPDMARTRAKTRKTANSAPPDPRARTRAKTRKTANSAPPDPRARTRAKTRKTTNSASPDPRARTRARPRKTTNSASPDPRARTPPWPLPNDFRSARPQGSDSGSAPEDDELRLARP

SEQ ID NO: 46851 - protein, 870 aa, Zea mays
  Coding DNA Sequence Number=SeqID_5072
  Gene Ontology: Mol. function=nucleic acid binding; Cellular component= chromatin; Biological process=DNA integration
  Homolog annotation: Hit_ID=Q8H6I0; Match level="QueryCoverage=96%, HitCoverage=50%, E-value=0.0, Identity=86%"; Hit description =Putative gag-pol polyprotein
  Pfam annotation: Domain name=RVT_2; Domain location=773-862; Score= -97.0; E_value=5.8e-09; Accession=PF07727.4; Description=Reverse transcriptase (RNA-dependent
  Pfam annotation: Domain name=rve; Domain location=382-545; Score =195.1; E_value=1.6e-55; Accession=PF00665.16; Description=Integrase core domain
  Pfam module annotation: Pfam domain module=RVT_2::rve; Domain location=773-862::382-545
MSLASLRIENEKLLAKAKDFDVCNATISDLRTKNDILHAKVVELKSCKPSTSTVEHVSICNRCRDVDINAIHDHMVLIKQKNDHIAKLDAKIVEHNLENEKFKFARSMLYSGRRAGIKDGIGYQRGDNVKLSAPPKRLSNFVKGKAPMPQDNEGYILYPAGYPESKIRRIHSRKSHSGPNHAFMCKGETSSSRQPTHAKLPKKKTPSASNDHNISFKTFDASYVLTNKSGKVYASGGSSWIIDSGCTNHMTGEKKMFSSYEKNQDPQRAITFGDGNQGLVKGVTVFRRSDDSIAFKGVLEGQLYLVDFDKAELDTCLIAKTNMGWLWHRRLAHVGMKNLHKLLKGEHILGLTNVHFEKDRICSACQAGKQVGVHHPHKNIMTTDRTLELLHMDLFGPIAYISIDESKYCLVIVDDYSRFTWVFFLQEKSQTQETLKGFLRRAQNEFGLRIKKIRSDNGTEFKNSQIKGFLEEEGIKHEFSSPYTPQQNGVVERKNRTLLDMARTMLDEYKTLDRFWAEAVNTACYAINRLYLHRILKKTSYELLTGKKPNISYFRVFGSKCFILVKRGRKSKFAPKTVEGFLLGYDSNTRAYRVFNKSSGQVEVSCDVVFDETNGSQVEQVDLDEIGDEEASCIALRNMSIGDVCPKESEEPPNAQDQPSSSTQASPPTQNENEAQIDEGEDQANEPPQDDGNDQGGDANDQDKEDEEQRPPHPRVHQAIQRDHPVDTILGDIHKGVTTRSRVAHFCEHYSFVSSIEPHRIEEALQDSDWVVAMQEELNNFTRNEVWHLVPRPNQNVVRTKWVFRNKQDEHGVVTRNKARLVAKGYSQVEGLDFGETYVSGTIIRGTLKTPNSQVVTPISIKLQRPDGCD

SEQ ID NO: 46852 - protein, 750 aa, Zea mays
  Coding DNA Sequence Number=SeqID_5073
  Gene Ontology: Mol. function=RNA-directed DNA polymerase activity; Cellular component=mitochondrion; Biological process=RNA-dependent DNA replication
  Homolog annotation: Hit_ID=Q8S463; Match level="QueryCoverage=99%, HitCoverage=39%, E-value=0.0, Identity=91%"; Hit description =Putative prpol
  Pfam annotation: Domain name=RnaseH; Domain location=200-327; Score =8.1; E_value=1e-05; Accession=PF00075.14; Description=RNase H
  Pfam annotation: Domain name=rve; Domain location=532-691; Score =123.7; E_value=5.1e-34; Accession=PF00665.16; Description=Integrase core domain
  Pfam module annotation: Pfam domain module=RnaseH::rve; Domain location=200-327::532-691
MGCLAALSRFISRLGERGLPLYRLLRKAECFAWTHEAEEALGNLKALLTKVPILVPPTDGESLLVYVVATTQVVSAAIVVERQEEGHALPVQRPVYFVSEVLSETKIRYPQVQKLLYAVILTRRKLRHYFESHPVTVVSSFPLGEIIQCREASGRIAKWAVEIMGETISFAPRKAIKSQVLADFVAEWVDTQLPTAPIQPELWTMFFDGSLMKMGAGAGLLFISPLGKHLRYVLRLHFPVSNNVAEYEALVNGLRIAIELGVRRLDARGDSQLVIDQVMKNSHCRDPKMEAYCDEVRRLEDKFYGLELNHIARLYNETADELAKIASGRTTVPPDVFSRDLHQPSVKIDDAPEPEAPSVQPEVPSAQPEAPSARPEAPSVQPEVPSASEGEALRIEEERSGDTPDRNWQTPYLQYLRQGELPLDRAEARRVARCAKSFVLLGDEKELYHRSPSGILQRCISIAEDQELLQEIHSGACGHHAAPRALVGNAFRQGFYWPTAVADATRIVRTCEGCQFYAKQTHLPAQALQTIPITWPFAVWGLDLVGPLQKAPGGYTHLLVAIDKFSKWVEVRPLNSIRSEQAVTFFTNIIHRFGVPNSIITDNGTQFTGRKFLDFCEDHHIRVDWAAVAHPMSNGQVERANGMILQGLKPRIYNDLNKFGKRWMKELPSVVWSLRTTPSRATGFTPFFLVYGAEAVLPTDLEYGSPRMRAYSDQSNQASREDSLDQLEEARDKALLHSARYQQSLRRYHV

SEQ ID NO: 46853 - protein, 62 aa, Zea mays
  Coding DNA Sequence Number=SeqID_5074
MTTGAGHFVSAVCKFASQNSGQWKFKKGPEYASMYSESREEARDFARVRNACFEQLTPSVPC

SEQ ID NO: 46854 - protein, 97 aa, Zea mays
  Coding DNA Sequence Number=SeqID_5075
  Homolog annotation: Hit_ID=O49677; Match level="QueryCoverage=94%, HitCoverage=8%, E-value=1e-29, Identity=60%"; Hit description =Putatative protein
MEEEVTGSGGGIGRKMAAGEVDLKEKSGTAWSHSYLNQKPWHPLSYPNQRRKWIAEQVHANHARRQEEVQREFAQEQEFFRQTALFSKKDKEKSHSI

SEQ ID NO: 46855 - protein, 125 aa, Zea mays
  Coding DNA Sequence Number=SeqID_5076
  Pfam annotation: Domain name=NAD_binding_2; Domain location=8-125; Score=-35.2; E_value=2.4e-05; Accession=PF03446.5; Description=NAD binding domain of 6-phosphogluconate dehydrogenase
  Subcellular localization annotation: CTP_CleavageSite=86; ConfidenceScore=5.35e-01
MDMTTPLQGSALLRALSQVGTFLSFIELSSIPQTRPRSAKQSMVGNPGDVRAVVLDPAAGALAGLRRGGVLVDCTSSSPSLAREVAAAAAAAGCHAVDAPVSGGVLRTARAPPRPSPLQSSLVRF

SEQ ID NO: 46856 - protein, 460 aa, Zea mays
  Coding DNA Sequence Number=SeqID_5077
  Gene Ontology: Mol. function=diacylglycerol kinase activity; Cellular component=intracellular; Biological process=protein kinase C activation
  Homolog annotation: Hit_ID=Q6ES36; Match level="QueryCoverage=95%, HitCoverage=87%, E-value=1e-180, Identity=72%"; Hit description =Pentatricopeptide (PPR) repeat-containing protein-like
  Pfam annotation: Domain name=PPR; Domain location=175-209; Score =32.2; E_value=1.9e-06; Accession=PF01535.11; Description=PPR repeat
  Pfam annotation: Domain name=PPR; Domain location=276-310; Score =47.3; E_value=5.2e-11; Accession=PF01535.11; Description=PPR repeat
  Pfam annotation: Domain name=PPR; Domain location=311-345; Score =10.9; E_value=0.38; Accession=PF01535.11; Description=PPR repeat
  Pfam annotation: Domain name=PPR; Domain location=347-381; Score =12.7; E_value=0.23; Accession=PF01535.11; Description=PPR repeat
  Pfam module annotation: Pfam domain module=PPR::PPR::PPR::PPR; Domain location=175-209::276-310::311-345::347-381
MATPPAAVCALTAAASTGRHLRQIHAHLVTSGHLSSLGPTLLHRLISLHPPHLQLAYAHRLLLSIPSPPLDLFNLLLPPLASSPDPAAAAGLYIHLRRRGLGPDAHTLPHVLKALARLGPGCLPLVACTHAEAVKTGLARAVVYVPNALMSAYSACGHLHRAMQVFDEMPRWTVVSWNTVLTACADNGRHDRCAGMFVNMLEAGSVPDQTTFVVMLTAAAELGNLALGKWAHGQVLTRRTDMTLQLGTAVVNMYTKCGEVSYASRLFENMAARNVWTWSAMIMGYSQNGMVREALELFDRMKDASVAPNYVTFLGLLCGCSHAGLVNEGRKFFHEMEHVYGIKPMMTHYSAMVDVLGRNGRLQEAFEFVVDMPVEADTVVWRTLLSACQLHSSKDCIGIADKAQKRLLELEPRRSGNHVMVANIYSDIGLWDKAAMARRVMREGGMKKMAGESCVEPAKA

SEQ ID NO: 46857 - protein, 274 aa, Zea mays
  Coding DNA Sequence Number=SeqID_5078
  Gene Ontology: Mol. function=signal transducer activity; Biological process=response to light stimulus
  Homolog annotation: Hit_ID=Q5VRW4; Match level="QueryCoverage=35%, HitCoverage=34%, E-value=6e-33, Identity=83%"; Hit description=Non -phototropic hypocotyl 3-like
  Pfam annotation: Domain name=NPH3; Domain location=24-200; Score= -65.9; E_value=3.2e-06; Accession=PF03000.5; Description=NPH3 family
  Subcellular localization annotation: CTP_CleavageSite=72; ConfidenceScore=5.16e-01
MTSLPQRPPERPVVLHYLNDASTAKSVPDVAPPTSSSASGRFLPPESPTTTWLKKRLLLSPSWPRSLRIRRRAAAAVAPRPSPPTASRDAGRRGDTGVRPRRRARAGAALDVPLVLRLVRGFLKEGGGGSKAARVARLVDVYLAEAALEAGLRPAEFEELARAVPAHARPADDALYRAVDTYLKRLPHEVVALVDLMAAHGKGAGGDGSHSRKPTLGVIPTRREPRGSRSFLSQEVRGHGSNPTEPSPPPLSLPLLFNACLSSPHLASSPRILR

SEQ ID NO: 46858 - protein, 133 aa, Zea mays
  Coding DNA Sequence Number=SeqID_5079
  Gene Ontology: Mol. function=nucleic acid binding; Cellular component= intracellular; Biological process=regulation of transcription
  Homolog annotation: Hit_ID=Q5Z9H7; Match level="QueryCoverage=87%, HitCoverage=99%, E-value=1e-44, Identity=76%"; Hit description=Zinc finger protein-like
  Pfam annotation: Domain name=DUF1909; Domain location=12-77; Score =4.1; E_value=0.0036; Accession=PF08927.1; Description=Domain of unknown function (DUF1909)
MTGKAKPKKHTAKEIAAKIDAATTNRGGGKAGQADRLGQDKGGHAKLACPLCRTPAPDIKSMQIHHEARHPKLPFEPEKLLNLHSSAPAAAAAAAAAAAAAEATTSKPKPGVRGSLKNAFVIRITCSTLLYAS

SEQ ID NO: 46859 - protein, 831 aa, Zea mays
  Coding DNA Sequence Number=SeqID_5080
  Homolog annotation: Hit_ID=Q5Z9H5; Match level="QueryCoverage=38%, HitCoverage=91%, E-value=1e-158, Identity=86%"; Hit description =Putative arogenate dehydrogenase isoform 2
  Pfam annotation: Domain name=F420_oxidored; Domain location=554-735; Score=-42.7; E_value=0.016; Accession=PF03807.7; Description=NADP oxidoreductase coenzyme F420-dependent
  Pfam annotation: Domain name=NAD_binding_2; Domain location=552-693; Score=-74.7; E_value=0.015; Accession=PF03446.5; Description=NAD binding domain of 6-phosphogluconate dehydrogenase
  Pfam annotation: Domain name=PDH; Domain location=557-821; Score= -14.5; E_value=8.2e-08; Accession=PF02153.8; Description=Prephenate dehydrogenase
  Pfam annotation: Domain name=zf-CCHC; Domain location=163-182; Score =12.7; E_value=0.0078; Accession=PF00098.13; Description=Zinc knuckle
  Pfam module annotation: Pfam domain module=F420_oxidored::NAD_binding_ 2::PDH::zf-CCHC; Domain location=554-735::552-693::557-821::163-182
MHSYYWVLGYCYLPGAAETPDGWSTWRPDRWSRDAGKDRGEERDVGKDRGEERIRMEVMKAVSFMYVRPPGYNAESAKAAEIEDEKKRSDPGDMGTASASTSSIPDKGPEKAKSGADKKNRPKDVFGRPLATEQEFEVLKNAPRLDTGAPARVKPFGVEVRNVRCLRCGNYGHQSGDRECPLKDAIMPNEESRLKRDDPLTTIMAQTDSSEPLKWELKQKPGMSPPRGGFDPDDPNQQIVAEDIFDEYGGFLGNCDIPALISNFSATKSKKRSKKKSKHKQAKSAIHEDSGRHESSYHLSSDFDNEKRNITSRSKRKKANCSDSSYSDSEIDARKGKSKSKHKHTKKYQLKSSDSEFDVREDTRRRLKRDHMKEKRDESPLPFSKDQGDTEGKRHSRCSREKHNYSYSSSSSERGRRRSREKRHYSYSPSSSERGRHSLRHKEKQYYSDSSSDRSHRHSRRSREKRHDRDSSSPDAIRRSRPLASGSPASSHTPIVRLLNIYSLGSDPSRTVPDPCVCHPDLQLGERIRAVDAAQPFDYESRAAGLLEERQRLKIAIVGFGNFGQFLARTFARQGHTLLAHSRTDHTALATTLGATFFADPHDLCECHPDVVLLATSILSAEAVLRSLPVHRLRRNTLFVDVLSVKEFPKNLLLSSLPPDFDVICTHPMFGPESARDGWDGLPFVFDRVRVGDCPARRARADAFLNIFEREGCRMVEMSCAEHDAHAAETQFLTHTVGRMLAMLELRSTPINTKGYETLLRLVDNTCSDSFDLYNGLFMYNKNSTELLNRLEWAMDSVKKRLFDGLHDVLRKQLFEGSPHAPDVSSSNVRK

SEQ ID NO: 46860 - protein, 403 aa, Zea mays
  Coding DNA Sequence Number=SeqID_5081
  Homolog annotation: Hit_ID=Q5Z9H2; Match level="QueryCoverage=76%, HitCoverage=81%, E-value=1e-132, Identity=75%"; Hit description=F -box family protein-like
  Pfam annotation: Domain name=F-box; Domain location=126-173; Score =41.3; E_value=3.3e-09; Accession=PF00646.23; Description=F-box domain
MADVQGDNEAVLEDDAFPDDGPLDTEEGGGGEPISGGDEEEEEDVDGLASFLESEILSGSSDEDPIDEQRQQKEEGDAAKNKRKQGSGSDGDGCSGSEGEQTKRARREEKRRQAKGKAVAPQIDTGLFSNVPPELFLQIFKFLSSEDLISCALVCRFMNAAASDETLWRRLYCMRWGLASNAKFRECAWKNLYIQRDREDMVEFVRNTPTEFKEYYIQMQAAKRSQAPRPSEVNDDKVMLDKTVADQVSSWKNSRGLTDEAVKGHSCSGNTCSYTQIGDAYICEKTGRVHVCDDACREFVLDQSSGLLLCTISGHCFERWLCPDDEWDADDTLTFGKFQDLQQAGVVDEAEPFMGSGRYGLGYADATGGLGGDATTTGHTATTAGLGWGVASMGYAAVIEGLG

SEQ ID NO: 46861 - protein, 115 aa, Zea mays
  Coding DNA Sequence Number=SeqID_5082
MAEGIAWWSYTAVTFNMHDVGRSTGRVSLTRFIENIEMVGMYKICLRYPLPFYLTSGILIMLAASDCRNCHSVYSNHTKHSMYLKEGELTTSSRETSSRWWIAKFSKFMMSEYIP

SEQ ID NO: 46862 - protein, 195 aa, Zea mays
  Coding DNA Sequence Number=SeqID_5083
  Gene Ontology: Mol. function=signal transducer activity; Biological process=response to light stimulus
  Homolog annotation: Hit_ID=Q9C941; Match level="QueryCoverage=57%, HitCoverage=26%, E-value=4e-21, Identity=45%"; Hit description =Putative non-phototropic hypocotyl; 25081-26618
MSECPLIHYSAWLHLRQAHPSTAKEERKSLARLIDARKLTVEAAAHAVQNERMPVHAVVQVLFSEHGKLNRLAELSASFSGQRSPSPSPNPALELPGRCPSKREVLAQHQEVRRLHDDVARLQAQVDRLGSERRRRSGGGGGGFFKWSAFWFGGGMGADVGRRLGERHGALDAAQGEEERHGDAQCQVVQVHVLR

SEQ ID NO: 46863 - protein, 79 aa, Zea mays
  Coding DNA Sequence Number=SeqID_5084
MAMLLKDGYPIVCLRFHKYCLTHHNEKLIEDNSTLSSYDVQNNSKVALKLHALDVWGLLRSQWQLRSSLIGILEMAMFV

SEQ ID NO: 46864 - protein, 36 aa, Zea mays
  Coding DNA Sequence Number=SeqID_5085
MAKEQIIKINKNMAGKVSDQGHNLPSMSSCSATSTC

SEQ ID NO: 46865 - protein, 150 aa, Zea mays
  Coding DNA Sequence Number=SeqID_5086
MGKSNKRKCEPTPPSEDFGNSEYSEEEFSFESEGSPAPVSPPASSDDSDDSQGLAAEVWTYIRVVERSGLEGSDESEYSSDEEDSSDLSEEGGGGNGGDDDDDGGDGDDDDDGSDGGSRGGNGGGKGDHGGGRRGSNGGGSSKGSNKASG

SEQ ID NO: 46866 - protein, 153 aa, Zea mays
  Coding DNA Sequence Number=SeqID_5087
MTATPARKLLVRTKITQRKKKAHQRRGSDEAGRRRRKAFATRRELHQDYVVDQPIRPSRPNADGFRPKIATQEQAMAQSYGRNDGNRAWQFFLLPRRRRKTARVGTASRILALEVVGQPMRVTMAEELAPVGSACNSWKRLHLGVVWADDWGS

SEQ ID NO: 46867 - protein, 275 aa, Zea mays
  Coding DNA Sequence Number=SeqID_5088
  Gene Ontology: Mol. function=RNA-directed DNA polymerase activity; Cellular component=mitochondrion; Biological process=RNA-dependent DNA replication
  Homolog annotation: Hit_ID=Q8S463; Match level="QueryCoverage=99%, HitCoverage=14%, E-value=1e-142, Identity=92%"; Hit description =Putative prpol
MGPIKDLKGVQRVIGCLAALSRFISRLGEKGLPLYRLLRKAERFTWTPEAEEALGNLKALLTNAPILVPPTAGEALLIYVAATTQVVSAAIVVERREEGHALPVQRPVYFISEVLSETKIRYPQIQKLMYAVILTRRKLRHYFESHPVTVVSSFPLGKIIRCREASGRIAKWAVEIMGETILFAPRKAIKSQVFADFVAEWVDTELPAAPIRPELWTMFFDGSLMKTGAGAGLLFISPLGKHLRYVLRLHFPASNNVAEYEALVNGLRIAIELGV

SEQ ID NO: 46868 - protein, 152 aa, Zea mays
  Coding DNA Sequence Number=SeqID_5089
  Gene Ontology: Mol. function=nucleic acid binding; Cellular component= intracellular; Biological process=translation
  Homolog annotation: Hit_ID=Q3LRV2; Match level="QueryCoverage=99%, HitCoverage=66%, E-value=5e-55, Identity=70%"; Hit description=Gag
MKKVFYYETDSSSPFTSGVESTTSKRQERKKYSKMPLRYPHIPKRAPLLSIPLVKQPYFDGEDYCMWSDKMRHHLTSLHKSIWDNVEFGAQAPQVCDEDYDSDEATQIRHFNFQATSILLASLCQEEYNKVQGLKMPKKFGMSSRRRMKGTR

SEQ ID NO: 46869 - protein, 109 aa, Zea mays
  Coding DNA Sequence Number=SeqID_5090
MANKHEARESSIKLAIRARFEPDTTRFYAGPGSPRRRQTASATPAVLGGRAVVDKGGSAAVLSSSTVEGRRVGRAGKVGNGLMEAWIAFYRAEKETGVPGWGEERYQRH

SEQ ID NO: 46870 - protein, 917 aa, Zea mays
  Coding DNA Sequence Number=SeqID_5091
  Gene Ontology: Mol. function=protein dimerization activity; Cellular component=nucleus; Biological process=regulation of transcription, DNA-dependent
  Homolog annotation: Hit_ID=Q653U3; Match level="QueryCoverage=99%, HitCoverage=99%, E-value=0.0, Identity=81%"; Hit description =Putative auxin response factor
  Pfam annotation: Domain name=AUX_IAA; Domain location=688-875; Score=- 94.5; E_value=0.01; Accession=PF02309.7; Description=AUXIAA family
  Pfam annotation: Domain name=Auxin_resp; Domain location=260-347; Score=178.9; E_value=1.3e-50; Accession=PF06507.4; Description=Auxin response factor
  Pfam annotation: Domain name=B3; Domain location=133-238; Score =113.7; E_value=5.3e-31; Accession=PF02362.12; Description=B3 DNA binding domain
  Pfam module annotation: Pfam domain module=AUX_IAA::Auxin_resp::B3; Domain location=688-875::260-347::133-238
MRLSSSSGSVLPAQPGSPEAVEEHKCLNSELWHACAGPLVSLPAVGSRVVYFPQGHSEQVAASTNKEIESQIPNYPNLPPQLICQLHNVTMHADAETDEVYAQMTLQPLNPQELKDPYLPAELGSANKQPTNYFCKTLTASDTSTHGGFSVPRRAAEKVFPPLDFTQQPPCQELMAKDLHGNEWKFRHIFRGQPKRHLLTTGWSVFVSAKRLVAGDSVLFIWNDNNQLLLGIRRANRPQTVMPSSVLSSDSMHIGLLAAAAHAASTNSRFTIFYNPSCFCRASPSEFVIPLVKYVKAVYHTRISVGMRFRMLFETEESSVRRYMGTITGICDLDSVRWPNSHWRSVKVGWDESTAGERQPRVSLWEIEPLTTFPMYPSPFPLRLKRPWPTGLPSLHGGKDDDLANSLMWLRDTANPGFQSLNFGGLGMSPWMQPRLDATLLGLQPDMYQAMATAAFQDATKQASPTMLQFQQPQNIAGRASPLLSSQILQQAHHQFQQQPYLQNISESTIQAQGQSEFLKQQIQRSQSFNEQKPQMQHQQESQQQQQPQCLPVPQHQQMQQQNMTNYQSISNALSPFSQLSPVSQSSPMALQTILPFSQAQSFTDTNVGSLSPSNGNTMQNTLRPFSSEAVSHLSMPRPTAIPVADPWSSKRVAVESLLPSRPQVSSQMEQLDPAPASIPHSSALAPLPGRGCLVDQDVNSDPQNHLLFGVSIDSQSLLMQGGIPGLQNGNDSAAIPYSTSNFLSPSQNDFPLDHTLNSSGCLDDSGYVPPCSDNSDKVNRPPATFVKVYKSGTYGRSLDITRFSSYHELRRELGRLFGLEGQLEDPLRSGWQLVFVDREEDVLLVGDDPWQEFVSTVSCIKILSPQEVQQMGKQGLELLSSAPARRLGSSCDDYVSRQESRSLSTGIASVGSVELG

SEQ ID NO: 46871 - protein, 95 aa, Zea mays
  Coding DNA Sequence Number=SeqID_5092
MKPELETCSRSHHDQWRRGIIAIRPAVQWTVVTARSVMVKMPVLAPGRDLCSASVSPTSIGGARALAIARRCHCAAVEGNSVAVYGPRYGMVGER

SEQ ID NO: 46872 - protein, 222 aa, Zea mays
  Coding DNA Sequence Number=SeqID_5093
  Homolog annotation: Hit_ID=Q6ET46; Match level="QueryCoverage=41%, HitCoverage=17%, E-value=1e-19, Identity=58%"; Hit description =Putative receptor Mediated Endocytosis RME-1
MAIEEQSKLLRVICDQLSAQDARWASLEFAATECDDVVEAAVTTCVGALKSCCPRVELRYEEPVTADNWGGLFEGNDVFINLPTKCSTERLVNISPTSEDRALQRRLLEFLATRPEWQSPMLLYFQGALYSKDGIEQATQADATSFFAMSTLSRADIKQVWAIVDAKRQGYLGFAEFVTETSSVYGPSREQDHEDSLKREDLSTSDPPGWKGCEILARSKGV

SEQ ID NO: 46873 - protein, 454 aa, Zea mays
  Coding DNA Sequence Number=SeqID_5094
  Homolog annotation: Hit_ID=Q5N761; Match level="QueryCoverage=22%, HitCoverage=26%, E-value=3e-28, Identity=66%"; Hit description =Putative O-acetylserine (Thiol)-lyase
  Pfam annotation: Domain name=ECH; Domain location=178-346; Score= -43.9; E_value=0.00032; Accession=PF00378.10; Description=Enoyl-CoA hydrataseisomerase family
MSPLPLLPIVYEPYREASHPPPVHDDVAGVVSTGSDDDLDLQQIAKEPSVSSPPRHSSRDAVRGPCPRPLHHRLTIPVAANLDQICRLSGPCDVADRGLLCDLLWSDPSSMEDREWANNKDQYVSCTFGADVATDCRRAQDLDIICRAHQVVEDEYEFSVDCQFVTFFSAPNYRKLGCSFTIIKPKANRNNSSPLGCSTKCPSQALHPIVKPNLVAVLNIAGAGGKLCGGFDIKVFTRVHQTGDVSLMPNVSTELVSNMMEEGKQPSVAAIPGLALGGGLELTMSCQAQIPTHVAHTICSLVNNVMASQAHVVGQGIVDRIAFSGDHQWIVQGTTNGHGLSSKVAAKNGHPELNGKTPMVYLNIVADECVANIAAKLEYMGPYRSAKDRIGLRKINDAKEKDLLVSLDKTNLGEPITGNIGVDIVFVAAAKGYKLLATMPSSLDVERHSSERSF

SEQ ID NO: 46874 - protein, 508 aa, Zea mays
  Coding DNA Sequence Number=SeqID_5095
  Gene Ontology: Mol. function=carboxypeptidase A activity; Biological process=proteolysis
  Homolog annotation: Hit_ID=Q9FGZ7; Match level="QueryCoverage=74%, HitCoverage=80%, E-value=1e-109, Identity=53%"; Hit description =Arabidopsis thaliana genomic DNA, chromosome 5, TAC clone:K5J14
  Pfam annotation: Domain name=Peptidase_M14; Domain location=45-325; Score=97.4; E_value=4.3e-26; Accession=PF00246.14; Description=Zinc carboxypeptidase
MSAAYPRLLLCLLTLALALAGVAAGKISAPRTPISRDIYHSSDSLLREIKALVARHSSKLSMDTIKTSNKGYSAELFVVTFNHVKERMDNGSKVHILLSFGQHGRELITSEVALRLLYVLTEKPKIAGVDISSFEKLLENLVIKVVPMENMNGRKRVEEGELCDRRNGRGVDLNRNWSVDWGKKEKDYDPYEENPGIAPFSEPEAQIMRELSRSFKPHIWVNVHSGMEALFMPYDHKNTTPNGASAHSMRSVLENLNRRHFQDSCLVGSGGGSVGYLAHGTTTDYMYDIAKVPMPFTFEIYGDEKASSDDCFKMFNPVDKKTFDRVVNKWCMAFLILFEEGLRNLRDAQIVSQGTLENWVPIGGDIVEINVERKSSIRERRKLEGLDLGMQELRTYFRLFLLSTFLLMFMFCARISKNRNRDSDRTVGWDSSRTQKSLWKFTISNRSDTVLSDVCFYSSLGTWKTSIKASDSCGDLELIHVDDGHGLTIVYSSKRWVKIWDLLAVFHI

SEQ ID NO: 46875 - protein, 380 aa, Zea mays
  Coding DNA Sequence Number=SeqID_5096
  Subcellular localization annotation: CTP_CleavageSite=100; ConfidenceScore=5.23e-01
MKPGGGGGGGNGVTATTTAIPPDDLRSRRRLAALLAPLLLFLAAALSFPSTLHLAAVPLPTPPMTTVPRRTTPPRVAVCLVGGARRFELTGPSIARHVLRGGAFAVPADRRDAGQAAATTSVDVDVFLHAPLDADAYKLPLLLAPAAGAGGGSGTTSRNSNNVVSLAAVRVFRPVYLDETTPAARAQVLTADNSPNGIQGLLQYFRLVEGCLDMIRDRESRGNFTYAAVLRTRLDGFWTAPFRLDDDDQLLSGSAYVVPEGSRFGGLNDRLGYGGRRATEAALARLSALPRLAAAGHAGLNSEAAFAAQLELSGVAARERRLPFCVLSDRAYAFPPAPGYGVPVAALGSAGPLSGAKCRPCRPACAGACALPCFARLGTT

SEQ ID NO: 46876 - protein, 201 aa, Zea mays
  Coding DNA Sequence Number=SeqID_5097
MWYPSSVVDVLPRSHRVIEANLFHLPSVNADDGGVGMQEEAPNPLPVVCRDQTNWSRRPSTFPSPTTAFLLLALLFVASGTSLPTLGGFNRGGATQPRSNRIGGYCVDGRRKGDRALKQSAYNFTYNKSTFLAEMTEVHLSEKVGTDKVQLSTFFSNTLGMYSDEVDIVVILTHMIAKRKDSAWLYNSKDVVDGTGRKAKQ

SEQ ID NO: 46877 - protein, 95 aa, Zea mays
  Coding DNA Sequence Number=SeqID_5098
MGLMDTFGWRSKSYSMFTGVINSTELRSYGDSLSQVGCGIQGYGPQLATAGDTSTRKSFWRGGIYYRRDSNQIYDFVNNFFTSEGSGYNSNDPYM

SEQ ID NO: 46878 - protein, 62 aa, Zea mays
  Coding DNA Sequence Number=SeqID_5099
  Subcellular localization annotation: CTP_CleavageSite=23; ConfidenceScore=5.14e-01
MPRNMVNRNSASAFGNQTPQPNSCMSRGSLEEMVAGVTWPSTLPPGWAVEWDPASAEEEHEE

SEQ ID NO: 46879 - protein, 103 aa, Zea mays
  Coding DNA Sequence Number=SeqID_5100
  Gene Ontology: Mol. function=transferase activity; Biological process= isoprenoid biosynthetic process
  Homolog annotation: Hit_ID=Q653T6; Match level="QueryCoverage=66%, HitCoverage=16%, E-value=1e-26, Identity=91%"; Hit description =Putative geranyl diphosphat synthase
MASALKFPLSESTEGRVLSILADKLRTRQQNIAEITEMIHVASLLHDDVLDDADTRRGVSSLNLIMGNKGAGTTFKDELHAGAGGRWRALEAGAAAAGRGQKV

SEQ ID NO: 46880 - protein, 112 aa, Zea mays
  Coding DNA Sequence Number=SeqID_5101
MDALVNVHNGEARLRVEYSVVIPDHTVKPTRTQVCTRHHLSNAPPSSDVLNPSDVAASPDGSSSTESSPVGPSSPSISSPERLSRYFIKVIDLVNLSICMVLDQLLGKVLVV

SEQ ID NO: 46881 - protein, 116 aa, Zea mays
  Coding DNA Sequence Number=SeqID_5102
METRLPQPTISSVGDSIHAFPSYDGIDAEKYIEWETKIDCLFENYFMCELKKIKKATSVLTHSALSWNLGEDQQVLEKGQYIKEDKLGRSQQEKVKSDPTSSPPRSSGPVCTKPNA

SEQ ID NO: 46882 - protein, 89 aa, Zea mays
  Coding DNA Sequence Number=SeqID_5103
MELLTLAMYEAGNDGGGGGQRWHGGELSVVAVVATVVVAAGCGDALVGVGMRNDLGGKNPSRIKVYCFSSGRPTSSSGFTAEVSLWAPP

SEQ ID NO: 46883 - protein, 223 aa, Zea mays
  Coding DNA Sequence Number=SeqID_5104
  Subcellular localization annotation: CTP_CleavageSite=77; ConfidenceScore=5.39e-01
SAPSASAHGHGARPRRAARGLGPVLARHPPLRQLGPDSPSLSPVPARPAMARAPTPAPPCARWRSVRRDPGGPLPPPAMAPARRGPAMALAHPDALGPAPVLGPVPACAPAPARSPRPAPARPPLPAHVRGGVALLLARSCASAAWRGRPPAQPRCLLAARSASRARLGPDVSPKNSQEKPLSNSYLVEASDNENDGFGIDSGNGEDEAVEGDFQEFQDYDEF

SEQ ID NO: 46884 - protein, 329 aa, Zea mays
  Coding DNA Sequence Number=SeqID_5105
  Gene Ontology: Mol. function=hydrolase activity; Cellular component =integral to membrane; Biological process=hypersensitive response
  Homolog annotation: Hit_ID=Q69L47; Match level="QueryCoverage=98%, HitCoverage=99%, E-value=1e-132, Identity=70%"; Hit description =Putative phosphatidic acid phosphatase beta
  Pfam annotation: Domain name=PAP2; Domain location=93-238; Score =119.5; E_value=9.4e-33; Accession=PF01569.12; Description=PAP2 superfamily
MADQLGSYTIRSHGMILARLHMYDWIILLLLAVIDGLLNIIEPFHRFVGKDMMTDLRYPMKGNTVPFWAVPLIGIILPWAIFVGIYFKKKNFYDLHHGILVITDAIKDGVGRPRPDFFWRCFPNGNDVYDNITTGVICNGVKSVIKEGHKSFPSGHSSWSFAGLGFLAWYLAGKLTAFDRKGHIAKLCIVFLPLLTAALVAVSRVDDYWHHWQDVFAGGLIGLTVASFCYLQFFPYPFDGDGTYYSLFLLTIEFSGYVQHVTEYCTIYFSALWPHAYAVRLAEEGNSRNANSYSVRPTEIETVDIPGHGGIITLRDTLNDVESGSARRL

SEQ ID NO: 46885 - protein, 172 aa, Zea mays
  Coding DNA Sequence Number=SeqID_5106
MRMGSESECENPNQEHKRMQHSRTNGYHSSPSGGSSKLASYHCCCHQTVRCTPDSLVPRGVSRGGPTGGSRWALAHPKPGPPKTPSRYPERSFSFFTSDGGRQLRLLFVFLRSAPAAAPLPLPPSGQRGAICYCYRRPKCPVGQLPARCTAAPCQPASVCSSSWLLAFGVFV

SEQ ID NO: 46886 - protein, 238 aa, Zea mays
  Coding DNA Sequence Number=SeqID_5107
MKVVSPERAWWSPRSSELRWATRPAAAESAEEEGSALAPEDRHEERGAHDAWVVRHGRRWKGTVGEDFGVAQRRRRCKEDARRFGSDIIVGRARLGRRRPGRARRGGGGRGFRRGAVEDFGAGKPGAAAGIEGGEGRSGATVSRRGERVSGRDLGAGPSPLSPLITGGGQMWGDDNDVDGGWCSGVAVGERGDMASDEGMEPTPIGRDAGVYGSSSMPYAAQLQLYGAVAGIVASNIQ

SEQ ID NO: 46887 - protein, 130 aa, Zea mays
  Coding DNA Sequence Number=SeqID_5108
  Gene Ontology: Mol. function=geranylgeranyl-diphosphate geranylgeranyltransferase activity; Biological process=biosynthetic process
  Homolog annotation: Hit_ID=Q0H903; Match level="QueryCoverage=47%, HitCoverage=14%, E-value=1e-21, Identity=77%"; Hit description =Phytoene synthase
MAAPREEGATELNQESRWPVWSSLLLYRQILDEIEANDYDNFTRRAYIPKTKKLMALPKAYLRSLVPVWEKLSKFSGHAAGGSSIESLMKMSEPAVLSHFKPADYVSILAQIHKELECRPPDDKASLYLL

SEQ ID NO: 46888 - protein, 262 aa, Zea mays
  Coding DNA Sequence Number=SeqID_5109
MSERLLVEFHLMQGTKGTPAIHVMPAVGRKCRDSLEGGTTAQNSTATSTFHSIPLSTAAMIPATPAAPKTRFSKGGTCGDELQLIIKNGAGAKRIAQDFNVADTSLSPVGPFSPPVDDGPVFGPSLSQSRLVPFGALWALMACVVPLTHSHSAPPVRVYTRKRLRWKPAMDSLLLATDAPMAGDGEPSAAVAVALATPAEEGSPPASLVGEGEPSSAVAVALATPVEEDSPPASLDGEGESSVAVAVALATSVEEGSPPASP

SEQ ID NO: 46889 - protein, 63 aa, Zea mays
  Coding DNA Sequence Number=SeqID_5110
MPPVLHFCFSNQMNVSRIRWSLCSPIYKSLINAQDDVEAQILLEKARRCYSEALATVAPALPA

SEQ ID NO: 46890 - protein, 56 aa, Zea mays
  Coding DNA Sequence Number=SeqID_5111
MAAFVAVRRLRRRLMTKDARLDDRWALATVKRRETVAARVWGQWYSGECTQNKIPA

SEQ ID NO: 46891 - protein, 106 aa, Zea mays
  Coding DNA Sequence Number=SeqID_5112
MKARCLVVLALVLIPSLLVALTVLLLLLLRELPLILLLVLTLMLVMVSGSVWMASQLLGLSGFASGTSAQWSWGVAAATAAELPPLGCLLLLLSTPSTSTPILRHL

SEQ ID NO: 46892 - protein, 163 aa, Zea mays
  Coding DNA Sequence Number=SeqID_5113
MTPKKATTSATSSLDEAVMAGLADKKGKTVLVDSTLPATVGIGPANSVHPRNEDRPTPEDNIHTYTEDLQIVTRIRVHAIRYGKLVISELRRGGADDVEAAEGTEKNDAWRQKTTRLSVAAGRPIPTPGLQATCVCYVELLEAAMLAHVLLADARHDKLGGTN

SEQ ID NO: 46893 - protein, 303 aa, Zea mays
  Coding DNA Sequence Number=SeqID_5114
  Gene Ontology: Mol. function=metal ion binding
  Homolog annotation: Hit_ID=Q2QZM2; Match level="QueryCoverage=27%, HitCoverage=12%, E-value=2e-18, Identity=55%"; Hit description =Expressed protein
  Pfam annotation: Domain name=DUF594; Domain location=240-296; Score =72.0; E_value=1.9e-18; Accession=PF04578.4; Description=Protein of unknown function, DUF594
MTRPRAIEQIVDTSSDIWNLISESKVNGSTGVEDFTSWLHTERGIITQLQVLFVVSVLLYAVQVVLGWWRRCSTNAYLKHSLWMAYIINTPLVIYVLGLARSSPSSVARQLLQACAFPFVMALGSTNSMTAYSVDDNKQYMRHFMQQLLRVLSLFAMWRANETILRSSSFLVPLLYLFLTALLLSVNGNRIFASMTASSFLDKQSRDTTLHAKYARMKYYREQPSDRERTLIKGIRLGRKLQVMGDGMRWKVLADFWTEMILFVAPSHNAKAHIERLASGGEFLTHLWALLFHAGILERNKKG

SEQ ID NO: 46894 - protein, 102 aa, Zea mays
  Coding DNA Sequence Number=SeqID_5115
  Homolog annotation: Hit_ID=Q1EP91; Match level="QueryCoverage=33%, HitCoverage=31%, E-value=1e-07, Identity=76%"; Hit description =Mitochondrial inner membrane preprotein translocase (TIM23) component- related
MMMLMLEVEDPTLGMMLMMMIWTRNADVAMARPSDIRTVLASYQGHDVAAKFIERSKEHQRVKNVGTHVLNVKNVGTVELNGQPSPTHVGPISSTAMWPRRT

SEQ ID NO: 46895 - protein, 232 aa, Zea mays
  Coding DNA Sequence Number=SeqID_5116
MARRRRDPVAVAARPGQFLDEITASRTQRLISNASTAFAIMSPSRAKRKVAQIREQALSAAVGDVVARTMSAVAGRYDAHASVDDQLERLATLLVMVHSAVDEAERVHVANWWLRRWLWRLRYAALDGDEVLLSMRQQRAAEAAEATAMTQSAGGRLWNAATRVVVRSAKSLLVSSRSGGRGGGPNMAQYCLSNTLGWPTKRVGHPSQPPPPQLVPPGAAAPRLRLLARHSC

SEQ ID NO: 46896 - protein, 204 aa, Zea mays
  Coding DNA Sequence Number=SeqID_5117
  Gene Ontology: Mol. function=hydrolase activity; Biological process =metabolic process
  Homolog annotation: Hit_ID=Q67J10; Match level="QueryCoverage=61%, HitCoverage=34%, E-value=2e-10, Identity=37%"; Hit description =Putative PrMC3
  Subcellular localization annotation: CTP_CleavageSite=7; ConfidenceScore=5.19e-01
MARRTQRCAHVLNLPPRRRAAPRLQSPPPPHDLNRSARVNTVQLRSPVHGGGGGTPSAGKGAKLEATRVQIRSPASIRGLEAPRPAGDVASQLSGFLSSIPEIVARGDLASQCPGEKQIDCVERFDDTKSVPSSPNGNSTNGVASKDFATGISSRLYLPARVDPEKKLPIVVFFHDGAFMVHNASFPLYHIYIASVDVAVPASR

SEQ ID NO: 46897 - protein, 151 aa, Zea mays
  Coding DNA Sequence Number=SeqID_5118
  Gene Ontology: Cellular component=integral to membrane; Biological process=transport
  Homolog annotation: Hit_ID=Q67UZ5; Match level="QueryCoverage=73%, HitCoverage=51%, E-value=3e-46, Identity=79%"; Hit description =Putative transmembrane trafficking protein
  Pfam annotation: Domain name=EMP24_GP25L; Domain location=53-118; Score=46.6; E_value=8.7e-11; Accession=PF01105.14; Description =emp24gp25Lp24 family
MARGGAWAAVAAAAVWWMAAGAGAVWLEIAPSGTKCVSEEIQSNVVVIGDYSVLYDHHHAQPTISVKVTSPFGDIVHKKEKVSMGQFAFTTAEAGNYLACFSIDGEDRGLVVKLNLDWKIGLASRDWDSVAKKEKIELWHLQQYFRKMKLI

SEQ ID NO: 46898 - protein, 354 aa, Zea mays
  Coding DNA Sequence Number=SeqID_5119
  Gene Ontology: Mol. function=porin activity; Cellular component =integral to membrane
  Homolog annotation: Hit_ID=Q67UZ2; Match level="QueryCoverage=83%, HitCoverage=66%, E-value=6e-79, Identity=55%"; Hit description =Putative nucleoporin p58; nucleoporin p45
MDSSIASSEMVKAEVRRLRGRHAELGGTTTVMEREKASIQELMNVVNEMMWNTEFGIRSYLMLRPRFTRPSAGVANGGSSNPSAGAPPNQPVVDFYSGVPKRPSIFMQRTVNKFECYLAECCKWIGELEQLVQMETNKRSSDSLESLPKVMSNVHDYFIYVASKVENLHQHVESMKTEYLNEQRRTGNGSDPFLEANRREAAKQEAAARRVHPTLHLPTPAQPTAQIAAPATSQPQQPSFPSAATSSSAFSTFSTPASAPSSSSLFATPTTPAPSGNLFGAPGSAQLTTPFGTPSTPTLASTPAPGFGTSATSNLGGTSLFSTPFGGGATASGSSFGERKVEAPGTTLDVNGPT

SEQ ID NO: 46899 - protein, 323 aa, Zea mays
  Coding DNA Sequence Number=SeqID_5120
  Gene Ontology: Mol. function=calcium-dependent phospholipid binding; Cellular component=plasma membrane; Biological process=cell differentiation
  Homolog annotation: Hit_ID=Q67UZ4; Match level="QueryCoverage=58%, HitCoverage=65%, E-value=8e-66, Identity=62%"; Hit description =Putative fiber annexin
  Pfam annotation: Domain name=Annexin; Domain location=250-316; Score =24.2; E_value=0.00025; Accession=PF00191.10; Description=Annexin
MASAAGSEEACREIRRTCGAPRRLGLLLAPRSPAERQQIRAAYRARFGEDLAATLHGTLAAPNTNQVDEVKPTDQSQAHGERFNLNSLLPLLQLSKLLYLWALEPAERDAVVAREAVEGGVTAAGYRALVEVFTRRKQDQLFFTKQAYAVRSHHDDLSQHVAKCDARRLHDTKNSGAGAGSGSVVDEAVILEMFSKRSIPQLRLAFCSYKHIYGHDYTKASGLALKINGSGEFEGPLRVVVKCIYNPSKYYSKLLHRSMLPAATDTRMVTRAILGSDDVGIDEIRSAFQSSYGKSLAEYIQENLPGSDYRDFLVAVASASVAQ

SEQ ID NO: 46900 - protein, 133 aa, Zea mays
  Coding DNA Sequence Number=SeqID_5121
MTSSSVVIISVEVVCVGANNFSVHTSDGVMSWNRRGTYLSAVDLGAEENLAAGAWGGERGGELRGDVLRDKKREDGDPVGIKGIGAKIYDADPPDRNPRRRQGVRAKIYGADPRHLTSHVTSSGATDIGAITV

SEQ ID NO: 46901 - protein, 128 aa, Zea mays
  Coding DNA Sequence Number=SeqID_5122
MAPPPLQQRASSFALTFLLAPASSQGARRLVDDDAFDYADLLATRRGVVLVWLAPRTPAEKACHLFGVCNPVSGHRHVLPPLEWNLAGGGLNGYAIITTVDMRSSRVITNYYLYSIQTHLKTLSSKKG

SEQ ID NO: 46902 - protein, 76 aa, Zea mays
  Coding DNA Sequence Number=SeqID_5123
  Homolog annotation: Hit_ID=Q1XA87; Match level="QueryCoverage=80%, HitCoverage=43%, E-value=9e-28, Identity=93%"; Hit description=Salt tolerant protein
MDCLSYIQRNKIILVKLWLFVAYVVSFVCLAGSVGLLVQDALTNKGPSVWTGVAGVLQCVLVLISGLVYWTCHSED

SEQ ID NO: 46903 - protein, 152 aa, Zea mays
  Coding DNA Sequence Number=SeqID_5124
MGVGAVHPWRPALGKKTGWELGHGKNRERGWGCAVVGRRQGEAAGGGGRYAEGGQPWATMSSLLELGVGPAREEQGREKFTCALDSRGSGLEFSGCLLAGGAGAERATAALEVGCNPSWATREDARLGSREMGAELGRTELWKSRGKRARQG

SEQ ID NO: 46904 - protein, 84 aa, Zea mays
  Coding DNA Sequence Number=SeqID_5125
  Homolog annotation: Hit_ID=O04936; Match level="QueryCoverage=74%, HitCoverage=10%, E-value=8e-08, Identity=47%"; Hit description =Cytosolic NADP-malic enzyme
  Pfam annotation: Domain name=malic; Domain location=2-80; Score= -79.8; E_value=0.062; Accession=PF00390.9; Description=Malic enzyme, N-terminal domain
MKDRNEKLFYKLLIDNVEELLPIVYTPTFYVDAHGDVCKDHNKKLKDANLFVSQGGLIILVKTVVAASSSQGFLLACMNNALGL

SEQ ID NO: 46905 - protein, 180 aa, Zea mays
  Coding DNA Sequence Number=SeqID_5126
MRSSCAFEKKIVGRAVKVNVPYIESKRDMKPLRLDHCSSESDVRLLGKSMVEILLVLGVGLCLLLRRQCDLVVEGSPGAEGGFAWLLLVSDIMDMELLATLLVRVVLLWTPGPCSAGLWSLFCLSLRLDLPVVELFRSGVFFEELVSFLEEEEFLVVVAKAFLFLLPAEGQFANTSVSGL

SEQ ID NO: 46906 - protein, 111 aa, Zea mays
  Coding DNA Sequence Number=SeqID_5127
MNPRAGGEVATGRGKRRRGWGGRVMRTRGRQSRWGGGREYDNEGIASRGGERGHGVTWGAHTGVICPRRSRIPARYGMGDSPVLPARDGGPSSMLISRMGPRPPSADGGGR

SEQ ID NO: 46907 - protein, 101 aa, Zea mays
  Coding DNA Sequence Number=SeqID_5128
MALTSQRRASDDVSIALVAHSIGAKAGLDLDRGPQHPKTSSRIDDETSPGIDNKASDHNALREDGESLATGAKSATGDDSAPPRRTGPKALAKTPSTVAEG

SEQ ID NO: 46908 - protein, 191 aa, Zea mays
  Coding DNA Sequence Number=SeqID_5129
MRRWVREVGGGEETTTGLRGERRREWTGILLGSQSTKGGLKVELSHERVSRVMPEHHGDGAWPGSDCRCGRDAVHAAHSVRGGGPAVVGRRRGKVLFRRGNLSSDSVGGIALTLPHEGCFPQPRLSRRVLRAGSGKGGDGVSLVGDRWRRWLIDDRKGRWRGRVLRICNPRGNCSCHSSKGRGGARTGARA

SEQ ID NO: 46909 - protein, 74 aa, Zea mays
  Coding DNA Sequence Number=SeqID_5130
MTSLFMLRSSLWLQFKPHHIAAGAAFLAAKFLHYDITFHPNFWHEFKTSPYIVQGLTAPSVALADVVQQLKELL

SEQ ID NO: 46910 - protein, 90 aa, Zea mays
  Coding DNA Sequence Number=SeqID_5131
MNMGTGLQDPESTPPPPPPHGDLPRITSQSFDSDDFGDATADGATPPAPPPQGELSTVMRSLDLRTQVEGPWSRYLKTHCAAVVSLVVAS

SEQ ID NO: 46911 - protein, 336 aa, Zea mays
  Coding DNA Sequence Number=SeqID_5132
MSSQSSAGGPAIHHPHSNYHPYIFQHDPPLHSNSRRRRRNHDDPYQPYLPLPHAHSHGATAVVTGTVRCHVPRDPLVLSHLQERLFPTLPQHHPIAGPPPTKRARRAPDTPWDPPPPTLQPALVPVALERPPDVGHSAGALLSRDEIERRSPSRRDGIDSALEARLRASYCAYLHCLGNRLGFPPASVLGLLALAATPSPTRVAPTPGHQACDGATVHDSAPAASSDAALDANTASVGAAPHASAPATSGGVALLPRRCATLLPFTDTVAPSCSGAVLPGAGAGVDWHMRTDAPPLPGLGASCVALLDASSGADAALSALLGVGVGVNATIKTIKH

SEQ ID NO: 46912 - protein, 152 aa, Zea mays
  Coding DNA Sequence Number=SeqID_5133
MGVGAVHPWRPALGKKTGWELGHGKNRERGWGCAAVGRRQGEAAGGGGRCAEGGQPWATMSSLLELGVGPAREEQGREKFTCALDSRGSGLEFSGRLLAGGAGAERATAALEVGCNPSWATREDARLGSREMGAELGRTELWKSRGKRARQG

SEQ ID NO: 46913 - protein, 87 aa, Zea mays
  Coding DNA Sequence Number=SeqID_5134
MVREEPQDIENEDDLCLPTPCPTKRRKVIGLDDLLLDYLLFCKKDKLKVKAAKSKHGPKGGYGSGEENDRATTQQDIIVCKIFEEVQ

SEQ ID NO: 46914 - protein, 89 aa, Zea mays
  Coding DNA Sequence Number=SeqID_5135
MSSIGGSTMSSEPEEVELFVGVNLTGDTMELVGSGTRTTQIGSRNEEYDSLLDSGSMGKGGSINNRDVGSKGSKALKSTLSSLALERPT

SEQ ID NO: 46915 - protein, 104 aa, Zea mays
  Coding DNA Sequence Number=SeqID_5136
  Homolog annotation: Hit_ID=Q3LRV2; Match level="QueryCoverage=34%, HitCoverage=15%, E-value=4e-11, Identity=80%"; Hit description=Gag
MGSGRTLSREFGDKYKEESSSSIKSHKKGDKKKKKMKKLVYYETDSSSPSTSGAESTTSTCHERKKYSKPPYFDGEDYCMWSDKMRHHLTSLHESIWDVIEFGA

SEQ ID NO: 46916 - protein, 556 aa, Zea mays
  Coding DNA Sequence Number=SeqID_5137
  Gene Ontology: Mol. function=isomerase activity; Cellular component =intracellular; Biological process=protein folding
  Homolog annotation: Hit_ID=Q6K5Q1; Match level="QueryCoverage=93%, HitCoverage=87%, E-value=0.0, Identity=56%"; Hit description =Putative peptidylprolyl isomerase
  Pfam annotation: Domain name=FKBP_C; Domain location=178-276; Score =102.7; E_value=1.1e-27; Accession=PF00254.18; Description=FKBP-type peptidyl-prolyl cis-trans is
  Pfam annotation: Domain name=FKBP_C; Domain location=61-156; Score =76.8; E_value=6.6e-20; Accession=PF00254.18; Description=FKBP-type peptidyl-prolyl cis-trans is
  Pfam annotation: Domain name=TPR_1; Domain location=297-330; Score =5.2; E_value=1.3; Accession=PF00515.18; Description=Tetratricopeptide repeat
  Pfam annotation: Domain name=TPR_1; Domain location=346-379; Score =12.8; E_value=0.16; Accession=PF00515.18; Description=Tetratricopepti de repeat
  Pfam annotation: Domain name=TPR_1; Domain location=380-413; Score =38.8; E_value=1.8e-08; Accession=PF00515.18; Description =Tetratricopeptide repeat
  Pfam annotation: Domain name=TPR_2; Domain location=297-330; Score =13.9; E_value=0.58; Accession=PF07719.7; Description=Tetratricopeptid e repeat
  Pfam annotation: Domain name=TPR_2; Domain location=346-379; Score =13.9; E_value=0.58; Accession=PF07719.7; Description=Tetratricopeptid e repeat
  Pfam annotation: Domain name=TPR_2; Domain location=380-413; Score =30.5; E_value=6e-06; Accession=PF07719.7; Description=Tetratricopepti de repeat
  Pfam module annotation: Pfam domain module=FKBP_C::FKBP_C::TPR_1::TPR_ 1::TPR_1::TPR_2::TPR_2::TPR_2; Domain location=178-276::61-156::297 -330::346-379::380-413::297-330::346-379::380-413
MKKGENAVFTIPPELAYGEDGSPPVIPPNATLQFDVELLSWVCIKDISKDGGILKKVVAKGDKWENPRDPDEVVVKYEARLEDGTVVSKSDGVEFTVRDGVFCPAISKAVKTMKKNEKAHLTVMPQYGFGVKGRQASGEEASVPPNATLHIDLQVVSWRTVTELGSDKKILKKILKEGEGYDCPNDCAVVRVKLIGKLEDGTLFVKKGHDGEEPFEFKTDEDQVIEGLDKAVLSMKKGEVSLVTIPPHHAFGTNETTKDLATVPPNSYVYYEMELVSFDKEKDSWDLKNVAEKIEAAAKKKEEGNVWFKIGKYARASKRYEKALSFVEYDSSFTEEEKQLSKPLQISCKLNNAACKLRLNDYKEAKELCTEVLESDNTNVKALYRRAQAHMHLVDLDLAEADIKKALEIDPDNRDVKMGYKRLKEKVKEYKRRDAKLYGNMISKLSKLEDTEDNGQMSQAVNKKRELLWPLAEMLRRFFTADGSKGSTLWLVLRLLIPVIVLVAVCVGYFMHSSVEEIDCINCECLSLYRSDEYYTYLLVVWVEDLRAKYSRVLYC

SEQ ID NO: 46917 - protein, 110 aa, Zea mays
  Coding DNA Sequence Number=SeqID_5138
MDMLCTGRGGECMTHTVDYRATHDWLLGPTTEGVKTGRIQAYRVTPYRTLMYLSQIRDRLRVVQIQDRYRTGPSNNSGGLVESIKKAMAGVAETGRCQTRRSYASCLPNS

SEQ ID NO: 46918 - protein, 58 aa, Zea mays
  Coding DNA Sequence Number=SeqID_5139
MVTIGYWATAYWEIPDDCYLPGVAELTDAGALDAAGRLEHLEAGTETSTETREDRGEE

SEQ ID NO: 46919 - protein, 66 aa, Zea mays
  Coding DNA Sequence Number=SeqID_5140
  Homolog annotation: Hit_ID=Q75M81; Match level="QueryCoverage=68%, HitCoverage=4%, E-value=3e-08, Identity=67%"; Hit description =Putative integrase
MSSWCSPLEEDCVIALDGDNGVITKRNNPVDIGVELGEGHALPRHVVHHAGVEDLACAPTTPFSPS

SEQ ID NO: 46920 - protein, 550 aa, Zea mays
  Coding DNA Sequence Number=SeqID_5141
  Gene Ontology: Mol. function=ubiquitin-protein ligase activity; Cellular component=ubiquitin ligase complex; Biological process =protein ubiquitination
  Homolog annotation: Hit_ID=Q1SAW5; Match level="QueryCoverage=54%, HitCoverage=68%, E-value=3e-08, Identity=21%"; Hit description=U box
MSSPRLSSKEEELLRSVERAIERSYAAKQATNVPLWRRLLGNASKKSKNDSAALTTAPPSPGVLVGTQREEQERAKEGADVASSAPRHPSEAGAEGDDVQPAAQDRSVHAATMMKSALARIQGGQNSGAFVDMELAMKGLMDVSFKGRERVPVLPAEFRSKWPHGNISQLERDIIADPLILTSGHTIDRFSYQWSSLGAAKRFLTVPNHLLRDIITAWCLDHEIPLPSSTSTSVASEEAPPPTEEEMQLLLEKLSMHSAAQKEALHRIQLLSTSSKGVHPCLDRWQDLLPKLMCLHKEWRSTWARQWEEERLTVMLNLSLHRVNRDILARQERLPHALKETSARAGRHGYPLTVMLKVSSLVTILSESEYSTFRRKFVEIDGIEELHVLLCNRDCLVRNEASAAILALCRDDAAALTRVPDASLVECLSDGMVTDECLLLLECTSDRESVRDRIAFSVELLMEAIMATENGQGYLSSRGTRTALALIYNCIKEADGRGRLRTTVILQGFVEALRILERKETPLRTVFQIEEIHSIVSQALAELTQWNIRS

SEQ ID NO: 46921 - protein, 273 aa, Zea mays
  Coding DNA Sequence Number=SeqID_5142
MEVFGEDKASTPLHRIIHPSSSLRTCRYFGSDRAPRVAPQADPSSLSSDIIQSKVFISSLLQKSLLSSTRASSDVSLALVLPYALEGSALRHQCYASEEVSGCLLLLSIVFLLLRHFHISYRCSLFTFFSFSLLHHGHEPTPPSEDFGDSEYSEEEFSFESEGSPAPGSPPASSDDSDDSQGIAAEVWTYIRVVERAGLEGSDESEYSSNEENSSDSSEEGGGGDGDDGDDDGGDGDGGGGDGKSGDGGGKCGSGDGGGGSKGSSRGSNKASG

SEQ ID NO: 46922 - protein, 211 aa, Zea mays
  Coding DNA Sequence Number=SeqID_5143
  Gene Ontology: Mol. function=RNA-directed DNA polymerase activity; Cellular component=exocyst; Biological process=exocytosis
  Homolog annotation: Hit_ID=Q2RAC2; Match level="QueryCoverage=94%, HitCoverage=38%, E-value=3e-54, Identity=49%"; Hit description =Exocyst subunit EXO70 family protein, putative, expressed
IDTIFVGESGSQMRDSALSLTKCLAQTAQKTFSDFEEAVEKDATKNIHTDGTVHPLTSYVINYVKFLFEYVLIPSNARKKVTIVSEAKDLLGDDWIQRHRRIVQQNANQYRRIAWAKVLQCLSGQGLTSSGGSGHVGSDGGNSSGASRTAVKERSFNVLFEEIYHKQCGWSVPDTELRESLRLAVAEILLPAYRSFIKRFGYAALTPRYLL

SEQ ID NO: 46923 - protein, 176 aa, Zea mays
  Coding DNA Sequence Number=SeqID_5144
MEAARKHEDDHWTHMTECIDLVFDIARIQEHIVTQDLGVKAMDQPLLVAVPGGVAPCACGGWPPTGPPPPACWRGLGPQRGAPPARPPTPVRSRPGAAPTQPRHSPCLGARPWHGERKKKRRRKLAVNSQQAASVWGTGLSGGAPDSVRWCTGQCPVCQAASAEEAALGNLLEAYG

SEQ ID NO: 46924 - protein, 133 aa, Zea mays
  Coding DNA Sequence Number=SeqID_5145
  Subcellular localization annotation: CTP_CleavageSite=59; ConfidenceScore=5.68e-01
MKAISLTNARRRPRISKSKSSSKSQQSKSPTPTSTRWTKKAATPYLIKTKKNGKVIAIKANKQANKRKMAKRIWVSKEIISTMKGTNKLYGALGKLVKARDRVEMDGSGLATVAECSGGLAGDAELAGAKFWV

SEQ ID NO: 46925 - protein, 122 aa, Zea mays
  Coding DNA Sequence Number=SeqID_5146
  Subcellular localization annotation: CTP_CleavageSite=44; ConfidenceScore=5.72e-01
MAQGHISLLATPCSWLSPTTLTSSRRCPAPQRIITTRSPSRRPKVASVPTTSLQHHWRQPSRWPNSRWIALGAPDAPKVSSGAFKSAEAREEVLVDPTDLAKRVHVGVALTSKLKGTLFDFL

SEQ ID NO: 46926 - protein, 419 aa, Zea mays
  Coding DNA Sequence Number=SeqID_5147
  Gene Ontology: Mol. function=transferase activity; Cellular component= nucleus; Biological process=regulation of transcription, DNA-dependent
  Homolog annotation: Hit_ID=Q5Z5E6; Match level="QueryCoverage=59%, HitCoverage=97%, E-value=2e-36, Identity=41%"; Hit description=CCR4 -NOT transcription complex,subunit 7-like
  Pfam annotation: Domain name=CAF1; Domain location=170-396; Score =115.3; E_value=1.7e-31; Accession=PF04857.10; Description=CAF1 family ribonuclease
MAARDRSRGACAAAGIFSNETPIDQATHWYSAVPMTPLQPAPMHTVTTMPPQSAPMPTVTMIPPQFFTPMPTVPMTALQPAPMLPMMPPQFFTTMPTVPITPLQPAQLSTPMPIVPTTPLQPAPMYTVTTMPSQSAPMPTVPMMPPQFFTPMPTVPVMPPQPAPFPVPVHEVWADNFHEVEAAVGYFAAHARFVAVGLHYPGVVHGADHRGLVASTAEQRYATVKANVDALKPLQLGLAVITEAREIAAWEFNLSDFDPTVDPHAVRSIAYLRRRGLRCDELRLRGIPVAKLTRVLRLICRPGVSWVTHTGAYHVAYLMKVINGGNKLPGDMAGFLAAVRLSLGEDVYDVATMASDCQDMPAGLEGIASRLGVAPPLSMHPLAGAGSVLALQAFMELRFHVFRGNVTRYRGVLQGLQVT

SEQ ID NO: 46927 - protein, 573 aa, Zea mays
  Coding DNA Sequence Number=SeqID_5148
  Gene Ontology: Mol. function=helicase activity; Cellular component =mitochondrion; Biological process=embryonic development ending in seed dormancy
  Homolog annotation: Hit_ID=Q6ZKM5; Match level="QueryCoverage=77%, HitCoverage=96%, E-value=0.0, Identity=77%"; Hit description =Putative drought-inducible protein 1OS
  Pfam annotation: Domain name=PPR; Domain location=212-246; Score=9.4; E_value=0.57; Accession=PF01535.11; Description=PPR repeat
  Pfam annotation: Domain name=PPR; Domain location=247-280; Score=2.5; E_value=3.7; Accession=PF01535.11; Description=PPR repeat
  Pfam annotation: Domain name=PPR; Domain location=283-317; Score =32.7; E_value=1.3e-06; Accession=PF01535.11; Description=PPR repeat
  Pfam annotation: Domain name=PPR; Domain location=318-352; Score =28.3; E_value=2.7e-05; Accession=PF01535.11; Description=PPR repeat
  Pfam annotation: Domain name=PPR; Domain location=353-387; Score =20.1; E_value=0.0077; Accession=PF01535.11; Description=PPR repeat
  Pfam annotation: Domain name=PPR; Domain location=388-422; Score =38.9; E_value=1.7e-08; Accession=PF01535.11; Description=PPR repeat
  Pfam annotation: Domain name=PPR; Domain location=423-457; Score =10.8; E_value=0.4; Accession=PF01535.11; Description=PPR repeat
  Pfam module annotation: Pfam domain module=PPR::PPR::PPR::PPR::PPR::PP R::PPR; Domain location=212-246::247-280::283-317::318-352::353 -387::388-422::423-457
  Subcellular localization annotation: CTP_CleavageSite=60; ConfidenceScore=5.49e-01
MAILTLNRQDVTSFSPTLLAQPGSRAKFGTPKSPSPGTIRHRALGIERGQMLSLGALRKLCAAFDAVALTVIAAGLSRPPSGRHPFSSAHAHSSHPADFPTIAACRAAISASKGDRRRRPGVGQPSSSPSPSLAAAAAKEEQEQPVLVRIKHERDPERLYQLFRANAHNRLLVENRFAFEDAVARLAGARRNDLVEEILEQHKALPQGRREGFVVRIIGLYGKAGMPGHALRTFQEMGMYGCPRTAKSLNATMKVLLRARMFDEALSLFEEGPEKYDVEVDDISCNTVVKMFCDMGDLRAAYQVMQGMERAGVRPDVITYTTLMAAFYKCGRREVGDGLWNLMRLRGCVPTLATYNVRIQFLVNRGRGWQANELARKMYVAGIKPDEITYNLIIKGFFMMGEHEMAKTVFGAMHGRGCKPNSKVYQTMVHYLCERRDFDLAFRLCKDSMEKNWFPSVDTINQLLKGLMAISKDRNGKEIMKLVTGRKPSYSDASLARNFLRYFEPPLFGGLRWLGVGKNVAQRRGCSPTVADVLERKPGLTICCNANAWDMGCRNKCHPDIRFPFLSKWTFRK

SEQ ID NO: 46928 - protein, 102 aa, Zea mays
  Coding DNA Sequence Number=SeqID_5149
  Subcellular localization annotation: CTP_CleavageSite=54; ConfidenceScore=5.19e-01
MRTFHIMRAPSFSSSSDVRLSDFTMFFLPNLLPPAQSRNRELIDAPQRGYGVILAMRSPGVRYWTTKVCPPLPFPPALRNLGSGGGEGCGSLICYLWYPCIH

SEQ ID NO: 46929 - protein, 662 aa, Zea mays
  Coding DNA Sequence Number=SeqID_5150
  Gene Ontology: Mol. function=transmembrane receptor activity; Cellular component=integral to membrane; Biological process=defense response to bacterium
  Homolog annotation: Hit_ID=Q9XGQ5; Match level="QueryCoverage=99%, HitCoverage=100%, E-value=0.0, Identity=85%"; Hit description =Putative transmembrane 9 superfamily protein member 2
  Pfam annotation: Domain name=EMP70; Domain location=60-620; Score =837.5; E_value=7e-249; Accession=PF02990.7; Description=Endomembrane protein 70
MARALHSPCFVAPLLWLTLLLVAVSPGGAFYLPGSYMHTYSQGEVIHAKVNSLTSIETEMPFNYYSLPYCRPQGGIKKSAENLGELLMGDQIDNSPYRFHVNVNESVFLCTTKGLNENDAKLLKQRTRDLYQVNMMLDNLPVMRFTKQNDVTVQWTGFPVGYSPPGASDDYIINHLKFKVLVHEYEGRNVEIIGTGEEGSAVISETDKNGMSGYQIVGFQVVPCSVKRNADDFSKLNMYDNIDPVDCPVELKKSQVIRQQERITFTYDVEFVKSDIRWPSRWDVYLKMEAGAKVHWFSIMNSLLVILFLAGIVFVIFLRTVRRDLTRYEELDKEAQAQMNEELSGWKLVVGDVFREPSCSKLLCIMIGDGVQILGMAVVTIVFATLGFMSPASRGMLLTGMIVLYLFLGIASGYVSVRFWRTIKGTSEGWRSVSWLTACFFPGVMFTVLTVLNFVLWKSESTGALPISLFFTLLALWFCISVPLTLVGGFLGTRAEKIEFPVRTNQIPREIPARKYPSWLLVLGAGTLPFGTLFIELFFILSSIWLGRFYYVFGFLLIVLLLLVAVCAEVSVVLTYMNLCVEDWRWWWKAFFASGSVAVYVFLYSINYLVFDLRSLSGPVSAMLYVCYSFLMAFAIMLTTGTIGFLTSFAFVHYLFSSVKID

SEQ ID NO: 46930 - protein, 106 aa, Zea mays
  Coding DNA Sequence Number=SeqID_5151
MRVPPDLGLVFPRRISSVVGDEATRGGERQGKPEADEESKARWVWCGRGIEILYRRCQVSPAGTRTHMQSQMPSAVAAEASTPLQAHVDLAVKSRGASPTVHVDEA

SEQ ID NO: 46931 - protein, 576 aa, Zea mays
  Coding DNA Sequence Number=SeqID_5152
  Gene Ontology: Mol. function=voltage-gated chloride channel activity; Cellular component=membrane; Biological process=chloride transport
  Homolog annotation: Hit_ID=Q6ZKN1; Match level="QueryCoverage=87%, HitCoverage=66%, E-value=1e-176, Identity=64%"; Hit description =Putative CLC-f chloride channel protein
  Pfam annotation: Domain name=Voltage_CLC; Domain location=181-521; Score=-59.8; E_value=2.4e-08; Accession=PF00654.10; Description =Voltage gated chloride channel
  Subcellular localization annotation: CTP_CleavageSite=12; ConfidenceScore=5.29e-01
MAGSDLEPLRASAAALPSSSDPDSPAVTPRRSRVRDLLRNLDRRLSNRSRGGADAGHGGGEAGASPRRPEEDSDELGDGAPPEWALLLVGCLLGLATGICVAVFNRGIAFANTELIRWLDVLFSPKCLKTMYDAHTNTLTDTEFKVHVIHEWAWAGTPTEGAAWLRLQRLADTWHRILLIPVTGGVVVGMMHGLLEIFEQIKQSLSSQREGIDFMAAIFPTIKAIQAAITLGTGCSLGPEGPSVDIGKSCANGCAEMMENNRERRIALVAAGSAAGIASGFNAAVAGCFFAIETVLRPLRAENSPPFTTAMIILASVISSTVSNVLLGEKAAFIVPTYELKSAAGSSAQSNFIWLFNLPLGLWQLVVWFTKTFDLIKKKFGLPAVVCPALGGLGAGLIALRYPGILYWGFTNVDEILHTGKSASAPGIWLLAQLAAAKVVATALCKGSGLVGGLYAPSLMIGAAVGAVFGGSAAELINSAIPGNTAVAHPQAYALGAVGLAIWVPSVVNQSGSKDTFEATSPRHGYSSLLPPTDRNETDWRRQDGDDVELTILDVDPYHYGSNNEEMLLDDLKVDN

SEQ ID NO: 46932 - protein, 740 aa, Zea mays
  Coding DNA Sequence Number=SeqID_5153
  Gene Ontology: Mol. function=serine-type endopeptidase inhibitor activity; Biological process=defense response
  Homolog annotation: Hit_ID=Q2L3B1; Match level="QueryCoverage=40%, HitCoverage=99%, E-value=1e-103, Identity=51%"; Hit description =Gibberellin MYB transcription factor
  Pfam annotation: Domain name=Serpin; Domain location=322-725; Score= -123.1; E_value=8.7e-06; Accession=PF00079.10; Description=Serpin (serine protease inhibitor)
  Pfam annotation: Domain name=WD40; Domain location=198-236; Score =36.9; E_value=7.1e-08; Accession=PF00400.22; Description=WD domain, G-beta repeat
  Pfam annotation: Domain name=WD40; Domain location=241-279; Score =7.0; E_value=5.6; Accession=PF00400.22; Description=WD domain, G -beta repeat
  Pfam module annotation: Pfam domain module=Serpin::WD40::WD40; Domain location=322-725::198-236::241-279
MSQRDGDLAAGAHPEEGDRHAVRMDGSDDELDQPTSKATEHITAMDVRKGKDMQGIPWNVMPTTRDKYRQSRLQGYANFENECMPAEKGQLYYEFQHSTRSVKPTIRHFQASHAMTYKKQEVINLQGHVTPCEKHHRNHYEGFYQTPVSTLAVKHNLLVTGGFHGEIICKHTSLSPDGKLAAIVGDSPDGLLIDANSGKTVHKLHGHLDYSFASAWNPDGRTFATGNQDKTCRVWDVRNLSRSVVVLGGNIGAVRSIRYTPDGKFMAMTEPADFIHIFDVESGYSRKQELDFFGEIAGISFSPDTEALFVGVHDRFFNCCLLQFSRRRFYSYLDSTLLLAAGSGGATRDQLLATLGGGDGPDAADSLHALAEQVARIAFADAVFADASLKLRPAFEEVAVGKYGAEIHSVEFQKKVRLITTLRSQTSDLDVAKSRSATGRSAAPLPGFMLVSVLFRFGASSSSPLRQFLLVSTSALLSCSASALLARLHFGAAELLRWRTGRDYATPRRRHAAGGCRRRHGLYWAYSLVLGRDRGCSPGSPGRRSAPGRQDAEAAARVNAWAERKPSSRTSKAVTSTQAEAVLHVHPPPGSTRLPPGLGPAEKLSAEPGFLDKHIPTRKVPVGETKVPRFKVSFVFEASELLNKALGLWLPFSAEEAGLVVGDPPMLYVSSVFHRSVVEVHEEGTEAAAASAVLMMVVGASLGSSTDCSFMADHPFVFLIREDTPPEEDFGQSRRRSPKT

SEQ ID NO: 46933 - protein, 94 aa, Zea mays
  Coding DNA Sequence Number=SeqID_5154
MRNGSGHGIVGGTRLADRPLPLACQPVPFEQRTTAQELQPDQARHRASPQLSSCRGGWFILLGGLTKWVVATRSKWRLRSGCWQLRTSASQFVG

SEQ ID NO: 46934 - protein, 154 aa, Zea mays
  Coding DNA Sequence Number=SeqID_5155
  Gene Ontology: Mol. function=kinase activity; Cellular component =endoplasmic reticulum; Biological process=proteolysis
  Homolog annotation: Hit_ID=Q9AY37; Match level="QueryCoverage=92%, HitCoverage=49%, E-value=1e-57, Identity=64%"; Hit description =Putative phosphatidylinositol-4-phosphate 5-kinase
  Pfam annotation: Domain name=MORN; Domain location=16-38; Score=33.4; E_value=8.1e-07; Accession=PF02493.10; Description=MORN repeat
  Pfam annotation: Domain name=MORN; Domain location=39-61; Score=30.4; E_value=6.5e-06; Accession=PF02493.10; Description=MORN repeat
  Pfam module annotation: Pfam domain module=MORN::MORN; Domain location=16-38::39-61
MAVFNELKDGWNGDTYAGEYFADRMHGFGIYSFANGHRYEGAWHEGRRQGLGMYSFRNGETQAGHWQNGVLDTLSTQNFIPGSPIAVNHSKVLNAVQEARRAAEKAYDIPRVDDKVNRAVAAANKAANAARVAAVKAAQKRIPSNGDDLPLSVV

SEQ ID NO: 46935 - protein, 64 aa, Zea mays
  Coding DNA Sequence Number=SeqID_5156
  Gene Ontology: Mol. function=protein kinase CK2 regulator activity; Cellular component=protein kinase CK2 complex
  Homolog annotation: Hit_ID=Q9FQF7; Match level="QueryCoverage=73%, HitCoverage=18%, E-value=2e-18, Identity=97%"; Hit description =Protein kinase CK2 regulatory subunit CK2B2
MDRKRIKDALEKHLERSSPSTSRGVVSKERERLAAGKLPSSLGKAEISRLPFLWPLQMRNSLLA

SEQ ID NO: 46936 - protein, 1213 aa, Zea mays
  Coding DNA Sequence Number=SeqID_5157
  Gene Ontology: Mol. function=protein serine/threonine kinase activity; Cellular component=membrane; Biological process=protein amino acid phosphorylation
  Homolog annotation: Hit_ID=Q6ZF70; Match level="QueryCoverage=64%, HitCoverage=91%, E-value=0.0, Identity=57%"; Hit description =Putative PTH-2, resistance gene (PTO kinase) homologs
  Pfam annotation: Domain name=APH; Domain location=759-934; Score= -16.3; E_value=0.084; Accession=PF01636.13; Description =Phosphotransferase enzyme family
  Pfam annotation: Domain name=Pkinase; Domain location=756-1026; Score= 150.8; E_value=3.6e-42; Accession=PF00069.15; Description=Protein kinase domain
  Pfam annotation: Domain name=Pkinase_Tyr; Domain location=756-1026; Score=129.6; E_value=8.7e-36; Accession=PF07714.7; Description =Protein tyrosine kinase
  Pfam module annotation: Pfam domain module=APH::Pkinase::Pkinase_Tyr; Domain location=759-934::756-1026::756-1026
  Subcellular localization annotation: CTP_CleavageSite=23; ConfidenceScore=5.06e-01
MQARAGRYRPLSPGGGSNARRVALAHLQPRSRLLLGAIALTIGCIGSSLRGKNLRETPTDSLNTQDCAARRFSPLGFPPLSACASVSLLPFSKKPDNPSIHPRSAPPTQGRNRSRLAAGSTPRADGYAWQAQQARRFADVHAACSGCGRNASAVEDGHGTFQPFPRLLLLSAGLSRSVTTPAVLCSSLRQRLLRKQLPLLCSPKALGHCCWFPFAQFGLTQALWTKCDLQELKVAAIDFQMSPFVLAVVSVAFLSLRFLQAHGSGLLLSCGSNSTVDADGRRWIGDITPEGNFTLSSPGLAASLVGKSSSDEIFGPLYSSARFFNAATWYTISVLPGSYCVRLHFFPSTFGNLSANNSVFDVTANDFKLVSKFNASEEIAWRASVSNSVTSAVVKEYFLVVGARGLSIEFDPRPGSFAFVNAIEVMLTPDNLFNDTVSKVGSPVTQLPLGLRGRGVETMYRLNIGGPALKSPSDQYLHRPWYTDEAFMFSTNAAQTVSNASSIVYVSSNESTIAPIDVYETARIMGNNMVVDKRFNVSWRFYVHPNFDYLVRLHFCELVYDKPSQRIFKIYINNKTAAESYDVYARAGGINKAYHEDFFDNSTQQADTLWLQLGPDSMASASGADALLNGVEIFKLSKDSDLSYVLGHIDTGNQMDSSKGGKIKGLWEELGIGSASFVAVTSVVLFSWCYIRKKRKAVNKEAPPGWHPLVLHEAMKSTTDARAASKSSSARNASPIGHRMGRRFGIAEIRAATKNFDESLVIGTGGFGKVYKGEIDEGATVAIKRANTLCGQGLKEFETEIEMLSKLRHRHLVAMIGYCEEQKEMILVYEYMAKGTLRSHLYGSSLPPLTWKQRIDACIGAARGLHYLHTGADRGIIHRDVKTTNILLDDSFVAKIADFGLSRTGPTLDQTHVSTAVRGSFGYLDPEYFRRQQLTQKSDVYSFGVVLFEVACARPVIDPTLPKDQINLAEWAMRWQRQRSLEAILDPRLDGDFSPESLKKFGEIAEKCLADDGRSRPSMGEVLWHLEYVLQLHEAYRRNVVESESFGSGELGFADIPSFFSLPHVIREGEEEHHHRSKKPSTNGIEKGGMVVQLENVWYSVLRALRNANRRAQYRVLPRPSCPPTRPQSALRRHRAATINAIRGPSSPPPRNRSAGVPPTAAIRNLKSSQISFRYGTVALGHVSHKLSVPPRRPRGRGTLPGFVRTAGGGAGP

SEQ ID NO: 46937 - protein, 180 aa, Zea mays
  Coding DNA Sequence Number=SeqID_5158
  Pfam annotation: Domain name=WD40; Domain location=1-35; Score=2.6; E_ value=18; Accession=PF00400.22; Description=WD domain, G-beta repeat
  Pfam annotation: Domain name=WD40; Domain location=40-78; Score=21.1; E_value=0.0039; Accession=PF00400.22; Description=WD domain, G-beta repeat
  Pfam annotation: Domain name=WD40; Domain location=95-138; Score =18.3; E_value=0.029; Accession=PF00400.22; Description=WD domain, G -beta repeat
  Pfam module annotation: Pfam domain module=WD40::WD40::WD40; Domain location=1-35::40-78::95-138
MECVQKFMHADWVWALALRGNTIASTTGINAYVWDIRDDNLTSLISNAHVGSTYSIAWTHLADVLFTGGEDGAIRLFNVSDVSDDEEDIKPVATWVPHSASSGGRIALIDLRKLPTPKRSSKDRIVSAGEDGSVRIWNFSEALDIERRAQALRSLRQENRMRRRKAQCVLIKSKIRPSNL

SEQ ID NO: 46938 - protein, 75 aa, Zea mays
  Coding DNA Sequence Number=SeqID_5159
MHGVGGVGVVLVSAGQSGGLSRESRHLALCRAMNGFNESEASTARRSVSIDTGSVQYVAPPRTDNELCPHRPAGR

SEQ ID NO: 46939 - protein, 158 aa, Zea mays
  Coding DNA Sequence Number=SeqID_5160
  Gene Ontology: Mol. function=identical protein binding; Biological process=negative regulation of enzyme activity
  Homolog annotation: Hit_ID=Q8H4X8; Match level="QueryCoverage=72%, HitCoverage=15%, E-value=3e-10, Identity=34%"; Hit description =Putative subtilisin-like serine protease AIR3
MHDQDQDDDDKDASSLEGLLAELCQARHRLQPTHLIGDAKSLFHEVVMLDSLHTTIHGVPVVCSTGNSGPYNDTVVNATSWVTTFAATTVTVNRDFPGILTFNNRVRIKRRASSSPHCTFCRTLYPIVDVARATSNSYAAASCAFDTFDPVRGSRVKA

SEQ ID NO: 46940 - protein, 79 aa, Zea mays
  Coding DNA Sequence Number=SeqID_5161
MAHRTVNSPLSGAHRTVRCDVRCATKIHFPKTALSGFCDWENSAVDQPGPTWQRVHRTVRCTPETSGAPKPETLNLVFS

SEQ ID NO: 46941 - protein, 232 aa, Zea mays
  Coding DNA Sequence Number=SeqID_5162
  Gene Ontology: Mol. function=sequence-specific DNA binding; Cellular component=nucleus; Biological process=regulation of transcription, DNA-dependent
  Homolog annotation: Hit_ID=Q6H6J2; Match level="QueryCoverage=87%, HitCoverage=36%, E-value=8e-74, Identity=71%"; Hit description =Putative homeobox protein
MLELDDGLQMDEKYNQCLDEIQSTTARFNTLMHSPPGGGGGGGGICAPFAHRAVSTMYRGLRRRLAGEIMAAASRASCWGESSSSVTVAAGGDVERSWESAFIQKHWSAQQLRRTEQQCWRPQRGLPEKSVAVLKAWMFENFLHPYPKDHEKDVLAARSGLTRNQAIIKIPPDSVSNWFINARVRLWKPMIEEMYQDLKRSSGAGGGGHGPAMEPQQHLSKRRICELEDGGQ

SEQ ID NO: 46942 - protein, 134 aa, Zea mays
  Coding DNA Sequence Number=SeqID_5163
  Homolog annotation: Hit_ID=Q9ZTI3; Match level="QueryCoverage=31%, HitCoverage=11%, E-value=6e-08, Identity=64%"; Hit description=RNA polymerase sigma factor 1
  Subcellular localization annotation: CTP_CleavageSite=37; ConfidenceScore=5.56e-01
MQHQLPSLPAICARLASPSLPLSSLLPTPSVPVSQPPASRAPAPGSHAHSLCFGSVAIGFLGVEAIDKVDERLSKAMVVVARSSVSVRQRRMNGHRQGAARKSVTISPALTQSRNRVHLRSIFSKDLLTHKQAI

SEQ ID NO: 46943 - protein, 152 aa, Zea mays
  Coding DNA Sequence Number=SeqID_5164
  Homolog annotation: Hit_ID=Q9LGH0; Match level="QueryCoverage=86%, HitCoverage=37%, E-value=7e-17, Identity=39%"; Hit description=NAM -like protein-like
MDSYLTFFSMDMMVELLEHIKDKVPRTQSSVMHRWLTIQTQVNKFCSCYDAILRRNQSGSTIHDKIAEATKMFQSLDNENKAFTLIHCWNILKDEDKWKAKRLELVELEKQPNKKKQKSTKMSRPRDDEATNNEEVPEDVAPQTELKKGHRG

SEQ ID NO: 46944 - protein, 75 aa, Zea mays
  Coding DNA Sequence Number=SeqID_5165
MAQGHISLSAVGAPDSLQDLSGAPPDSPEAPQVRTPTVEPQRSANVAGEREMCPWAILSILVIECRRGSELEILL

SEQ ID NO: 46945 - protein, 394 aa, Zea mays
  Coding DNA Sequence Number=SeqID_5166
  Gene Ontology: Mol. function=nucleic acid binding; Cellular component= intracellular
  Homolog annotation: Hit_ID=Q6YS82; Match level="QueryCoverage=91%, HitCoverage=90%, E-value=4e-92, Identity=50%"; Hit description=RRM -containing RNA-binding protein-like
  Pfam annotation: Domain name=RRM_1; Domain location=14-93; Score =43.6; E_value=6.8e-10; Accession=PF00076.12; Description=RNA recognition motif. (a.k.a. RRM, RBD, or
  Pfam annotation: Domain name=zf-RanBP; Domain location=199-228; Score= 25.8; E_value=0.00015; Accession=PF00641.9; Description=Zn-finger in Ran binding protein and others
  Pfam module annotation: Pfam domain module=RRM_1::zf-RanBP; Domain location=14-93::199-228
MAGYMSRGPQNGSVYVCNLPPGTDENMLAEYFGTIGLLKKDKRNGRPKIWIYRDKVSNEPKGDATVTYEDPHAASAAVEWFNNKDFHGSTIQVHIAESKSKDAFDNPTNLNTIAGVSEQDEVDNGAGIGRGRGDGPGKAWQQDGDWMCPNTSCTPCRCWLKLVVEVAVGVEAVVTLMQEEAVVRVLVLLLVVVHLDYFGPNDWPCPMCGNINWAKRTKCNICNTSKPGTNEGETGSKEVQCHFGPLPIVVCIAIFLHFRGGRGGGYKELDEEELEEVKKRRKEAEEDDGEIYDEFGNLKKKFRSKALHTGSAQTLPGSGRAGWEVEHRGSSEREGRERSRDRGRDDYDENETRSIDRGDHGRDQRRSQDREREKGRERRDHEYERSRERDRRHR

SEQ ID NO: 46946 - protein, 133 aa, Zea mays
  Coding DNA Sequence Number=SeqID_5167
LYADGGYQLRIRRLEVSYGTRLPREHHPRVLARVDRLSPLLASCHGHRIALYITYIFCISKRFFRPRYTSPELGSDPWTKGKAVNKGKIAKEKLTGGDAHDEKLAYVMCGLDGFRLQTTDSHNLAEHVSSPGR

SEQ ID NO: 46947 - protein, 231 aa, Zea mays
  Coding DNA Sequence Number=SeqID_5168
  Gene Ontology: Mol. function=mismatched DNA binding; Cellular component=chromosome; Biological process=mismatch repair
  Homolog annotation: Hit_ID=Q69MM0; Match level="QueryCoverage=80%, HitCoverage=14%, E-value=2e-73, Identity=73%"; Hit description=DNA mismatch repair protein-like
MTEAIVPSSGSLLEAVEGLVEVVDHVGVLSEGHGVSYLDSEEELSLPETGFQLFQKYAEQIQKWGWIISGGSNSSESFKKNMNILKRQVRLVTLVAVPCIFGVKLTGKDLMEFIWQLDETDGSSDMPPAVLRILNFKACRGAIMFGDPLLPSECCLIIEELKATSLCFQCAHGRPTTVPILNIASLHDELARLQMLSGRKAETWHGLGHHEPSLERAHMRLERLRKLRRGL

SEQ ID NO: 46948 - protein, 925 aa, Zea mays
  Coding DNA Sequence Number=SeqID_5169
  Gene Ontology: Mol. function=mismatched DNA binding; Biological process=mismatch repair
  Homolog annotation: Hit_ID=Q69MM0; Match level="QueryCoverage=79%, HitCoverage=64%, E-value=1e-165, Identity=43%"; Hit description=DNA mismatch repair protein-like
  Pfam annotation: Domain name=DNA_mis_repair; Domain location=92-191; Score=7.7; E_value=0.00053; Accession=PF01119.9; Description=DNA mismatch repair protein, C-terminal domain
MASCGSTVLMGSKCLHLGIDDKREVVGTTGECSIFSLKQSSACIFVIVHSVRCEKRELHHVKKCVLQIALIHPQISLRLLDNDSEDELLYTEISSSPLPLISKTFGDDISRCLHEITASDQMCFVRRGYAEIDVQSRKRQKADIYPAFILNFYCPRSTYDLHFEPTKTIVEFKDWRTVLLFFEQSVTNYWKKHQLQSPKVKLNKGLLKDHNVQNEKEYAHFESTQQTNAVKDTNSDMSSTRATRNSHCFSFVMEPSIQNVCFSGRITNSCRPDDNVASIDYKLGYKQMHYPENGSYKWLDDGPSHLNDDISSVNPTCWKRQRTEGIFHEYAYSGNLVMLEDVPTEGYFAHEQETELIGPEVEIPESCFRALNKPNGMTPDFVQNKTNLKAQTSGWDGLYDKFEKLNGDCLLDNGFYHDGGSTSKGTCRVLRKSSTSKKLGTAAGCVEGLEADAINQMNFPDIHALWNSDLIDRSSFKDTLNHFSHPSLLADTPCSHPRTLHTLNRTSDKCFRSWNYENIDSNVRFSNDSSIIFEGTKNFDNFNNEIQSLNYFNDKCGSTDQLGFEEDLTTWKSKFDMRLSVNISPETAGDNGCHLNVPSLNIANDNLFTQDLLNQHNSGLNQRLRTSKCSRFRSHSAPPFYRGKLKFSRLNVPLSKPSTDSDKDICVNNPEDNAPGPVDIPCISSTQPIPETDSSEFPDLNFSSLIPECVDKNCFEEARVLLQLDKKFIPVISGETILLVDQVQVFSFSKGPGEQDCPQYVDSEMNPLEVPHQSNEVAREYPSVSQRRNSSHEGVETGPKLLKHHHREALGEYVCELRSSRDMKNSHISNGDTLADEVEVKLDMFRALVLDGVGGEVHDADVVAIDKSALCQHTVELLKQLTKPRRLGYAVSHNAVLGLDAGVVNDLLPLRGPRDKAVAEEHSVA

SEQ ID NO: 46949 - protein, 196 aa, Zea mays
  Coding DNA Sequence Number=SeqID_5170
  Gene Ontology: Mol. function=DNA binding; Cellular component =chromatin; Biological process=regulation of transcription, DNA -dependent
  Homolog annotation: Hit_ID=Q8W512; Match level="QueryCoverage=62%, HitCoverage=97%, E-value=2e-57, Identity=90%"; Hit description=HMG -like nucleosome/chromatin assembly factor D
  Pfam annotation: Domain name=HMG_box; Domain location=73-142; Score =112.7; E_value=1.1e-30; Accession=PF00505.9; Description=HMG (high mobility group) box
  Subcellular localization annotation: CTP_CleavageSite=49; ConfidenceScore=5.29e-01
MPTAIAFKSRPTFRPFPLHSHVNATHSRLRAHLQTLITIRLQGLEMKSRARSGGGDSRLSVRKTKVEKDPNKPKRPPTAFFVFMEEFRKDYKEKHPNVKQVSVIGKAGGDMWKSLSDAEKAPYVSKAEKLKVEYTKKMDAYNNKQSGGGPTLSGDSDKSKSEVNDGDEEVALRPAWAVIEIFEAVADQNVLQGVQA

SEQ ID NO: 46950 - protein, 76 aa, Zea mays
  Coding DNA Sequence Number=SeqID_5171
MNGIRRTLHLPVHGMVAEFTLHNIGALGDGCPKQHEGVDEMVGTEEAELDPMPCYWPGSDRQGRDRLIEGRWVEML

SEQ ID NO: 46951 - protein, 67 aa, Zea mays
  Coding DNA Sequence Number=SeqID_5172
MRCPLQGHRHGRLVAVSQQHPLRFQEAAPPFLHPRRSAEEERKSGHGREELSLCGTKETDDDSVDEG

SEQ ID NO: 46952 - protein, 86 aa, Zea mays
  Coding DNA Sequence Number=SeqID_5173
MSSKDFSDGLAYTHLKAQQAAEKVANIRKNPQGKKAEVKHIESKAEDAAIEAEAVAARAAKNATYYVVLKICEQIYDEMMQGHKEN

SEQ ID NO: 46953 - protein, 240 aa, Zea mays
  Coding DNA Sequence Number=SeqID_5174
MVEEQSVLEVLLATIVDPSEDSGYIDIEEDNTIIHPTKSSHVDFGKSKTKDGHIEVLKRFGYIDRVLLGCKDLVSEPKEDEVVVFGSFLKDDSKKRKRKVTTMWSKISKIKPGSTPQASEEIPVVPEAETPTMIEEIPSLETQGTKIKDAIALIAQNFNPLKPLSKSEEEEEEEERIASVMSSFFDIDEEGLEEKDTTGTILASKGVTPPAADVAISRSPKVELTHAVVERELGLHLVPK

SEQ ID NO: 46954 - protein, 143 aa, Zea mays
  Coding DNA Sequence Number=SeqID_5175
  Gene Ontology: Mol. function=transferase activity, transferring phosphorus-containing groups; Cellular component=membrane; Biological process=two-component signal transduction system (phosphorelay)
  Homolog annotation: Hit_ID=Q75WE8; Match level="QueryCoverage=78%, HitCoverage=13%, E-value=6e-58, Identity=81%"; Hit description =Histidine kinase 3
MVPNGAGECGGGCRRGKAAHAGVGAVAGFFLCLLMVWAVGGSERSGCGRVAEHHGVKECMVNSGMVHDGNQVNGASFIPDIRCIRDRIYDGKQNWLKDAILQESCTAQDKYGLNSHAPAVLEDKLLQNVIQEDINSTTQCNAW

SEQ ID NO: 46955 - protein, 137 aa, Zea mays
  Coding DNA Sequence Number=SeqID_5176
MGEDGGKRKQETTTASKVQREAAAANISMRKWLQHVKASFLSLRDSSVTLEASVTNAADDPSTVEPMMTAAAMNIIKDVSLDKLLNDLALYTASLGDIEISMGVTLQFDLLSLSALVPVNLATSENLLVGHLFSTTV

SEQ ID NO: 46956 - protein, 61 aa, Zea mays
  Coding DNA Sequence Number=SeqID_5177
MGSRHSACSAEAGCRGDDDDDNAGFYCDYDYGFLVFFPFGKGKEGVEADLQEFQDFDESED

SEQ ID NO: 46957 - protein, 320 aa, Zea mays
  Coding DNA Sequence Number=SeqID_5178
  Gene Ontology: Mol. function=transferase activity, transferring phosphorus-containing groups; Cellular component=membrane; Biological process=two-component signal transduction system (phosphorelay)
  Homolog annotation: Hit_ID=Q75WE8; Match level="QueryCoverage=96%, HitCoverage=38%, E-value=4e-90, Identity=93%"; Hit description =Histidine kinase 3
  Pfam annotation: Domain name=CHASE; Domain location=2-211; Score =30.5; E_value=2.1e-06; Accession=PF03924.4; Description=CHASE domain
  Pfam annotation: Domain name=HisKA; Domain location=183-248; Score =92.0; E_value=1.8e-24; Accession=PF00512.15; Description=His Kinase A (phosphoacceptor) domain
  Pfam module annotation: Pfam domain module=CHASE::HisKA; Domain location=2-211::183-248
MQKTFEDFTARTTFERPLMSGVAYALKVLHNERQQFEEQHGWKIKKMEDGDQSLVHDYNLEKLEPSPVQDEYAPVIFSQETVKHIISVDMMSGKVVGYSKIMTIYYVPGQQICSVLSLSNFSFRFKHEPSLPWSAIIISTAVAIIVLLVGHIIYATLNSLEKAEHDYRVMRELKGQAEAADIAKSQFLATVSHEIRTPMNGVLGMLQMLMDTELDTTQQDFVVTAQESGKVLINLINEVLDLAKIESGRIELEAVPFDVRDILDNVISLFYDKSQAKGIELAVLVSDQVPDVLIGDPWRFRQIITNLVGNSMKESCTSLY

SEQ ID NO: 46958 - protein, 63 aa, Zea mays
  Coding DNA Sequence Number=SeqID_5179
MGNSQLSNWVERKVRLLKDKFKSLGKARKVTKWRKPSRDKISEVPTEEFEVKNSLFEGSYKKP

SEQ ID NO: 46959 - protein, 90 aa, Zea mays
  Coding DNA Sequence Number=SeqID_5180
MAQSTVGSLRAVGALDMSGLTQYAALTTSGAKPQRPRPERAGRLQATQHDEPSLGPGYDGQGSAQNRDNSDGVRALHRPRRPPKEDDVPG

SEQ ID NO: 46960 - protein, 149 aa, Zea mays
  Coding DNA Sequence Number=SeqID_5181
  Pfam annotation: Domain name=DUF588; Domain location=45-124; Score= -9.7; E_value=0.019; Accession=PF04535.3; Description=Domain of unknown function (DUF588)
MRASRPAVHPVEAAPPPPAAAAEGPEAQVEGAAHPRGVRMKDPPGAPGTPAGLGLRLAQAFFAAAALAVMASTNDFPSVSAFSSCSMQLLLNALMHDMAAESDSFSDDMEVASSESSSSASYCGLSCPGAQAPPLHMQAPPLHMQALPE

SEQ ID NO: 46961 - protein, 93 aa, Zea mays
  Coding DNA Sequence Number=SeqID_5182
MAVAHETQAHRRTKLVDFGPGASPSIKEYGRGNIGQELGLYRPEFVVGACLHRRSAILHGGNRGQNPDLGCFGGDTAVLVLVSLWLRLVEGET

SEQ ID NO: 46962 - protein, 80 aa, Zea mays
  Coding DNA Sequence Number=SeqID_5183
  Subcellular localization annotation: CTP_CleavageSite=63; ConfidenceScore=5.13e-01
MTRWPRCQAPFSLIFVVFFGGLFKAATVSIAAPPPRWAGASLDKAARATGTLPAPTDARSAPTASLAPTPDIGHANLAIG

SEQ ID NO: 46963 - protein, 727 aa, Zea mays
  Coding DNA Sequence Number=SeqID_5184
  Homolog annotation: Hit_ID=Q2R1Y3; Match level="QueryCoverage=92%, HitCoverage=86%, E-value=2e-72, Identity=58%"; Hit description =Expressed protein
MGVDEDEERRMDERPMHQGCMAGFLHLFDRPQILSGRRLHSSQRRLTSVSSGSATPSERSMPLDRAPSSPDTTPPAAPRPSLQLSPLDLKEGGVGGGFGAPQAWRLPRLSLDSRAVVDARGKLRPREIRTSAAAGAPPSPSAGCADERRSPSVVARLMGLDALPHGLGQASAESGQHGGGGASPAALRRSASERVPRDPAQFRFVDPSFFERPASPLPSPPVAEEVAVRRAPDPAAVPRALQRRSRFDAHYEVFPEPAKRADPASGAAAHGEIALYGEIERRLRKRGIAEPARDLETLKQILEALQLKGLLHHTAPVPAQARTTPPPIVVMRPSSRAQPQMPPPARLTPARRLRVDVDRARRPRSPDPSPSPARSPASPARRGSLSPQRRVSPSQSPKQQQQSSFRKTSGFDSAGARTRIARRAAYNGIALSPDDEASTTFSDGGSSSSASSRWDFDTQLDPRTDRGLLERCGKLLSSIHAFTRGDASGADQQPSPVSVLDAAAFLADEDSPSALSASKRAIDFRSSSVGHPKPASAVSDPEHDEYVDPEASGCPDPDYAYVAELVRHLGGARARARDPAAAYRAAEQRRRERGGDPDTWHLRRLLCGAVTEALERQRSACPWEPAAWLRGAELVGHVWAEVRRAGEPVAPAADADLNDVTCRAIRRDLAADGGSPWGSLRQRPRHGADVADAVLQIERLLFVDLVADTIRELADADRPLPRRKLVF

SEQ ID NO: 46964 - protein, 170 aa, Zea mays
  Coding DNA Sequence Number=SeqID_5185
MAGEGPAQVAGEDGRRRWPAAAASGPGGGGVECRTKEQPGIERIEDHLSVWFCAVPVSVAVAALMRGTDGLMRMMTMRTEIRKEVTVEEQAFVAVPEVTVDPRVPQSWLSLDAAALPGAWTAVEVRSPQMRSPRASAGLGERRAERTQRNQETETNEETQGETGAILTLR

SEQ ID NO: 46965 - protein, 154 aa, Zea mays
  Coding DNA Sequence Number=SeqID_5186
MTVGRSASGAAWPRWWAVGAKAGGEVLHGARAQRGEWEEQGHRPMFLPGAKKLWGAANGDFKKRSGIWWISSSRTLAPTERLSLRADWRPQNTSAPRGQCRRWSGSPFPHEADTRLHLGVPRLRLERMEGNVERRAGVLPDRGGVGDAVLRLLR

SEQ ID NO: 46966 - protein, 121 aa, Zea mays
  Coding DNA Sequence Number=SeqID_5187
MAQTEKRAGHDWVQRRGTGTARVRASARTAEEAALGELKAGHREARVGAAMQATERAPEKGDGGQHPWRAEAVGEGVDHGRWGEKEEDDQRDGEEAELRGREEGVAREGAGRWPTGYLKVA

SEQ ID NO: 46967 - protein, 59 aa, Zea mays
  Coding DNA Sequence Number=SeqID_5188
MARLCLTVAEHGRGRWPGSTGGGFRRRRPGNGEAPASLKNGCAQLGVLNSNSNQVSNSN

SEQ ID NO: 46968 - protein, 390 aa, Zea mays
  Coding DNA Sequence Number=SeqID_5189
  Gene Ontology: Mol. function=structural molecule activity; Cellular component=chloroplast
  Homolog annotation: Hit_ID=Q7XBW5; Match level="QueryCoverage=71%, HitCoverage=74%, E-value=3e-77, Identity=59%"; Hit description =Probable plastid-lipid-associated protein 3, chloroplast precursor
  Pfam annotation: Domain name=PAP_fibrillin; Domain location=155-356; Score=262.0; E_value=1.2e-75; Accession=PF04755.3; Description=PAP _fibrillin
  Subcellular localization annotation: CTP_CleavageSite=29; ConfidenceScore=5.49e-01
MAPLFAAASHASLLPLSSLDRPAAGHLVRGTLRPHTSSLRLRRPPGATGRGRGRGRGGIPDEWGERSPPDNPEPPAQPDPPIDEDEWGRDDSAEGNSRPIVVDEWGEPGVPEPEPPSAADPPSPSADDDWGKEPEAPAPAPAPAAEEDEQEVKREELKRCLVDTVYGSDLGFRASTEVRGEVVELVTQLEAVNPTTAPVESPDLLDGNWILIYTAYSELLPILAAGATPLVKVKQISQEIDSKIMTIVNASTLTTPFASFSFSATASFEVQSPSRIEVQFKEGSFQPPTISSSVDLPQQVDIFGQKISLGPVQQALNPLQQAFASIAGSISGQPPLKLLLTEVAETLQIAGNEDCKGDCAANNAAFTVYVATKTLNQCSSKIADFSVYVA

SEQ ID NO: 46969 - protein, 124 aa, Zea mays
  Coding DNA Sequence Number=SeqID_5190
MGKSKKGGSSSHHSSDKRKREPTPPSEDFGDSEYSEEEFSSESKEVWTYIRAIERAGLEGSDESEVSLDEANSSDSSEEGGSDGDGDDDNGGDGDGDGDGGEGDGKGSKGDGKDDSKGSNKASG

SEQ ID NO: 46970 - protein, 384 aa, Zea mays
  Coding DNA Sequence Number=SeqID_5191
  Gene Ontology: Mol. function=RNA-directed DNA polymerase activity; Cellular component=intracellular; Biological process=RNA-dependent DNA replication
  Homolog annotation: Hit_ID=UPI00004C1733; Match level="QueryCoverage =99%, HitCoverage=29%, E-value=0.0, Identity=89%"; Hit description =UPI00004C1733 related cluster
  Pfam annotation: Domain name=RVT_1; Domain location=12-181; Score =140.9; E_value=3.5e-39; Accession=PF00078.17; Description=Reverse transcriptase (RNA-dependent
MAAGFIKEVFHPEWLANPVLVRKKGGKWRMCVDYTGLNKACPKVPYPLPRIDQIVDSTAGCETLSLLDAYSGYHQIRMKESDQLTTSFITPFGMYCYVTMPFGLRNAGATYQRCMNHVFGEHIGRTVEAYVDDIVVKTRKASDLLSDLETTFRCLKAKGVKLNPEKCIFGVPRGMLLGFIVFERGIEANPEKIAAITNMGPIKDLKGVQRVTGCLAALSRFILRLDERGLPLYRLLRKAECFTWTPEAEEALGNLKALLMNAPILVVSAAIVVERREEGHVLPIQRPVYFISEVLSETKIRYPQIQKLLYAVILTRRKLRHYFESHPVTMVSSFPLGEIIQCREASGRIAKWVVEIMGETISFAPRKAIKSQVLADFVAEWVDT

SEQ ID NO: 46971 - protein, 59 aa, Zea mays
  Coding DNA Sequence Number=SeqID_5192
MKEKVMQVHADDPEVVKGDFTEGPEKQGLGLEISNNDIGVQKIVLLTMSCTINADNFGS

SEQ ID NO: 46972 - protein, 88 aa, Zea mays
  Coding DNA Sequence Number=SeqID_5193
MTTGTGENRGGGGGRGPVRQGSFALSSPLSRKTVEEVSAEISQGPVDFQASAASQPVRDARRERAPKVTEITLSSQQLLRLMLRVKTN

SEQ ID NO: 46973 - protein, 102 aa, Zea mays
  Coding DNA Sequence Number=SeqID_5194
MTTGTGENGGGGGGRGPVRQGSFALSSPLSRKTVEEVSAEISQGPVDFQASAASQPVRDARRGVGGPLTHASARWRRVSCGASMSVRDRRGHGRARAPTLHS

SEQ ID NO: 46974 - protein, 179 aa, Zea mays
  Coding DNA Sequence Number=SeqID_5195
MEFPKRGRAFLQGSLRRSPKATIPGAATGADENASSKHLVPVGAASPKRKKVLGERNDSGVGGMEGAASAPVQQPKLALSPPTPASRGAGPYDPKTNYTTPRPAFLRYDPERRREILLRVSRAAEVMYDDCSSTTSGTAASEEDGGSSLASDAAADSLISSPPLRGGGGGVRGFRGVGW

SEQ ID NO: 46975 - protein, 207 aa, Zea mays
  Coding DNA Sequence Number=SeqID_5196
MDPYPYPPVVARGRAVAGRASGSETPQERRRAARSLAAWGAWEFGTPLGRSGRSLAARAARGSWRRRTAHWRLGGAGLWPPGSLGVAAGGVPAWGAAALGGSLGPGLLGVAAGVGGRDGNSGREGKRAFNALQSTIAREVVIAPLSHRTVRCAPDAVRGAPLKIPEGEELGVEFPGAPDTVRWHTGQSGEEQVVEEEPPNSEAFDFI

SEQ ID NO: 46976 - protein, 119 aa, Zea mays
  Coding DNA Sequence Number=SeqID_5197
MAADVLVTGGAGAMQYAGPDRRKEERSVRGRNEQQLDDKKPPVFPPVATEQNCSSLLRLSNEDDEETRATPATIIEKNTINHVKMLPKNLIHPPQVQDLEDDGFRKPTLSIADARQRSG

SEQ ID NO: 46977 - protein, 59 aa, Zea mays
  Coding DNA Sequence Number=SeqID_5198
MKDAKPINTPMGINGHLDLDTREHQTVWWFIEPSDMVQRSPAMVRTVTFQGTIHGPVAH

SEQ ID NO: 46978 - protein, 246 aa, Zea mays
  Coding DNA Sequence Number=SeqID_5199
  Subcellular localization annotation: CTP_CleavageSite=16; ConfidenceScore=5.16e-01
MLKQKLNLKNLKTRKRCQLKVKKPVKKATSNKIRLSLPTFVPTWAADRPIAQLSSRPPTDDVDSTDPIHQSYARHARLYRWDLDVPVDLGVPESFETVGSREVSSIRKEKAVWEIVAGLEQIDHWSREAVADRVSPWAGAGITCIKFTFTYKENDPWGNSRNAPNELAALGKTKRSSAKIHRTVRLSSVPSDYPVHHKDMQSQQSTAPNPNSQLTWRAPDNEQCSVRCATGLFDVLVDRELSQRLE

SEQ ID NO: 46979 - protein, 99 aa, Zea mays
  Coding DNA Sequence Number=SeqID_5200
MTDVHPVGVSPIGGGSRTMGAVIIDVCADRSMVHGGEADRGGHNTPIYIPACTQYPTGTGMGTMFYLRVQLRAGMANTRGYGCGRVSIIPDPNPTRCHP

SEQ ID NO: 46980 - protein, 198 aa, Zea mays
  Coding DNA Sequence Number=SeqID_5201
MAPNYLEHALAMFEKISQMFDTILAQIFLGTWSCDTGDLATRQLPVHSPKPHNVHTQTTELSRGNKSYTAILPKFAKICALLALEQEQKKPCHVLDRADMPTARQPAHTHQDMHARAPALVHTTRTPRRAFKGPLRTRNTSLRACPHCPSLVLSFGKLCAARQATRALGRRGQRFPTTPSLVLAPGRLPREAEKLSKA

SEQ ID NO: 46981 - protein, 223 aa, Zea mays
  Coding DNA Sequence Number=SeqID_5202
MAKPTTPLVPLINQLRASIPPSWLYCFPGWSSNEQVLTGSKTEGVSGFLGRWISDQRPRLEVGVSVRARRCLTGRAHGPAARAGQGVSDKTSERRCLTSGATAGRGPLVSGTGQVQAWARTDGRGPPGGDPARKGEGHRGADAWDPRSTSQWPRKGRREGLRLGDCRWVPLIRVVVYLGRALGVSAMSRVGDLTQAKEGTGRWRFARGPRHDGVVSVPVITDG

SEQ ID NO: 46982 - protein, 308 aa, Zea mays
  Coding DNA Sequence Number=SeqID_5203
  Homolog annotation: Hit_ID=Q6QP51; Match level="QueryCoverage=80%, HitCoverage=98%, E-value=1e-26, Identity=37%"; Hit description =Putative growth-regulating factor 1
MAAAAGCASAAASGSQVEKDSVVVDHGADAPDLRETLLVIVHAWVLVPLKPGCDSSKAGPSEGFDSRLRALGLHAHYWSEVRRLAPRKGSTAASGHSGSAPTTDQGFEGWPPKGFDSRLRIRRARDDSGYVRYMAEAQATLPSRQGRSDRNHFAPPLTDLTGKQRRLPCSDCCATRQGLGLRLDLRRRFPPRPTLGLGLNLDPERRSPPRPTPGLGLNLDPGRRSPSRPTLGLGLNLDLGRRSPPCPTPGLGLSLDLGGVTASPDLGLGPTTLEGPPTEARIRQQGPDSPDSCTSTGFKRSSDGHDIT

SEQ ID NO: 46983 - protein, 170 aa, Zea mays
  Coding DNA Sequence Number=SeqID_5204
MGSSIRSLLTGEVGPESTQRCALERPAGRDGSAAANDEEIGPSAQGEEEEAAGKGAAAREGIRRAQGGCRREALGRARGDAGKGGGGRRRNRARRAGRRGGGRREGSGGREEKGNGIGWGNYRSKKKAVIPNITVLWGQGGYWGTAGRGRPSWWSIWATTHPKNTKEQLA

SEQ ID NO: 46984 - protein, 70 aa, Zea mays
  Coding DNA Sequence Number=SeqID_5205
MGGEATNAGGGGIRARMEHYLYSGEKKHVVAGIAIFAAVFGVPWYFMTRGALRLRSYSTLLCDAARVHGN

SEQ ID NO: 46985 - protein, 294 aa, Zea mays
  Coding DNA Sequence Number=SeqID_5206
  Subcellular localization annotation: CTP_CleavageSite=31; ConfidenceScore=5.17e-01
MRPPPPDPFVSFDFSRAVTSLSLFHLSLSPRGALGFGVEIAGVWIPGGEFFPSPSLFSLSPLPFFFPARPSCPHALRRPGPRATRGRALPDPALPFPSRAPTPAARPRPPLPVQRPASPRGRAAPFLCPPCPGEPRRGSLPAPPLDRALLPAPASPPPRRAAPPVASPRAQRASPRAAPRPRPAPHPGEPSFPGEPPPPAPRPRHPARPRPTPAARPCALARPCPVEPALAPPSPPSPRAPAPRSCPGRSPSAASLPAPVPRRLASRAPALNPVLVDVLRRALRRTTILFIYIY

SEQ ID NO: 46986 - protein, 130 aa, Zea mays
  Coding DNA Sequence Number=SeqID_5207
  Gene Ontology: Mol. function=protein kinase activity; Biological process=protein amino acid phosphorylation
  Homolog annotation: Hit_ID=Q6YY75; Match level="QueryCoverage=57%, HitCoverage=18%, E-value=1e-11, Identity=52%"; Hit description =Serine/threonine-protein kinase Nek4-like
MALIMGGFGSIKAYWCCFSRPTGKREVIPSWLCPSQRKDVKPHYYQATKPELCDTIITKESSPISTLKLAHIENAPAKWYHLNIVQQRADTLESLLKLYAKLLEERLDELADVFRPFGERAVSSREMSIQ

SEQ ID NO: 46987 - protein, 838 aa, Zea mays
  Coding DNA Sequence Number=SeqID_5208
  Gene Ontology: Mol. function=microtubule motor activity; Cellular component=microtubule associated complex; Biological process =microtubule-based movement
  Homolog annotation: Hit_ID=Q93XG3; Match level="QueryCoverage=85%, HitCoverage=99%, E-value=0.0, Identity=87%"; Hit description=Kinesin heavy chain
  Pfam annotation: Domain name=Kinesin; Domain location=39-330; Score =372.8; E_value=5.3e-109; Accession=PF00225.13; Description=Kinesin motor domain
MGAIGGNESVQWDKVAGADAVNGGGTSVGRMDRIQVLVRLRPLSEKEVARGEPAEWECINDTTVMFRSTFPDRPTAPTAYTFDRVFHSDCSTKEVYEEGVREVALSVVSGINSSVFAYGQTSSGKTYTMNGVTEYTVADIYDYINKHEERAFVLKFSAIEIYNEAVRDLLSAENTPLRLWDDAEKGTYVENLTEVVLRDWNHLKGLISTIESSAREFLGKDKSTTLVASANFVDLAGSERASQALSAGTRLKEGCHINRSLLALGTVIRKLSMGSNAHIPYRDSKLTRILQPSLGGNARTAIICTLSPATSHIEHSRNTLLFGSCAKEVVTNAQEVARLESELRQPASNSSLEALVKEKDNQIRKMEKEIKELKSQRDLAQSRLQNLLETVGDQVKHSGSGKRSARSPPSIGISPGISRDDSSQISHDDSDLFKDVRCIGTSGTGGNEQLDLSAGESSSLQGLNMNSSLHGSGSNASVNSRRSRLLSESPITLEQHLENIKRPFVSLGRDLGSSTHNSSGSRILGRSRSCRSLMGSTMFDGMEMDDGTPLHRSLVGFPGRPEGNHRRGSTPNHDAESETLSRAGSVVSTKTNAACDAEFTGIGEFVAELKEMAQVHYQKQLGNQITNGEFVDIKNIGLDPIADASQSPSRWPLEFEKKQQEIIGLWHACCISLVHRTYFFLLFKGEQADSIYMEVELRRLSFLRDTYSRGNTPSNAVVGSLNSSPAASAKKLQREREMLARQMQKRLTAEERERLYTKWGISLDSKKRKLQVARRLWTEAEDLEHVRESASLVAKLIGLQEPGQVLREMFGLSFAPQQQPPPRRRSSNGWRYGIPSFG

SEQ ID NO: 46988 - protein, 629 aa, Zea mays
  Coding DNA Sequence Number=SeqID_5209
  Gene Ontology: Mol. function=binding; Cellular component=cellular _component; Biological process=response to unfolded protein
  Homolog annotation: Hit_ID=Q6H660; Match level="QueryCoverage=94%, HitCoverage=99%, E-value=0.0, Identity=61%"; Hit description =Putative stress-induced protein sti1
  Pfam annotation: Domain name=TPR_1; Domain location=2-35; Score=29.1; E_value=1.5e-05; Accession=PF00515.18; Description=Tetratricopeptide repeat
  Pfam annotation: Domain name=TPR_1; Domain location=253-286; Score =27.1; E_value=6.1e-05; Accession=PF00515.18; Description =Tetratricopeptide repeat
  Pfam annotation: Domain name=TPR_1; Domain location=287-320; Score =28.8; E_value=1.9e-05; Accession=PF00515.18; Description =Tetratricopeptide repeat
  Pfam annotation: Domain name=TPR_1; Domain location=328-365; Score =11.3; E_value=0.24; Accession=PF00515.18; Description=Tetratricopepti de repeat
  Pfam annotation: Domain name=TPR_1; Domain location=36-69; Score=9.3; E_value=0.42; Accession=PF00515.18; Description=Tetratricopeptide repeat
  Pfam annotation: Domain name=TPR_1; Domain location=392-425; Score =33.7; E_value=6.4e-07; Accession=PF00515.18; Description =Tetratricopeptide repeat
  Pfam annotation: Domain name=TPR_1; Domain location=451-484; Score =34.3; E_value=4.1e-07; Accession=PF00515.18; Description =Tetratricopeptide repeat
  Pfam annotation: Domain name=TPR_1; Domain location=485-518; Score =35.6; E_value=1.7e-07; Accession=PF00515.18; Description =Tetratricopeptide repeat
  Pfam annotation: Domain name=TPR_1; Domain location=70-103; Score =37.3; E_value=5.2e-08; Accession=PF00515.18; Description =Tetratricopeptide repeat
  Pfam annotation: Domain name=TPR_2; Domain location=2-35; Score=30.9; E_value=4.5e-06; Accession=PF07719.7; Description=Tetratricopeptide repeat
  Pfam annotation: Domain name=TPR_2; Domain location=253-286; Score =27.8; E_value=3.8e-05; Accession=PF07719.7; Description =Tetratricopeptide repeat
  Pfam annotation: Domain name=TPR_2; Domain location=287-320; Score =21.0; E_value=0.0042; Accession=PF07719.7; Description =Tetratricopeptide repeat
  Pfam annotation: Domain name=TPR_2; Domain location=328-365; Score =3.5; E_value=13; Accession=PF07719.7; Description=Tetratricopeptide repeat
  Pfam annotation: Domain name=TPR_2; Domain location=36-69; Score =17.0; E_value=0.066; Accession=PF07719.7; Description=Tetratricopepti de repeat
  Pfam annotation: Domain name=TPR_2; Domain location=392-425; Score =27.2; E_value=5.9e-05; Accession=PF07719.7; Description =Tetratricopeptide repeat
  Pfam annotation: Domain name=TPR_2; Domain location=451-484; Score =23.4; E_value=0.00081; Accession=PF07719.7; Description =Tetratricopeptide repeat
  Pfam annotation: Domain name=TPR_2; Domain location=485-518; Score =24.7; E_value=0.00033; Accession=PF07719.7; Description =Tetratricopeptide repeat
  Pfam annotation: Domain name=TPR_2; Domain location=70-103; Score =34.1; E_value=4.9e-07; Accession=PF07719.7; Description =Tetratricopeptide repeat
  Pfam module annotation: Pfam domain module=TPR_1::TPR_1::TPR_1::TPR _1::TPR_1::TPR_1::TPR_1::TPR_1::TPR_1::TPR_2::TPR_2::TPR_2::TPR _2::TPR_2::TPR_2::TPR_2::TPR_2::TPR_2; Domain location=2-35::253
  Pfam module annotation: Domain location=36-69::392-425::451-484::485 -518::70-103::2-35::253-286::287-320::328-365::36-69::392-425::45 -484::485-518::70-103
MADEAKAKGNAAFSAGRFEEAARHFTDAIALAPDNHVLYSNRSAALASLHRYSDALADAQKTVDLKPDWAKGYSRLGAAHLGLGDAASAVAAYEKGLELDPSNEGLKAGLQDAKKAAAAPPRRGSSGPDAIGQMFQGPELWSKIASDPSTRAYLNEPDFMHMMREVQRNPSSISMYLSDPRMMQVLSLMLNVKIQRPEASEPSQSTPPPPKQQQQQQTPPSETKARDVEPEPEAEPMDLTDEEKDRKQTKAAAQKEKELGNAAYKKKDFEVAIQHYTKALELDDEDISYLTNRAAVYIEMGKYDECIKDCDKAVERGRELRADFKMISRALTRKGTALVKLAKTSKDFDIAIETFQKALTEHRNPDTLKKLNEAEKAKKELEQQEYYDPKLADEEREKGNEFFKEQKYPEAIKHYTEALKRNPKDPRLVIAYGPGWMLPPIALLGKAILPVEVYSNRAACYTKLGAMPEGLKDAEKCLELDPTFTKGYTRKGAIQFFMKEYDKAVETYQAGLKHDPNNQELLDGVKRCVEQINKANRGEISQDELQERQNKAMQDPEIQNILTDPIMRQVLIDFQENPSAAQEHLKNPGVMQKIQKLEEDDGDIEFVEFPKGVEVEGICASLLVLVACF

SEQ ID NO: 46989 - protein, 294 aa, Zea mays
  Coding DNA Sequence Number=SeqID_5210
  Gene Ontology: Mol. function=receptor activity
  Homolog annotation: Hit_ID=Q6H663; Match level="QueryCoverage=92%, HitCoverage=95%, E-value=7e-55, Identity=46%"; Hit description =Receptor-like protein kinase-like
  Pfam annotation: Domain name=DUF26; Domain location=197-251; Score =32.1; E_value=5.7e-07; Accession=PF01657.8; Description=Domain of unknown function DUF26
  Pfam annotation: Domain name=DUF26; Domain location=95-151; Score =34.7; E_value=2.6e-07; Accession=PF01657.8; Description=Domain of unknown function DUF26
  Pfam module annotation: Pfam domain module=DUF26::DUF26; Domain location=197-251::95-151
  Subcellular localization annotation: CTP_CleavageSite=70; ConfidenceScore=5.08e-01
ASTVVSKLKHSLKAPTMHLLISGLVAAALFLHVDAARGTFVYAGCSPSRYAPNTAFESNLNSLLSSMAPTASSGATYSTFTAPGAGLAEAESPAAYGLYQCRGGLRPGECVACVRDTVARIGAVCAGAAAASLQSDGCYVRYGGASAAYHSCGAGTSGDPWFLRSRDAVLSELQGVDATAASGSGSGGYKVSASGPVRGAAQCLGGIAAGDCAACLAQAAAQLRGTCGAALAADVYLVQCSVRYWTDGANQLRSSQDNPEDDAGRTLAIAIGISAGVAALVVFISFLRKACEAH

SEQ ID NO: 46990 - protein, 89 aa, Zea mays
  Coding DNA Sequence Number=SeqID_5211
  Subcellular localization annotation: CTP_CleavageSite=58; ConfidenceScore=5.47e-01
VQGTTPTLQYSTDHGSNSAARKTDQVPPPAARVQAAASPLAARVQGSRQPPLHQPSPRYAAAADVFVGRGRIILSGDDQLRHRKVSCEH

SEQ ID NO: 46991 - protein, 76 aa, Zea mays
  Coding DNA Sequence Number=SeqID_5212
MDPKGKGMVVNDEEKEFLFNELRDDKPTNSGSSHKKSDGKKKRRIKKIIYYNSDVSSSSPRGDDDDSSSKKKTGRI

SEQ ID NO: 46992 - protein, 135 aa, Zea mays
  Coding DNA Sequence Number=SeqID_5213
  Gene Ontology: Mol. function=ubiquitin thiolesterase activity; Biological process=ubiquitin-dependent protein catabolic process
  Homolog annotation: Hit_ID=Q6ZJC2; Match level="QueryCoverage=62%, HitCoverage=7%, E-value=4e-19, Identity=60%"; Hit description =Putative ubiquitin-specific protease
MVRQQTAPKVVRHYLSKLSLFPYELFVKLYSKVELHPFGLHNLGNSCYANAVFSVLCLLDHSQHIFWKGFTQTTVILHYYKCSKKLEQLILIQNVLPLSDQLLWIYVWMEEKTIVYYMCWDVLHVDELFLPLWLI

SEQ ID NO: 46993 - protein, 522 aa, Zea mays
  Coding DNA Sequence Number=SeqID_5214
  Gene Ontology: Mol. function=transporter activity; Cellular component= integral to membrane; Biological process=transport
  Homolog annotation: Hit_ID=Q84LK4; Match level="QueryCoverage=98%, HitCoverage=99%, E-value=0.0, Identity=72%"; Hit description =Putative high affinity nitrate transporter
  Pfam annotation: Domain name=MFS_1; Domain location=49-424; Score =45.4; E_value=1.9e-10; Accession=PF07690.6; Description=Major Facilitator Superfamily
  Pfam annotation: Domain name=Sugar_tr; Domain location=51-461; Score=- 161.1; E_value=0.079; Accession=PF00083.14; Description=Sugar (and other) transporter
  Pfam module annotation: Pfam domain module=MFS_1::Sugar_tr; Domain location=49-424::51-461
  Subcellular localization annotation: CTP_CleavageSite=57; ConfidenceScore=5.05e-01
MASDAAHGSSLDGVTPSSKFDLPVDSEHKAKTIRLLSFANPHMRTFHLSWMSFFTCVVSTFAAAPLIPIIRENLGLTKADIGNAGVASVSGAIFSRLAMGAVCDLLGPRYGCAFVVMLAAPAVFCMAVIDSAAGYVACRFLIGFSLATFVSCQYWTSTMFNIKIIGTVNALASGWGDMGGGATQLIMPFVYEAILRCGATPFAAWRIAYFVPGIMHIAVGILVLTAGQDLPDGNLRSLRKQQQQQQQGDGGDASCCRRDSFSRVLWHAVANYRTWVFVFVYGYSMGVQLTTNNIIAEFYYDQFELDIRVAGIIAACFGMANLVSRPLGGVLSDLGARYWGMRARLWNIWILQTAGGAFCFWLGRASELPASVTAMVLFSFCAQAACGATFGVIPFVSRRSLGVISGLTGAGGNVGAGLTQLLFFTTSSYSTRKGIENMGIMAMACTLPLVLVHFPQWGSMLLPPSADADEERYYASEWSEDEKSVGRHSASLKFAENSRSERGKRNAVAVLATAAATPEHVV

SEQ ID NO: 46994 - protein, 169 aa, Zea mays
  Coding DNA Sequence Number=SeqID_5215
MERRKAIVARMRDLLARAASAQAAHCRLRRSTAATTARKWKRAVGRIQKRGACNGEDGHAREEEDHGALLASASSSSISSCNGSGFSCRDATAAADAEACCSSTAVSCPWPATLRLSSCGSGSWSSDENDDDDVRMAHWVTTDSDCKYIQSCSLVTNSKPKFSVVVLEL

SEQ ID NO: 46995 - protein, 2208 aa, Zea mays
  Coding DNA Sequence Number=SeqID_5216
  Gene Ontology: Mol. function=nucleic acid binding
  Homolog annotation: Hit_ID=Q6Z7C5; Match level="QueryCoverage=97%, HitCoverage=97%, E-value=0.0, Identity=67%"; Hit description=SNF2 domain/helicase domain-containing protein-like
  Pfam annotation: Domain name=DEAD; Domain location=962-1128; Score= -10.5; E_value=4.3e-05; Accession=PF00270.19; Description=DEADDEAH box helicase
  Pfam annotation: Domain name=Helicase_C; Domain location=1323-1402; Score=87.7; E_value=3.6e-23; Accession=PF00271.21; Description =Helicase conserved C-terminal domain
  Pfam annotation: Domain name=QLQ; Domain location=437-473; Score =52.2; E_value=1.8e-12; Accession=PF08880.1; Description=QLQ
  Pfam annotation: Domain name=ResIII; Domain location=958-1122; Score=- 22.1; E_value=0.0033; Accession=PF04851.6; Description=Type III restriction enzyme, res subunit
  Pfam annotation: Domain name=SNF2_N; Domain location=964-1272; Score =352.0; E_value=1e-102; Accession=PF00176.13; Description=SNF2 family N-terminal domain
  Pfam module annotation: Pfam domain module=DEAD::Helicase _C::QLQ::ResIII::SNF2_N; Domain location=962-1128::1323-1402::437 -473::958-1122::964-1272
  Subcellular localization annotation: CTP_CleavageSite=29; ConfidenceScore=5.15e-01
MQPSGGASGSSRGSPASSPHPDHQQPPTPASAQQQAQQLGFRGQGMMHHHEQQQAFHSGAPHGMMGPGGVNFPQSSGPVSSFQGQRNLPLSSGGPQGMVGGQMHNQVAMQQQFLKLAMQQQQQQQKAAQGMLLQQQAKMNMAGSSSRDQDMLNNPAKMQELMALHQAQMYKRQCEQKEQGQSSGSEQRSGDMRPPMPPQGVPGQQLPSMGMIRPMQPIQGQVGMGSAGGNPITPTQFQAIQAWAKEHNFDLSNPANISAISQLLPIWQSNRMAAMQKQNEANMAAQQQQALPSQVNSDTPGHVNAPSQGALLKPRQPLAPSSISGGEEAKVVNSSNLQLQQQFPVHNRDGSNERAVRSLMTGGNGAQTTHIPQSSGHVNKIPEQPNPKNVLANSEAMQMQHVRQMQQLNQAAAPTSTPIEAGGSQVPTSAQPQTGQTGFTKNQLHVLKAQILAFRRLKRGDRLPPEVLELIVSGRPPDSQGQQQVSGPQVTHNRERPTVSNADEHGKQMESGGKAPEKPALLKGPCLPKVEVSTSEDKASPASGPGPAQVMKASPKEPLKIGPVSVPEHCNTTVIKSEQDLERNIQRTPGRSDYNAERGKSVPAESGSVDVEQAKRTGSTSSAPVPRDVPRKYHGPLFDFPSFTRRHDSMGSANYNSNLSLGYDVKDLLAQEGMIVLGRKREDNLKKISGLLAINLERKRIRPDLVLRLQIEEKKLKLLEHQARLRDEVEHEQQEIMAMPDRIYRKFVRQCERQRVELVRQVQQMQRASREKQLKSIFQWRKKLLEAHWAIRDARITRNRGVAKYHERMLREFSKKKDDDRNKRMEALKNNDVERYRQILLEQQTSVPGDAAQRYNVLSSFLTQTEEYLYKLGGKITATKSQQQVEEAANAAAAAARAQGLSEEEVKAAAQCAGQEVMIRNTFSEMNAPRDNTSVNKYYTLAHAVSERVTKQPSLLRAGTLRDYQLVGLQWMLSLYNNKLNGILADEMGLGKTVQVMALVAYLMEFKGNYGPHLIIVPNAVLVNWKSELLNWLPSASCIFYVGAKDQRQKLFSQEVMAMKFNVLVTTYEFVMFDRSKLSRVDWKYIIIDEAQRMKDRDSVLARDLDRYRCQRRLLLTGTPLQNDLKELWSLLNLLLPEVFDSSKAFSDWFSKPFQRDGPTHNEEEDDWLETEKKVIIIHRLHQILEPFMLRRRVEDVEGSLPRKDSIVLRCRMSAVQGAIYDWIKSTGTIRVDPEDEKRRAQRNPMYQVKTYKNLNNKCMELRKVCNHPLLSYPFLNHGKDFMIRSCGKLWNLDRILIKLHKSGHRVLLFSTMTKLLDIMEDYLQWRRLVYRRIDGTTSLEDRESAIVDFNRPGSDCFIFLLSIRAAGRGLNLQSADTVVIYDPDPNPQNEEQAVARAHRIGQTREVKVIYMEAVVDNISSYQKEDELRNGGSGDLEDDLAGKDRYMGSIESLIRNNIQQYKIDMADEVINAGRFDQRTTHEERRMTLETLLHDEERYQDSVHDVPSLQEVNRMIARTESEVELFDQMDEDFDWTGDMTKHHQVPKWLRVNSNEVDAVVASLSKKPSRNMSSGGIALDTNETLEKRRGRPRGTGKYSIYREIDDEDLEESDEDSEERNTASLPEEGEVGEFEDEEDNDDSVPDNKDESEEEEPMNDDVYEFTEGLRGRKANRMEEAGSTGSSSGSRRLPPPVPSSSSKKLRSLSALDARPGTLSKRTPDDLEEGEIAMSGDSHMDLQQSGSWNHERDDGEDEQVLQPKIKRKRSIRLRPKPNAEKQEDRSGEGAFPQRGTHLAFQGDGHYDSQFKSDLDARAFPAARQQDAVHPIVKQKRNMSSRKVSPASRSGKLSHLSGSGEGSAELSKENWSSKAIDSTAPEFGGTKMSDSMQRKCKNVISKLWRRIDKEGHQMIPNISSWWRRNENSSFRGPAGSTLDLQKIEQRVDGLEYGAVTEFIADMQQMLKSVVQHFSYRHEVRIEAETLHNLFFNIMKIAFPDSDFMEAKNAMSFSNPGSGAAAAPSSSKHAAPSLKRSRASASASASEAEQQHGSGHSSRHNQPSEAVPPSRSHSSRSERDPRHGGSRDQHLQDGAAGLLHPSDMFIVKKKRQERARSGIGSPSSSGRGAGPLSPANPGRPGPAPSPRGARTPFQRDPPPHPSQQSMHSAGSGWGSGGAHSDHQAGASSSAPGIGDIQWAKPAKRLRTDRAGRGGRA

SEQ ID NO: 46996 - protein, 149 aa, Zea mays
  Coding DNA Sequence Number=SeqID_5217
MGKNNKRKREPTPPSEEFGDSEYSEEEFSSESEGSPAPIPLRESSDDSDDSQGLAAEVWTYIRAVERSGLEGSDESEYSSDEEDSDGGGEDEDDDDDDDGGGGGDGDDNGKGGSSGSKDGDGGGSRGGGGSGRGSTRGGSGGGSNRASG

SEQ ID NO: 46997 - protein, 74 aa, Zea mays
  Coding DNA Sequence Number=SeqID_5218
MAAARAKVAARERQSGSSSSLPHGELLGRCGGRTGAGDGGAERRISLDARLDTRPWWMWWLPRAMIPYWCVAHP

SEQ ID NO: 46998 - protein, 55 aa, Zea mays
  Coding DNA Sequence Number=SeqID_5219
MESHDLWAEQESRLVGKVCNLYRVLETGCPHSTQCSGGDAGNMEDFAEFQDYDEF

SEQ ID NO: 46999 - protein, 116 aa, Zea mays
  Coding DNA Sequence Number=SeqID_5220
MTRILELEAGGPGRGAHGLGSFDGTDSEQAIRRRAESFARAGSSDHDAGSSTERSAQGEMGDEAGMDAELEKQESGVGKGALEAAALESELRGAACWEMLHGGGSREAGTRAAPGR

SEQ ID NO: 47000 - protein, 113 aa, Zea mays
  Coding DNA Sequence Number=SeqID_5221
MSKIDGRLKVVEVSSPEVGANVGHSFSDAIDQEQGNTIVNGMGHSPDKIIFVPLMFTRDYNTIYHELSGLFPFKSVSSLVFVTTSSRSSLAIASVLTPITFGLLLYSAYTFAI

SEQ ID NO: 47001 - protein, 763 aa, Zea mays
  Coding DNA Sequence Number=SeqID_5222
  Gene Ontology: Mol. function=glucose-6-phosphate 1-dehydrogenase activity; Cellular component=chloroplast; Biological process=glucose metabolic process
  Homolog annotation: Hit_ID=Q10M94; Match level="QueryCoverage=59%, HitCoverage=85%, E-value=0.0, Identity=68%"; Hit description=Glucose- 6-phosphate 1-dehydrogenase 4, chloroplast, putative, expressed
  Pfam annotation: Domain name=G6PD_C; Domain location=501-729; Score =177.6; E_value=3.1e-50; Accession=PF02781.6; Description=Glucose-6 -phosphate dehydrogenase, C-terminal domain
  Pfam annotation: Domain name=G6PD_N; Domain location=345-516; Score =146.4; E_value=7.4e-41; Accession=PF00479.12; Description=Glucose-6 -phosphate dehydrogenase, NAD bindi
  Pfam module annotation: Pfam domain module=G6PD_C::G6PD_N; Domain location=501-729::345-516
MVPASNSSDRSDRSDKPMDQKAYVQQLESSKLKLASLEQELQKARQQGIFISSSGDQTHTMSGNGAMTFDLEYSRWQEEQNKQINELRTAVNAHASDSDLRLIVDGIMAHYDEIFRLKGIAAKADVFHILSGMWKTSAERCFLWLGGFRSSELLKLLVNQLEPLTEQQLMGLSNLQQSSQQAEDALSQGMEALQQSLAETLAGSLGPSGSSGNVANYMGQMAMAMGKLGTLENFLRQYWSRRSDGGSSQVSKYRSTKQSNSAEDARARRVGVRSSGAVLVGDLALNPDSGGEMANTSSDTLDSSTVQEKPVVPGHIISEISSHVQKEESAVSKRRSNNEPSLCIAVIGATGELARTKVFPALFALYYSGFLPRNVGIFGYSRKKLTDEGLRSIIEANLTCRVDHHENCDDKLIEFLKKTYYVDAGHDNQEGMVRLNSRMSQIEGIGAANRIFYLAVPQEALLDVALPLADGAQTKQGWNRIIIEKPFGFTGLSSLRVTQSMLSRFEEKQIYRYFGNYGIIRDIVHSHILQTIALFAMEPPVSLDGEDIRDEKVKVLRSIRKVNLDDVVLGQLKDMSGMGLMTNRAEIRIQFRHVPGNIYRERFGHDIDLDTNELVLRDQPEEAILLKVNNKVPGLGLQLDASELNLLYRDRYNTEVPDSYEHLLLDVLDGDSHLFMRSDELAAAWNVLTPIIHEIDQNRVVPELYEAGDRGPINAYHLAAKHGVRWDDDCQMYNMPSVIGLIKDFQGDMPFKEICKHGFFPVL

SEQ ID NO: 47002 - protein, 59 aa, Zea mays
  Coding DNA Sequence Number=SeqID_5223
MENKYFTPIKGRAYCGGYEEPMFLCGGDNDTVEPRQCQQADFSDWNLWFFLKIEYVLAS

SEQ ID NO: 47003 - protein, 91 aa, Zea mays
  Coding DNA Sequence Number=SeqID_5224
  Subcellular localization annotation: CTP_CleavageSite=66; ConfidenceScore=5.05e-01
MGMWFTSLLVLDKYQAGIDVCSTKSASTPVSVLDFLCHSQTLVSFLWVLILSFTTPILCSPLLLPQVQSKKEGMKNDNGSGRVLHLPFTNF

SEQ ID NO: 47004 - protein, 68 aa, Zea mays
  Coding DNA Sequence Number=SeqID_5225
MARARAYKAPRNFDRTPPHALDLTGAQYHRRLPVHGVPAAARSPATVDRPTEPFPATPDPWKRLCTPR

SEQ ID NO: 47005 - protein, 112 aa, Zea mays
  Coding DNA Sequence Number=SeqID_5226
MGLCASCCKGIGQRELLWGGGLPAAVPEGGAMGGSSAARASPVPWEPQGNRAPTGEEARESSRRAVARGMEGGELGHGNGAHALAGDEAVVGKPERKKAWGRRRLLVAAGIF

SEQ ID NO: 47006 - protein, 232 aa, Zea mays
  Coding DNA Sequence Number=SeqID_5227
MGPRAGGRRRRDFGRIGEHSGEQSASQWGTIWCTEAGMSFGEGVGVFYAWVWARGRAVLARRVKVWRLNEGQLRRAEIPHGEMKLTQKKGGEVPYPKKALRAAWHNAGRLWLAGRRGIGGGELRSVQGEVRRGPGRGVDERGIQGRFSVHRAQAKLTMAEARAKARRGRWNGGATTVVALRASFGKNRRWHMASLPREGWPDPSTRLVLGAYFFAEGTPSKNTFGSVICKLT

SEQ ID NO: 47007 - protein, 108 aa, Zea mays
  Coding DNA Sequence Number=SeqID_5228
  Subcellular localization annotation: CTP_CleavageSite=10; ConfidenceScore=5.03e-01
MGNPRGGSACAQGVAGAHTAAGSTQRNIHGNELTFVFFVFSTSCGYIELGNTLQGRRIGIAGHGTTVALTAPPVLTGKEEGDKRLRLDPEYPSLESIWSIDIRMSGCC

SEQ ID NO: 47008 - protein, 369 aa, Zea mays
  Coding DNA Sequence Number=SeqID_5229
  Gene Ontology: Cellular component=chloroplast outer membrane; Biological process=chloroplast fission
MCLELLNSHGMRFHFKKKREVDYFTAATNKTYRKLATHPPRWCRHNICPSLPLPFVSLSLRFRSRPSSPHRDPQTARAGAMRWDASEAEVALERIWELHDRLSDAILAASRAHLFLLAPQPPPVPSAPPVKGAHRVSGGRNGCVFVKGGGEALAAAAESVSEVRSLHAIRSALEDVEDHLEFLHTVQSRHQAERDSAIARLEQSRLVLATRLAEHQGKKHRIIDEVLAFVGEVSDKSQFISFEDVCATHSRSEDDAEDNRGNGSRIMSNMLSSSLSLAKNSFRLDKIGGALGNAAMFAVSVLAFFQLHQITFGSKTPAMEYRKRIEYSIQPRSSQSNGKGKLLEGADHSLQWTGPCSRQLGNLLSDSYK

SEQ ID NO: 47009 - protein, 72 aa, Zea mays
  Coding DNA Sequence Number=SeqID_5230
MGVAACRMSLQLSTCKIDVVGPWPLQTKQSKMLIAKSPRCQQQRCSLRGTPHAGPVWEDGRSGSVSRQASAE

SEQ ID NO: 47010 - protein, 232 aa, Zea mays
  Coding DNA Sequence Number=SeqID_5231
  Subcellular localization annotation: CTP_CleavageSite=49; ConfidenceScore=5.65e-01
MAAASTSLPLGFSSHHRPTPRIRPQPQSQSQPLKAKPLNPLRFSLALTPATAKPRLAAMPDDVAVANFVEKDWSFLESAGANLQRALASGALSPASRVLALTPTASFVRSLLASSPCELLVAAHESMYVLAGVKEAHDEVRCFHLEGGGGGRGGGVVEAVPERFDDFDVVFVCYFPGMGVSAGALLKSLAKRCSKDFQWTEPEVVRRMRLITLCIAFAKSQLNHLRWQIGGV

SEQ ID NO: 47011 - protein, 180 aa, Zea mays
  Coding DNA Sequence Number=SeqID_5232
MERLISPHRSRSSCSISGICLVPWVGVQDTFGHIRTQKLVLALVIFAVLKYSVIRYISVKAVHSVADYGSCGVGTETNGEDTAEGEEAEGSPWNKAPRLDDAARTTLPVASAPRPTGKTPLKGRRRREARRTKLPASTTTLLGLPQWPRSPAPTPPRISLDLPPWMTTTCCSTSPHHWPT

SEQ ID NO: 47012 - protein, 199 aa, Zea mays
  Coding DNA Sequence Number=SeqID_5233
MAWRPVANGGMKKKLIRGVVAGLGELTSPRYAYSHLYKPFAVAEFECLDKSPFRYFLGELYGGNSLGSTIAVGNEKKRQRVYNTMFHVPWRCERDAFVSATKTAKSLDGFALKTGQQEEGPEEADATEKAMEAVDNVVKSLDEEVESKEMQKQQPHDYSSMSLRNLKATHKKYLIAAKEEVTEGKRLPLEVDENACISH

SEQ ID NO: 47013 - protein, 132 aa, Zea mays
  Coding DNA Sequence Number=SeqID_5234
MPRNMVIGTSLDDWFLKKKIGGLISQFGSCTFTLRTGKTLAKVVEIVSCAKNKWGNWWDFWFYVAPEGIEGVPGLPPSILCSHCYVAFPHFKVKKGDKSEQALQHATRLSSNRDLVKNSLPMVYGRWHMGGI

SEQ ID NO: 47014 - protein, 146 aa, Zea mays
  Coding DNA Sequence Number=SeqID_5235
MALCPHVIEIKGFLLPWTTGRLGASCTACSGRGGTKEPLGLLRQGEEIRRAQPWWEEELGLGVVGREEQGASACCLAARRWELGWSLREAAMEERRCHGWLHQVGEEEGRLYQAITWRGRERAGAAICRAEALDMSASFNRWQVLR

SEQ ID NO: 47015 - protein, 225 aa, Zea mays
  Coding DNA Sequence Number=SeqID_5236
  Gene Ontology: Mol. function=carboxyl- and carbamoyltransferase activity; Cellular component=ornithine carbamoyltransferase complex; Biological process=amino acid metabolic process
  Homolog annotation: Hit_ID=Q8SA97; Match level="QueryCoverage=75%, HitCoverage=19%, E-value=2e-13, Identity=38%"; Hit description =Ornithine carbamoyltransferase
MGRRETEHEGGKKQAKGKPAAFVLSCSQPEVGQGGGSSEVEVESGPEGQARRRPSSVVEAESEPWGRARRRPLSEVEAESEPWGRARRSPSSEVEAESEPWGRARRSPSSEVEAESEPWGRARRSPSSGVEFEPEPWGRARRSFLWRPRLDFAAVSLTLSSGTTVGAVQAALFSCQSVGVAIWPRLLLREACPSWASGESKLCADGGYQLRFRSLGGTPNYGPRQ

SEQ ID NO: 47016 - protein, 189 aa, Zea mays
  Coding DNA Sequence Number=SeqID_5237
MGKLESVVPPARRCGRAGEGLRAGGRPWEENSRGVKDAMAGGAWSREPAGGLAAVKQGRRKAKEEEGGGDEEPDCSPVGSERQGGRHGRKLAGFQPTRRGEIGGGEGCCPCCSHGEPGRKKGRGRHGQELDDHGRRGGAELPARCHGEEELPALACVKKSGGWENGRGGRRLWRLGKIEGWECKNASTC

SEQ ID NO: 47017 - protein, 540 aa, Zea mays
  Coding DNA Sequence Number=SeqID_5238
MAPERVPSPPRAVEAAVSETRGIGQELSVDDYLVGGVTMFDAQTGCRLPEVGCLFVDCECVGTETGRLVVAPARPFADTGASAKGVVVASLDPWVHFCAAPDGGGEIVGAFAAEGVAAAVARQLCYATAFADQVAFGALLNDEKDVAAEARTKAESVHTEANAARKRAAEIELEVKSMRAYRERTESATRAGVDRAHTIFVDAYRDLGAQTAPFDKSGGEEDLESLSSIVTSLMSYASLVSYKGAANALAREGCRHFEAFDRSIEDFDVGVFQVEDDVLKRLARALYDRMWSPHGYDVVRERPDWTLAHAMRDEEVEDLAGLESSVARNDAEVEEGVEEQSSLTKGGVEDPAAAETSAQADFGDNGNGISLMCKSLIVLSSGDFDVDLWSSESEEFLSPFARMDDEFSKDDLDYFMALDLSVKESSPRVAPTAVESLSKVAPTAARGKRRIRVPKQSVGMLGESSQGIGVPLKASPMGMVRPRPWERMRSKEGTHQIILAPTTGQHFEEGDLRALFDGEELRLMLFNFREPGLILKAEPM

SEQ ID NO: 47018 - protein, 138 aa, Zea mays
  Coding DNA Sequence Number=SeqID_5239
MDAPGALAARQGRAGGRLRAMVASQAVGDHAGLGALGCAPGARYAVASSAGQGPRRVPPRAAAPGAELHAMDAPGSREPRRAWSYAARGRREQQHRRAESRPRRAAASSRAGGAASSRVGRAPWAERHARPRVTTQRR

SEQ ID NO: 47019 - protein, 145 aa, Zea mays
  Coding DNA Sequence Number=SeqID_5240
DTLLGHLSSDQWRVMISGQKGNHDLWVKDVRITGGDENDGFGIDYGNGEYEAVEEDFQEFQDGVADGLDLKYYPRRSTSSAGGVIVSPIGEGNPRLSCMVKLVAMLNTELDHALDELGKHPYRSSPGGRFDYGTPECRTQIDLEP

SEQ ID NO: 47020 - protein, 164 aa, Zea mays
  Coding DNA Sequence Number=SeqID_5241
  Gene Ontology: Mol. function=peptidase activity; Biological process =lipid transport
  Homolog annotation: Hit_ID=Q01595; Match level="QueryCoverage=78%, HitCoverage=100%, E-value=7e-33, Identity=60%"; Hit description =Cortical cell-delineating protein precursor
  Pfam annotation: Domain name=Tryp_alpha_amyl; Domain location=49-121; Score=25.7; E_value=0.00017; Accession=PF00234.12; Description =Protease inhibitorseed storageLTP f
MAPKVVLFLALGLLFAAAAHGCEPYYPVPVVPTPSVVLTPSSHSHGRYPIDTLKLKVCANVSGLIKVGLPQHEQCCPLLEALVDLNTALCLCTTIKANILGIHLNVPLSLNLILNTTAARFAERTSLAPTKLGIPCTDEQLLPLNLDEQRSRRQGRAIAPPPAR

SEQ ID NO: 47021 - protein, 107 aa, Zea mays
  Coding DNA Sequence Number=SeqID_5242
MPVTKTPSPSRPSHLQTQHVAYARLGPDDTDAIPILERHHPLCPPSSCRGRRLPLLPRRQPFPFSSTSILHRVPSFDSSSPPVCGPSPIELPSLLLALEKRRRRSLH

SEQ ID NO: 47022 - protein, 682 aa, Zea mays
  Coding DNA Sequence Number=SeqID_5243
  Gene Ontology: Mol. function=RNA-directed DNA polymerase activity; Cellular component=nucleus; Biological process=RNA-dependent DNA replication
  Homolog annotation: Hit_ID=Q8S472; Match level="QueryCoverage=99%, HitCoverage=63%, E-value=0.0, Identity=81%"; Hit description =Putative gypsy-type retrotransposon RIRE2
  Pfam annotation: Domain name=Retrotrans_gag; Domain location=170-261; Score=67.8; E_value=3.5e-17; Accession=PF03732.7; Description =Retrotransposon gag protein
MPEPSTTEGRRIQGELKNLLEDAAVRQAESSASRRQGYPSEHRAATSRFMREASVHTERTRNTAPAAPGRLGNEHHHRNCRTHLDERVRRGYHPRHGGRYDSGEDRSPSPEPPGPQAFSRAIRRASFPTRFRTPTTITKYSRETRPKLWLADYRLACHLGGTDDDNLIIRNLPLFLSDTARAWLEHLLLGQISNWDELVQAFAGNFQGTYVRPRNSWALRSCRQQPGESLRDYIWRFSKQRTELPNVTDSDVIGAFLAGTTCRDLVSKLGRKTPTRASELMDIATKFASGQEAVEAIFWKDKQPQGRQPEDVPKASTQRGTKKKGKKKSQAKHDAANADLVTAAEYKNPRKPPRGANLFDKMLKEPCPYHQGPVKHTLKECAMLRRHFHKVGPPAEGGRAHNDDKKEDHKAGEFPEVHDCFMIYGGQVANASARHRKQEHREVCSVKVAAPVYLDWSDKPITFDQGDHPDRVPSLGKYPLVVDPVIGNVRRTKVLMDGGSSLNIIYAETLGLLRIDLSLVRAGATPFHRIIPGKRVQPLGQLDLPVCFGTPSNFRRETLTFEVVGFRGTYHAVLGRPCYAKFMAVPNYTYLKLKMSGPNGVITVGPTYRHAYECDVECVEYAEALAESEALIADLESLTKEAPDVKRHAGNFEPAETVKSVPLDPNNDTSKQIWIGSELDPK

SEQ ID NO: 47023 - protein, 117 aa, Zea mays
  Coding DNA Sequence Number=SeqID_5244
MAWSQFGELWTKARKNFEGLSKGEGQEDLGTKAKVKKSLLGRVKAIGVTHMQLDGSSHKAQVILAQVMVMVTRSCLVSNQKLESKKELDYGSFQHLEKFLVPLEYIGTQRYGEIDWL

SEQ ID NO: 47024 - protein, 110 aa, Zea mays
  Coding DNA Sequence Number=SeqID_5245
  Subcellular localization annotation: CTP_CleavageSite=49; ConfidenceScore=5.09e-01
MAPKVALFLALSLLFAAAAHGCGPYCSGPVVPTPPVVPSHSHGRCPDRRAENSRKMTKYVHHYYFRTIMFFVSLTSFPRGHVRAKGWPQPGPWDTHEDCILCEPAVLVTR

SEQ ID NO: 47025 - protein, 107 aa, Zea mays
  Coding DNA Sequence Number=SeqID_5246
MAHGGGALTARNSGHAPDPRARALACAESRTQRLPPDHGLTLGQRVWTPIDDGGDLARFFRCAHEFHGDGGSQGKRLGFTRAKVLEVEYIPRLYPLATECRIPCEMF

SEQ ID NO: 47026 - protein, 116 aa, Zea mays
  Coding DNA Sequence Number=SeqID_5247
MTKVNACRREVGANVGPCSRMLYIKNKATQLLTIRDSSFEALSPRDIISSHEGEEAWVYQGQRYLRSGTYPGYIPRNRMPDSMRGVRHARGEFGGKDRSDLGGPPICDWNGCDYIG

SEQ ID NO: 47027 - protein, 64 aa, Zea mays
  Coding DNA Sequence Number=SeqID_5248
MGEEEMGRAIGGGERGCEGERRAKLGQKELGMGRDEGGTAIQLESAGRIIDMGVAKQNQMHLLG

SEQ ID NO: 47028 - protein, 110 aa, Zea mays
  Coding DNA Sequence Number=SeqID_5249
  Gene Ontology: Mol. function=microtubule motor activity; Cellular component=microtubule associated complex; Biological process =microtubule-based process
  Homolog annotation: Hit_ID=Q6ERT5; Match level="QueryCoverage=38%, HitCoverage=43%, E-value=1e-18, Identity=95%"; Hit description =Dynein light chain type 1-like
  Pfam annotation: Domain name=Dynein_light; Domain location=1-98; Score=11.7; E_value=7.1e-05; Accession=PF01221.9; Description=Dynein light chain type 1
MVDRDQTKIGAPEKCTILATEHMYITLRKYNPSSSHFEPLPARIATRIPGNELEFDKRYGVGWQCVVGANFGCFFTHSSGTFIYFSMERLSFLLFKAAVVAAAAAAAVAS

SEQ ID NO: 47029 - protein, 121 aa, Zea mays
  Coding DNA Sequence Number=SeqID_5250
MPTRIFGPEGEIDLTNNEMVAGAFEADSHRMMSTEQGPIFLTIIKGGPSHFVAEDDVELVLVEDASDDEEATLIAQMTFEDPSFFTTIKDCPSLSIVEVNVGPQLVEDPSIEIESSSSTGA

SEQ ID NO: 47030 - protein, 369 aa, Zea mays
  Coding DNA Sequence Number=SeqID_5251
  Gene Ontology: Mol. function=calcium ion binding; Cellular component =endoplasmic reticulum
  Homolog annotation: Hit_ID=Q6YVG9; Match level="QueryCoverage=74%, HitCoverage=83%, E-value=1e-113, Identity=64%"; Hit description =Calcium-binding EF hand family protein-like
  Pfam annotation: Domain name=efhand; Domain location=238-266; Score =12.0; E_value=0.64; Accession=PF00036.22; Description=EF hand
  Pfam annotation: Domain name=efhand; Domain location=285-313; Score =20.2; E_value=0.0075; Accession=PF00036.22; Description=EF hand
  Pfam annotation: Domain name=efhand; Domain location=324-352; Score =12.0; E_value=0.63; Accession=PF00036.22; Description=EF hand
  Pfam module annotation: Pfam domain module=efhand::efhand::efhand; Domain location=238-266::285-313::324-352
ENESGLMNYDLSPVKRKDGQRAGAATDDSSDMAKPAAARKPSAASTVALTLVLALASAVLLFLLLRFSPSSPSPNPHPHRRLRLRPRAHAHHHQIPFDPVVADIERRLEDREWERLAAAGLHAPGMEAAPVPEDLTDGEVDADEDYINDAARFNVTLRVEALFPKIDVDPADGAVTGAELAAWNLANARREVLHRTARELELHDRDHDGRVAYGEYERPSWAWRFDGMYIFVPFQLFMFDSSVRERDKDNDGKLNFQEFFNGLFYSIRHYDDEGLTDDTGGSDAPAKKSFSHLDLDNDGLLSADELKPVIGNLHPSEYFYAKQQADYVISQADTNKDGQLSMNEMIENPYVFYNALFTEDDYGFHDELR

SEQ ID NO: 47031 - protein, 84 aa, Zea mays
  Coding DNA Sequence Number=SeqID_5252
MEDGCHRGRGRPAKGEKKGVAAKRGGEGKKKGWPPRLAPEDASEATRLEEVIVGGHPRHAGSMEVVAGGRTSGIGSDDVMRNHH

SEQ ID NO: 47032 - protein, 41 aa, Zea mays
  Coding DNA Sequence Number=SeqID_5253
MEDERLVHARLMHPVDPVDGNGMASWCQIAATYNSNTELPH

SEQ ID NO: 47033 - protein, 104 aa, Zea mays
  Coding DNA Sequence Number=SeqID_5254
MSGDHAKRETVTGEKPASSGKTLSREYDNKYKEESSSSIKSHQRGDKKKKKMKKVVYYETDSSSPSTSGTESSTTSKRHERKKYSKMPYAILVFQNALRYFPYP

SEQ ID NO: 47034 - protein, 234 aa, Zea mays
  Coding DNA Sequence Number=SeqID_5255
  Homolog annotation: Hit_ID=Q6ZI78; Match level="QueryCoverage=91%, HitCoverage=37%, E-value=1e-75, Identity=64%"; Hit description =Putative DDT domain-containing protein
MKDEGDYFTVLQNKKRKLKVSSVTWAEYLCDFLEMTKNEERSTNIATVIRGYYGLIDTDIKLKILRELVEEAIQTSAIKEILSDRVDQKQVLNATKRENTRKDKQEKNLNTEIAMKSQENQTDDVQVGHGGVDELVRRKEENDKSNISRSRTEGKRHLHLETEIEKLSIRSSPLGKDRQYNRYWFFKREGRLFVETADSREWALKRQLEKFYSKISGGRLGVEASSAMNAEPTP

SEQ ID NO: 47035 - protein, 60 aa, Zea mays
  Coding DNA Sequence Number=SeqID_5256
  Homolog annotation: Hit_ID=Q6ZI78; Match level="QueryCoverage=54%, HitCoverage=5%, E-value=6e-08, Identity=81%"; Hit description =Putative DDT domain-containing protein
MARSVPQRRWRGILGQMPLFDTKPFSLLEPPKDFDLNEKVFQIRFTKEIATPDFQRSPNL

SEQ ID NO: 47036 - protein, 156 aa, Zea mays
  Coding DNA Sequence Number=SeqID_5257
MAGPGTVYRRPYPLPVGDPILQVGPLTQCLKCPSVEYQILIARTPLARSPLLRPSLPSRTAVPCRRQPCSAIRPLLRCLLLARAVEPDVLLGLAPCIHEQIPRRPPPALEQILRRSGSQRPSSAPALEHIPRQPGILRPRGSDRHRLLPPASSRRH

SEQ ID NO: 47037 - protein, 129 aa, Zea mays
  Coding DNA Sequence Number=SeqID_5258
MEQGEASTTAGMGSGDWAAMDTEGASSNQDTGKRAWQLARTERNSSWGEQHSKRGELRRTDAMGGPWARPWNQRSSEERESTAESSRRPWRLGPGRGERDGRWEREAKEMGRLVYAAVRGGRRCALRLK

SEQ ID NO: 47038 - protein, 159 aa, Zea mays
  Coding DNA Sequence Number=SeqID_5259
MSPNRYGSGAVDRWHRCLLVTPDSSVPHRTLSGLLDKWTRRRSCDYFGYPIPRYPTTMSSLDDMEEDAGEEGTMQEICDEIPIAAFHLTKGFFSSGLKEAKYHNCTVNATKDFMLNKEIEQKIISDSKLYEVLDNEGPMVDRAKVALEKTHIEMMKLRE

SEQ ID NO: 47039 - protein, 123 aa, Zea mays
  Coding DNA Sequence Number=SeqID_5260
MPVAIGIGPTRSGRSKAEKRRAAALKRCLNRPANAVGVWDPTAHLGLPLEVLLGGFSSMKDARELSRWLMSDLFFDGVPTRPYILDRGALHAEISISSSFHALEVSVLPSGLTTHWVGVAPEL

SEQ ID NO: 47040 - protein, 137 aa, Zea mays
  Coding DNA Sequence Number=SeqID_5261
MGKNKKGGSSSHHSGDKRKHEPSPPSEDFGDSEYSEEEFSSESEGSPVWTYIRAVERSGLEGSDESEISSDEENSSDSSEEGSGGDGDDEGDSGDGGDDGGGGDGDCKGDNDGGKGDSGSGKGDNGSSKASGKAPLA

SEQ ID NO: 47041 - protein, 74 aa, Zea mays
  Coding DNA Sequence Number=SeqID_5262
MRLALCLLVGLLLLSLPAFFLSLVTIIIGTICIKVTSLTRDENGMGTRNGYWIRVRKQDEISDTETGMDFADLR

SEQ ID NO: 47042 - protein, 107 aa, Zea mays
  Coding DNA Sequence Number=SeqID_5263
MKESDEGDHPSKIKNISSEDVESPQILGLGGTTFRGSTCSKEDKKKTTEGGGSSRHEKAERELKRPSPVFEKDALEATQTKGEEGEDLGFFVRHLARANLMTKKLRK

SEQ ID NO: 47043 - protein, 99 aa, Zea mays
  Coding DNA Sequence Number=SeqID_5264
MQERDPKWKTTPTVKLTMMLKTIAAPWSCPRSTSLDPYMARQLSVFDSDGTLWDVPHSGFGRAASQLQLDGRILYILTNEWQIGVTSEWSQVRKLREAA

SEQ ID NO: 47044 - protein, 93 aa, Zea mays
  Coding DNA Sequence Number=SeqID_5265
MGSSNDMPCTMLQRNKNRAKLDIGQNTAQYPARRSAVQAQGAQRRGAGEQSFGRAHRELGGELGLGTGLTAGETGAGEGELAEHLGGCSRRAA

SEQ ID NO: 47045 - protein, 113 aa, Zea mays
  Coding DNA Sequence Number=SeqID_5266
MKVNREDNKRDYQSDRYKGKHEYTFDKHKSKGSDINQDIDNTSSMSDDKLKRHVEDKLSELCFFANVVGGLYILALGEDVVSDDDKDINNGSTSVLSLSTNNLFAEVDELMTV

SEQ ID NO: 47046 - protein, 96 aa, Zea mays
  Coding DNA Sequence Number=SeqID_5267
MAMMGSTSKKMYLCQVPNFGFEMIKLRPGEEGESPRRGYWLIGGLIELVIKKRSSTVKGLLLGVFLSTESPQDKSITDKVMLRTISAEGPQDKATI

SEQ ID NO: 47047 - protein, 94 aa, Zea mays
  Coding DNA Sequence Number=SeqID_5268
MADFSQTSLSSLVMAGLGAKREPITWIKRGKIFLDPDCKVVRARKVPQWRNQADVDPGAWSPSLKCRGRFHEVCVRGKEAKLTASGPQHTKITI

SEQ ID NO: 47048 - protein, 47 aa, Zea mays
  Coding DNA Sequence Number=SeqID_5269
MAWCGGGLGVWWRCDSGNEAHENGRCGSEDRVPRRISSLLALDAEKR

SEQ ID NO: 47049 - protein, 93 aa, Zea mays
  Coding DNA Sequence Number=SeqID_5270
MGSSDDMPCTMLQRNKNRAKLDIGQNTAQYPARRSAVQAQGAQRRGAGEQSFGRAHRELGGELGLGTRLTTGETGAGEGELAEHLGGCSRRAA

SEQ ID NO: 47050 - protein, 55 aa, Zea mays
  Coding DNA Sequence Number=SeqID_5271
MGGALAPPWLSPREEGALWAVHSGLGGDHYVNGNMERPPEKTVLPQGFNGTPLAD

SEQ ID NO: 47051 - protein, 90 aa, Zea mays
  Coding DNA Sequence Number=SeqID_5272
MAGVFIGDFLFDSTFLLKDFRALSPLLGDFLFDSTFHDYRALSPLLGDFFDSAFHLKDFRSLSPLLGDFLFPLHSKENYFISKEKLEMVE

SEQ ID NO: 47052 - protein, 56 aa, Zea mays
  Coding DNA Sequence Number=SeqID_5273
MELDEVVVTTREDDDAVLLDMCLQLSSQTVIICHATKMCSMKCLPEPGKFLKWQAE

SEQ ID NO: 47053 - protein, 147 aa, Zea mays
  Coding DNA Sequence Number=SeqID_5274
MIILLTSRNKRVPFGYDESNEHCIVILSGGNNDLIQLHDGRNLGLVSSSMVWPWSSKHGVGSMDLMSRSAPSTLLGEVMCGDQHFPVAAGSGGHGPPYHAATDNVLVLFLAGHHSESRDYKPPCLVAAAHFMDEAAASQQQQQQLMY

SEQ ID NO: 47054 - protein, 98 aa, Zea mays
  Coding DNA Sequence Number=SeqID_5275
  Subcellular localization annotation: CTP_CleavageSite=41; ConfidenceScore=5.03e-01
MAGARPNAELGLAISQRSATRSPAPTRVLLCSPRPCELPPSAMDAGELIPWCRDLAMEFQALFFPAAQLPRRPSRARAQPEEKSMWTSEKKQAQYSVR

SEQ ID NO: 47055 - protein, 103 aa, Zea mays
  Coding DNA Sequence Number=SeqID_5276
MTQSKDQILSKFQKSTQVLSDLRENTLKREMVTGEKPEALGRKNDERTPSKEADNKHKEESTGSIKSHRKGDKKKKKMKKVVYYETDSSSPSTSGAESTTSKR

SEQ ID NO: 47056 - protein, 213 aa, Zea mays
  Coding DNA Sequence Number=SeqID_5277
MAGEPPWAHAGAGKPRPGLDSGGASPDRGHASREQGQGCCRCWPQCRNGPPGLAAPWSTEPRSSRAHKRRPGERAGRGCWRSWAMPTAKKKRERASGHRNQRGWLLAMWAAWAHDVGTGWDGRAIEEEEQWAGAPLTGGPGGWAAVRRGRARIGSREHAQRLGFWALGRCGCGCESKPARGAQCWPRVLDGPRTQCSGPQGAKGGKGFSFVFI

SEQ ID NO: 47057 - protein, 181 aa, Zea mays
  Coding DNA Sequence Number=SeqID_5278
MATLAMPSRRGARASSRGESGSHNSRDVSAWSSSWRFGEGDACELWRKQCVHCCMHANWRAGVEKAVHPLVHASTALGGLRGEETLSELLGRCWAAEKKKGGRGVGCAQAGRAEVLLGRGMGCEAMRGEAKEQRLRLQAPVDTPVFLPRYLEPCKVLTNPSWCPYTKGSPQKGQAPGQVTP

SEQ ID NO: 47058 - protein, 432 aa, Zea mays
  Coding DNA Sequence Number=SeqID_5279
  Gene Ontology: Mol. function=RNA-directed DNA polymerase activity; Cellular component=mitochondrion; Biological process=RNA-dependent DNA replication
  Homolog annotation: Hit_ID=UPI00004C1731; Match level="QueryCoverage =97%, HitCoverage=27%, E-value=1e-178, Identity=77%"; Hit description= UPI00004C1731 related cluster
MGPIKDFKGVQRVVSAAIVVERREEGHALPVQRPVYFISEVLSETKIRYPQIQKLLYAVILVRRKLRHYFESHPMTVVSSFPLGEIIQCREASGRIAKWVVEIMGETISFAPQKAIKSQVLADFMAEWVDTQLPAAPIQPELWTMFFDESLMKTGADASLLFISPLGKHLRYVLRLHFPASNNVAEYEALVNGLRIAIELGSGASTLVPEAPSAPEGEALRVEEERNGVPPNQNWQTPYLQYLHRGELPLDRAEARRLARRAKSFVLLGDGKELYHRSPSGILQRCISIAEGQELLQEIHSGACGHHAAPRALVGNAFRQGFYWPTAVADATRIVRTSQGCQFYARQTHLSAQALQTIPITWSFAVWGLDLVGPLQKAPGGYTHLLVAIDKFSKWIEVRPLNSIRSEQAVAFFTNIIHRFRVPNSIITDNGT

SEQ ID NO: 47059 - protein, 220 aa, Zea mays
  Coding DNA Sequence Number=SeqID_5280
  Subcellular localization annotation: CTP_CleavageSite=69; ConfidenceScore=5.51e-01
MWSTSSLEASRGLGVSGGASWATRGGPWMRRCAVAIKAVRATPMVRSCSSVRDTARSRSCEAGKAVWMVAMVEASVESVEGTSEAHVALATSERVVGKPRGSYQEKRADEMGSKATTMAREPVLIGYHERRSPEGKNIGCTCAGCHDDDDDYGGGAMCERGGGAGCNGDAGHGGSGMMAGLMLLAAMVLATYKGSIVGRSVMKGRANSAAQGGSGAGGPA

SEQ ID NO: 47060 - protein, 188 aa, Zea mays
  Coding DNA Sequence Number=SeqID_5281
MNSAATEVRAAKSEGTRLSGVAPDSPVLQGDKAPTVDFAPNPNGWVTWRHTGQCTVPVRWRTGLSDVNFRLRLFTPSRRLSDGNLRIFCFGAATPMMMMMVLLMMVLTVDFYIFSMRRLTLVQLRSGKEEEDVEADLQEFWEFDEFEDYASDLPQSAACGLDMSNLAPFLKVDPDVAKHTNKEKWNLM

SEQ ID NO: 47061 - protein, 78 aa, Zea mays
  Coding DNA Sequence Number=SeqID_5282
MGGGGMLQGGRSRAAERKDQCHREEPRHMAATRPHHCWEGETMPQGSRAMGRSTREGRISPNRGVIPRERKEQKRRSE

SEQ ID NO: 47062 - protein, 689 aa, Zea mays
  Coding DNA Sequence Number=SeqID_5283
  Gene Ontology: Mol. function=protein binding; Cellular component =cytoplasm; Biological process=ubiquitin cycle
  Homolog annotation: Hit_ID=Q338L7; Match level="QueryCoverage=91%, HitCoverage=99%, E-value=0.0, Identity=44%"; Hit description=F-box family protein, putative, expressed
  Pfam annotation: Domain name=F-box; Domain location=202-249; Score =37.1; E_value=6.2e-08; Accession=PF00646.23; Description=F-box domain
  Pfam annotation: Domain name=LRR_1; Domain location=385-403; Score =0.2; E_value=2.6e+02; Accession=PF00560.23; Description=Leucine Rich Repeat
  Pfam annotation: Domain name=LRR_1; Domain location=405-429; Score =2.0; E_value=1.2e+02; Accession=PF00560.23; Description=Leucine Rich Repeat
  Pfam annotation: Domain name=LRR_1; Domain location=457-482; Score =7.5; E_value=11; Accession=PF00560.23; Description=Leucine Rich Repeat
  Pfam annotation: Domain name=LRR_1; Domain location=503-525; Score =5.7; E_value=25; Accession=PF00560.23; Description=Leucine Rich Repeat
  Pfam annotation: Domain name=LRR_1; Domain location=587-607; Score =3.1; E_value=74; Accession=PF00560.23; Description=Leucine Rich Repeat
  Pfam annotation: Domain name=LRR_1; Domain location=615-640; Score =6.8; E_value=15; Accession=PF00560.23; Description=Leucine Rich Repeat
  Pfam annotation: Domain name=LRR_1; Domain location=657-688; Score =6.2; E_value=20; Accession=PF00560.23; Description=Leucine Rich Repeat
  Pfam module annotation: Pfam domain module=F-box::LRR_1::LRR_1::LRR _1::LRR_1::LRR_1::LRR_1::LRR_1; Domain location=202-249::385-403::405- 429::457-482::503-525::587-607::615-640::657-688
MANEGRMKGVQGVGGGTGDEEDGNEEVREELELALSLGWRSWHLPPRQEPAPSSHNWTAVLPEWNPDAAGSSHDAKTALGGQSIPSLRFRDMLGGILDASHAGGSVEVGWGNLDEEDEDRDLQNKRLRVQHFGEIPKIYFELKHENLCSAFLDVRLSCLPEHELEFGLSLFPNDGSESLRDANNEIVDDAENPGERNSEGVGIRMDLSDDLLHLIFSFLGQKDLCRAGVTCKQWRSASVHDDFWKCLKFENTRISLQNFVNICRRYPSVTELNLNGVINAEMLVLEAIVFLRFSPPIVSHVGILSILYLLDRVSCRHLKTLTMGKGQLGGPFFQALSECPLLTALTVNDASLGSGIQEATIKHGGLRELHIFKCRALRISVRCSQLQILSLRRTGMAHVSLNCPQLLELDFQSCHKLSDNAIRQAATACPLLAKLDMSSCSCVTDETLRDIGNSCPSLSALDASNCPNISFESVKLPMLVDLRLLSCEGITSASMVAIAYSRLLEALQLDNCSLLTSVSLDLPHLKNMSLVHLRKFAELNLRSPVLSYIKVSRCSVLHRVSITSTTLQKLVLQKQESLSSLSLQCHNLIDVDLSDCESLTNAICEVFSDGGGCPKLRSLILDNCESLSIVELNSSSLVCLSLAGCRSMTCLRLSCPNLQHVNLDGCDHLKNAAFCPAVGVPVNLFADIR

SEQ ID NO: 47063 - protein, 206 aa, Zea mays
  Coding DNA Sequence Number=SeqID_5284
MEFPKELTQQAVVWHKQAKAQQEAEKQTLSQHSAVVGGDQSCIDILRCFLGNARAMMSTVYATAQRRAAQRPYVRLRSLAHVTGSRPRGSIGPGVFFVPKSRDPAESGSGPHTERSGDPSQGSGLYPRRSWTLPGGPVRICRNPTLSHGDPGPIVDTLGVYHLFPAMWRPPEPSTWWGSGAVYTRLEIAAWAPCLLTVVRGYPLFQ

SEQ ID NO: 47064 - protein, 138 aa, Zea mays
  Coding DNA Sequence Number=SeqID_5285
  Subcellular localization annotation: CTP_CleavageSite=44; ConfidenceScore=5.21e-01
MAEPQPGEPGHVPGLRLRRSSIGFNASDARSLPPASSPASPLCRQSNRSTDRVNTYGGSRRDDAVRLCMQWSGFCWIDPDIEWRAAGHSVHLPRLPRRIMSVDLLRAAVGEAALVYGTVWQIADRLGRHRGSVRGATS

SEQ ID NO: 47065 - protein, 653 aa, Zea mays
  Coding DNA Sequence Number=SeqID_5286
  Homolog annotation: Hit_ID=Q9CB00; Match level="QueryCoverage=60%, HitCoverage=84%, E-value=7e-56, Identity=38%"; Hit description=Ara4 -interacting protein
  Pfam annotation: Domain name=UBX; Domain location=548-650; Score =64.0; E_value=4.7e-16; Accession=PF00789.11; Description=UBX domain
MARPPQEAIDTFVSITGADEVTAVRVLESFSRLRGISTLGASRPYNDDHKRSTETTVAALGQLAHRTLSGAPCRPLARATRRSRIARPTVGSPNSPEHGHDLNEAVNAYFNEGDRTTTRINQNPVPATASYDDMMELDEPLDPMFNRPLFPRTLGNPFALLDPGFADITAGDIFGRGPRVTQPRDVRQIPIEVKDSNTQTGSSGQGPIIEDVTGRESFYGPEVHGTVIVDEDDEDLPLTLSAQDPKIPSSALHPNHFMPSAPPVVDVSDHNNDIEEEMIKAAIEASKREADGMKNTAERERALRQEGMYVADHSPDLSDKEGGQGGSGISERRGLTTGEVGTSEQTVDEENFQEDNEDGEEQPLVRTRSRRLRGRTIEPAETVQRADSPPSSPQPHVQIGHQRNVGFPSVEWGGISSEERDEALMLEAAMFGGIPEGAPYPFSFPAHGRSTHYPLVARPPSPSLTAQRLLREQQDDEYLAALQADREKELKAVQEAELRRVEEAAAREAALERQKKEEEEKLKKQREEEELESKLAAKQASLPKEPLQNDEGAVTVVVRMPDGSRRGRRFLKSDRLQYLFDFIDISRTFKPGTYRLQYLLIKDVQLESIAYYTGDMARSYPRRAFTELESQMSLSDLGLTSKQEALFLEKLSA

SEQ ID NO: 47066 - protein, 111 aa, Zea mays
  Coding DNA Sequence Number=SeqID_5287
  Homolog annotation: Hit_ID=Q9CB00; Match level="QueryCoverage=70%, HitCoverage=16%, E-value=1e-11, Identity=49%"; Hit description=Ara4 -interacting protein
  Pfam annotation: Domain name=UBA; Domain location=4-44; Score=15.8; E_ value=0.049; Accession=PF00627.21; Description=UBATS-N domain
MARPPQEAIDTFVSITGADEVTAVRVLEEHGHDLNEAVNAYFNEGDRIFGEVIRVAGWVGGGRKNLHARVDAPAARLGLEQRATDEVTSASTFEKHFDPRVHAADEHDLPP

SEQ ID NO: 47067 - protein, 74 aa, Zea mays
  Coding DNA Sequence Number=SeqID_5288
  Subcellular localization annotation: CTP_CleavageSite=40; ConfidenceScore=5.28e-01
MQKIPLARQLSVLSNRKRVKIPPLFMCVQVTSTLSIAQVTCVKKQASSSDVAGLELGRRIRKPNAKFLGEDWVA

SEQ ID NO: 47068 - protein, 300 aa, Zea mays
  Coding DNA Sequence Number=SeqID_5289
  Gene Ontology: Mol. function=protein binding; Biological process =protein modification process
  Homolog annotation: Hit_ID=Q1S0J6; Match level="QueryCoverage=59%, HitCoverage=57%, E-value=1e-33, Identity=52%"; Hit description =Ubiquitin; Apoptosis regulator Bcl-2 protein, BAG
MMMSGNRKQRVALSPVKEAAAVPKEEVWEVRPGGMLVQKRSPDADPPPVPTIRVKVKFNGVYHEIYINSQASFGELKKLVSEKTGLHPDDQKVVYKDKERDSKAFLDMAGDPAAKAKRLLEERRTSKAERAAKAIARVALDVDKLATKVSALETVASKGGKVVDAGRGDADGGADARAGGAGTPSPPTGTPRRSGGRREKACAEARGDAGRHPRQEQGGGAQQQQDTAAQRTSRRARRTSSGGSSSRRAPTTATAPAPQTQTAASWDSFDLLSSVPPSTSAAAPVTSTTTPSPRLEWELF

SEQ ID NO: 47069 - protein, 346 aa, Zea mays
  Coding DNA Sequence Number=SeqID_5290
  Gene Ontology: Mol. function=transcription regulator activity; Cellular component=nucleus; Biological process=regulation of transcription
  Homolog annotation: Hit_ID=Q69IU0; Match level="QueryCoverage=68%, HitCoverage=89%, E-value=2e-44, Identity=44%"; Hit description =Putative MYC-related DNA binding protein
  Pfam annotation: Domain name=HLH; Domain location=179-228; Score =43.0; E_value=1e-09; Accession=PF00010.16; Description=Helix-loop -helix DNA-binding domain
METIDEGICDDDGGSGEAGSKPLLVGGLTRLAADKGAEATIFACAAATGLWALSNWHFCKARSLLLYEKSQMQHQGAMNELVSQASFCSPASPPSFFSAAVGHHSMLDFVSCGVPEQWFLGEEALDKPIHDGAEWVAAGGSHDSAGSDLSSNPPAAGIVLSERAARRRGRKPGPRSDNPGISHVEAERQRREKLNRRFCDLRAAVPTVSRMDKASLLADAAAYIAELRGRVEQLEAEAKQQVASRKLGGNPAMCPASGGLEEKLEVRMVGRNAAALRLTTASTRHAPALLMGALRSLDLPVHNACVSRVGGSATVQDAVVDVPAALQDEGCLRAALLHVLQQDESA

SEQ ID NO: 47070 - protein, 119 aa, Zea mays
  Coding DNA Sequence Number=SeqID_5291
MNTNCIPPPQQAPFYPVVVEEVPLELHHLHVRNGVILEDSSEEILATPTSLSEFHAFVAGASSSAPPVPVAQSPAPGGDDPDDFGDDGDDDAEEKENNDEDANNEQEDNFVGLWPVAEH

SEQ ID NO: 47071 - protein, 180 aa, Zea mays
  Coding DNA Sequence Number=SeqID_5292
  Homolog annotation: Hit_ID=Q8LIY0; Match level="QueryCoverage=28%, HitCoverage=8%, E-value=9e-09, Identity=56%"; Hit description =Putative CSLC9
MGGRSTLPRGPHDREIAVWAVRSGAGARARDVSVYDNGARWRVLAHGLAPPALRDARVHVRRARSPYPASPPPFLSSYPHLPSLLPPRLSSTPTAAVPMPQWWGREAQGDGDVTSVVVKMESPDWAVRKPEVARGKAGRGKNARQITCVLLLKAHHAAGKLTGAASTALSPSTPSSPRAI

SEQ ID NO: 47072 - protein, 36 aa, Zea mays
  Coding DNA Sequence Number=SeqID_5293
MENHQGKHVPPQGWEVLVLILLRWWSDKGFLQVLFP

SEQ ID NO: 47073 - protein, 198 aa, Zea mays
  Coding DNA Sequence Number=SeqID_5294
MAESVTADTRAHGEEASQFDESVAERILWHGLEKDSASNNARSKVRSRLGERYGTDCPAARTAAATHTTSLRHNTTMARNRGASSLQERPNTRNDGRVAHELGMGKLVSMVSDGDTNSARRGLAGEDTSPSEQRGTVRAQGDGARWRWPRRRSPSVVHRRNLGWACAGRTGSSVEDRTEQGMSSREVDAAGKGARLSR

SEQ ID NO: 47074 - protein, 124 aa, Zea mays
  Coding DNA Sequence Number=SeqID_5295
MEILLVGGEIVVDGHIPTAAAIDDTKLRCRVRSFTRPTAGNIFYLGSLETCVDGRNPRFAANNDDEFLGLFPAESHHVRSAYTATDNDTDHRHFHAGPLCLLQHPFRIIAAEKLRGLIFYAQYI

SEQ ID NO: 47075 - protein, 171 aa, Zea mays
  Coding DNA Sequence Number=SeqID_5296
MTSISRFLALPRRPRPSSLGWCSEAGFQSLCPIIAAEKVSGRIFYARMEILLVGGEIVVDGHNPTVAAIDDTKLRCRVRSFTRPTAGNIFYLGSLETCVDGRSPRFAANNDDEFLGLLPAESHRVRSAYTATNNDTDHRPFHAGPICRLQHPFRIIAAEKLPGLIFYARYI

SEQ ID NO: 47076 - protein, 550 aa, Zea mays
  Coding DNA Sequence Number=SeqID_5297
  Gene Ontology: Mol. function=monooxygenase activity; Cellular component=integral to membrane; Biological process=electron transport
  Homolog annotation: Hit_ID=Q5Z6A5; Match level="QueryCoverage=93%, HitCoverage=92%, E-value=1e-134, Identity=51%"; Hit description =Putative thromboxane-A synthase
  Pfam annotation: Domain name=p450; Domain location=46-544; Score =216.3; E_value=7.1e-62; Accession=PF00067.12; Description=Cytochrome P450
MEITASCDDGAVTAGAVSGLLLASVLSLFGAFLVYFYAPFWSVRRVPGPPARFPIGHLHLLARNGPDVFRAIAKEYGPIFRFHMGRQPLVIVANAELCKEVGIKKFKDIPNRSTPPPSIGSLHQDALFLTRDSTWSAMRSTVVPLYQPARLAGLIPVMQSYVDTLAANIAACPDQDCVPFCQLSLRMAIDIIGRTAFGIEFGLSKNAAGTGSSSSESPGGGEGEGDVREFLREYKRSMEFVKMDLTSSLSTILGLFLPCVQTPCKRLLRRVPGTADYKMDQNERRLCSRIDAIIAGRRRDRATRRRCGPGAAPAPAPLDFIAALLDAMESGRRRRRRCRHVRALAYEHLIAGTKTTAFTLSSVVYLVSCHPLVEAKLLRELDGFAPRRGRGRAPDADELQSGFPYLDQVIKEAMRFYVVSPLIARQTSERVEIGGYVLPKQGAYVWLAPGVLARDAAQFPDPEEFRPERFAPEAEEERARHPYAHIPFGVGPRACIGHKFALQQVKLAVVELYRRYVFRHSPSMESPIQFDFDLVLAFRHGVKLRAIRRG

SEQ ID NO: 47077 - protein, 227 aa, Zea mays
  Coding DNA Sequence Number=SeqID_5298
  Subcellular localization annotation: CTP_CleavageSite=72; ConfidenceScore=5.12e-01
MERSLSCAERGSQYGAGAGAGAMNLRSYSASYERPTTAAPSTVQRARSVSSWSTPPAPPPVQRAGSTKSGPTAAAGGRAAPGLNLRSYSASYAASYGPTLADTGGQLKRSGSVTNWTSANRRSVNLRGRKLRAGADDAEVQRRRLVVYKTYGVEREGPGVGAPRRQLDQGQVLRRGLRLVVIDRQLPSPCPTGLSEWYYYGKTAVDGLFEKAGFGFTIVTVSQKPVK

SEQ ID NO: 47078 - protein, 201 aa, Zea mays
  Coding DNA Sequence Number=SeqID_5299
  Subcellular localization annotation: CTP_CleavageSite=37; ConfidenceScore=5.27e-01
MGRAGARPGRVMAGLTTPAAGSGSRDAREGRARRTRQAALRWPFAGGSGSGWGVLRRDYVSWPPQTAMKALPGARRALAALAGHTKFAKPPHPRTRCLHARAEIITGKRLGREIDACTAEKEEAVARDDRWGQKTAAPGPAVLGLGVAHARAGRWGAWRGAWSVLARGTPGPSQLGPMQREGALPVACRPRDEPVAAPAKA

SEQ ID NO: 47079 - protein, 104 aa, Zea mays
  Coding DNA Sequence Number=SeqID_5300
MARRKAESLSTRVHESVTTTAQGHPVADRSGPRVGDPPEQRAREGTLSFGPASSGRQAWARSLVSPGPPVRERKESTAARWPHMSARPRCRIGSRNGKWEMGPK

SEQ ID NO: 47080 - protein, 75 aa, Zea mays
  Coding DNA Sequence Number=SeqID_5301
MALTYHQRRGRPRSPPRMALTYLQRDEPSIDGLVNLAYAIGEFGKSTEAGVTYPSHALDMVPIRTLQVARGTHIL

SEQ ID NO: 47081 - protein, 92 aa, Zea mays
  Coding DNA Sequence Number=SeqID_5302
MRGTWRRADREARGGAGTGRHATARGQGGARRRWGRGWRSVAVGERVALGGGGGEGGAGTGRRAAAGAGRRAYRRSRRARGVIAGSLQQPCS

SEQ ID NO: 47082 - protein, 248 aa, Zea mays
  Coding DNA Sequence Number=SeqID_5303
  Gene Ontology: Mol. function=identical protein binding; Cellular component=cellulose and pectin-containing cell wall; Biological process=negative regulation of enzyme activity
  Homolog annotation: Hit_ID=Q6H733; Match level="QueryCoverage=94%, HitCoverage=27%, E-value=4e-75, Identity=66%"; Hit description =Putative subtilisin-like proteinase AIR3
MTVWGQFRPIGKEPATKARMINSIATDVEALYMSIVETRKVILNMKLIGARYFNKGYAAAAGALNASMNTPRDMDGHGTHTLSTAGGSPVPGASVFGFGNGTASGGSPRARVAAYRVCFPPVNGSECFDADILAAFDAAIHDGVHVLSLSLGGDPSDYLDDGIAIGSFHAVRRGISVVCSAGNSGPALGTASNLAPWLLTTGASTMDREFPSYIVFDHTKAKACNSSECPLARPPNSGLTKIKARTRP

SEQ ID NO: 47083 - protein, 119 aa, Zea mays
  Coding DNA Sequence Number=SeqID_5304
MVVMGSTSEKMYLCQDLVDVGLLIEDLLTGHMPHHGMVFEPHAGTVAGGDVVFCAAIVCLSLLSMIIFAASGSSGAGDGEEGVKPRRRGRSNGPVFVGGRGCGCGGCGAGAGVCGTYLS

SEQ ID NO: 47084 - protein, 157 aa, Zea mays
  Coding DNA Sequence Number=SeqID_5305
MPPEQYTVTGDGRPRAFQWWRRELSAFLLNSLHGATEDKGKGSGALLLISRTTPFYRREDRPSRCSTDPGRPGTALGHSRAIPTLAEVGADPWSWFVSESARAYPVGVRCSAERAPQVDETGRAGKRMRETARWGSSVGALRPVGVGPCDLVSPVGR

SEQ ID NO: 47085 - protein, 121 aa, Zea mays
  Coding DNA Sequence Number=SeqID_5306
MWEIRGGQEAGTDSPAFTGELQVGAPWEEQRCGRPAAWEMGREGLDTREGTRGNREQGAATMGKLEAERDQGRSRGGARAMGGSRRECHERSRARQPGDKADGKKGNIPGGGEDRGRAAWG

SEQ ID NO: 47086 - protein, 69 aa, Zea mays
  Coding DNA Sequence Number=SeqID_5307
MAQLAVDGQPSDQGGDGAALAARCGTAAKVPHRREIPGTRATNPANEAQWDPPCIVAKPPDRFSRTPRR

SEQ ID NO: 47087 - protein, 128 aa, Zea mays
  Coding DNA Sequence Number=SeqID_5308
MREIRGGREAGTASPTVTGELQVGAPWEEQRCGRPAPWEMGREGLDTREGMRGNREQGTTAMGKVEAERDQGRSRGGARTMGGSRRQRRERSRARRLGDKADGKIGNIPGGGEVSHSGFRGTKTRART

SEQ ID NO: 47088 - protein, 55 aa, Zea mays
  Coding DNA Sequence Number=SeqID_5309
MLAGLAWSLAAGVLGRYCWPLGYPPGDPARAQSFEGPEAVGGNHAEALSGRLNTD

SEQ ID NO: 47089 - protein, 68 aa, Zea mays
  Coding DNA Sequence Number=SeqID_5310
MEEFQAAVRGGDSRGSAEAEAEIYNAGGAEQCDVLEVSNNTEIAAGEARKPDLTAKKAKLGESMASAR

SEQ ID NO: 47090 - protein, 161 aa, Zea mays
  Coding DNA Sequence Number=SeqID_5311
  Subcellular localization annotation: CTP_CleavageSite=37; ConfidenceScore=5.14e-01
MANGQRGIGSARSVPWLGDCAWCMASGVGVTAAARSCADRVQGARWRLNVTSCNLMLNRVVNRPYPKLAFKFFGPYTILEKDVWPEEILDRRLVKKGGRAVPQNTEFTPNSSIVVLVGGLSRAHIAVILAVIHRHSRAWRCGDAEFFSDTDFTAANSSTHV

SEQ ID NO: 47091 - protein, 101 aa, Zea mays
  Coding DNA Sequence Number=SeqID_5312
MEQSRAEQGERRGDQSPLLLLGPKTVIKSRGVLETGFCLRARTGRGARKGEATFASSAGSAAPPRDTTRMCRPAFDSAPIGRQLAGLGIGSPFALAGEACE

SEQ ID NO: 47092 - protein, 753 aa, Zea mays
  Coding DNA Sequence Number=SeqID_5313
  Gene Ontology: Mol. function=protein binding; Cellular component =COPII vesicle coat; Biological process=ER to Golgi vesicle-mediated transport
  Homolog annotation: Hit_ID=Q9FG78; Match level="QueryCoverage=99%, HitCoverage=100%, E-value=0.0, Identity=56%"; Hit description =Protein transport protein SEC23
  Pfam annotation: Domain name=Gelsolin; Domain location=621-711; Score= 82.3; E_value=1.5e-21; Accession=PF00626.12; Description=Gelsolin repeat
  Pfam annotation: Domain name=Sec23_BS; Domain location=398-499; Score= 149.0; E_value=1.3e-41; Accession=PF08033.2; Description=Sec23Sec24 beta-sandwich domain
  Pfam annotation: Domain name=Sec23_helical; Domain location=512-612; Score=150.6; E_value=4.2e-42; Accession=PF04815.5; Description =Sec23Sec24 helical domain
  Pfam annotation: Domain name=Sec23_trunk; Domain location=127-390; Score=224.4; E_value=2.5e-64; Accession=PF04811.5; Description =Sec23Sec24 trunk domain
  Pfam annotation: Domain name=VWA; Domain location=131-386; Score= -20.1; E_value=0.1; Accession=PF00092.18; Description=von Willebrand factor type A domain
  Pfam annotation: Domain name=zf-Sec23_Sec24; Domain location=55-97; Score=37.9; E_value=3.4e-08; Accession=PF04810.5; Description =Sec23Sec24 zinc finger
  Pfam module annotation: Pfam domain module=Gelsolin::Sec23_BS::Sec23 _helical::Sec23_trunk::VWA::zf-Sec23_Sec24; Domain location=621 -711::398-499::512-612::127-390::131-386::55-97
MDFAELEAVEGLRWPWHSWPPTAPAAASLVVPTAVLCSPLQHPTAPDLLPLLPYAPLRCASPGCGAALNPFSRVHHGSARWSCPFCGATGNPFPRLLAPDALPAELFPTHSSVEYSLPPDPAEAGGPGPPALVFVIDAATAAEELAVLKDEVRRVVQGLPEGIRVALVTFAASVWVHDLGFEGCARVVVLNGERELESDKIQKLLGVHRSPYKKLAMPRSTEAQRFLLPVSECEFNITSAIEDLSSMSACPRGHRPLRATGAAISTAIALLEGCCSPSTGGRIMVFTSGPATVGPGCVVETDLGKAIRSHRDIFNSNAPLTDKARDFYKKVAKRLTDHALVLDLFACSLDQVGAAELRNPIEVSGGLMVHTESFESEQFKSCFRHMFKREGANNLNMNFNATIEIVTSKEVKICGALGPCISLRRKNSSVSDKEIGEGGTNYWKTSSLSSKTNIAFFFRVDCSRKAEPPTVFFIQFMTRYRAGDGSYRLRVTTVARRWAAPRSPEIAAGFDQEAAAAVMARLAVYRAETYHVRDVIRWLDKMLIRFTAKFGNYVSEDPSTFRLSTNFSLYPQFMYYLRRSQFIDVFNSSPDETAFFRLMLNREGVVGSLIMIQPTLFQYSFDGPPIPVLLDVSSISPDVILLFDSYFYIVIHYGSKIAQWRKLGYHKDPNHENLRKLLEAPEVDAEALLVDRFPVPKLIKCDQHGSQARFLLARLNPSVTQKTQLSEGSEVIFTDDVSLQVFIEHLQELAVQG

SEQ ID NO: 47093 - protein, 573 aa, Zea mays
  Coding DNA Sequence Number=SeqID_5314
  Homolog annotation: Hit_ID=Q109H1; Match level="QueryCoverage=10%, HitCoverage=20%, E-value=6e-18, Identity=73%"; Hit description=Alpha- galactosidase, putative, expressed
  Subcellular localization annotation: CTP_CleavageSite=54; ConfidenceScore=5.03e-01
MAMAMATATTSEPGGLCCVQAFPNQHGHMNNPPAGPGARDPTVHPSGSDTRACNASARGAASPRVASNRDAVSPLPPLLVVDEPNRVVASPSPLPPVVYEPYRDEAMAGADARAHYCGYLPCERGGLATAWQPGGLFDRGVYSDEQRFEEPISADNCGADARQEVALAARVLAADTCAAGILDGAAPFAATSEKHMAPVASPSPSSFLTTTTAARVAVVETTTSNSPPKCSAKCLNVSSTPNLALGDPEEPENIVASEPIVDKPVTSANTKTFPHEIKELAVNVYDKGLRLEIYSKVGFQTCAKAHSGSLGHEEQDAKTFAAWGVDYLADPVSYSEEYGLLFDIYHSTSTEDRILTTMPTSTSTLLHSSLTYALPGASLPNLALLSSMSLEHASLCAHHVLEELSTRIDDLFSNRIGSMSTLMAYGSELRVVRADKSRRSPVGKIRELNEDIIVPEYYYAGGDKLQSLNAWFGPEGNIQRIVELQSLNLNSRPSLSLVVSLETSTSPPILWPSRGPLNMFAMVLCTLEEADQSFIFYSISSLGASKTNEFGDQGNFSIFVLDPGDHDVQPIKG

SEQ ID NO: 47094 - protein, 72 aa, Zea mays
  Coding DNA Sequence Number=SeqID_5315
MRQPRAPLAGGTGLSGVHRTVSVDVTLLYELYTLGSLLPKRYVAAYGNSEPTYTTLYGNPDATYTTQAYPDV

SEQ ID NO: 47095 - protein, 547 aa, Zea mays
  Coding DNA Sequence Number=SeqID_5316
  Homolog annotation: Hit_ID=Q5QTN8; Match level="QueryCoverage=41%, HitCoverage=79%, E-value=2e-73, Identity=60%"; Hit description =Calcium homeostasis regulator CHoR1
  Pfam annotation: Domain name=XH; Domain location=403-543; Score= -46.9; E_value=0.07; Accession=PF03469.5; Description=XH domain
  Subcellular localization annotation: CTP_CleavageSite=77; ConfidenceScore=5.84e-01
MNPCSGLAHPSLRTWTHSLSTRPKRSRCGSSAASRRSAARRPPSSGATRLARHRTPRRATAAVLDVPAFTPNLALPTAATATRAGPGAGATATATARSRPGCAASCENPARKAACVAMPRWFLQLDSARAVARLVHLCLLHFTPWSPLYIAAQVQLACVYHQFIINSIPSEEAGTLPLFYPIRLSPFGHSPVRGRVADGEERVRGEREDGSPVDSRRGSATRRGTTAGRADAVSTAARPPSSESIIQALNRFVHEQIRRAPRRGHHTYVRRQPHLRESMGALPVAHSLALTAAFLPCRRPAAHGRCRRRRYRAVVAYMEPNPNSPAAIAGRLVGALPIVGLVARILNDEGGVGGDIIDFAEFRRRVSKKCTVMDSKAFYDFNQRRGKPGDPFYVLLCCWLAAIGAGLLKTEEILEGVARLRISNDIEFEEETFIDMMRAAKEKRAKLKAPAPQIPMETRAEKALEAIYVCCFGQDMVEDEDEKLLRAILNAVFPSVGRAAVERMVASMAKQVASGERKRDGRTVSKEVQQRQLKDLEFLKQNKLESS

SEQ ID NO: 47096 - protein, 237 aa, Zea mays
  Coding DNA Sequence Number=SeqID_5317
  Homolog annotation: Hit_ID=Q69L77; Match level="QueryCoverage=22%, HitCoverage=19%, E-value=2e-09, Identity=53%"; Hit description =Putative brix domain-containing protein
MDIMVDQFEHCASTKIFQVGVPYSDPLADGPVIQRPSGFEQLDGQVKVLQIEGAVPPGADLVAGGVAGEDPEAEIGGADLALQCRDAGQDMPEWKPDQFASARPERTLFGFKDPVPDAEPASIDVEVAVAPFWNREKVLITCSRRITYIKQKIPLDGEVFWRVNGNQFETAARPYAFIKIGMRLRLCRRTLQQVLLRNKGMYHESHEFGGHMFNALLEVFPVLRFAFCCAKLNIQIH

SEQ ID NO: 47097 - protein, 373 aa, Zea mays
  Coding DNA Sequence Number=SeqID_5318
  Gene Ontology: Mol. function=sulfate adenylyltransferase (ATP) activity; Cellular component=intracellular; Biological process =sulfate assimilation
  Homolog annotation: Hit_ID=O48888; Match level="QueryCoverage=99%, HitCoverage=69%, E-value=0.0, Identity=89%"; Hit description=ATP sulfurylase
  Pfam annotation: Domain name=ATP-sulfurylase; Domain location=1-359; Score=591.9; E_value=5.9e-175; Accession=PF01747.8; Description=ATP -sulfurylase
MVNMSVPIVLSVGDAQRRAIQADGATRVALVDERDRPIAVLSDHEKNTFFIVDIYPIANENNDVHVNYCITCWYDNIEIYKHNKEERVARTWGTTAPGLPYVEEAITNAGDWLVGGDLEVIEPIKYNDGLDQYRLSPAQLREEFARRNADAVFAFQLRNPVHNGHALLMTDTRKRLLEMGYKNPVLLLHPLGGFTKADDVPLSWRMKQHEKVLEEGVLNPESTVVAIFPSPMHYAGPTEVQWHAKARINAGANFYIVGRDPAGMSHPTEKRDLYDADHGKKVLSMAPGLERLNILPFKVAAYDTKQKKMDFFDPSRKDDFLFISGTKMRTLAKNRESPPDGFMCPGGWKVLVEYYDSLVPSEGSSKLREPVAA

SEQ ID NO: 47098 - protein, 375 aa, Zea mays
  Coding DNA Sequence Number=SeqID_5319
  Gene Ontology: Mol. function=protein serine/threonine kinase activity; Cellular component=cytoplasm; Biological process=protein amino acid phosphorylation
  Homolog annotation: Hit_ID=Q2QSJ1; Match level="QueryCoverage=84%, HitCoverage=84%, E-value=3e-55, Identity=40%"; Hit description =Protein kinase domain containing protein
  Pfam annotation: Domain name=Pkinase; Domain location=47-355; Score =139.3; E_value=1.1e-38; Accession=PF00069.15; Description=Protein kinase domain
  Pfam annotation: Domain name=Pkinase_Tyr; Domain location=47-352; Score=-15.9; E_value=1.7e-11; Accession=PF07714.7; Description =Protein tyrosine kinase
  Pfam module annotation: Pfam domain module=Pkinase::Pkinase_Tyr; Domain location=47-355::47-352
MAAASNLVNGGVAALQIEGEPEEPQSQTNAAAALAPVPWLPSVAERYERREKLGEGMFGDVYEAWDRVHDHLVAVKRLSGRTNDRFVKTSIPEFAREVMSLAACRGHPSIVQLLATHVDGNRADGDCFAVTEHAGPMNLRQYMDARRANGDPFDEDEVRDVMRQLLAGAEHTHGAGVLHRNIVPENVVVGMDGATSKMVYKICGFGMSKPAAQTDKDDSGLLASPSPYRAPELFLGSKDYDGRVDTWSLGCIMAELVTGAGVPFFGGALDKEVFDKMMHVVGTKGIVKWQGLERVAPREKVASLQKVGHRERGYLHKMFPPKVLSSAGFKVLEGLLHSNPDRRLSAADALRMPWFRRRCSLGACFMPHGASMKSG

SEQ ID NO: 47099 - protein, 523 aa, Zea mays
  Coding DNA Sequence Number=SeqID_5320
  Pfam annotation: Domain name=WD40; Domain location=135-175; Score =2.1; E_value=21; Accession=PF00400.22; Description=WD domain, G-beta repeat
  Pfam annotation: Domain name=WD40; Domain location=72-122; Score =14.5; E_value=0.38; Accession=PF00400.22; Description=WD domain, G -beta repeat
  Pfam module annotation: Pfam domain module=WD40::WD40; Domain location=135-175::72-122
  Subcellular localization annotation: CTP_CleavageSite=27; ConfidenceScore=5.51e-01
MASSAAPPASPSSRSHGNAAGAGSSATAMMLPGPPGRGNGGCIDLSPAGLLAHGAGSSVVVSDPRSMQLLCVLPMPSSSLASFVTAVRWAPPDTPSLDDDDDDRRPLRLAAGDRHGRIAVWDARARAVLHWLNLDEARGVAPGSGGGVQDLCWVHHGSGWHLASIHGPSLLCIWETSNSPRVLWMFDAAPEYLSCLRRDPFDARHLCAIGLRGFLLSAIPRQDSDISLQEHRVNCGAGDVADLQRLEKEISAPVPAPALAAFPLFSSRICFSPLWRQILFVTFPRELIVFDLSYSTALSVTPLPRGFGKFSDVMADPDIDMLYCTHLDGKLSIWRRKEGEQVHLLCAVEELMPSIGTVVPSPAVLAATIWQSESIFRSIEKQCQDLAQPHSFMIDTNSDQNACQGTMTYLTSISEDGKIWSWLLKFDKSALPSKANLGANLCDHSSANEIIYSTVKPTNVSISATNIGKEPGGGNNPAPAVPLVALGTQNGTIEVVDVVANAVSASFSVHSSTHVASLIGLTF

SEQ ID NO: 47100 - protein, 668 aa, Zea mays
  Coding DNA Sequence Number=SeqID_5321
  Homolog annotation: Hit_ID=Q6YXY7; Match level="QueryCoverage=55%, HitCoverage=69%, E-value=1e-110, Identity=50%"; Hit description =Putative WD repeat domain 11
  Subcellular localization annotation: CTP_CleavageSite=27; ConfidenceScore=5.04e-01
WTLPAAPRPGQNASSKQSSTSKERSAEASGAESSDETCESFAFALVNGALGVFEVHGRRIRDLGQSGPRHHLHLQMVWLLLWLTAFPMFTHREGIRRIKFSPVVHDPLANALLQPQSPGTLVLELDWLSTRTRKDEPLMLCIAGADSSFRLIEALRMILQLGVKPSWFECNSSDKLTGDSFKVAPTFGDLRSYMIETTLPPIGDAVVAELLLKVLEPYRKEAIVNKGACARFAFAAAIFGDFQEALFWLQLPQALRHFLASRERSASEKFTKNAANYGQLSSMAFNQEQLWFNASERIPWHDKLDGEDALQKHVHELVSLGNLEAAVSLLLSTPPEGSNFYPNALRAVVLSSAVSQSLHELAVKVPLAPPDSLQHRRRLLSSSSAAARLHPPPVSPAALHLFQRPTPPTSVLSSAPPPLQQSSAARPALPSFILKQPLQDAGCWNDAATLAASHLHGSDYARVLQRWADYVLRGEHNMWRALILYVAAGALPEALDTLRKSQRPDTAAMFLLACHETYSQALSESEPEDDTSVLALTPTPEQTEKLRFPSKNVADEDLIAVSEVFGQYQQKLVANSFQVSAKLFVLSVGRYQTSRHDIGTADVAESDGRRQEQTCSASECAANFSCGRDEMRTDAIEAAADDILTPALETSLSLDPSSLPIRADIVLE

SEQ ID NO: 47101 - protein, 202 aa, Zea mays
  Coding DNA Sequence Number=SeqID_5322
  Subcellular localization annotation: CTP_CleavageSite=29; ConfidenceScore=5.38e-01
MPSVPPAAPNGSNSNTLNQNMPFLPDTIPSTALQDNSLRNGGSSSIVNGAPSDDQFMYTGKVVHGLPGGMDASSSLLTAHNPAVGQFNGHNGATIKTEFGYSSNSDFGFSNEAVFLEQSVGDVSGASFSSSELNGQPLGGPILDTDSSSYGFLSQIPRNFSFSDLTEDLSQSAEILENYGRSPFIPSDANNFPESTAGEHTG

SEQ ID NO: 47102 - protein, 143 aa, Zea mays
  Coding DNA Sequence Number=SeqID_5323
  Gene Ontology: Mol. function=protein binding; Cellular component =anchored to membrane
  Subcellular localization annotation: CTP_CleavageSite=69; ConfidenceScore=5.13e-01
MHMSHLNFGVPPNSMCKDTATFPAAAFTLPELWALFLVGCFKNPDVVAAFTLTPASKLSSLRLQQLSVRANLSLSGALPPQLASMRSLQVLTVLQNALIRGAVLNDIGALASLVHLDLSYNSLADHGSHCPKRPCSLPQRWPP

SEQ ID NO: 47103 - protein, 130 aa, Zea mays
  Coding DNA Sequence Number=SeqID_5324
MAQRDDLGASLCVAVAERLGKQAHPKTRAGAAALGRTGAAARTGWAVTAAKGEERGGKEERWSSPAMAGRRRPRRAADGGGGERERRGGGERRKETLDTILEIAVAAATMDPAEQETLLRVMESVSSDRD

SEQ ID NO: 47104 - protein, 76 aa, Zea mays; identical to SEQ ID NO: 44547
  Coding DNA Sequence Number=SeqID_5325

SEQ ID NO: 47105 - protein, 118 aa, Zea mays
  Coding DNA Sequence Number=SeqID_5326
VGSSMEGGSGVDHPIVKREKVRRRSVCREGQGRGSDRATERGSRQRGFDRHEGDLSTGKDKRSWYVTARLRVDLNAITKNKVHGLIEGYKDAPNKLAIVKEDAHNDPVRIGRSPLIVA

SEQ ID NO: 47106 - protein, 170 aa, Zea mays
  Coding DNA Sequence Number=SeqID_5327
  Pfam annotation: Domain name=zf-CCHC; Domain location=79-96; Score =10.5; E_value=0.018; Accession=PF00098.13; Description=Zinc knuckle
MAHEIWSTIEKFHERNDHVMTSRDENGMGTRDGYRIREVKILAIIESPNYKSLIMDEMFNKLKSIEIDHQTRAKIENLDGCFNYSEPDHYVACCPKKGKQEAGPHDHVSGRPKGKREYTFGKHKSMGGFNKEALKKKYLQIAKIKECAFLSSLSNLDHDSNDATYSSSVE

SEQ ID NO: 47107 - protein, 619 aa, Zea mays
  Coding DNA Sequence Number=SeqID_5328
  Gene Ontology: Mol. function=cAMP-dependent protein kinase regulator activity; Cellular component=protein serine/threonine phosphatase complex; Biological process=protein amino acid dephosphorylation
  Homolog annotation: Hit_ID=Q6K3D4; Match level="QueryCoverage=95%, HitCoverage=71%, E-value=1e-178, Identity=74%"; Hit description =Putative PKG-Ib
  Pfam annotation: Domain name=PP2C; Domain location=112-388; Score =108.6; E_value=1.8e-29; Accession=PF00481.12; Description=Protein phosphatase 2C
  Pfam annotation: Domain name=cNMP_binding; Domain location=411-557; Score=15.9; E_value=0.0099; Accession=PF00027.19; Description=Cyclic nucleotide-binding domain
  Pfam module annotation: Pfam domain module=PP2C::cNMP_binding; Domain location=112-388::411-557
MGCSASKCCSQLKCSLCSNGCLGQAPDSPRESRGKSSRGRGRVDSSGSDDSSGDDLGEDDDAFNHMNATRESTAGISRLSRVSSQFLPPDASRKVQVPLGNYDLRYSFLSQRGYYPESLDKANQDSYCVHTPFGPSPDDHLFGVFDGHGEYGAQCSQFVKRRLCENLLRDNRFRTDAVLALHSAFVATNTQLHADNLDDSMSGTTAVTILVRGKTIYVANTGDSRAVIAEKQGDDIVAVDLSIDQTPYRFDELERVKECGARVLTLDQIEGLKNPDVQCWGTEESDDGDPPRLWVQNGMYPGTAFTRSIGDSVAESIGVIADPEIFVLDLNSNNPFFVLASDGVFEFLSSQTVVDMVSKYKDPRDACAEIVAESYRLWLQYETRTDDITIILVHINGLTDKFLDVLSLKKLKQLDVKAHIERGGEGDCFYVVGSGEYEVLAIQGVELLTCSLHSCFATAGHNKPLQASVRAVTSGTLWALKREDFRDTWDLISAETKQAQSSRENGNYVLDIDEGGHFGEWSLIGETIAFTAIAVGDVTCSTIMKEKFDSIVGPFPKLSQADSKIKESLVTLENVADGDFPFRRVKLSDLEWKMCIYAADCSEIGLVQVRGYGMLMDSA

SEQ ID NO: 47108 - protein, 94 aa, Zea mays
  Coding DNA Sequence Number=SeqID_5329
MVVEVLKKYEIYLHQLTPSAIMRLGVFIWALYRNQRSSSRTLGIECLAIEVEWSMPEPKGDGDMKYAVRQTVCQSDYQTDWQTELQSDKVDQTG

SEQ ID NO: 47109 - protein, 58 aa, Zea mays
  Coding DNA Sequence Number=SeqID_5330
MARWRARSRRRPRCRGAVGDGATAWRAAAAAREKRGKSTTMLMKQDVRICPYRSRKDS

SEQ ID NO: 47110 - protein, 235 aa, Zea mays
  Coding DNA Sequence Number=SeqID_5331
MVRRPQLQQGASALRVSAWAGWCELGSARARTSYSGVAAWRRHWGRSFGEGRVVQKRCREEEMKGGLGIHGAAALAVQHVRVREWEWRGTGGEEEGPSSRPSIKMDPYLRTVIIGAEVTRLGANINSVEVPAHRADVTLTWPELIAMSIAADLVLFANTATDMHASNKKDQARLCIFWCAKTLLVYRPFFMVQLLYSLKSNATYVRSSSILALGGAVDLASCFRALKMDEQYRSK

SEQ ID NO: 47111 - protein, 140 aa, Zea mays
  Coding DNA Sequence Number=SeqID_5332
MAMELSWIEVAAPTWRNGCRSLVPTVLYRVNRVVIALDGLWYARQNTENYTYSEFVQVYYAAFLVTKSYRDVASSPSLMLPAAQHVCCRLSVRKMPAVVCAQLPSISSKAQSNQAVTGVADSTRTATAESREVVGGAGSD

SEQ ID NO: 47112 - protein, 78 aa, Zea mays
  Coding DNA Sequence Number=SeqID_5333
MAASGGNRLLGRPRLLVVVQIRPLAAIHRVAPSLHLLLREVWIVGVRGPWISDLTVDVADRFELDKNLIATVQVALNS

SEQ ID NO: 47113 - protein, 253 aa, Zea mays
  Coding DNA Sequence Number=SeqID_5334
MTTKRSKAPKIHDESTPIASEATPEVECRLCLRKFLLHESKEQRFKSEEEEDKEQIAPVMSLFFDIDKGESKEKDTVGTILTAEDIALSNVVAIVPRGPKVDLAAIAVTPLTIVVVEEKIGSSKPAIAEDKAKGQQGMKRLKMPLKMTHPLVKGPSIKDLVAEKAMLSTMSSKDFSNYLANMHLKGLFLSKALKNKRNVKGEAVHEEIVKLRSEAFSSASASSKEKNFSDGDLEGLMRWVLSEIRAYKSILSA

SEQ ID NO: 47114 - protein, 114 aa, Zea mays
  Coding DNA Sequence Number=SeqID_5335
  Subcellular localization annotation: CTP_CleavageSite=18; ConfidenceScore=5.04e-01
MKLWKETSRSSKTTTSSRCGLAATPSRLPVKAAVIYVSFPHFDLFKAMSHLTGLAHIAKTTLDDREVFVVELSSELVEKDPHIEKMGTHTRELEEQVDVWDNTIEVLENQLHDL

SEQ ID NO: 47115 - protein, 171 aa, Zea mays
  Coding DNA Sequence Number=SeqID_5336
MDIEVSHVKRKEIPLFVFPGGVCPSRTSRTTHKNSCAIPTRDVSADDQVGNLLGVASCSDAQHNLLRVNIQNTIRKKDVNAENNLEIGSKNNLEQICSLRPQESNNNLKRKVNQELEELDESKKEQYWKILVLSPQVGVGRLEDSITVGDGAISGGRGCNVLADNGLKNTG

SEQ ID NO: 47116 - protein, 75 aa, Zea mays
  Coding DNA Sequence Number=SeqID_5337
MTVRHHVLSQPNPHRRMGTVEPVHRDLSVRVSTVTRRLTDIWRARGCKGFDKIFVVHHDDHQPNPLAYEVAIIGH

SEQ ID NO: 47117 - protein, 76 aa, Zea mays
  Coding DNA Sequence Number=SeqID_5338
MGKEAIELQAGYPSEIQLPFGWVWSWRAIPLGVLVPLGASHRVLPYSIPFRPFGRWHDGVVTALPVTGVPPAVMHF

SEQ ID NO: 47118 - protein, 244 aa, Zea mays
  Coding DNA Sequence Number=SeqID_5339
  Gene Ontology: Mol. function=DNA topoisomerase (ATP-hydrolyzing) activity; Cellular component=chromosome; Biological process=DNA topological change
  Homolog annotation: Hit_ID=Q6Z8D9; Match level="QueryCoverage=80%, HitCoverage=12%, E-value=1e-104, Identity=93%"; Hit description =Putative DNA topoisomerase II
  Pfam annotation: Domain name=HATPase_c; Domain location=67-216; Score= 55.5; E_value=1.8e-13; Accession=PF02518.16; Description=Histidine kinase-, DNA gyrase B-, and HSP90-like ATPase
MTGPLHSSSGHNAAAGGGGKTIEEMYQKKTQLEHILLRPDTYIGSVEKHTQTLWVYEDGAMVNRSVTYVPGLYKIFDEILVNAADNKQRDPKMDALRVEIDVDGCSISVYNNGDGIPVEVHQEEGVYVPEMIFGHLLTSSNYNDNEKKTTGGRNGYGAKLTNIFSTEFVIETADGRRQKKYKQVFSENMGKKSEPQITKCKQGENWTRVTFKPDLAKIYEQVNDRWEVCVSQSEGQFQQLRNLV

SEQ ID NO: 47119 - protein, 126 aa, Zea mays
  Coding DNA Sequence Number=SeqID_5340
MAGCCIAVHLPGRASREAREHYEVLVAEVCLMRRGRERSLGQARRAALLRRQCATTCSGTMAWTGSPGSATRRLGTPIFAANAAMASHGQAGTTPDRAPGTAAGRGHGDPLTRHTRAPASNACEHA

SEQ ID NO: 47120 - protein, 66 aa, Zea mays
  Coding DNA Sequence Number=SeqID_5341
MQKTREWGGASCWMAGAGGNAAKAGELDGDGELAVVESRCELAAAMNGWWAHKHKSRRRTSVAGQK

SEQ ID NO: 47121 - protein, 87 aa, Zea mays
  Coding DNA Sequence Number=SeqID_5342
  Subcellular localization annotation: CTP_CleavageSite=38; ConfidenceScore=5.19e-01
MDLSYPTGSLLGGKIQIHAKEKAMRHRDRPSPRRGPSRSTKGRSRSYSAPDSLVHPRIEGNQGLPNGVPTAPRSLRAIKDPLGAMEK

SEQ ID NO: 47122 - protein, 80 aa, Zea mays
  Coding DNA Sequence Number=SeqID_5343
MAIILYWVYTFTFLPIVLYWVYTDGYQLILHPLERYRLHTLDEEEEKFISLCTVLQYCERSAWQITTIRVTGAWSRFFDI

SEQ ID NO: 47123 - protein, 217 aa, Zea mays
  Coding DNA Sequence Number=SeqID_5344
MDAPEAWSSASSSPEFELWPLYPNPAASPSCADELFAEAGAGSPLPSPCRCADYTIAGVVGHGSAWTHAQLQRAEDAARCVDIVAETVASRLRTSSIVQQSHGMGADPVLGSAQGVPTRGGCVGQDFFSSIQQNEHRVREAAVVPQQFGPPSHATRDAATGSEDEPDRAPQIRFMGEVHREHERKRSRSRSPSADRDRYRRRHSQSRRGLRRWVTAK

SEQ ID NO: 47124 - protein, 106 aa, Zea mays
  Coding DNA Sequence Number=SeqID_5345
MDTTLDLRCDRGKLVAKSGNDRVAAPSAIARRTSPPSWVPLLAAGVPLHNVIVGEGLFSKFIVVVPPSSTGRAKLRVLRARDRGAPTIPCRAGASATVLLDLGEGK

SEQ ID NO: 47125 - protein, 512 aa, Zea mays
  Coding DNA Sequence Number=SeqID_5346
  Gene Ontology: Mol. function=signal transducer activity; Cellular component=spindle; Biological process=cell division
  Homolog annotation: Hit_ID=Q6Z8D3; Match level="QueryCoverage=99%, HitCoverage=100%, E-value=0.0, Identity=82%"; Hit description =Putative WD-40 repeat protein
  Pfam annotation: Domain name=WD40; Domain location=224-262; Score =24.9; E_value=0.00029; Accession=PF00400.22; Description=WD domain, G-beta repeat
  Pfam annotation: Domain name=WD40; Domain location=266-303; Score =13.6; E_value=0.71; Accession=PF00400.22; Description=WD domain, G -beta repeat
  Pfam annotation: Domain name=WD40; Domain location=308-346; Score =40.8; E_value=4.6e-09; Accession=PF00400.22; Description=WD domain, G-beta repeat
  Pfam annotation: Domain name=WD40; Domain location=359-397; Score =16.3; E_value=0.11; Accession=PF00400.22; Description=WD domain, G -beta repeat
  Pfam annotation: Domain name=WD40; Domain location=447-485; Score =33.4; E_value=7.9e-07; Accession=PF00400.22; Description=WD domain, G-beta repeat
  Pfam module annotation: Pfam domain module=WD40::WD40::WD40::WD40::WD4 0; Domain location=224-262::266-303::308-346::359-397::447-485
  Subcellular localization annotation: CTP_CleavageSite=46; ConfidenceScore=5.54e-01
MDAGSRSISSAKNRAAAVAAAPRPPLQEAGSRPYMPSLSSGPRNPSAKCYVSPLVLVLERVGCSTFCLTKLGSFSPPPSHVCVLQGDRFIPDRSAMDMDLAHYLLTEPRRDKENASGMAASPSKEAYRRLLAEKLLNNRTRILAFRSKPPEPENVSFADTTSSNLQAKPAKQRRHIPQSAERTLDAPELVDDYYLNLLDWGSNNVLSIALGDTVYLWDASSGSTSELVTVGEDSGPVTSVSWAPDGRHMAVGLNSSDVQLWDTSSNRLLRTLRGAHEARVGSLAWNNSVLTTGCMDGKIVNNDVRIRDHVVQRYEGHSQEVCGLKWSGSGQQLASGGNDNLLHIWDVSMASSMPSAGRNQWLHRLEDHMAAVKALAWCPFQSNLLATGGGGSDRCIKFWNTHTGVCLNSVDTGSQVCALLWNKNERELLSSHGFTQNQLTLWKYPSMVKMAELNGHTSRVLFMAQSPDGCTVASAAADETLRFWNVFGTPETPKPAAKASHTGMFNSFKHIR

SEQ ID NO: 47126 - protein, 128 aa, Zea mays
  Coding DNA Sequence Number=SeqID_5347
  Homolog annotation: Hit_ID=Q6Z0Z4; Match level="QueryCoverage=50%, HitCoverage=19%, E-value=3e-11, Identity=42%"; Hit description =Putative HGA1
MGASAAGRQGQQDKQGVEGQGYIEREWRTRPYACYHDPVAMAHVHEYTLKPLSEPAVAPVCTRTHQFWGRVQLLLSGMKETVVTKVTSASYTEEYLFMVVTTANKGSAVPSYYGATMSIDSSQVLPDD

SEQ ID NO: 47127 - protein, 756 aa, Zea mays
  Coding DNA Sequence Number=SeqID_5348
  Gene Ontology: Mol. function=ATP binding; Cellular component=nucleus; Biological process=regulation of transcription, DNA-dependent
  Homolog annotation: Hit_ID=P59278; Match level="QueryCoverage=25%, HitCoverage=36%, E-value=1e-09, Identity=28%"; Hit description =Uncharacterized protein At1g51745
MGFEKCDGGTWDWYNLEKSKRVKAFRCGEFDACIEKAEATQGTLVKKREKYARREDAILHALELERKQLASKYQTQGFRPGPPGNISACTKHHKDLGSTRYKSKKGKKRKDASVPPDVKKEVGQCFLPAGSKRNFSGSLTQGNLVSNHMGDFSPLGHSHGGATLENKESTVVKKNRSDGSDFEDSLVSKSDRRRPLSQVLQSSENLLPHLKQNDDFGALLIAESNNPSLAASWSRRNKYTYMASDSGETESHSDLPSIKMSSTRTDFENESYLQHPVYFSEEQTSDFIEKQITESSERECSESETEDDAELLQNASVILRTESHAPCPYSIPVSDKFKHVDYDDNEVIYSTYMPQLNEYEEEDGSSELGVSQWHMKGKRNNRNAVKRLVDMRDGNTWLNKYNGSLKGSLHNTNGGNPRKEGMHTSGEQFFEESFYQIKEEPNYDSDETNLFENMSHSETNLYYGKKYPSSLRTTRDLSRGYSYFNDSSNVSPLNKDTERIYHVDRNAYWDRPSFYQRKLTSSFGGMGPMLFNVNLKVQASYQGEHVPLVSLMSRLNGKAIVGHPIQIEIVEDGSTAVFCGDSGMQETTAAPPAWPTGRRTAMQRVPRSNPSGALLDGDNEGGLVYSDYETKPTLRKYSSSSNHQVKVNNKISSNAKRSSAKPPKKSSKKTNLSSQKLRALSSISTAKNHHGEGGQAKANWHNDIFGGLIGSEGAVPLVTCVPTKVVFTRILEAVGRPPLSAARRVRMASPPVRDPP

SEQ ID NO: 47128 - protein, 582 aa, Zea mays
  Coding DNA Sequence Number=SeqID_5349
  Gene Ontology: Mol. function=phosphoribulokinase activity; Cellular component=chloroplast; Biological process=reductive pentose -phosphate cycle
  Homolog annotation: Hit_ID=P26302; Match level="QueryCoverage=71%, HitCoverage=100%, E-value=0.0, Identity=84%"; Hit description =Phosphoribulokinase, chloroplast precursor
  Pfam annotation: Domain name=PRK; Domain location=238-437; Score =399.3; E_value=5.7e-117; Accession=PF00485.8; Description =Phosphoribulokinase  Uridine kinase family
MKEGEELNTDKIHYSLRMNERKNSILTKYTTRCEMRVNERKVNERKNSMLTKYTLSLRMNGRKTNEGKNSMLTKYTRWEWMKGRTHFQLIIISCPRYYEGETKTKRKIGTRHIIAILISSCYLVAPQSTPTIPFSLSSPLQGPCHPHKAWTLGPAGGEEDKTNAAAGMMAICSAHTTTISLRSPCTTTVSNAAAGLVQKQVIFLTSINRRSGSRRRGGGVSRTLLQVSCSADGNKPVVIGLAADSGCGKSTFMRRLTSVFGGAAEPPRGGNPDSNTLISDTTTVICLDDYHSLDRTGRKEKGVTALDPRANNFDLMYEQVKAIKQGQAVQKPIYNHVTGLLDPPELITPPKIFVIEGLHPMFDERVRDLLDFSIYLDISDEVKFAWKIQRDMAERGHSLESIKASIEARKPDFDAYIDPQKQYADAVIEVLPTQLIPDDDEGKVLRVKLIMKEGVDKFNPVYLFDEGSTISWVPCGRKLTCSYPGIKFAYGPDIYFGNEVSVLEMDGQFDRLDELIYVESHLSNLSTKFYGEVTQQMLKHADFPGSNNGTGLFQTIVGLKIRDLYEQIVAERAGAPVEAAKV

SEQ ID NO: 47129 - protein, 83 aa, Zea mays
  Coding DNA Sequence Number=SeqID_5350
MAYERSIVQLCPLNCNFALKKFWDAIYNRCVSQWSERFVPNKLRGKGTNGVSDHNYGFNSAAGVLKGVGTFCMDYQTAVFEKI

SEQ ID NO: 47130 - protein, 124 aa, Zea mays
  Coding DNA Sequence Number=SeqID_5351
  Homolog annotation: Hit_ID=Q6QP54; Match level="QueryCoverage=63%, HitCoverage=32%, E-value=4e-08, Identity=46%"; Hit description =Putative kinase
THSTSAPKDGLRLARPQGSDSASTSEDELRLARPQGPDSTSEEPPPRPTSGSDPPRHRKAIITLPLASSGCGGQDRRPIWLASGLDHGTTASLGGADEGVARRRTCQFGSPMAGEHTGAGGQGG

SEQ ID NO: 47131 - protein, 93 aa, Zea mays
  Coding DNA Sequence Number=SeqID_5352
MAPTLAPGGGPTLICTVAEVPRSGQRQGHARGYGLAPRRPEEGSLEPSAGNEGAPPLVEDAAQDEKGVTVSHMRRVSDLKANTELQKEYSLLL

SEQ ID NO: 47132 - protein, 364 aa, Zea mays
  Coding DNA Sequence Number=SeqID_5353
  Gene Ontology: Mol. function=protein serine/threonine kinase activity; Cellular component=cytoplasm; Biological process=protein amino acid phosphorylation
  Homolog annotation: Hit_ID=Q6Z8C8; Match level="QueryCoverage=99%, HitCoverage=92%, E-value=1e-169, Identity=72%"; Hit description =Putative serine/threonine-protein kinase Mak
  Pfam annotation: Domain name=Pkinase; Domain location=1-225; Score =162.0; E_value=1.6e-45; Accession=PF00069.15; Description=Protein kinase domain
  Pfam annotation: Domain name=Pkinase_Tyr; Domain location=1-225; Score=-26.9; E_value=8e-11; Accession=PF07714.7; Description=Protein tyrosine kinase
  Pfam module annotation: Pfam domain module=Pkinase::Pkinase_Tyr; Domain location=1-225::1-225
MKKKYYSFEECMGLREVKSLRRMNHPNIVKLKEVIRENDILYFIMEYMECNLYQLMKDKVKPFSESEVRNWCFQIFQALAYMHQRGYFHRDLKPENLLVSKDVIKLADFGLAREVSSLPPYTEYVSTRWYRAPEVLLQSSAYDSAVADEIHKICNVIGSPDEQSWPQGLSLAEAMKYQFPQIKGSQLAEVMTTASSDAIDLISSLCSWDPSKRPKAAEVLQHTFFQGCTCVPLPVRPKASSLPRTPPCVGSKGNSENSVARRFSTGTLSTMKSHSNASAKLNGLSKTGNPVLRHSRSLPETGRGAIQKVSSITEKLSQMSVTSRTRSAVKPAAPMMKAGHGKSDFLGKSDDIPPAKRLTRKLVS

SEQ ID NO: 47133 - protein, 164 aa, Zea mays
  Coding DNA Sequence Number=SeqID_5354
  Subcellular localization annotation: CTP_CleavageSite=30; ConfidenceScore=5.04e-01
MTPPRRIARSCKACNPSREPSARPGGRPARARACSRYLTREAAAAGRQGANPGEEGQGRCSSLELISSSEAGSSKQIPLLLSIVVVGVAGQFAWRRGGNIWCAFANRGAAGGWRRPGEDCSAAAKGFKMLACIACSAKDGGDQDGSRAATPHGRDAGKSLTSQG

SEQ ID NO: 47134 - protein, 72 aa, Zea mays
  Coding DNA Sequence Number=SeqID_5355
MWDCGQPSVAAICLLDEAQTVRGQGQYGPRPGVGLGFPPDGPDGPRVRRGDGVRRRCLNLALGRDPIREERS

SEQ ID NO: 47135 - protein, 59 aa, Zea mays
  Coding DNA Sequence Number=SeqID_5356
MTGGGGGKAHAAGEWLAEATNTNKQNNLLGCELNLPPKLHPPLSLKAGGVGDLFSKAMN

SEQ ID NO: 47136 - protein, 104 aa, Zea mays
  Coding DNA Sequence Number=SeqID_5357
MTKGPRRYENVTPYESSPEAEPWDPPHVITGTSTTYLPHEQHLWWFTYNWRARGCKGSTKIYVVHHDDHQQNPVAYKVAIVGHQPSSAFDTYEDGPSHCLTEEV

SEQ ID NO: 47137 - protein, 83 aa, Zea mays
  Coding DNA Sequence Number=SeqID_5358
MWQQEELCDGGGQQQRSASLHKQQKLDDDGVQQRRDSRVCAQSSSGGRAQSRARKERRAQPWERKGVTIGFSDFETISGKEIS

SEQ ID NO: 47138 - protein, 102 aa, Zea mays
  Coding DNA Sequence Number=SeqID_5359
MKNKDQHRPTLRGGPDDQIFDDDQLSDDDQLSDDDELSNDDQLLDDDQLSGDDQLSDGDQLSGDDQLSNDDQLFDGQLRWPTLHQSASGDQFSIEQPGEAEI

SEQ ID NO: 47139 - protein, 89 aa, Zea mays
  Coding DNA Sequence Number=SeqID_5360
MAIFSRVVKKLCVGPDPGSPQPQSTTLGQQQHPTPPRGQLQDRHVAREYDMLQGINTLVSGWKLINLDDLNVGWLGVFAAKSETLMGYS

SEQ ID NO: 47140 - protein, 254 aa, Zea mays
  Coding DNA Sequence Number=SeqID_5361
  Gene Ontology: Mol. function=calcium ion binding; Cellular component =membrane; Biological process=homophilic cell adhesion
  Homolog annotation: Hit_ID=Q6QP51; Match level="QueryCoverage=83%, HitCoverage=76%, E-value=3e-15, Identity=40%"; Hit description =Putative growth-regulating factor 1
MTDLGRVRNYVLWADLLGTTQMYTYWHCMLASRTVRSAECRQSRSDRSHFAAPLTDLTGKRRRLPAPTVVPLDRVRLTAAKSSLGRHRKLCLARPRARTQPRPCKTVSASPDPKARTQPRPRKTVSTSPDPRARAHPRHRTTDSASPDPRARTQPLPRKTDSASPTTGLGLSLGLGRRSPPRPTPGLGLSLDLGRRTPLRPTPGLGLSLGLGRRSPPRPTPRPGLSLDLGGASASPDLGLGPATSQGRPSLPYP

SEQ ID NO: 47141 - protein, 98 aa, Zea mays
  Coding DNA Sequence Number=SeqID_5362
MTLGRTLLRRAPRPRPHSRGEDKLPRPWSWRTCGTFGGRSRRRFTSAIMTASKKGPGKGILRKGSFSTKEAGPSPLLIRGSKADPSEGFDSRLRALGL

SEQ ID NO: 47142 - protein, 237 aa, Zea mays
  Coding DNA Sequence Number=SeqID_5363
  Homolog annotation: Hit_ID=Q3E0G9; Match level="QueryCoverage=57%, HitCoverage=22%, E-value=1e-10, Identity=30%"; Hit description=Ig -like, group 1
  Subcellular localization annotation: CTP_CleavageSite=91; ConfidenceScore=5.28e-01
MESSGAPDMSGGAPDTVRWHTGQSGTRCKPNSLSLSLALGVIGSSASPDPGLELSLDPGRRSLPRPTPGLGLSLGLERRSPPRPTLGLGLTLDAGRQTPPRPTVGLGLNLYLGRRTASPDPRARTQPRPRKTVSASPDPRARTQPRPRKTDSASPDPRARTQPRPRKTVSTSPDPRARTQPRPRRSLRLARPRAWTRHVTGKAIITLALASSGYGEQDRRPIWLAPVTSNDGTPRAP

SEQ ID NO: 47143 - protein, 276 aa, Zea mays
  Coding DNA Sequence Number=SeqID_5364
MAGFHHPLRLGSVIRFESLEFMSLGNEYDMILHPPVPLERPSSRHRPSRRRRQRWSNRDRATQGTPCIGGAIRMDDGIEPLSKDLASVHISLGVSQAAPAPTFLAPPPPMWETPVPHIIERAVSTTPALPPAGWEEPNAPWRYMARVGGEPSVFNPIPFQLSFNTSSITQMLRDPEFMLQFLYVCDEMLSESSEGYSFGGEGYDPTQECFHVDLEILKEGDHLGMPREGDQPPPCNPDGAQTPPGSHATHLEQLRELHNKLGEEQQCLQRLRQALD

SEQ ID NO: 47144 - protein, 496 aa, Zea mays
  Coding DNA Sequence Number=SeqID_5365
  Gene Ontology: Mol. function=RNA-directed DNA polymerase activity; Cellular component=mitochondrion; Biological process=RNA-dependent DNA replication
  Homolog annotation: Hit_ID=UPI00004C1731; Match level="QueryCoverage =99%, HitCoverage=43%, E-value=1e-162, Identity=75%"; Hit description= UPI00004C1731 related cluster
  Pfam annotation: Domain name=RnaseH; Domain location=90-211; Score= -6.8; E_value=0.00025; Accession=PF00075.14; Description=RNase H
  Pfam annotation: Domain name=rve; Domain location=244-420; Score =89.8; E_value=8.6e-24; Accession=PF00665.16; Description=Integrase core domain
  Pfam module annotation: Pfam domain module=RnaseH::rve; Domain location=90-211::244-420
MGCLAALSRFISCLGERGLPLYRLLRKTEHFTWTPEAEEALRNLKALLTNAPILVPHAAGEALLIYVAATTQVVSAVIVVERREEGHALPVQRSVYFIRAGAGLLFISPLKKHLRYVLRLHFPASNNVAEYEALVNGLRVAIELRVRRLDACGDSQLVIDQVMKNSHCHDPKMEAYCDEVRRLEDKFYGLELNHVARRYNETADELAKIASGRTTVPPDVFSRDLHQPSVKTDDTPEPEKASALPEAPSAQLEAPSTPPEAPSAPEGEALRVEEERNGKAPGGFTHLLVAIDKFSKWIEVRPLNSIRSEQAVAFFTNIIHRFGVPNSIITDNGTQFTGIKFLNFCEDHHIRVDWAAVAHPMTNGQVERANGMILQGLKPRIYNDLNKFGRRWMKELPSVVWSLRTTPSRATGFTPFFLVYGAEAILPTDLEYGSPRTRAYDDQSNWTSREDSLDQLEEARDMALLHSTRYQQSLRRYHARGVRSRDLQVGDLVLRL

SEQ ID NO: 47145 - protein, 563 aa, Zea mays
  Coding DNA Sequence Number=SeqID_5366
  Gene Ontology: Mol. function=transporter activity; Cellular component= membrane; Biological process=oligopeptide transport
  Homolog annotation: Hit_ID=Q6ZGW7; Match level="QueryCoverage=99%, HitCoverage=96%, E-value=0.0, Identity=73%"; Hit description=Peptide transporter-like
  Pfam annotation: Domain name=MFS_1; Domain location=22-494; Score =12.3; E_value=8.7e-05; Accession=PF07690.6; Description=Major Facilitator Superfamily
  Pfam annotation: Domain name=PTR2; Domain location=84-482; Score =364.7; E_value=1.4e-106; Accession=PF00854.12; Description=POT family
  Pfam module annotation: Pfam domain module=MFS_1::PTR2; Domain location=22-494::84-482
MDRRGNPAVKTTTGRWRSAILLLANYGLATCAFFGVGVNLVVFLRRVLHQGNAEAANSISKWTGTVYIFSLIGAFLSDSYWGRYVTCAVFQIIYVMGLVVLSLASWLLLVKPSGCGGVKAHCDGPSAPGVALFYLSTYMIAFGNGGYQPSIATFGSDQFDETDPEEARSKVAFFSYFYLALNVGSLLSNTVLVYYEDSGRWVMGFWVSAAAAALALVLFLLGTPGYRHFKPSGNPLTRVAQVFVAALRKWRAEVPRGELLHEVVEAGEDPKVSGIRKILHSDGLRFLDKAATITEEEEEEGPWRLCTVTQVEEVKCILRMLPIWLCTIVYSVVFTQMASLFVEQGATMDTNIGSFHFPAASMSLFDVLSVLAFIAIYRRVLVPVMARLSGNPQGLTELQRMGVGLVIGMAAMVVAGVVEVERLKRVAAPDQPSSLSVLWQVPQYALIGASEVFMYVGQLEFFNGQAPDGVKSFGSALCMASISLGNYVSIMLVSVVTSLTAGEKRPGWIPGNLNSGHLDRFYFLLAALSLVDLAVYVACAMWYKGIKLDGGDGDNRRKVSAHV

SEQ ID NO: 47146 - protein, 618 aa, Zea mays
  Coding DNA Sequence Number=SeqID_5367
  Gene Ontology: Mol. function=nucleic acid binding
  Homolog annotation: Hit_ID=Q9FKY7; Match level="QueryCoverage=97%, HitCoverage=59%, E-value=1e-137, Identity=42%"; Hit description =Arabidopsis thaliana genomic DNA, chromosome 5, TAC clone:K2A18
MEDYPEELRTPPVSLVSIVGCPELHPSISAALSSQQPPMNTLALPDFAKVSILARSGKPRDPLAPPHPPAGILKKDWLLKHRTRAPAAVAALFRADQVSDDPAQWLKACSDLENLKSAIQRKNTKLLVVLVQAQASDELSEDVTVALRKRAEIDSNHLVVLVEHDEAEWNRSLNKSVAIYAEFRRDWPEALKFYEEGVRVLREMIGTSTRLPPTQRLVEIKAVAEQFHFKISTLLLHAGKAVEAITWFRKHIRSYARVLGTPEVAFLHWEWFSRQFLVFGELIETTSTTIPDTLSPRFGTADYGLTEWEFQPAYYYQLAATYLREKSLSDTEYTSYALSEAERFQDSYEIIALFRKAYESFQSLGATRIASVCSGGMAMEYYAAGDFSNAKQLFDNVAGLYRKEGWTTLLWENLGYLRECSMKLNSPKDFISYSLEMAALPLFSRSEEENRENKIKSGPAGSPTISRRENIQQEVINVLERNQSSEGTDDGFNNAMEEVTHLDIDQISSLRMVLTTSVAFLDQSVKPGSPLLVSVSLLSHLPSPVVVDQLEVQFNQSDCNFVIHSRQEDSPPFYSNLHDQVVQDTSLTLFTNRWMRLTHEAKSGTNVMIRNLDNTSFH

SEQ ID NO: 47147 - protein, 113 aa, Zea mays
  Coding DNA Sequence Number=SeqID_5368
MAKGGGGGQREGSALKRAAIVAGGLALAWVTVETAFRPLMGRLRAAISSSTDTARDPDQEEPPAPASAAEAEKASAPEEPAAVEEKVEEKVVELEEKVEEAAADKAEVLEAEN

SEQ ID NO: 47148 - protein, 139 aa, Zea mays
  Coding DNA Sequence Number=SeqID_5369
MTIEFVSRPPPCTGGNKARGISAESSIMETAGSIREDPQAEYHLHMEKAHGSLWSYSTELGDANIVRKIISLLPQQKYGSIITILHTMDDLSTMILTIMIGKIATFKMSQKMGQEELTSLRPYAFACDENVTPRDPQTP

SEQ ID NO: 47149 - protein, 173 aa, Zea mays
  Coding DNA Sequence Number=SeqID_5370
MGHTRSLLPLALFFLSSVSERGVNRRGRAPIPTAHPRFDSVLLPLASWVSPWLDGVSPPFDLCGDLDDDDIDEPVTVVPKDRRLPAAAPTPNGHNNHLLRFTRSLQRPAQNPNPSPNSPPSPPLATAEEQVEKVKLDGISVARWRLPLPSTCASTAEFAASTAEFDLVEPTTK

SEQ ID NO: 47150 - protein, 48 aa, Zea mays
  Coding DNA Sequence Number=SeqID_5371
MVCVACLLPLFLIPVVNALPYLIDLIICVQLFESPGGMEDIVFFCAGK

SEQ ID NO: 47151 - protein, 303 aa, Zea mays
  Coding DNA Sequence Number=SeqID_5372
  Gene Ontology: Mol. function=isomerase activity; Biological process =cell redox homeostasis
  Homolog annotation: Hit_ID=Q5EUC7; Match level="QueryCoverage=83%, HitCoverage=89%, E-value=1e-141, Identity=87%"; Hit description =Adenosine 5'-phosphosulfate reductase 3
MARLLLWWTALLLPSLLAGVGPAAAAAASPPHDACLVPTIAQSVLRTPDTCSTLDRRLGDPVGVIEECKPNFETLAYLFPAIRHFAFEESAIRPSIISRYGIHGFPTLFLLNSTMRVRYHGPRTVKSLAAFYTDVSGINASVKSTAGEAMVHPLDDIEHKKDAEQENCPFWWARSPENILQQDTYLALATVFVILRLLYRIFPKIDSFTRWAWRRHNMFAKLMGAHEYFLTYLEQARQKFHRLYPSSSKRGNLQEGAMNATAWASKSLASVSIGEPSAIGRTNSTTNPNLGVLLSDLQVQQHL

SEQ ID NO: 47152 - protein, 699 aa, Zea mays
  Coding DNA Sequence Number=SeqID_5373
  Gene Ontology: Mol. function=zinc ion binding; Cellular component =cellulose and pectin-containing cell wall; Biological process =metabolic process
  Homolog annotation: Hit_ID=Q6Z692; Match level="QueryCoverage=99%, HitCoverage=99%, E-value=0.0, Identity=76%"; Hit description =Putative early-responsive to dehydration stress protein
  Pfam annotation: Domain name=DUF248; Domain location=132-694; Score =476.0; E_value=4.7e-140; Accession=PF03141.7; Description=Putative methyltransferase
  Pfam annotation: Domain name=Methyltransf_11; Domain location=298 -393; Score=12.7; E_value=0.0031; Accession=PF08241.2; Description =Methyltransferase domain
  Pfam module annotation: Pfam domain module=DUF248::Methyltransf_11; Domain location=132-694::298-393
MSRALYRGVSGIGGKLAAADEAYAYYDPKEPSENSIGGGFGRGGARKRHLADAAVKVGVLLLVAAALVGSVAWAGTLYAGRGAAARAAAAAAHRGYRRLQEQLVADLLDIGELAGGGARAKEAEVCPPEYEDYVPCYYNVTDAVDVSDLGAGVAISYDRQCTRDGRVTCLVAPPRSYRIPVRWPSGKGFIWKDNVRISGHEFSSGSLFKRMMVEEDQISFPSDAHMADGVEDYAHQIAEMIGLRNEFNFNEAGKYCMLSRLAGSAGLFLLNLTNIHAQCAGKCMSEFTTVPAKVRTVLDIECGFGTFGAHLFERDLLTMCIANYEASGSQVQITLERGIPAMIGSFATKQLPYPYLSFDMVHCAKCNIEWYKNDGIFLVEVNRLLRPDGYFVWTSNLNTHRALRDKENQKKWTAIRDFAEGLCWEMLSQQDETIVWKKTNKRDCYNSRKSGPELCGHDPESPYYQPLNPCISGTRSQRWIPIEYRTTWPSQARQNSTELDIHGVHPEVFADDTSSWDSMVRNYWSLLSPLIFSDHPKRPGDEDPQPPFNMLRNVLDMNAHFGGFNAALLKAGKSVWVMNVVPTDAPNYLPLIFDRGFIGVQHDWCDAFPTYPRTYDMVHADGFLSLQKNHKHRCSTLDIFLEVDRILRPEGWVIIRDAAPLIEAARSVVTQLRWDARVLDLDIASDEKLLVCQKPFLRK

SEQ ID NO: 47153 - protein, 148 aa, Zea mays
  Coding DNA Sequence Number=SeqID_5374
MPIKQSRSATLAGKRICKSTPPAERRICMSVVNREIAITVANPALWSPKSTVWPPLEFALATALSYASLRLGDTYSPRGRCSGNGGFRLGHSRHRIQWLEMGDDLIQGLIAHTGSMKVASNLGHQILIRRPGIEDTSSCSAFCIRSPR

SEQ ID NO: 47154 - protein, 210 aa, Zea mays
  Coding DNA Sequence Number=SeqID_5375
  Homolog annotation: Hit_ID=Q43864; Match level="QueryCoverage=30%, HitCoverage=23%, E-value=6e-11, Identity=80%"; Hit description =Annexin p35
MTNDVRGNFFRKGKEKERDLSRIEPQNIQSVQFDFSHQCCKELILGGQVSDPVRSVQQEKIIRKPENPDDLSPRHCKPSYGSSREVFRLQNGPEMCLLLAHHSSASSMITSLSIMKLVPAVRDISFRKLQHGMNQLDLATRGRIRDSLYRLASSLEQRHCGGLGSSGSNRFASGGGGFAETQADPMDRSVARLLLQKPSYRKTAPPHRRP

SEQ ID NO: 47155 - protein, 113 aa, Zea mays
  Coding DNA Sequence Number=SeqID_5376
  Subcellular localization annotation: CTP_CleavageSite=65; ConfidenceScore=5.38e-01
MATEIHKSSPIALSQHATTLPLLAGRHSPHRQLCPVRKLPLLAGRHSPIRQPRFFASRVASVSPCAVSRRGRIQSRRDETRIGVGAWREDSTQSAGCRHTVLRQPMTAAKVYS

SEQ ID NO: 47156 - protein, 63 aa, Zea mays
  Coding DNA Sequence Number=SeqID_5377
MTENGIRFDVKPPSSGGLIDIGSVMTGDEPLPISIGIGEEKSCAAVRWGVVWRQFINGGVPEN

SEQ ID NO: 47157 - protein, 252 aa, Zea mays
  Coding DNA Sequence Number=SeqID_5378
  Subcellular localization annotation: CTP_CleavageSite=56; ConfidenceScore=5.21e-01
MPRPPPPGRGTPGARRPIRDFFATWLATLRSPLLPLLRRALSTSSSSGSWDDPLSSAAAAVEAHFQAHWSALDAAARQDPTRVIAAGDWRSPLELPFLWLGDVHPSLLTSLLRTLSPSPRLLAAVDRVDRRIRTAVPAVSDRLRQAQEAFVAAEATGAADVEAFLAELKGVALEANRLRRGVLSDLVAAAGGYQAALYLEALSRFVLSMHDPEVLRRFDQCRASPPKLSEYQSGIELHFYGHPYEGLSGFLI

SEQ ID NO: 47158 - protein, 87 aa, Zea mays
  Coding DNA Sequence Number=SeqID_5379
MGQLLRQSLKIEDKICTAVRAVLRNMSVAMMSSPNRWSIQDQAEAEAGGGELVAQQYTETLLHYPLEDGIMLAVKYLLLRIPSRTGC

SEQ ID NO: 47159 - protein, 431 aa, Zea mays
  Coding DNA Sequence Number=SeqID_5380
  Homolog annotation: Hit_ID=Q109A0; Match level="QueryCoverage=43%, HitCoverage=100%, E-value=5e-23, Identity=42%"; Hit description =Expressed protein
MAAVRLRWIEGGHGDVMGQEAPNRVPWTWARPRILCVRERASREWPSAIKPSARQLQAKPSMHHDLYIQIPYIDTKYVLVTNLKHSNRSVCLTIYTNECVLASTVAATALALLHHHPQGQHRTAVSHNDRCISGAGRLMPEKPPPLRRRPTAAGSWVRSLHCKSMAADDVAARVAAAPKKLLPRAGCGGSSGDTLNHVVVSSKPSRPKPKPKPKPSPEPKTTNKPKPVPVPPSPPPGPLGPVPALTELPAGHSSRQVVEIIFLSSWSSPPPGAPTSSSSTFPGAVVEMLFRVHNPARAVARFEDYRAAVRARAGGASRSAADGNEMMRFTPAPPYGSSAAAAAAAGEDGPRVRTFDGSGGAHASARGPATGRRAMFLCRVIAGRVAEGAGAHAAAAAGKEHFDSVRVGRGGELVVFDRRAVLPCFLIIYKL

SEQ ID NO: 47160 - protein, 237 aa, Zea mays
  Coding DNA Sequence Number=SeqID_5381
  Gene Ontology: Mol. function=nucleoside-triphosphatase activity; Cellular component=membrane; Biological process=cell division
  Homolog annotation: Hit_ID=Q1SK92; Match level="QueryCoverage=63%, HitCoverage=19%, E-value=7e-46, Identity=58%"; Hit description=AAA ATPase, central region; DEAD/DEAH box helicase, N-terminal
MYLLFEKLLNKLEGPVLILGSRIVDMNSDEESNDRLTVLFPYNIEIKPLENENHLVSWNSQLEEDMKMIQFQDNRNHIMEVLVENDLECDDLGSICLSDTMCLISYHLMNNKDPEYRIGKLVLSTKSLSHALEIFQGNKISDKDIMKLEATDDALKKIVFYVCPRGTNLSITLEAARVGEAASRPPPGSARPPAARLGEADGRQEPRAVGPHHDLRRTGQGAPRSGGESERARQQTG

SEQ ID NO: 47161 - protein, 240 aa, Zea mays
  Coding DNA Sequence Number=SeqID_5382
  Gene Ontology: Mol. function=catalytic activity
  Homolog annotation: Hit_ID=Q6H699; Match level="QueryCoverage=76%, HitCoverage=79%, E-value=1e-42, Identity=52%"; Hit description =Pollen thioesterase-like
  Pfam annotation: Domain name=4HBT; Domain location=120-206; Score =32.9; E_value=1.1e-06; Accession=PF03061.12; Description =Thioesterase superfamily
MKSKLLRQGMWLDNDDVGRTPCFVGWSASKMRHLAEAGQWIKVLEVSLHNPAAGRLLCGPSRRRPRLAALQATVPTTTNAARRPSEVVCPKNIVRDTKLPRAGKFFELEMTVRDCDLDVYGVVNNAVYAGYIEIARQEMLASLGVCTASIVRTDRAMALSELNVKYFAPLKQRGAKFVVMVRVVQIKGVRMLMEHLIATLPDRKLVLEATATVVCLNQEYRPTRMFPEMAKLLPFFSHPN

SEQ ID NO: 47162 - protein, 246 aa, Zea mays
  Coding DNA Sequence Number=SeqID_5383
  Gene Ontology: Mol. function=catalytic activity
  Homolog annotation: Hit_ID=Q6H699; Match level="QueryCoverage=80%, HitCoverage=66%, E-value=8e-30, Identity=40%"; Hit description =Pollen thioesterase-like
  Subcellular localization annotation: CTP_CleavageSite=58; ConfidenceScore=5.15e-01
MELGSMRLRCCPQAPPNKIKPLPRTISAGARRLCSRRRRAGALLHVAAPDSRPLETVCADSTGQGTKPSIVDDAMYRDDDKFCLVEMEVRDCELDQYGLVSSDVYVDYLENGRQHCNMGCASASRSIITSPISFLFLLGSYLAREVFASRLGIGRDSIARTGNALALSEQKLNYYTPLKRGARFVVMVRVVQIKGARMVLEHFVETLPPERKLVLEATATVVFLDKDYRPTRVFPEVASKMRLHFF

SEQ ID NO: 47163 - protein, 404 aa, Zea mays
  Coding DNA Sequence Number=SeqID_5384
  Homolog annotation: Hit_ID=Q6H697; Match level="QueryCoverage=27%, HitCoverage=45%, E-value=3e-49, Identity=84%"; Hit description =Peroxisomal protein PEX19-like
  Pfam annotation: Domain name=Pex19; Domain location=1-129; Score= -12.8; E_value=1.5e-05; Accession=PF04614.3; Description=Pex19 protein family
MVGIAAGDALSDSEDMDSIVETMMQQLLSKEILHEPMKDIVEKYPKWLEDNKDKISKEEYGRYNNQLELMVKLIEVYENDPENMTRIFDIMQNMQECGQPPSDLVQDIVPDLDLSKLGQLATQKDNNSLVGFLASIRIRSSWSPAKEAGCSARVRAGQDGRARGRIEGVTADPARKATTTTDPTMKTVVWPKCASQPLRRQRSSISGDIRPLARQATVAPACGCTDNSWRRTGEGEEVPHGRWGLAGSEGDASVAEGPLGAPTSCLGGGTPGAVWLRRWVHAGGREIQWWSLRTTEYPERARRGGDASWRRCTTSKSPTTAYGTGGQRPGTRPWEGGGGSVVCRQEVGGGEGGRPPSTQGKRGEPRDRAGEEGFGVACGSDHEDIGVDGSGGEGGRRCGRRPCR

SEQ ID NO: 47164 - protein, 112 aa, Zea mays
  Coding DNA Sequence Number=SeqID_5385
MGVVWPLIIDLRHVHFTQPIDHRLVTRTPHSTYVSLPYVTFFDFWWRPFLGQKSVAFGIMENGRSWLFSTKMGVVWPLIIDQRLVHLTPDMFPCHRSHSWFSGGDHFLVKNP

SEQ ID NO: 47165 - protein, 250 aa, Zea mays
  Coding DNA Sequence Number=SeqID_5386
  Gene Ontology: Mol. function=DNA binding; Cellular component =mitochondrion; Biological process=DNA integration
  Homolog annotation: Hit_ID=UPI00004C1731; Match level="QueryCoverage =84%, HitCoverage=14%, E-value=1e-112, Identity=92%"; Hit description= UPI00004C1731 related cluster
  Pfam annotation: Domain name=rve; Domain location=4-151; Score=56.0; E_value=1.3e-13; Accession=PF00665.16; Description=Integrase core domain
RIRTSSAPTEAPGGSTHESLPSTKYYKWIEVRPLNSIRSEQAVAFFTNIIHRFGVPNSIITDNGTQFTGRKFLDFCEDHHIRVDWAAVAHPMTNGQVERANGMILQGLNPRIYNDLNKFGKRWMKELPSVVWSLRTTPSRATGFTPFFLVYGAEAILPTDLEYGSPKTRAYADQRNQANREDSLDQLEEARDMALLHSARYQQSLRRYHARGVRSRDLQVGDADTYGFLTNKLSRPKIQNVIYDIETYVG

SEQ ID NO: 47166 - protein, 125 aa, Zea mays
  Coding DNA Sequence Number=SeqID_5387
  Subcellular localization annotation: CTP_CleavageSite=52; ConfidenceScore=5.17e-01
MARACMPSKAGSLWSPSGQATKQQDAKRRPPSPPDVLAPGLLPKLLGHRGPRVTAGCRSLDGAPLLLDDQEEEEAAQAPPCEHQRLLGALPCSCCSVIRRYPRRAYSSTSNLFTTAVRTLLVTKS

SEQ ID NO: 47167 - protein, 270 aa, Zea mays
  Coding DNA Sequence Number=SeqID_5388
  Gene Ontology: Mol. function=adenyl-nucleotide exchange factor activity; Cellular component=mitochondrion; Biological process =protein folding
  Homolog annotation: Hit_ID=Q6K635; Match level="QueryCoverage=85%, HitCoverage=70%, E-value=9e-99, Identity=78%"; Hit description =Putative co-chaperone CGE1 isoform b
  Pfam annotation: Domain name=GrpE; Domain location=63-232; Score =169.3; E_value=9.6e-48; Accession=PF01025.9; Description=GrpE
MPLCMGGIGFEGFLDLCEKEDPETEVTGESAADDSAGSTDETPSIIVTTLQSYRVALINDDDAKAAEIESFLLSIEDEKNSLLNKITALDVELATQRERILRISADFDNFRKRTENEKLNMMENVQGELIESFLPVLDNFERAKMQIKVETEGEEKINNSYQSINKQFIEILNSLGVEDVETVGKPFDPMLHEAIMREESSEYEEGIILQEFRKGFKLGERLLRPAMVKVSAGPGPENSGDDDPTVVEDSVAPQKVEDVEEDGFDDGDAE

SEQ ID NO: 47168 - protein, 39 aa, Zea mays
  Coding DNA Sequence Number=SeqID_5389
  Homolog annotation: Hit_ID=O24560; Match level="QueryCoverage=55%, HitCoverage=13%, E-value=7e-07, Identity=100%"; Hit description =Ubiquitin carrier protein
MGKKVSIAHLRAHNRLDAQVSIAHLRAHNRLDLHQVDEE

SEQ ID NO: 47169 - protein, 149 aa, Zea mays
  Coding DNA Sequence Number=SeqID_5390
MNDRRLPPPLHPPARNPAAAARNPARHQSRRDQSHPHARPHLKHHESRVSPAAEPASTRTPPAEPLPTSARPPAPDLRKPRRASNRLLKPRRKPHRTQLHFHRTDLRVRGLLAAGDHGAPRLRSRSPPPPTRPPNLQKKKRETHCLRSD

SEQ ID NO: 47170 - protein, 370 aa, Zea mays
  Coding DNA Sequence Number=SeqID_5391
GGSSEVEVESEPLGRARRRPSAEARAESEPWGRARRSSSSSGAEAESKPWGRARRSSSSSGAEAESEPWDRARRSSSSSGAEAESEPWGRARRSSSSSGAEAESEPWGRARRSFPWRPRPDLAAVSLTLSSGTAVGAAQAALSSCQASQWSGEAILALNAPAIRSVVVAIWPRLLLGEDWALGEPKALRSTWKARRRRPNRRNHCPCVSISRALHGRRGLANANRSAPSKSAPCSPLLLRSTWKELLVPKSTESLLADGGLDPRSALSPALALYMEGKVGAPITLALVLYMEGGDGAQIDGIKLLANGCGGFGGAGGRDMGLSGRDDAWAPALLRNPAPRPSDGITHSSFRCAMGSSSGKRSSIFDDELL

SEQ ID NO: 47171 - protein, 55 aa, Zea mays
  Coding DNA Sequence Number=SeqID_5392
DVRRQIRILEMRKRALLEEQQSLIVKAALRGSKEEEVFLAGVNPVASTSVLLSHL

SEQ ID NO: 47172 - protein, 161 aa, Zea mays
  Coding DNA Sequence Number=SeqID_5393
  Gene Ontology: Cellular component=mitochondrion
MQAYRFLEPAVPEINENAHLVALFSCSPFEYYRVRWLGFGEILEVVKLLRETLVHTFSGFRLEFTSRDGGGAPLSRLLLQVLGLLVALNEEKGQLNIGIPLRRWGNRLTVALGRLQKEGLEFNLTNGASITKGRTITLTSTKARDPDLNQGMESNATRKRF

SEQ ID NO: 47173 - protein, 286 aa, Zea mays
  Coding DNA Sequence Number=SeqID_5394
  Gene Ontology: Mol. function=structural constituent of ribosome; Cellular component=small ribosomal subunit; Biological process =translation
  Homolog annotation: Hit_ID=Q9GCB7; Match level="QueryCoverage=84%, HitCoverage=58%, E-value=1e-102, Identity=80%"; Hit description =Ribosomal protein S2
MKASRPVVWYVVVIVRAPLRNKEKVDSTIPWKLDKRINYSIPANDPMRLVYLFRNSITKTVILERKRITAKNRTPRSHLSSCTEKSAARIIIHSREVSSWAELGSELLPVVANYLQIYSEGAVPQPQGGAAQVVQGTPTPAPQEAPLPSIVPPSCYSLTGYVEDWVACNPTFMSDALNENMMGRGSLVHSSGFPAASGSGPSLNPAVASTPSSSFFQGVGSALEAAAAPAEPGEEVQQGAIEALNVAALPGVPQDELFGAMEQNLGTARPSSGSSGPACSSNSSRY

SEQ ID NO: 47174 - protein, 139 aa, Zea mays
  Coding DNA Sequence Number=SeqID_5395
MDKAYFCAFHLPPASRQRYPGPYSYIHVNEWMGSTENALSLGMVHHMPVISLKLGIGEVRHGIEVVEWCDLVCLVSMEGQKTSTDDYYSPAESHSFPLKGPKDMSKKLFQIKDLPILRSTRILLLLIDTDEKEFRKAIL

SEQ ID NO: 47175 - protein, 62 aa, Zea mays
  Coding DNA Sequence Number=SeqID_5396
METRYSPYCKYVVRLRSEKFCEEVIKKRKARKRRLLTFALFQSCSIAIYQLWLIINQFLVRV

SEQ ID NO: 47176 - protein, 67 aa, Zea mays
  Coding DNA Sequence Number=SeqID_5397
MPQYHGPDAHPSRDLDLDHDHDHDHDHVVWEIRDQEMDARVRQQQAMAEGSKTDFVELALNGKNYLT

SEQ ID NO: 47177 - protein, 99 aa, Zea mays
  Coding DNA Sequence Number=SeqID_5398
  Subcellular localization annotation: CTP_CleavageSite=22; ConfidenceScore=5.38e-01
LNLVISSLLPNTGSWAIKAGARCDVVARSGLRLRRGGSSVYSPNRGDSSIAALAGRCGNGAAVVAAGAGAIVFVQGRRTRGRRSDILRLGFDLACLIHA

SEQ ID NO: 47178 - protein, 142 aa, Zea mays
  Coding DNA Sequence Number=SeqID_5399
MGKNKKRKREPTPPSEEFGDSEYSEEEFSSESEGSPAPIPLRESSDDSDDSQGLVAEVWTYIRAVECSGLESSDESEFSSGEEDSDGGEDEDDDDDDGDDDDGGDGDGDGGNGGGGSGGKGGSSVGSTGGGGGKGSGSRASG

SEQ ID NO: 47179 - protein, 384 aa, Zea mays
  Coding DNA Sequence Number=SeqID_5400
  Gene Ontology: Mol. function=protein serine/threonine kinase activity; Biological process=protein amino acid phosphorylation
  Homolog annotation: Hit_ID=Q9SLZ6; Match level="QueryCoverage=43%, HitCoverage=32%, E-value=4e-73, Identity=83%"; Hit description=OsPK4
  Pfam annotation: Domain name=Pkinase; Domain location=10-252; Score =139.0; E_value=1.3e-38; Accession=PF00069.15; Description=Protein kinase domain
  Pfam annotation: Domain name=Pkinase_Tyr; Domain location=10-207; Score=-65.1; E_value=1.8e-08; Accession=PF07714.7; Description =Protein tyrosine kinase
  Pfam module annotation: Pfam domain module=Pkinase::Pkinase_Tyr; Domain location=10-252::10-207
MRGGLLLGLYELGRLLGHGTFAKGYHARHADDTGETVAIKVLDKEKALRNDLVPHIKHEIAILRRVCHPNIVRLFEVMATRSKIYFTMEFVRGGELFARVAKGRLKEDTARRYFQQLISAVGFCHAHDIFHHDLKPENLLVDERGDLKISDFGLSAVTDQFHPDGLLHTLCGTPSYVALEVFACRGTKHIRLLRDALRPPIFAQRLLAAYARSGSLASRHRSRALTIPSPPPSSDLTPPHVSTARADILVHGGWRGWVHHAEAFEALPKEHAANHGKFVALQQSIQSYLGVCGPFLPSPPSHWDLMAVDDGVVMVFVWSMSFQIASRGLQQRTRSSRRLGQLDACSTGRRPSWCLLLQPLRLAIETKHVKVVEAHESTPPPRNY

SEQ ID NO: 47180 - protein, 95 aa, Zea mays
  Coding DNA Sequence Number=SeqID_5401
MGTLPGGFFAECSTRQRGRHSTKLSIVSSAVGGYLLEEDLDLNRMLGRRHSVDLSRQRATTKKVIYQSQSQSQSQSQSQSQSCTTPARVYLYILR

SEQ ID NO: 47181 - protein, 57 aa, Zea mays
  Coding DNA Sequence Number=SeqID_5402
  Homolog annotation: Hit_ID=Q5XTZ4; Match level="QueryCoverage=51%, HitCoverage=9%, E-value=2e-07, Identity=76%"; Hit description=Salt -inducible protein kinase
MGHLMDMKGYIDSVRWDVKATIVEFWREAAILLKLHHPNVLGFYGIVNNGPGGHWQP

SEQ ID NO: 47182 - protein, 122 aa, Zea mays
  Coding DNA Sequence Number=SeqID_5403
MAGLMALARETGAAHGASDRDSRCRGTRGIASGAAPAPQAAAAQEQRRGHKGNSDTSDEASTWRMDTEAVFDIGGDEQQGGCASRELVGGASDMVPDVAVRLAAGAERTKMSINGQREANRA

SEQ ID NO: 47183 - protein, 48 aa, Zea mays
  Coding DNA Sequence Number=SeqID_5404
MALELTALVNQKKPTGEIWSRTRGERKGEFVGSCGAKVAAPGPAREVR

SEQ ID NO: 47184 - protein, 145 aa, Zea mays
  Coding DNA Sequence Number=SeqID_5405
MGKSKKGGSSSHHSGDKRKREPTPPSEDFGDSEYSEEEFSSKFEGSPVYTSPPTSSDDSNDSQGIATEVWTYIRAVECSGLEGSDESEVSSDEENSSNSSEEGSGGDGDGEGDGDDGGDGDGDDDGSKGDGKGGSGKVSGKAPLA

SEQ ID NO: 47185 - protein, 155 aa, Zea mays
  Coding DNA Sequence Number=SeqID_5406
  Subcellular localization annotation: CTP_CleavageSite=80; ConfidenceScore=5.14e-01
MGVLVSGAVIQWVRAHGLAPQAKSCRFYCPSRDYLRGAGAPTLFRFAGMNYLTSAGSRWKRVAAISTASCTTSRVTSSVSATAGHRPAAHPEHGGDSLGTAALAATWCYSLLDACAKAKVPPPIGGDVEAIKAKEMEARKMEPQLSLLSTSWNWS

SEQ ID NO: 47186 - protein, 161 aa, Zea mays
  Coding DNA Sequence Number=SeqID_5407
  Subcellular localization annotation: CTP_CleavageSite=48; ConfidenceScore=5.59e-01
MDSTTVAAAASSTGSTLPIDPAVASTATATRKAAAARTTSEFGLLTPSAATASAATSERAPGLIPSGLGIPGFPTCTGALTDLRSPARLSRKPPPGFTTRPLVADATWAPPTPSTDSALATALATIQAAVAASQERERAVSLAWEQERAMGQALTTQVATA

SEQ ID NO: 47187 - protein, 44 aa, Zea mays
  Coding DNA Sequence Number=SeqID_5408
MEDLGIEAKEAAVREVAKLLPFPELLSSIASIKYDYLTRQQESF

SEQ ID NO: 47188 - protein, 116 aa, Zea mays
  Coding DNA Sequence Number=SeqID_5409
MQVACNHTTEAHPFDFDASSMEAQAHTSCNRHAGYYVRDTAPLLAPMPRLLDCGTSAAARGNPARGPIVPVEHIDHGDRERGYSERDPSLRRKRAPSPPTDQGFEGWPLGSVRQPP

SEQ ID NO: 47189 - protein, 82 aa, Zea mays
  Coding DNA Sequence Number=SeqID_5410
MTTTTPRLRTSPSRRRVGRRVEPKVGGTNECEDEHPKVWVEEGSNHHLLSNYEGRNQGGVNSYNISEGGMAKPVLGIAMARH

SEQ ID NO: 47190 - protein, 38 aa, Zea mays
  Coding DNA Sequence Number=SeqID_5411
MGGLGRHTSQPRKAKHPKERVVVARTMVKWKKDAKEGT

SEQ ID NO: 47191 - protein, 326 aa, Zea mays
  Coding DNA Sequence Number=SeqID_5412
  Homolog annotation: Hit_ID=Q9FGN7; Match level="QueryCoverage=85%, HitCoverage=37%, E-value=2e-78, Identity=55%"; Hit description =Arabidopsis thaliana genomic DNA, chromosome 5, P1 clone:MFG13
  Pfam annotation: Domain name=TPR_2; Domain location=129-162; Score =5.2; E_value=8.1; Accession=PF07719.7; Description=Tetratricopeptide repeat
  Pfam annotation: Domain name=TPR_2; Domain location=170-203; Score =6.7; E_value=5.5; Accession=PF07719.7; Description=Tetratricopeptide repeat
  Pfam annotation: Domain name=TPR_2; Domain location=49-82; Score=8.6; E_value=3.3; Accession=PF07719.7; Description=Tetratricopeptide repeat
  Pfam module annotation: Pfam domain module=TPR_2::TPR_2::TPR_2; Domain location=129-162::170-203::49-82
MSAILGAPYSALVRTDSDSQAKKKGVNLALAQMKNWFTRFPTILQGCESIIENLRGQYAHSVGCFDEAAFHFLEAKKLTESKSMQSMCETYAAVSYICKGDAESSSQALELVGPAYRTMDSFVGVREKTCIIFVYGLLLMRQHNPQEARNRLASGLKIAHQQLGNIQLVSQYLTILGTLALQLHDAAQAKEILKSSLTLAKTLFDIPTQIWILSVFTELYRELEEKENEMENSEYEGKKEDDLQRRLSEAYSHSFHHELCLTGVLFQVEKSRIQPLHMSSKQPEMAVPSANGDLDIPESVGLSAPQPFLKRLVEAEPMRRSTRRRR

SEQ ID NO: 47192 - protein, 460 aa, Zea mays
  Coding DNA Sequence Number=SeqID_5413
  Homolog annotation: Hit_ID=Q9FGN7; Match level="QueryCoverage=60%, HitCoverage=39%, E-value=3e-43, Identity=34%"; Hit description =Arabidopsis thaliana genomic DNA, chromosome 5, P1 clone:MFG13
MSIAAVSADGLLALADEAERRYDFSAAAACLESALRPPYAAALLPLTEARARLRLASLLLAPRGSSRVPRAGAPAAAKTHLERALLILSPLPSAPPRLKLLAHSHLAGAYAVLGAIASQKHVLHRGLGLLDSASASGLLQREPALLWTCNFQAQLGSVFTNDGDAASALSALSVGASAAAELGSPQLELFFAASELHVHLLCWEDSAAVENAVTRASLLWDALTAEQMEHWVGLFFYTQLLQTFYLLRICDYKAASQHVERLDTAVKSEMQRGRQITALANDLSTLERTLGQSGLKEREMLALSHKQRQLKGQLRALCGYDSLNDVLDYGDKLLLAPPLMHGEWLPRTAVFVLVDLMVVMVGRPKGIFKECGKRINSGLRLIHVIELVSCANSRWGTDWSEGWFYVKVGGEGEDHEEWPKASEMQRPELGRGVYRLWGQASEPRLESCWRPTPPDATIWG

SEQ ID NO: 47193 - protein, 257 aa, Zea mays
  Coding DNA Sequence Number=SeqID_5414
  Homolog annotation: Hit_ID=Q6QP51; Match level="QueryCoverage=36%, HitCoverage=43%, E-value=2e-11, Identity=47%"; Hit description =Putative growth-regulating factor 1
MGRRETEHGGGKQGDRRKGETRGLRVVPCPGRGNDGPPVTWSVRALGRARRRLLRGRGRVCIPRSRSSLSPGSGEAETVVWGRGRALGSGEAEFVVVRGRARVQALGSGEAEFVVFRSRARVRALGSGEAEFVVFRGRARVRALGSGEAEFVVFRGRARVRALGSGEAEFVIFRGRARVRALGSGEAEFVVFRGRARVRALGSGEAELPMAPEAGLGCCQPHSVERHSSRSDAGGAVFLSGRSVERRSDCGHFGSVD

SEQ ID NO: 47194 - protein, 73 aa, Zea mays
  Coding DNA Sequence Number=SeqID_5415
MGSRHSACSAEAECRGSFVLLLLVTLLRGERYLIRDGWFTGGDKDDGYDDGNGKEEGVEADLQEFQDVYEFED

SEQ ID NO: 47195 - protein, 58 aa, Zea mays
  Coding DNA Sequence Number=SeqID_5416
MPTQRSLATIVSGSPLASVPDVHAIAKAAISLSSSIPERPYPMCGVPGLLEALQNPFM

SEQ ID NO: 47196 - protein, 225 aa, Zea mays
  Coding DNA Sequence Number=SeqID_5417
MISSIPSSLTTLVRHGGSRTDPPLEIVANCNLGAAAIPHRVSDDTALPRCSVDGPNHGSTLGGTGLSGVHRTVSGAPSDSVRCTRGLRLELVTFGNFSGRRAIIHRTVRCTPDSVRCSKEARPPELASPGNAQQPLRYNSPDMSGVHRTVRCNHGATATSAPTATCDAFNARAAAQKSGAPILAHRTRNSTCPVCTGHPSGPRSQKLQRSESNGIDDVAGAPDMS

SEQ ID NO: 47197 - protein, 62 aa, Zea mays
  Coding DNA Sequence Number=SeqID_5418
MALVIHSAFFALALHSTSLVATPGNEARQRLSEYLRSKENGILIVGQELKVTSNLDIHVNRC

SEQ ID NO: 47198 - protein, 187 aa, Zea mays
  Coding DNA Sequence Number=SeqID_5419
  Gene Ontology: Mol. function=nucleoside-triphosphatase activity; Cellular component=membrane; Biological process=transport
  Homolog annotation: Hit_ID=Q6K989; Match level="QueryCoverage=97%, HitCoverage=99%, E-value=5e-48, Identity=82%"; Hit description =Putative ATP-dependent transporter
  Pfam annotation: Domain name=ABC_tran; Domain location=1-119; Score= -60.2; E_value=0.037; Accession=PF00005.17; Description=ABC transporter
MAGEGNGDEGWRRSGIEVSALQFGYDGQPPLFARFNLCVAPGSRCLLVGANGSALKHLKQLQVLLLDEITVDLDVVTRMDLLGFFKEECEQREATIVYATHIFDGLETWATDFAYIQEGELRRSGRYSDIEELRSAKNLLSVVESWLRSETKLPKKEPPPRPETQARRSSPFDASPFRSSRHMAYYR

SEQ ID NO: 47199 - protein, 101 aa, Zea mays
  Coding DNA Sequence Number=SeqID_5420
  Homolog annotation: Hit_ID=Q6K990; Match level="QueryCoverage=78%, HitCoverage=9%, E-value=3e-23, Identity=69%"; Hit description =Putative phragmoplast-associated kinesin
MAIDMSMDLDMGDQTSMQDVKDPSGAPVSRDTEASVQISRLPHWNNQPDSYLACLRAAKKPSADHVPFSPLDSNLNTVHLAGAVSPKVNQMSPSYIRELRA

SEQ ID NO: 47200 - protein, 68 aa, Zea mays
  Coding DNA Sequence Number=SeqID_5421
MTWAGRATADGARGRALTEVQHATVVATPATSSPSKCDAESSPLVASPALLDGRRHLLRMGGDSGKKP

SEQ ID NO: 47201 - protein, 224 aa, Zea mays
  Coding DNA Sequence Number=SeqID_5422
  Homolog annotation: Hit_ID=Q71KW4; Match level="QueryCoverage=17%, HitCoverage=18%, E-value=2e-12, Identity=87%"; Hit description =Desiccation-associated protein
  Pfam annotation: Domain name=PBD; Domain location=24-64; Score=24.5; E_value=0.00017; Accession=PF00786.18; Description=P21-Rho-binding domain
MKGLLKGLRYISQIFGDAKEPEMQIGKPTDVKHVAHIGWDNASVTAPSWVAASVPVPPPTTPFPCSAPRPNVRTPTNSCGWACHVLQMDEFKASPGTARGSDPEPSQPGGSEGCGEEQAGGGEDGGGKAERPRRARGNKGSGGNEPAKRRDCAAEGLRRDRRVAKAADAAEGAEGQGDAAAAAPKQRRRKPRAASGGRSKSSSGGAAASDSAGAPPDEDDRCGC

SEQ ID NO: 47202 - protein, 603 aa, Zea mays
  Coding DNA Sequence Number=SeqID_5423
  Gene Ontology: Mol. function=ubiquitin-protein ligase activity; Cellular component=ubiquitin ligase complex; Biological process =protein ubiquitination
  Homolog annotation: Hit_ID=Q6Z2K3; Match level="QueryCoverage=89%, HitCoverage=84%, E-value=0.0, Identity=79%"; Hit description =Putative Avr9/Cf-9 rapidly elicited protein 276
  Pfam annotation: Domain name=Arm; Domain location=318-358; Score =47.2; E_value=5.7e-11; Accession=PF00514.13; Description =Armadillobeta-catenin-like repeat
  Pfam annotation: Domain name=Arm; Domain location=359-399; Score =21.6; E_value=0.0028; Accession=PF00514.13; Description =Armadillobeta-catenin-like repeat
  Pfam annotation: Domain name=Arm; Domain location=400-441; Score =34.5; E_value=3.8e-07; Accession=PF00514.13; Description =Armadillobeta-catenin-like repeat
  Pfam annotation: Domain name=Arm; Domain location=442-483; Score =16.7; E_value=0.086; Accession=PF00514.13; Description=Armadillobeta- catenin-like repeat
  Pfam annotation: Domain name=Arm; Domain location=484-524; Score =24.0; E_value=0.00054; Accession=PF00514.13; Description =Armadillobeta-catenin-like repeat
  Pfam annotation: Domain name=Arm; Domain location=526-566; Score=5.2; E_value=2.8; Accession=PF00514.13; Description=Armadillobeta-catenin -like repeat
  Pfam annotation: Domain name=HEAT; Domain location=324-360; Score =14.1; E_value=0.51; Accession=PF02985.12; Description=HEAT repeat
  Pfam annotation: Domain name=HEAT; Domain location=448-485; Score =0.4; E_value=39; Accession=PF02985.12; Description=HEAT repeat
  Pfam annotation: Domain name=HEAT; Domain location=490-526; Score =8.3; E_value=4.1; Accession=PF02985.12; Description=HEAT repeat
  Pfam annotation: Domain name=U-box; Domain location=194-268; Score =83.4; E_value=7.2e-22; Accession=PF04564.6; Description=U-box domain
  Pfam module annotation: Pfam domain module=Arm::Arm::Arm::Arm::Arm::Ar m::HEAT::HEAT::HEAT::U-box; Domain location=318-358::359-399::400 -441::442-483::484-524::526-566::324-360::448-485::490-526::194-2
MWIRDLQLAFGNLSVIAALKFSCINVLDAICKNTGLQFKYVTWQLQAALANLPHSCFEISDEVQEEVDLVRAQLRREMEKNGGLDVTVFMKVHDILAQIDNAAPQSQQPHQQPEQPQMEKFSNDDLELRNVVLLVSEISGLSKPDMSKIVSDLIQGLENVETPESPKPDNVDRQPPSDETKGSSEEVKKSDSVAIPEDFRCPISLELMRDPVIVSTGQTYERAFIQRWIDCGNRTCPKTQQKLQNLSLTPNYVLRSLILQWCEEKGMEPPSRSKSDGSPLEVAGNRLAIEALVRNLSSSSLDDRKSAAAEIRSLAKKSTDNRILLAESSAIPALVKLLSSKDPKTQEHAVTALLNLSIYDQNKELVVVAGAIVPITQVLRTGSMEARENAAAAIFSLSLMDDNKIMIGSTPGAIEALVELLQSGSSRGKKDAATALFNLCIYQANKVRAVRAGILVPLIRMLQDSSRSGAVDEALTILSVLASHHECKTAISKAHAIPFLIDLLRSGQARNRENAAAIILALCKRDAENLACVGRLGAQIPLAELAKTGTDRAKRKATSLLEHLSKLQFSIRYLGKSSDWFTEKDADELDPWQLNRLPWYYLR

SEQ ID NO: 47203 - protein, 227 aa, Zea mays
  Coding DNA Sequence Number=SeqID_5424
  Homolog annotation: Hit_ID=Q9LD39; Match level="QueryCoverage=38%, HitCoverage=21%, E-value=2e-07, Identity=47%"; Hit description =Arabidopsis thaliana genomic DNA, chromosome 3, P1 clone: MGH6
MEALALASLFWRRRRQINSKIDTRYSLRLLAAAGDAAPRYLLHAAVPDARVAEPRQLRHHAPRRRAIRRRQAATAEKGGNFAGSGGRRATPAQPEEAMPATSTEPIKPLRAAAADGTDPYAFSPKAPSWSSRWRELLGLRRASAAQSPSTKASASASPAAAKTPASAVRATNSAAARSLKLLLQLTLQLPRGVQVAVPDKITFGGELDVMLILSQDSSIEAKMSGCD

SEQ ID NO: 47204 - protein, 138 aa, Zea mays
  Coding DNA Sequence Number=SeqID_5425
  Homolog annotation: Hit_ID=Q1SWV5; Match level="QueryCoverage=33%, HitCoverage=7%, E-value=2e-07, Identity=58%"; Hit description =Tyrosine protein kinase, active site
  Subcellular localization annotation: CTP_CleavageSite=59; ConfidenceScore=5.20e-01
MAKNFGSKTVQIAMNAVADTRSHSLRSGPQRPNTDRLFLIWTTDRDLALVNLAAVGVVVLALVTGLRPVDVGRERRDVDAPVLGEGPAVMASVEAVAELAFRCVAPDKDDRPDAREVVAELARIQTMLPELPSRIAQN

SEQ ID NO: 47205 - protein, 111 aa, Zea mays
  Coding DNA Sequence Number=SeqID_5426
MALARSLIDSLVPRTYQYLTIKMREEELDGSKIVLVVKTSEEERLYSDKNKLGTKRAVGHMCKCSCTALHCLMFTDGCSVCESPGARAPAPARPDARIETRKAKAIRNRYL

SEQ ID NO: 47206 - protein, 79 aa, Zea mays
  Coding DNA Sequence Number=SeqID_5427
MEDELREKEDGSPRQLERGSSCTVSGFKKFFRKVWGSHCARTILMYGHLFIVKTLDHTNIIRCISNDTYIGGRERSSTI

SEQ ID NO: 47207 - protein, 364 aa, Zea mays
  Coding DNA Sequence Number=SeqID_5428
  Gene Ontology: Mol. function=hydrolase activity, acting on ester bonds; Cellular component=cellular_component; Biological process =lipid metabolic process
  Homolog annotation: Hit_ID=Q6Z2J7; Match level="QueryCoverage=80%, HitCoverage=86%, E-value=1e-132, Identity=75%"; Hit description=GDSL- motif lipase/hydrolase-like
  Pfam annotation: Domain name=Lipase_GDSL; Domain location=49-329; Score=129.6; E_value=8.4e-36; Accession=PF00657.12; Description=GDSL- like LipaseAcylhydrolase
  Subcellular localization annotation: CTP_CleavageSite=34; ConfidenceScore=5.45e-01
MAALAVVFAITAISGAVAAADDVASSTAARNFTVASPPSPTTTTSGPVTYVFGDSMSDVGNNNYFPTSLAKSNYPWYGIDYPGREATGRFTNGKTIGDYMAEKFGVPPPPPFLSLRMTGKDVLGGVNFASGGAGILNETGVYFVQYLSFDEQISCFEIVKRAMIAKIGKDAAEAAANAALFQIGLGERAAMCMRLYGLGARKVAFNGLPPLGCIPSQRVRSTDGKCLSHVNDYAVQFNAAAKKLLDGLNAKLPGAQMGLADCYSVVMELIEHPEENGFTTAHTSCCNVDTEVGGLCLPNTRPCSDRSAFVFWDAYHTSDAANKVIADRLWADMTSAGHGSASATPHVAASSPDVAPSPSPSQDY

SEQ ID NO: 47208 - protein, 255 aa, Zea mays
  Coding DNA Sequence Number=SeqID_5429
  Subcellular localization annotation: CTP_CleavageSite=17; ConfidenceScore=5.22e-01
MTTAALSPLRKQGDGPPGSKRRQDLSLVSSPGLQRRVDSRTREQETDTARVLHVAEGLMIASLPSRALGRIDLGQHTAGRFDGNEDGEHALYPMERRSAPTCRDSGSFQTTHAAPDRIVRCRSVGTGRPKLTRPTTATITRAWHGQPAQIAILFMTYEQANILATHRTLQAVGRGIPTTRVRSAVPRPGITPHANRSRGHPTPSSARHDHHHHHHQSSLALPPLSVPSPRRAAPRRMPGELESIEQRPARHSAFL

SEQ ID NO: 47209 - protein, 597 aa, Zea mays
  Coding DNA Sequence Number=SeqID_5430
  Gene Ontology: Mol. function=protein serine/threonine kinase activity; Cellular component=integral to membrane; Biological process=protein amino acid phosphorylation
  Homolog annotation: Hit_ID=Q9FP13; Match level="QueryCoverage=96%, HitCoverage=97%, E-value=0.0, Identity=72%"; Hit description =Putative somatic embryogenesis protein kinase 1
  Pfam annotation: Domain name=LRRNT_2; Domain location=32-72; Score =58.5; E_value=2.2e-14; Accession=PF08263.3; Description=Leucine rich repeat N-terminal domain
  Pfam annotation: Domain name=LRR_1; Domain location=100-122; Score =12.9; E_value=1.1; Accession=PF00560.23; Description=Leucine Rich Repeat
  Pfam annotation: Domain name=LRR_1; Domain location=124-146; Score =19.3; E_value=0.014; Accession=PF00560.23; Description=Leucine Rich Repeat
  Pfam annotation: Domain name=LRR_1; Domain location=148-170; Score =18.0; E_value=0.034; Accession=PF00560.23; Description=Leucine Rich Repeat
  Pfam annotation: Domain name=Pkinase; Domain location=282-546; Score =114.1; E_value=4.2e-31; Accession=PF00069.15; Description=Protein kinase domain
  Pfam annotation: Domain name=Pkinase_Tyr; Domain location=282-546; Score=117.5; E_value=3.8e-32; Accession=PF07714.7; Description =Protein tyrosine kinase
  Pfam module annotation: Pfam domain module=LRRNT_2::LRR_1::LRR_1::LRR_ 1::Pkinase::Pkinase_Tyr; Domain location=32-72::100-122::124-146::148- 170::282-546::282-546
MGEVVAASSLALVLLFFCSCGPASGLLSPKGVNYEVQALMMIKNYLKDPHGVLKNWDQDSVDPCSWTMVTCSPENLVTGLEAPSQNLSGILSPSIGNLTNLETVLLQNNNINGLIPAEIGKLRKLKTLDLSSNHFSGEIPSSVGHLESLQYLDLSYNNLSGPIPGSLTRTFNIVGNPLICAATMEQDCYGSLPMPMSYGLNNTQGTVIPAKAKSHKVAIAFGATTACISLLFLAVGSLFWWRCRRNRKTLFNVDDHQHIENGNLGNMKRFQFRELQAATENFSSKNILGKGGFGIVYRGQLPDGSLVAVKRLKDGNAAGGEAQFQTEVEMISLAVHRNLLRLYGFCMTASERLLVYPYMSNGSVALRLKGKPPLDWITRKRIALGAARGLLYLHEQCDPKIIHRDVKAANILLDDCCEAIVGDFGLAKLLDHRESHVTTAVRGTVGHIAPEYLSTGQSSEKTDVFGFGILLLELITGQTALEFGKSSNQKGAIRCTKRSSWTYLSTRALGSKYDRIELEEMVQVALLCTQFLPGHRPKMSEVVRMLEGDGLAERWEALQHTESHKFKVPEFSFSRCHSDLTDDSSLLVQAVELSGPR

SEQ ID NO: 47210 - protein, 105 aa, Zea mays
  Coding DNA Sequence Number=SeqID_5431
MFYTVVALEESTQVQTKGHIHRTIRKINQEIAKACYYLMLDDAPDHRFVRSDGARIFDRSKETRIRFPCPPKTMASSNTENSQPVDNQPQHFCQRHAEYSDDKDE

SEQ ID NO: 47211 - protein, 646 aa, Zea mays
  Coding DNA Sequence Number=SeqID_5432
  Homolog annotation: Hit_ID=O82251; Match level="QueryCoverage=29%, HitCoverage=92%, E-value=6e-15, Identity=35%"; Hit description =Expressed protein
AYFHPDPITAAHYFTFDYNNRFADLYHCSNRLHHGLVKPVSVTRMVISAKPSFASMDAQVVFAEMPQSRVTKEYFVHESTRVEVMAMLGVFRAIINATGFVIYSYRGSRQNTRETARVTHAMDEEAAAANNTAQVPVTFGQCLQFSWDPGGSNATHRLEGKPNFKKRGMLGKMNESLGDEITEKLNTTELSVVSFPTQAISLAYLFLFSNPPVIGVLTRTPSAVMNIEVPASLGKGMPVFPEHPTIKVYEEGGSNQTLEDNVVVIFICLTEPRSHTTLWVADFPVFLDENLKDIFHWQELVSGPRCKARAHAGRHGGPREAHRASPTRPSFLPRDAAAARPALALHQAGRQAEAGTTNQSPRLPLGYPHPPELHKNLRSQAPTRAEGASSQQPRGATALPSTPHPNASLWPPPTRPLTQKISTPRPHRAEDHMASAVSLLLSPPRLLHRDGTSRLLSIPHRRVLLAAPNNATPRRLLAPAPRASNKNDNSGAVEAPDRLVAAVAYLYPFLDGAHHGRFLLTQFPFFGALLRPLAPAARLFHSSPLTPFLLFLTLYFAVVRNQQAFSRFVRFNAMQAVVLDVLLIFPDLLAQSFAPSGGVGFEIFQSMESTVFLFLLVSLVYGGGACLLGKTPRLPIVADAAERQVM

SEQ ID NO: 47212 - protein, 114 aa, Zea mays
  Coding DNA Sequence Number=SeqID_5433
  Homolog annotation: Hit_ID=Q6Z336; Match level="QueryCoverage=91%, HitCoverage=23%, E-value=3e-25, Identity=65%"; Hit description =Putative amino acid transporter
MGQAHKRSNSSPIYKELKDSSQIRPIVRTSLLLCSAVYITSSFFGFLLFGDSTLDDLLANFDSNLGIPYSLLFNDAVRVSYVLHLMLVFPARHVPSAAAQHGRAPLPVGAATGL

SEQ ID NO: 47213 - protein, 341 aa, Zea mays
  Coding DNA Sequence Number=SeqID_5434
  Gene Ontology: Mol. function=transcription regulator activity; Cellular component=nucleus; Biological process=regulation of transcription
  Homolog annotation: Hit_ID=Q6Z339; Match level="QueryCoverage=88%, HitCoverage=77%, E-value=1e-69, Identity=64%"; Hit description=BHLH protein-like
  Pfam annotation: Domain name=HLH; Domain location=130-166; Score =14.4; E_value=0.0042; Accession=PF00010.16; Description=Helix-loop -helix DNA-binding domain
MASSAAPFHLPFMCPERRRARRMEQNREPGLTAARSRCGKILASTKDPENSGPSFITLPCCMFRRERRGGEKQRQQRRSGAQHTEIQAFRYRAAETDKDKRQAMLVESNFNFHQLHLADQKLKKKIYPERREAELEILRELLPHGDQKRDKASFLLEVIEYIRFLQEKVQKYESAQPEKNHEDSSMPWAKVYYRSCWKNTENIIQGGGLAPSTKDENKEQYDSKQTTVASSALFDTQSARETSANDISSQKATSKAKCRADNSVPGKQPPWLSMSTSDADNKTLSKNEKQTLQEDTQSLSDAYSQGFVPKLLLFMMDHECEDIIHVTKKLRGERSKISSSN

SEQ ID NO: 47214 - protein, 119 aa, Zea mays
  Coding DNA Sequence Number=SeqID_5435
  Homolog annotation: Hit_ID=Q76K64; Match level="QueryCoverage=53%, HitCoverage=16%, E-value=7e-07, Identity=57%"; Hit description=Hd1 -like protein
MDAESLVGGVELGSGALDLCSTVLEELARCRLDVDTESLVKVPGRVDECYISFINGGGHSTLVPDNAIKSISNLNILTTGEVDLLPVHWFQMPVNLSPRDRAARILKHKKKRQESLIRP

SEQ ID NO: 47215 - protein, 111 aa, Zea mays
  Coding DNA Sequence Number=SeqID_5436
  Homolog annotation: Hit_ID=Q6YWS8; Match level="QueryCoverage=37%, HitCoverage=13%, E-value=4e-13, Identity=83%"; Hit description=ASC1 -like protein 2
MAFSPPLIDWEAESYPAYPDFAAIPLFVVFFLVVRFFLDRFVFEVVVFPAHFYNISRLLFARVGSVVLAIHDATDVFLELGKISKYSGHELFADVSFLVFILKVKRNMRID

SEQ ID NO: 47216 - protein, 66 aa, Zea mays
  Coding DNA Sequence Number=SeqID_5437
MICMVCLALNVWLVGPGSKASRRKLLRICDHLHVPTDEGSNAYCTIMWEVHPAHQKILILIGCWLK

SEQ ID NO: 47217 - protein, 131 aa, Zea mays
  Coding DNA Sequence Number=SeqID_5438
MEVAISYQKKRKKSSFKPNNLLTYPSQNKGIMVKGKMKEHKPENGNSQNRNEVWEEIRALGLCLTCVGLPWSSVQASSYQSSVKEGAPTSAPSHNLNAGSIPARGTRWEEGKKDQGKKRGRGIGRLIRLMT

SEQ ID NO: 47218 - protein, 142 aa, Zea mays
  Coding DNA Sequence Number=SeqID_5439
MRKTNCGAVGFKVRGGPRLYTQQQRGIEGLGWKCYCLLGIVFFKKGRNRGFRARLFGSMFRKGMPSGKKEESSIAEKRISVLNLSRNERIPFSRARDSSLISLGFNPNAREEKRKAWDFQYDRAGPQWSFMSEADVSVVNRI

SEQ ID NO: 47219 - protein, 80 aa, Zea mays
  Coding DNA Sequence Number=SeqID_5440
MPIIGEGETKPAGRGEVAYEARIELVGADTSSCSCRGNLSCRSSNRDTDLVSWLGKTSNIEFLPFNGTAIDEWSLRIVIE

SEQ ID NO: 47220 - protein, 44 aa, Zea mays
  Coding DNA Sequence Number=SeqID_5441
MGDCGLALWNCQPGDPGLGAVPFEKPLKAGSGVLSDLQCEKASF

SEQ ID NO: 47221 - protein, 377 aa, Zea mays
  Coding DNA Sequence Number=SeqID_5442
  Gene Ontology: Mol. function=metal ion binding
  Homolog annotation: Hit_ID=Q6ZHB2; Match level="QueryCoverage=96%, HitCoverage=100%, E-value=6e-34, Identity=52%"; Hit description=S -ribonuclease binding protein SBP1-like
MAVQAQYPSDLLFHARGEPERRKEMDMPTPPQLAGVSPAAVYFSGGGASGKSRRKRPREECVSLFTVQPQQSTAFASVALFQTQNMVSSSPSPAATALVSTGLRLAFDEQQQQQESKQTDAFGYPSSPSQSGSVSDELAAQVKRHDEEIDRFVREQVPSPFPCTTRLLSHRPPILTRRTVPGGVRSWSLTQGEQLRRAVADRLRRHSRAILAKAERSAAARLREKASEAEREARRGAELEERLARLRGEAGAWQAKALSEQAAAATLHAQLQQQAAARASAEEQLAAGGGDAGAAQSSSSAYVDPRRSDRACLGCRLRPASVVLIPCRHLPLCGECFAAGDADAADGVPRVPVRADGQRGGHPLLSVARLAVHLGSR

SEQ ID NO: 47222 - protein, 143 aa, Zea mays
  Coding DNA Sequence Number=SeqID_5443
MALARSLIDSLVPRTYQYLTIKMREEELDGSKIVLVVKTSEEERFLRSNVGRTFQDEINLLPTYLLNPTSGVRNISDHVTDSSINPANNAFPAHDIVQELASSHADPQGDSLVSPRTSVVYLPRSLSLDYPPMTHCLDSPQPL

SEQ ID NO: 47223 - protein, 105 aa, Zea mays
  Coding DNA Sequence Number=SeqID_5444
  Homolog annotation: Hit_ID=Q6Z756; Match level="QueryCoverage=83%, HitCoverage=75%, E-value=3e-20, Identity=55%"; Hit description =Erwinia induced protein 2
MLLLLTLPGLDGLRRGMVSVVRSALKPHDVRGALLPLPAHGHLLEHACTPSEHLRHHKSVMKSQRNALLIAAALLLYWILFSVTQLVVRLDQMQQRVDKLKKRDD

SEQ ID NO: 47224 - protein, 128 aa, Zea mays
  Coding DNA Sequence Number=SeqID_5445
MDGPEGIFPTRSRATAAPPHLTPPSAAGRECGMGHGGAYLSPGDRFKLRRIRSARSYFPGGWIGHERAAPYGEDGAVKPVPRVSAYSFPERASEGAAGQAGPRGSVTKSPIKCARAEASGWHAGPTCQ

SEQ ID NO: 47225 - protein, 103 aa, Zea mays
  Coding DNA Sequence Number=SeqID_5446
  Subcellular localization annotation: CTP_CleavageSite=50; ConfidenceScore=5.58e-01
MVNAAKNGPAVMTMAGGREQRSRRQPSSRPLRGQRENPLSRREDNAPVFRSSNGSRTRNDRPANHSPRRINFAAGQATPLGPGKGIPRKGSFPVKEPGSEPPY

SEQ ID NO: 47226 - protein, 1091 aa, Zea mays
  Coding DNA Sequence Number=SeqID_5447
  Gene Ontology: Mol. function=steroid hormone receptor activity; Cellular component=nucleus; Biological process=regulation of transcription, DNA-dependent
  Homolog annotation: Hit_ID=Q6CLA2; Match level="QueryCoverage=44%, HitCoverage=18%, E-value=2e-27, Identity=23%"; Hit description =Kluyveromyces lactis strain NRRL Y-1140 chromosome F of strain NRRL Y- 1140 of Kluyveromyces lactis
  Subcellular localization annotation: CTP_CleavageSite=52; ConfidenceScore=5.17e-01
MHTLTVGLIDCFILHKFTLQSFSFPFLVPWVYALLSPLRSAFLLSKTFLEISVTVAVSQFDLKCYSPDPQIADGYFSVLAEVYMRQEIPKCEIQRLVSLILYKVVDQTKLIRDSALQMLETLSLREWAEDDTDGVGHYRASVVGNLPDSYQQFQYKLSSKLAKDHPELSEHLCEEIMQRQLDAVDIIAQHQVLTCMAPWIENLNFVRLKESGWSERLLKSLYYVTWKHGDQFPDEIEKLWSTVASNTRNIIPVLNFLITRGIEDCDANPSAEITGAFATYFSVAKRVSLYLARICPQQTIDHLVFELSQRMLEDDEEPVRLGKVDVSANVVLEFSQGPTASQVATVVDSQPHMSPLLVRGSLDGAVRNVSGNLSWRTSAVTGRSVSGPLSPLAHEVSIPNPTAGRSGQLLPALITMSGPLSGVRSSAGNLRSRHVSRDSGDYYFDTPNSTDDILHQGGSGIHGINANELQSALQGHQHLLSRADIALILLAEIAYENDEDFRENLPLLFHVTCVSMDSSEDIVLEHCQDLLVNLLYSLAGRHLELYEIESSERENKHHVVSLIKYIQSKRGSLMWENEDPTLFRIELPSASLLSALVQSMVSAIFFQGDLRETWGSEALKWAMECTSRHLACRSHQIYRALRPSVKSDSCVLLLRCIHRCLGNPVPAVLGFAMEILLTLQVMVENMEPEKVILYPQLFWGCVALMHTDFVHIYCQVLELFCRVIDRLTFRDRTTENVLLSSMPRDEFDINGYASDLHRLESRTTSERLLSVTGTGKVPAFEGVQPLVLKGLMSTVSHGSAIELLSRITIPTCDSIFGSPDTRLLMHITGLLPWLGLQLTREAPPSLGSASPLQEQNQKAYYVSSNISAWCRAKSLDDLAEVFRAYSFGEIMSLEDLFARASPPICAEWFPRHSSLAFGHLLRLLERGPLDYQRVVLLMLKSLLQQTPVDPSQIPQVYNFVSQLVESTLCSEALNVLEALLRSCGGGGQGEEAGFGDNGGHGSGEKVLQSMLLPQSSFKARSGPLQYAAGSGLGSLMGQGGGGSSSAADSGLVARDVALQNTRLLLGRVLDTCALGRKRDHKRLVPFVANVG

SEQ ID NO: 47227 - protein, 79 aa, Zea mays
  Coding DNA Sequence Number=SeqID_5448
  Subcellular localization annotation: CTP_CleavageSite=58; ConfidenceScore=5.44e-01
MASPLVSGSGCGSVADLAGPVSASTHARLSFYTACVVPVFSKPGLGAFCPCAAPYLCTCTLVGASRLLPLQIFQRLMPL

SEQ ID NO: 47228 - protein, 135 aa, Zea mays
  Coding DNA Sequence Number=SeqID_5449
  Subcellular localization annotation: CTP_CleavageSite=42; ConfidenceScore=5.76e-01
MAPSVRPDAPRAPVASFSVVASRTATNHSSGLVLAAKPPIAVASVQPCSKFSKKTSVESAVYTRSCSSPLIEVLGCEWENWGRAPMDAAMGWAALPSVDGWWMGRMGENVVATDFCINSWDWAEHTSLARLNLGR

SEQ ID NO: 47229 - protein, 1168 aa, Zea mays
  Coding DNA Sequence Number=SeqID_5450
  Gene Ontology: Mol. function=steroid hormone receptor activity; Cellular component=nucleus; Biological process=regulation of transcription, DNA-dependent
  Homolog annotation: Hit_ID=UPI0000610EEC; Match level="QueryCoverage =52%, HitCoverage=22%, E-value=9e-28, Identity=22%"; Hit description =UPI0000610EEC related cluster
MGAGGAAKQIVDSLLARFLPLARRRIETAQAQDGQYLRPCDPSYEQVLDSLAMVARHTPLPLLEALLRWRESESPKGAHDASTYQKKLAVECIFSSACIRFAECCPQEGITEKLWIGLESFVFDWLINADRVVSQVEYPSLVDLRGLLLDLVAQLLGALSRIRFSSVTERFFIELNVRRIDSLALRSETLSIINGMRYLKLGVKTEGGLNASVSFIAKANPLNRPPNKRKSELQHALCNMLSSILAPLAEGGKNHWPPLGVEPALSLWYDAVARIRVQLMYWMDKQSKHVAVGFPLVTLLLCLGDANAFNSSFSQHMEILYKYLKDKNHRSMALDCLHRLVKFYLNIYADYQPRNHVWDYLDSVTSQLLTVLKKGLLTQDVQHDKLVEFCVTLAQSNLDFAMNHMILELLKPDSLSEAKVVGLRALLEIVVSPSNQQIGLDVLQVFGIGHYIPKVKSAIESILRSCNKAYSLALLTSSKTTIDNVTKDKSQGSLFRSVLKCIPYLIEEAGRNDKMTEIIPQHGISIDPGVREEAVQVLNRIVRCLPNRRFAVLKGMANFILKLPDEFPLLIQTSLGRLVELMRLWRVCLSEEALAKDMQSGRRLSIGGDALQRSPFHRSRDVSEFRASEMDAVGLVFLSSADVQIRLTALELLRCVRALQNNLRDYSANEWGDNKLKLEPEPIFIIDIIEENGEDIVQSCYWDPGRPYDLRREMDPIPLDVTLQSILESVDKNRWARYLSEIVKYAAELCPSSVQDARHELWSFLERLHAQFTIIGHLINFTAKLHRLEVIRRLEQITPADLGGKAQQPQDSETKLDQWLIYAMFACSCPPDIREEFSIKSAREVFHMIFPSLRHGSEAYALAATSALGHSHLEVCEIMFGDLALFVEEVSSETEGKPKWKNMVLNTDTLQNPRSRREDLRTHVANIHRILAEKVWPGMLSRKPVLCQHFLKFIEETYRQITISLADSFQDLQPLRYALASVLRYLAPEFVDAKAERFDNRIRKKLFDLLLTWSEDSGSSWGQESSSDYRREIERYKSNQHTRSRESFDKLAFDREMAEQLEAINWASMNAIASLLYGPCFDDNARKMSGRVISWINSLFMEPSARAPFGHSPVDPRTPSYSKHTDGRFGGRDKQKTSHLRLLLAKTALKNILQTNLDLFPACIDQVD

SEQ ID NO: 47230 - protein, 152 aa, Zea mays
  Coding DNA Sequence Number=SeqID_5451
  Subcellular localization annotation: CTP_CleavageSite=66; ConfidenceScore=5.49e-01
LPFLLNIGLKDPSQLLLTPVSASTPPALSLSSPNQDLVPSAPAPPLPLHVYTRRRQQTTSPTDLPAADASGASAVPIEPAPSPMSGLPPGAVPTPVVVNNHPMTTRAQGWFSSADCLHYCSHLPRSQLQFAKVWLIPKGAGPGKRIPSSGPQ

SEQ ID NO: 47231 - protein, 267 aa, Zea mays
  Coding DNA Sequence Number=SeqID_5452
NMVLNTDTLQNPRSRREDLRTHVANIHRILAEKVWPGMLSRKPVLCQHFLKFIEETYRQITISLADSFQDLQPLRYALASVLRYLAPEFVDAKAERFDNRIRKKLFDLLLTWSEDSGSSWGQESSSDYRREIERYKSNQHTRSRESFDKLAFDREMAEQLEAINWASMNAIASLLYGPCFDDNARKMSGRVISWINSLFMEPSARAPFGHSPVDPRTPSYSKHTDGRFGGRDKQKTSHLRLLLAKTALKNILQTNLDLFPACIDQVD

SEQ ID NO: 47232 - protein, 1002 aa, Zea mays
  Coding DNA Sequence Number=SeqID_5453
  Gene Ontology: Mol. function=RNA binding
  Homolog annotation: Hit_ID=Q6K9R1; Match level="QueryCoverage=99%, HitCoverage=99%, E-value=0.0, Identity=76%"; Hit description=Pumilio- like
  Pfam annotation: Domain name=NABP; Domain location=308-668; Score =515.0; E_value=8.6e-152; Accession=PF07990.3; Description=Nucleic acid binding protein NABP
  Pfam annotation: Domain name=PUF; Domain location=669-703; Score =41.7; E_value=2.5e-09; Accession=PF00806.9; Description=Pumilio -family RNA binding repeat
  Pfam annotation: Domain name=PUF; Domain location=705-739; Score =43.5; E_value=7.3e-10; Accession=PF00806.9; Description=Pumilio -family RNA binding repeat
  Pfam annotation: Domain name=PUF; Domain location=741-775; Score =36.0; E_value=1.3e-07; Accession=PF00806.9; Description=Pumilio -family RNA binding repeat
  Pfam annotation: Domain name=PUF; Domain location=777-811; Score =34.4; E_value=3.9e-07; Accession=PF00806.9; Description=Pumilio -family RNA binding repeat
  Pfam annotation: Domain name=PUF; Domain location=813-848; Score =40.3; E_value=6.6e-09; Accession=PF00806.9; Description=Pumilio -family RNA binding repeat
  Pfam annotation: Domain name=PUF; Domain location=850-884; Score =36.1; E_value=1.2e-07; Accession=PF00806.9; Description=Pumilio -family RNA binding repeat
  Pfam annotation: Domain name=PUF; Domain location=886-920; Score =36.7; E_value=7.8e-08; Accession=PF00806.9; Description=Pumilio -family RNA binding repeat
  Pfam annotation: Domain name=PUF; Domain location=928-962; Score =30.6; E_value=5.3e-06; Accession=PF00806.9; Description=Pumilio -family RNA binding repeat
  Pfam module annotation: Pfam domain module=NABP::PUF::PUF::PUF::PUF::P UF::PUF::PUF::PUF; Domain location=308-668::669-703::705-739::741 -775::777-811::813-848::850-884::886-920::928-962
MAPSQAAAAAGPTFEDLERDLQAVLMDQNHMSPVDDLGMFRSGSAPPTVEGSRTAIGALFSGPPLHANSLGAGGGSGGTASGLDVLTDEEIRSHPAYLSYYYSNEHLNPRLPPPMVSKEDWRAAQWFQAVSGGIGDRRRRPAEVGSGNSLFSVQPGANEVGGEKALLSDRMERSGRNGLARQQSSEWLGRGSDGLIGLSDASALGSPRKSFADALQENISRPAVIAGHLSRSNSRNVLEGPTPIRSSDSRKPQLQNRSESMNGLRSGSTSPSLVRVQSLGSSMSHTFASAVGSSISRSTTPDPQLIRRTPSPCLPPVGVRMGSSDKKVEASVSSLNHDGADIVATLSSLSLSGNKMSNVENEVQTHAYQNFGDQADVLFNVPKEHRQFSPRNLTQKTDEDLLNAPEYAVFPNGGSNFSNLHASKVASHSNSKFPMQSPHGNANKKGSLMSSAGSVSQYQHLNGDSHDIDVSGWHTHTGGFTSSMLNNQLNPDGDYGNVLSNHGGSSYQGQPTETMYAQCLQANPDSPLGAAASMSPFQGRGFTGSGHLDSPGYQKAYLGSLFGQQKLQYGMPYLGNSGALNQNIYGNDSAFGIGMTYLTSPPSTPYISSPQGHVGQGNRLTRLPAVVRNTAGGSMGSWNSENGLMDNGYGSSLLEEFKSNKTRSFELLDIVGHVVEFSSDQYGSRFIQQKLETASTEQKNMIFPEILPQARTLMTDVFGNYVIQKFFEYGTETQTKQLATLLKGFVLQLSLQMYGCRVIQKALEVVEVEQQTQMALELDGSIMRCVRDQNGNHVIQKCIECIPQERIRFIISAFYGHVVELSMHPYGCRVIQRILEHCDDESTQNAMMEEIMQSVVTLTEDQYGNYVIQHVLQYGKPEERSTIIAQLAGQIVKMSQQKFASNVVEKCLTFGSPEQRQILINEMLGTTDENEPLQAMMKDQFANYVVQKVLETCDDQNRELILSRIKVHLNALKRYTYGKHIVTRVEKLIAAGERRIGALPSC

SEQ ID NO: 47233 - protein, 144 aa, Zea mays
  Coding DNA Sequence Number=SeqID_5454
  Homolog annotation: Hit_ID=Q5QM39; Match level="QueryCoverage=25%, HitCoverage=11%, E-value=5e-09, Identity=78%"; Hit description =Putative cinnamyl alcohol dehydrogenase
MGMWKVVCVTDASAYIASWIVRLLLDRGYTVRATVRDTDMCGFSQFIWLHFYLPLNLIPDAGRQILSLLAAICVYLGISLKVDSTEPKHIKAYCYYLSFMFQTHLILHISTVCLHAQMLNSIYSLPYLFMIDEPISIDHDINVP

SEQ ID NO: 47234 - protein, 264 aa, Zea mays
  Coding DNA Sequence Number=SeqID_5455
  Gene Ontology: Mol. function=metal ion binding; Cellular component =integral to membrane; Biological process=ubiquitin cycle
  Homolog annotation: Hit_ID=Q9LRB7; Match level="QueryCoverage=89%, HitCoverage=72%, E-value=1e-44, Identity=47%"; Hit description=E3 ubiquitin-protein ligase EL5
  Pfam annotation: Domain name=zf-C3HC4; Domain location=97-138; Score =32.0; E_value=2.1e-06; Accession=PF00097.15; Description=Zinc finger, C3HC4 type (RING finger)
MTLSSILTVAGILLLFVFFAFGIVSLQYCFKVWDRESQQGEQSRRRQRRGTADGSSGGVRTSRGVDPELLRSLPVTVYQLAPPQGAGKGPQQDAVECAVCLAELQDGEEARFLPRCGHGFHAECVDMWLASHTTCPLCRLTVSKPDDGSPPPLSLALPPVPPEPANYTTTANLPASVLLGVSDHGAVTAGTGSAPAMVIEIPELFAPTPTLTPCDASKTPGSAGLRSIRRLWSFGRQGAAATSSCACAGAGAGASGVDLEQGMR

SEQ ID NO: 47235 - protein, 451 aa, Zea mays
  Coding DNA Sequence Number=SeqID_5456
  Gene Ontology: Mol. function=protein dimerization activity; Cellular component=nucleus; Biological process=negative regulation of cell proliferation
  Homolog annotation: Hit_ID=Q2QNH1; Match level="QueryCoverage=73%, HitCoverage=40%, E-value=1e-157, Identity=80%"; Hit description=HAT family dimerisation domain containing protein, expressed
MAPRKHPSGSKKRKRRKEVEEFIESQRGAMDKFVRTNTRTSKKCKSSLGHDGFGDWRHTSERLKEHEASMEHITSMNSWNELRVRLRKTETIDKEFQHQIAKEKERIRQVLLRIIAVVKFLGKRTLAFRGSSEQLYNDQNGNFLACLEMIAEFDVVMQDHLRRIQNNDIQYHYLSHKIQNELISLLASDITKSIIKIVKETKYFSVILDCTPDVSHQEQMSLLVRCVNMSSGKVEEYFLGFMKVDDTSGEGLFNSLLDSIKYFGLNIEDVRGQGYDNGSNMKGKHKGVQRRLLDINPRALFMPCACHSLNLTLCDMAKSCAKAISFFGIVQRIYVLFSSSTKRWDVLKGHVESLTVKSWCNTRWESRIKSVRRLPEMEEGALTARYTNRSPTHADPWPDGERPVLAMNCSKTRGPSNQQCDERLQWRQANLRGHQFGLGWRGGLGRVRRHP

SEQ ID NO: 47236 - protein, 102 aa, Zea mays
  Coding DNA Sequence Number=SeqID_5457
MENGARALSVHHGRDTKLSSMERSGAGGGDGRWLLAAGKQGDRGRRLWLASSESGRVRRRLLLRPRLGSGGVVTPLEAEAEAEAWGRARRRSSSEAEAEAEA

SEQ ID NO: 47237 - protein, 652 aa, Zea mays
  Coding DNA Sequence Number=SeqID_5458
  Gene Ontology: Mol. function=calmodulin binding
  Homolog annotation: Hit_ID=Q6YU05; Match level="QueryCoverage=99%, HitCoverage=100%, E-value=0.0, Identity=79%"; Hit description =Putative calmodulin-binding protein
  Pfam annotation: Domain name=Calmodulin_bind; Domain location=99-402; Score=670.8; E_value=1.1e-198; Accession=PF07887.2; Description =Calmodulin binding protein-like
MPRPGRLQRSGSKRGLDPTGGGGGGDNDDHAPKRPRIPALASVIVEALKMDSLQKLCSSLEPILRRVVSEEVERALAKLGPARIQGRSSPKRIEGPDGRNLQLQFRSQLALPIFTGGKVEGEQGAAIHVVLLDANTGCVVTSGPESFAKLDILVLEGDFNKDEDEDWTEEEFESNIVKEREGKRPLLTGDLQVTLKEGVGTIGELTFTDNSSWIRSRKFILGLRIAPGFYEGIRVREAKTEAFPVKDHRGELYKKHYPPTLKDDVWRLEKIGKDGAFHKKLNASGIYTVEDFLQLLVRDQQRLRSILGSGMSNKMWDSLVDHAKTCVLSGKHYVYYARDSRNVGAIFNNIYEFTGLIADDQFISAENLTDNQKGYADALVKKAYEDWMQVVEYDGKALLSFKQKKKSVMTRSDAAVASTNHPASNGSAISQKQLSLPAKAGQTSSAGIMNEDGTRNAYNANGNQSARYAATTQNIPANVAMQYDRSAVSPESQFSGSSLQSQASRGSNTLALGPPQQHQSFAFPALGQSMRPTGLNPFEEWPQQQENCGGVDDYLMEEIRMRSHEILENEEMQQMLRLLSTGGAGTNLTEDGFSFPSYMPAPSPKLSYEDDRTRAPGKAVVGWLKIKAAMRWGIFVRKKAAERRAQLVELDD

SEQ ID NO: 47238 - protein, 85 aa, Zea mays
  Coding DNA Sequence Number=SeqID_5459
  Subcellular localization annotation: CTP_CleavageSite=70; ConfidenceScore=5.29e-01
MAILSIISPFIVGIGVMNRPNMLGMKSSSEAPGHFRKHVSSDSSQASQWTRIIRRLVKRRRCKQESFGVTAAGETDLKMKRLFRP

SEQ ID NO: 47239 - protein, 68 aa, Zea mays
  Coding DNA Sequence Number=SeqID_5460
MAIEYTRALEARFYYLAHWSGERECVEDVIRIVIRLAPLEYIGGRLYRDAILMDSMWRNHPNYSSLSV

SEQ ID NO: 47240 - protein, 206 aa, Zea mays
  Coding DNA Sequence Number=SeqID_5461
MAFASPRWRYAGGMPRVNQCPITRRTQCHTKELGERNRYSYLTGDPWVDDAGCREQEHTAILNVVEASRVSHPRHARQERDPRRVPRQSTTCARDSHGHCPGPEISRGRAPTNRPVCHYGPRRLTEHAPAIYAPEGGDTQHRGGVRSGEGFRFARFPVVACRNRSATKSGMGLVTRILIDSSDRPTPQGSHRVLHMRQVEVQQRAR

SEQ ID NO: 47241 - protein, 380 aa, Zea mays
  Coding DNA Sequence Number=SeqID_5462
  Gene Ontology: Mol. function=protein binding; Biological process =ubiquitin cycle
  Homolog annotation: Hit_ID=Q53LU3; Match level="QueryCoverage=48%, HitCoverage=48%, E-value=1e-67, Identity=64%"; Hit description=F-box protein family, AtFBL12, putative
  Pfam annotation: Domain name=PPR; Domain location=31-65; Score=7.9; E_ value=0.87; Accession=PF01535.11; Description=PPR repeat
  Pfam annotation: Domain name=PPR; Domain location=67-101; Score=9.6; E_value=0.55; Accession=PF01535.11; Description=PPR repeat
  Pfam module annotation: Pfam domain module=PPR::PPR; Domain location =31-65::67-101
MISGFAYNGQFREALLVYNDMCREGVTLDDTVFVAALGACAHGGLLQEGWSIFNQMVEYCRIVPRMEHYGCIVDLLGRAGKLQEAVRFIESMPLKPGAFLEYLKCFLRQRNICFLGSIVGFSIAFRQLQDQGVSAIFSNCPNICTLIVTGCRHLSGAGFRGCSSSLRYLEAESCMLSPDGLLDIASGSGLKYLNLQKLRSSTGLDGLGNLALTKSLCILNLRMCRYLTDDSVAAIAGGCPLLKEWNLALCHGVHLPGWSAIAMYCSKLRVLHVNRYRHICDQSLLALSNGCPRLEAVHINGCAKGILDPAFLKHVQPISICPCTKSVPIVRLPDGSQRISMEVVLEMLMEVEATIYGVRHAGVYGREKKSPSVIIAVKIF

SEQ ID NO: 47242 - protein, 302 aa, Zea mays
  Coding DNA Sequence Number=SeqID_5463
  Gene Ontology: Mol. function=RNA-directed DNA polymerase activity; Cellular component=mitochondrion; Biological process=RNA-dependent DNA replication
  Homolog annotation: Hit_ID=UPI00004C1732; Match level="QueryCoverage =87%, HitCoverage=19%, E-value=1e-123, Identity=77%"; Hit description= UPI00004C1732 related cluster
  Pfam annotation: Domain name=rve; Domain location=108-267; Score =103.3; E_value=7.1e-28; Accession=PF00665.16; Description=Integrase core domain
  Subcellular localization annotation: CTP_CleavageSite=54; ConfidenceScore=5.18e-01
MGVPPKSRLGRTSYLAISPTRGELALSTELKARRLGAARQVVSSCWGTGRSSTTAAPQASFQRCISIAEGFYWPTTVVDATRIVRTCQGCQFYARQTHLPAQALQTIPITWSFAVWGLDLVGPLHKAPGGYTHLLVAIDKFSKWIEVRPLNNIRSEQAVTFFTNIIHRFGVPNSIITDNGTQFTGRKFLDFCEDHHIRVDWAAVAHPMTNEQVERANDMILQGLKPRIYNDLHKFGKRWMKELPSVVWSLRTTPSRATGFTPFFLVYGTEAILPIDLEYGSQGRGHSTTKAIEPTEKTHWTS

SEQ ID NO: 47243 - protein, 391 aa, Zea mays
  Coding DNA Sequence Number=SeqID_5464
  Gene Ontology: Mol. function=DNA-directed DNA polymerase activity; Cellular component=epsilon DNA polymerase complex; Biological process=nucleobase, nucleoside, nucleotide and nucleic acid metabolic process
  Homolog annotation: Hit_ID=Q6K777; Match level="QueryCoverage=79%, HitCoverage=15%, E-value=1e-129, Identity=71%"; Hit description =Putative DNA polymerase epsilon catalytic subunit protein isoform b
MELNSGLRSGTQMEWYSDHLTNLATNKELNFLTTQLPPNELRTCCSVFCYRKGLVMCKQIKRKRTEAEVFDKFLHGSTLEECYSAVASVANRWLDLLDNQGIDIADSELLDFISESSTMSKSLVDYGEQKSCAVTTAKRLAEFLGDSMVKDKGLHCQYIVAREPQGTPVSERAVPVAIFETDPEIAKHYLRKWFRFSSDANIRSIVDWSYYKQRLSSAIQKIITIPAAMQKISNPVPRVLHPDWLHKKVREKDDRFRQRKLRDIFSPLAKEEGLHNLNRTGDMEDLLISNKDLRKNPSHGLDIDKENNPNGASVGSGLNISKKQQNCMTGLNVPCTSQIQNAASYETVDKGTDYQGWLDAKKRKGKYVREQKKRRSVYYFIMLNFKYNQIA

SEQ ID NO: 47244 - protein, 185 aa, Zea mays
  Coding DNA Sequence Number=SeqID_5465
MESNVQVDGSVDGRGGGYEEGTKSVQLMAQAKIDAAVAEHAAEERTELYLKLEETGHEMAQVRLEQIGRELENSSGEVENQGRKNHEQNKVSTSAWNNIIACEANCCALFAVHEDPSSRTTACEANRCAHKRVEELRVARNSMMFKLALIIVYKLTPGRLNAKLSFLKNVIGCSEAELGNMDMFG

SEQ ID NO: 47245 - protein, 246 aa, Zea mays
  Coding DNA Sequence Number=SeqID_5466
  Gene Ontology: Mol. function=peptidase activity; Cellular component =membrane; Biological process=proteolysis
  Homolog annotation: Hit_ID=Q6Z8K1; Match level="QueryCoverage=89%, HitCoverage=42%, E-value=4e-98, Identity=78%"; Hit description =Aspartyl protease-like
MSLGHFQFKFHYNHCSWLRSSCGAKCSIINGASIMQDRDLRIYRPAESTTSRHLPCSHELCQSVPGCTNPKQPCPYNIDYFSENTTSSGLLIEDTLHLNYREDHVPVNASVIIGCGQKQSGDYLDGIAPDGLLGLGMADISVPSFLARAGLVQNSFSMCFKEDSSGRIFFGDQGVPSQQSTPFVPLYGKLQTYAVNVDKSCIGHKCLEGTSFKALVDSGTSFTSLPFDVYKAFTMEVTIHAFAAGC

SEQ ID NO: 47246 - protein, 170 aa, Zea mays
  Coding DNA Sequence Number=SeqID_5467
MEAKVRDEACAEEEDELDGFWVSYGRRRPRRRLPPPIPSLVARGALRRTRTDDGRLVIRIVPVVRPECIRARRDRRVENVGSSPVMPPPPPPLRDLMAAAREDGIRINAARADDGDTATTPAAGEGVRDVEDVVATPAAEAQPAVPPTRVRGMLRCSSSLHQMPSLRMVH

SEQ ID NO: 47247 - protein, 35 aa, Zea mays
  Coding DNA Sequence Number=SeqID_5468
MDSHGFVPCSFTVDDPEPPPLIRRPEGDRTNDIPA

SEQ ID NO: 47248 - protein, 610 aa, Zea mays
  Coding DNA Sequence Number=SeqID_5469
  Gene Ontology: Mol. function=ligase activity; Cellular component =plastid chromosome; Biological process=embryonic development ending in seed dormancy
  Homolog annotation: Hit_ID=Q6Z8K6; Match level="QueryCoverage=34%, HitCoverage=100%, E-value=5e-87, Identity=74%"; Hit description =Pentatricopeptide (PPR) repeat-containing protein-like
  Pfam annotation: Domain name=PPR; Domain location=125-159; Score =35.2; E_value=2.2e-07; Accession=PF01535.11; Description=PPR repeat
  Pfam annotation: Domain name=PPR; Domain location=200-234; Score =33.6; E_value=6.7e-07; Accession=PF01535.11; Description=PPR repeat
  Pfam annotation: Domain name=PPR; Domain location=235-269; Score =39.6; E_value=1.1e-08; Accession=PF01535.11; Description=PPR repeat
  Pfam annotation: Domain name=PPR; Domain location=270-304; Score =24.5; E_value=0.00039; Accession=PF01535.11; Description=PPR repeat
  Pfam annotation: Domain name=PPR; Domain location=305-339; Score =33.3; E_value=8.5e-07; Accession=PF01535.11; Description=PPR repeat
  Pfam annotation: Domain name=PPR; Domain location=340-374; Score=3.6; E_value=2.8; Accession=PF01535.11; Description=PPR repeat
  Pfam annotation: Domain name=PPR; Domain location=375-409; Score =23.5; E_value=0.00074; Accession=PF01535.11; Description=PPR repeat
  Pfam annotation: Domain name=PPR; Domain location=410-444; Score =15.6; E_value=0.11; Accession=PF01535.11; Description=PPR repeat
  Pfam module annotation: Pfam domain module=PPR::PPR::PPR::PPR::PPR::PP R::PPR::PPR; Domain location=125-159::200-234::235-269::270-304::305 -339::340-374::375-409::410-444
  Subcellular localization annotation: CTP_CleavageSite=45; ConfidenceScore=5.35e-01
MLACPSTSSPWPQRQPPSPCPGGGGGATRHVALAARSKRRGAGPAAAEGVDEAAAEAAELVRSLLRRTAGGKERLVPVLDRHVRVVRTEHCFLLFEELGRRDAWLQCLDVFRWMQKQRWYVADNGIYSKLISVMGRKGQIRMAMWLFSQMRNSGCKPDTSVYNSLIGAHLHSRDKTKALAKALGYFEKMKCIERCQPTIVTYNILLRAFAQAGDTKQVDMLFKDLDESVVSPDVYTYNGVLDAYGKNGMIKEMESVLVRMKSTQCRPDVITFNILIDSYGRKQTFDKMEQVFKSLLRSKERPTHPTFNSMITNYGRARLREKAESVVEKMEELGFKPNYVTQECLIIMYAHCDCVSKARQVFDELVTSQTKVHLSSLNSMLEAYCMNGLHTEADRLLDTALQQCVVPNGSTYKLLYKAYTKANDKLLVQKLLKRMNKQGIVPNKKFFLDALEAFGTSDRKPRTSPGINSASKPSTDSAGDSETATSDKPEIVQHQADALSENGASTSVLLGGIGKLLLWESTGEHVRTCGGRTTTCIVITPPGISPTGTRDSASVRLFSNILPPLISFKSLTVFGAISLSVSSNEKKKLHSANKNDRHGLQNKDIVQEKF

SEQ ID NO: 47249 - protein, 184 aa, Zea mays
  Coding DNA Sequence Number=SeqID_5470
  Homolog annotation: Hit_ID=Q6Z8K4; Match level="QueryCoverage=25%, HitCoverage=40%, E-value=9e-17, Identity=83%"; Hit description =Membrane-anchored ubiquitin-fold protein 3 precursor
MRHWIVVHVCLTVYFEMENKFGLFPHRMPKSHDYGLRQQYRTGKKATRPRAVKTPEIEAIADVESRPALARVSVDFFPLPCSCLLWAFDPGLRGSWEEEVRWAPRRRSGGEDMASGKEPIEVRFRLFDGTDIGPTKYDPSTTVSSLKEFILARWPQGEALMRLVDLVAYTPVPSRSADKLRTLL

SEQ ID NO: 47250 - protein, 155 aa, Zea mays
  Coding DNA Sequence Number=SeqID_5471
  Subcellular localization annotation: CTP_CleavageSite=45; ConfidenceScore=5.26e-01
MQLSFNDTSMKAICGHPSRSRPPAQLAPPTRCLLAVGLGSPTHARQEMVTEGKQHLEETSAPPAQRWNGRERYGVARLEPSLHLIDEPTRVGSVQAFQCAVVAGWVVTDAFNIILKGLTTLSSMASLFVNQWSLKYHDLELDKEAENTWVDCYIE

SEQ ID NO: 47251 - protein, 245 aa, Zea mays
  Coding DNA Sequence Number=SeqID_5472
  Pfam annotation: Domain name=VQ; Domain location=119-149; Score=42.9; E_value=1.1e-09; Accession=PF05678.4; Description=VQ motif
MARLFQLPHAKAKFVLHIYTKFPARAISCHPDTTDRKAKLRPQPTPMYSFDLEQDHTAAAARTTATTTYQPCARGARSLQLSGAHHYHPGEQALRTAAAVRPRRAKSSSSRKHAPSSSRRSSTTVVATDVSNFRAMVQELTGFFPPPAAVFRPLPRRVHATSPSVAVAVAAGQGCGWERRGSHGSSEAANSSTAGGGSSPDEGPAVPPPLVVAPQPQFAPLGVFDGLPDLGSPEFGWWGDLSIDF

SEQ ID NO: 47252 - protein, 356 aa, Zea mays
  Coding DNA Sequence Number=SeqID_5473
  Gene Ontology: Mol. function=binding; Cellular component=thylakoid; Biological process=photosynthesis
  Homolog annotation: Hit_ID=Q6Z6B0; Match level="QueryCoverage=57%, HitCoverage=93%, E-value=2e-85, Identity=78%"; Hit description =Tetratricopeptide repeat(TPR)-containing protein-like
  Pfam annotation: Domain name=TPR_1; Domain location=181-214; Score =12.2; E_value=0.19; Accession=PF00515.18; Description=Tetratricopepti de repeat
  Pfam annotation: Domain name=TPR_1; Domain location=227-260; Score =7.9; E_value=0.61; Accession=PF00515.18; Description=Tetratricopeptid e repeat
  Pfam annotation: Domain name=TPR_1; Domain location=261-294; Score =33.3; E_value=8.3e-07; Accession=PF00515.18; Description =Tetratricopeptide repeat
  Pfam annotation: Domain name=TPR_1; Domain location=295-328; Score =8.4; E_value=0.53; Accession=PF00515.18; Description=Tetratricopeptid e repeat
  Pfam annotation: Domain name=TPR_2; Domain location=181-214; Score =25.2; E_value=0.00023; Accession=PF07719.7; Description =Tetratricopeptide repeat
  Pfam annotation: Domain name=TPR_2; Domain location=227-260; Score =18.3; E_value=0.027; Accession=PF07719.7; Description=Tetratricopepti de repeat
  Pfam annotation: Domain name=TPR_2; Domain location=26-59; Score=7.7; E_value=4.2; Accession=PF07719.7; Description=Tetratricopeptide repeat
  Pfam annotation: Domain name=TPR_2; Domain location=261-294; Score =20.9; E_value=0.0046; Accession=PF07719.7; Description =Tetratricopeptide repeat
  Pfam annotation: Domain name=TPR_2; Domain location=295-328; Score =14.5; E_value=0.38; Accession=PF07719.7; Description=Tetratricopeptid e repeat
  Pfam annotation: Domain name=TPR_4; Domain location=135-160; Score =15.4; E_value=0.21; Accession=PF07721.5; Description=Tetratricopeptid e repeat
  Pfam annotation: Domain name=TPR_4; Domain location=181-206; Score =17.8; E_value=0.04; Accession=PF07721.5; Description=Tetratricopeptid e repeat
  Pfam annotation: Domain name=TPR_4; Domain location=227-252; Score =0.1; E_value=36; Accession=PF07721.5; Description=Tetratricopeptide repeat
  Pfam module annotation: Pfam domain module=TPR_1::TPR_1::TPR_1::TPR _1::TPR_2::TPR_2::TPR_2::TPR_2::TPR_2::TPR_4::TPR_4::TPR_4; Domain
  Pfam module annotation: Domain location=295-328::135-160::181 -206::227-252
MGTRSTAGIPRRLGPLYDSIMMTRGDRVLEQQGGRARRARAAHRAVADCKEAVRIDPSYDRAHTAWRLVLRLGEADKAIYHLKQSSNESASADVSRAQSVKSRIAKSNDARRLKNWFTVLQEAQAAASDGADCAPQVMALQAEALLRLQRHDEADSLLSSAGAPRFGVDESTKFFGTFGHAYFLIVRAQVDMAAGRFEDAVATAQTAFQLDPSNREVAVVQRRAKAAAAARLRGNDLFKAAKFVEACAAYGEGLDREPGNAVLLCNRAACHAKLGRHEKAVEDCSGALVVRPSYSKARLRRADCNVKLERWEASLRDYQVLIQELPENEDVKKALSEVEAKLKDQRNGAAAARSQH

SEQ ID NO: 47253 - protein, 337 aa, Zea mays
  Coding DNA Sequence Number=SeqID_5474
  Subcellular localization annotation: CTP_CleavageSite=64; ConfidenceScore=5.09e-01
MLHRRSRTLGGSSDRAARRAVATKSGTRGSGNGAATDLLVCFPSRAHLALMPPKAICSPSRPPSASEPVKRRHSTSRAGPTPLPPSWPGLYKSATCTARNPPIHRHRGADRAPVDDEPTSPKVTCAGQIKARPPKPSGGGKKATWLQALGIKKDAMALLDALHGAFRFNVAGCFGSFPGAAGVAGYTSAEDDDDDEEEEEDVPRAEKDTEHGGAARARWFMVLEEGNKKVSTKKLQGQEPERSQEEDAAPPANALMLMRCRSAPAKGLARRVEAEEEREDVKIATNKTPEKETEKERESLVLMTYSPDFFKVSLDIAKETWIVGGDDAVLRCRSWKR

SEQ ID NO: 47254 - protein, 166 aa, Zea mays
  Coding DNA Sequence Number=SeqID_5475
  Subcellular localization annotation: CTP_CleavageSite=24; ConfidenceScore=5.65e-01
MDAIQVKASSTQGTRSRLARAQPRAGTVVPGEFTPRPRAFSSNGRTLDSPKPSSGRLRCEATLAKSPHQPTVSQSEAGNSQVQPQAQQEAPPRPTPGLSLNLGLGRRTPPRPTPWLGLSLGLGGWSTPRPTLGLGLNLDLGRNRVLARPRPRPREESPPRPTLGSD

SEQ ID NO: 47255 - protein, 80 aa, Zea mays
  Coding DNA Sequence Number=SeqID_5476
MANSYLARLALDYAQPAKELYQKQQQMLTIRVTNRELERETRCRWQCPFGRALTTVPSLALREAVSNDLKNDFSSRAIKE

SEQ ID NO: 47256 - protein, 365 aa, Zea mays
  Coding DNA Sequence Number=SeqID_5477
  Gene Ontology: Mol. function=voltage-gated ion channel activity; Cellular component=integral to membrane; Biological process =potassium ion transport
  Homolog annotation: Hit_ID=Q40648; Match level="QueryCoverage=90%, HitCoverage=100%, E-value=1e-169, Identity=89%"; Hit description =Probable voltage-gated potassium channel subunit beta (K(+) channel subunit beta)
  Pfam annotation: Domain name=Aldo_ket_red; Domain location=7-321; Score=339.2; E_value=6.9e-99; Accession=PF00248.11; Description =Aldoketo reductase family
MQYKNLGRSGLRVSQLSYGAWVTFGNQLDVKEAKVLLQACRDAGVNFFDNAEVYANGRAEEIMGQAIRDLGWRRSDVVISTKLFWGGQGPNDKGLSRKHVVEGLRGSLRRLALDYVDVVYCHRPDASTPVEETVRAMNWVIDQGWAFYWGTSEWSAQQITEAWAVANRLDLVGPIVEQPEYNLFSRHKDTRRKTANPNDESTYGIGLTTWSPLASGVLSGKYGKGDIPADSRFALDNYKNLANRSLVDDTLRKVNGLKPIAAELGVSLAQLSIAWCASNPNVSSVITGATKESQIVENMKALDVIPLLTPEVVDRIEAVVQSKPKRNVESYRFWTNSILHCVACEQKDLLDDHDPFWSCCKISGA

SEQ ID NO: 47257 - protein, 322 aa, Zea mays
  Coding DNA Sequence Number=SeqID_5478
  Gene Ontology: Mol. function=protein dimerization activity; Cellular component=nucleus; Biological process=regulation of transcription, DNA-dependent
  Homolog annotation: Hit_ID=Q59AA1; Match level="QueryCoverage=74%, HitCoverage=87%, E-value=2e-72, Identity=64%"; Hit description=Auxin- responsive protein IAA10
  Pfam annotation: Domain name=AUX_IAA; Domain location=40-267; Score =61.1; E_value=3.5e-15; Accession=PF02309.7; Description=AUXIAA family
MRGGGAGPTAAFMSDEPPPADAEEVEENSGAEEEDEETVVEQDDDELELGLCLGSKQQQQQHPPPCRILTARDLQPRSLSPDSSVSSSSPAAGAGTAAPSKRAKADAAPNSPGTVASGHPQSSFGVVGWPPIRTFRMNSLFNQAKENASEAGAKKPIVEPDMQEDKEESKKGRTVGWVKVNMEGDIIGRKVDLNAHRSYKTLASALELMFMKPSIGLCTSSSSKTLKLLDSSSEYQLTYEDRDGDWMLVGDVPWEFSEEAQDHENLRRQRSRSTIPRVSQTHSSLHERQDVKPPIMSLLIAVVCNATPTTHPGVGWGQNVDV

SEQ ID NO: 47258 - protein, 240 aa, Zea mays
  Coding DNA Sequence Number=SeqID_5479
  Homolog annotation: Hit_ID=Q6V9H6; Match level="QueryCoverage=86%, HitCoverage=70%, E-value=1e-70, Identity=70%"; Hit description=Brown planthopper-induced resistance protein 1
  Pfam annotation: Domain name=CBS; Domain location=105-215; Score =82.4; E_value=1.4e-21; Accession=PF00571.18; Description=CBS domain
  Subcellular localization annotation: CTP_CleavageSite=43; ConfidenceScore=5.66e-01
MACVSTFQSCPIARRAKINTRSRGSSSSVAKGSPPPAFQFQCRASTFAADTSLRLELDENPEAIISGAWPGNCSLLSYDDLRAYLESQETAAQADDQRGVALLSETMSTPVLVATADQTLEDVECHFEAVSGLPVVDSGLRCVGVIVKNDRARASHGSKTKISEVMTSPAITLSSDKTVMDAAVLMLKKKIHRLPVVNQDEKVIGTRLYVARANGVLNTVNRHVEDLGAQIPMLGSHSLL

SEQ ID NO: 47259 - protein, 397 aa, Zea mays
  Coding DNA Sequence Number=SeqID_5480
  Gene Ontology: Mol. function=transferase activity; Cellular component= nucleus; Biological process=regulation of transcription, DNA-dependent
  Homolog annotation: Hit_ID=Q1RUG3; Match level="QueryCoverage=66%, HitCoverage=96%, E-value=1e-109, Identity=70%"; Hit description =Polynucleotidyl transferase, Ribonuclease H fold
  Pfam annotation: Domain name=CAF1; Domain location=25-258; Score =405.1; E_value=9.9e-119; Accession=PF04857.10; Description=CAF1 family ribonuclease
MAMPDLTATVIPKLGEADDESVEIREVWADNMEEEFALIRDIVDEYPFVAMDTEFPGIVCRPVGAFRSPADYNYATLKANVDMLHLIQLGLTFSGPRGELPVLGAGRRRCVWQFNFREFDDARDIFASDSIELLRRSGIDLRLNAERGVDARRFAELLMSSGVVLNDSVYWVTFHAGYDFGYLLKILTCNCLPDTQAGFFKLMKIYFPTVYDIKHLMKFCNSLHGGLNKLAELLDVERVGESHQAGSDSLVTSCAFWKLKDSFFTGSTEKYAGRFYCPDESCLPLTVNAVVASTIPSDVRFCRPSALSRSLRHPPRCINARGFCLSLSLCRLPPPHPFPHRGSRPKAPRIHRTLALAPQFSAMDALDPPPPPLSLTTPPAPAAHLHRAPSLAVDLAW

SEQ ID NO: 47260 - protein, 124 aa, Zea mays
  Coding DNA Sequence Number=SeqID_5481
  Homolog annotation: Hit_ID=Q6K8X7; Match level="QueryCoverage=32%, HitCoverage=7%, E-value=2e-07, Identity=70%"; Hit description =Pentatricopeptide (PPR) repeat-containing protein-like
  Subcellular localization annotation: CTP_CleavageSite=70; ConfidenceScore=5.70e-01
MAAAARSRLAGLRLDLASRTAPNPKPLLSSAFSSSTISAPPAAGRVREDESGLLSRRLLRLRFRSPAGTAAAAVERWAQDRVHVSQPELRRAIGMLRRERRYEQALELPSTVVMGSCSKTGLDC

SEQ ID NO: 47261 - protein, 140 aa, Zea mays
  Coding DNA Sequence Number=SeqID_5482
  Gene Ontology: Mol. function=hydrolase activity
  Homolog annotation: Hit_ID=Q6PPF8; Match level="QueryCoverage=57%, HitCoverage=24%, E-value=3e-40, Identity=95%"; Hit description =Putative inosine-uridine preferring nucleoside hydrolase
MVISLDLLYAKIIKNKWCCMSAKSTAFLHGAFSGDLLQVWLVQAAKGTSIDQHYEAQQQGIFLHDPVSFTVALHPEYFTFKKGVVRVEIQGICTGNTLMDQGLKKWNSENPWSGYKPISVAWTVDVPKVISFIKKLLMAP

SEQ ID NO: 47262 - protein, 117 aa, Zea mays
  Coding DNA Sequence Number=SeqID_5483
  Subcellular localization annotation: CTP_CleavageSite=78; ConfidenceScore=5.36e-01
MAVIAYRRAVLLHGHQRSRTARALDPSVVAVASHGRGRRRTWPSSPTGVRCSCTGTISGRNGGRPHPAPTPSRSGAVPSSEKAKIQPPSSTTTASRYGSKSLNYDLYTELYVVQDLP

SEQ ID NO: 47263 - protein, 74 aa, Zea mays
  Coding DNA Sequence Number=SeqID_5484
MAVASDGIRAARESGRWTHGAVVESARWSSEMGCARTETNERWAEFRFQGPIQGDVTQKLCGKYSNSHSLENFT

SEQ ID NO: 47264 - protein, 126 aa, Zea mays
  Coding DNA Sequence Number=SeqID_5485
  Gene Ontology: Mol. function=ATP-dependent helicase activity; Cellular component=nucleus; Biological process=rRNA processing
  Homolog annotation: Hit_ID=Q7FGZ2; Match level="QueryCoverage=74%, HitCoverage=18%, E-value=5e-25, Identity=61%"; Hit description=DEAD -box ATP-dependent RNA helicase 1
  Pfam annotation: Domain name=DEAD; Domain location=1-122; Score= -48.0; E_value=0.063; Accession=PF00270.19; Description=DEADDEAH box helicase
MKWARVGASSFLVLYLVREVFDDIAPMVGLSVGSAVGQSSIADEVSSLVPKPKQEFYPTIDEEYVQMEPQTKIDILVATPERLMDHINMTNGFSLEHLQYLVIDETDRMLTYYVSCRGVERVFKDI

SEQ ID NO: 47265 - protein, 71 aa, Zea mays
  Coding DNA Sequence Number=SeqID_5486
MSKTLRTGKQNKVHGRNRYPDSLMHHGWFLVASTEQFNNSSGLYMKTHADERKNYSVAEIQSLDSLECAFQ

SEQ ID NO: 47266 - protein, 354 aa, Zea mays
  Coding DNA Sequence Number=SeqID_5487
  Gene Ontology: Mol. function=transcription regulator activity; Cellular component=nucleus; Biological process=regulation of transcription
  Homolog annotation: Hit_ID=Q5SMP1; Match level="QueryCoverage=72%, HitCoverage=80%, E-value=4e-60, Identity=47%"; Hit description=BHLH transcription factor PTF1-like
  Pfam annotation: Domain name=HLH; Domain location=139-180; Score =22.4; E_value=0.0006; Accession=PF00010.16; Description=Helix-loop -helix DNA-binding domain
MQGGGGGGGQDDFLDQMLSTLPPAWPDLGYGKSSPWELPAGPDAAAAAAAAFDETALLASRLRHHQIGGVDEKPLMLHLSDLHGVAAGGGDDAGFMPLPLFTDRAAFKSPNAAGADQALYNGFGAAGMHAAAVHQPPFGQLRRERIAERMKALQELVPNANKTDKASMLDEIIDYVKFLQLQVKVLSMSRLGGAAAVGPLVASMASEGDDRAGNGTSDDGGDGATNGDNGGGGSSLRVTEQQVARLMEEDMGTAMQYLQGKGLCLMPISLASAISSSTSSSPPPSLLPRPSVGSVEGARGPLHDDSGGAGGDDGSRTIKYAGAGGEEESKLLVQRDHIHITYQPEYTFYGMRLG

SEQ ID NO: 47267 - protein, 995 aa, Zea mays
  Coding DNA Sequence Number=SeqID_5488
  Homolog annotation: Hit_ID=Q6F2U9; Match level="QueryCoverage=21%, HitCoverage=35%, E-value=1e-113, Identity=91%"; Hit description =Lysyl-tRNA synthetase
  Pfam annotation: Domain name=DUF594; Domain location=913-969; Score =70.7; E_value=4.7e-18; Accession=PF04578.4; Description=Protein of unknown function, DUF594
  Pfam annotation: Domain name=tRNA-synt_2; Domain location=27-308; Score=125.8; E_value=1.2e-34; Accession=PF00152.11; Description=tRNA synthetases class II (D, K and N)
  Pfam module annotation: Pfam domain module=DUF594::tRNA-synt_2; Domain location=913-969::27-308
MVNHLPELVLKKNNGMHMTYGLDLEHSPETRYRQRYLDLMVNHEVRHIFKTRSKVVSFIRKFLDDREFLEVETPMMNMIAGGAAARPFITHHNELNMRLFMRIAPELYLKELVVGGLDRVYEIGKQFRNEGIDLTHNPEFTTCEFYMAYADYNDLMELTETMLSGMVKELTGGYKIKYHANGVTNSPIEIDFTPPFRRIDMIKDLEAMANLNIPKDLASDEAKRYLIEACAKYDVKCPPPQTTSLRPETETEMFDVWSVVGWWDRWQLRVLVLGSLGIQWFLLVAAPMRKYTIRPGLRLCIWLAYISSDALAIYALATLFNRHARATSSSSCDGGANSKARILEVLWAPVLLIHLGGQEELTAYTIEDNELWTRHTVTLVSQVAVALYAFYKSWPNPSDWKLLASAILLFIIGVVSFSEKPWALKKASINRLASVSATIQGTKKRTRLAVYLDDLLFSDWYSCSRATEKSSSSGSSLPAAAAAAGVGWHDCFSFTEPSNKGHGDHVGLSEADKVYMVLSDMSLSAAADDLVLRGRARNVEDVLRPLSTKAEQALKRWLRGAFGLIYTRANLVFTRTYLVYHVLVVPILHVAALTLFATSDKHGYDRTDVKITYVLLCLTAALDVLAVFVRQLLYGAMSAKGVPALCETVPGYNLVDAVTRRRQKDIGWLFRCAAAMGCKEEYLEYCKCGGGQQHYTLYKNVSKMVLADLVDAQGRDLANYRVFTVPYASPASTAAGPAVEQQRASPAGAANWALSEEQQKLCGRKVRDTLRGSFDRSVLVWHIATDLCFRMEQVPPDADKEEDSHWLRIKCTEAISCYMARLLDSHPDMLLTGSRRHLVSEALDELESIFDRTMVDRSGKPPGKDDLHKIIDDVARVRFQVPVGVAHGAADDDGEEAVQSFFHIPEACGLAMELLQLEASTRWRVMYRVWLGMLFYSASMCRGYLHAKSLGEGGEFLSYVWLVLSLKGAKTLADKLQMLEVEGDDRQGRRQGRKW

SEQ ID NO: 47268 - protein, 55 aa, Zea mays
  Coding DNA Sequence Number=SeqID_5489
MGKPVPSLLMLLLSRGRVPLDSPTRWSPALVKIILRRRWGSSRGSLTFGLRRTYD

SEQ ID NO: 47269 - protein, 132 aa, Zea mays
  Coding DNA Sequence Number=SeqID_5490
MAARRGTRPRLAGARPWRPSPGVPAQPLPALGARLRAHVVQPRWLAGAAARDLVVAAMAPPAQCPPACSPSPAVARPGSPAMAARPHPLGSPLPRPQCPAMPWPWWHGPDSCPPWRARPCPARSWRVGPARP

SEQ ID NO: 47270 - protein, 105 aa, Zea mays
  Coding DNA Sequence Number=SeqID_5491
MAMMGSTSEKKYLCQKQCQEKEKRMGENMAQDSQNQHQPGTPDSVRCPRLARRELAALGNRSGDLAKNHRTVRWCTGLSSESSAPSPKYIDDELVALGKTRKRRD

SEQ ID NO: 47271 - protein, 124 aa, Zea mays
  Coding DNA Sequence Number=SeqID_5492
  Homolog annotation: Hit_ID=Q9FGQ9; Match level="QueryCoverage=41%, HitCoverage=29%, E-value=1e-15, Identity=65%"; Hit description =Arabidopsis thaliana genomic DNA, chromosome 5, TAC clone:K14A3
  Pfam annotation: Domain name=DUF581; Domain location=33-99; Score =76.4; E_value=9e-20; Accession=PF04570.5; Description=Protein of unknown function (DUF581)
MEDYYYYFTSWGTVGSVEPTGFPAHTLPRNPSSASPKTRRASRGDADAGERLHHYYLDACFRCGRHLGGNKDIFMYRGDTPFCSDECRQQQIEDDEAREKKRSRQHAAATATATATKRERERRS

SEQ ID NO: 47272 - protein, 430 aa, Zea mays
  Coding DNA Sequence Number=SeqID_5493
  Homolog annotation: Hit_ID=Q2HS71; Match level="QueryCoverage=45%, HitCoverage=20%, E-value=2e-64, Identity=64%"; Hit description =Methyltransferase small domain, putative
  Pfam annotation: Domain name=MTS; Domain location=25-257; Score= -76.1; E_value=0.0042; Accession=PF05175.4; Description =Methyltransferase small domain
  Pfam annotation: Domain name=PIP5K; Domain location=262-425; Score =14.4; E_value=1.2e-11; Accession=PF01504.9; Description =Phosphatidylinositol-4-phosphate 5-Kinase
  Pfam module annotation: Pfam domain module=MTS::PIP5K; Domain location=25-257::262-425
MRPLPMASAAGEAHTRGEELDLFMENKVATMQYISGTGSLRVGSEFLASLFLKASSGRTLITAQIPLVASHPDVHEPCDDSFALVDALLSDKAQLLTLQPRLCMEVGFGSGYVITSLAIMLRQLGSGAQYLATDINQHAAETTQATLEAHGVHADVIVTDIMSGLDKRLAGMVDVAVVNPPYVPTHVEEVGCRGIAASWAVGLNGRQVIDRILPAVREMLSERGWLYMVALEDNDPSDICHLMSEMGNLREMFQIDAADYMMSICGDDSLKELSSPGKSGSIFYLSQDERFVIKTLRKTELKVRFVVMRNMFCTELRIHRKYDLKGSTQGRSTKKQNINENTTLEDLDLSYVFHVDKPWPDALFRQEEHTHEDLKEQQVVHGEVENTLGPGSINLALENPIPKDWRTIHMIGAESNLLDIVSNSVGTSIT

SEQ ID NO: 47273 - protein, 88 aa, Zea mays
  Coding DNA Sequence Number=SeqID_5494
  Subcellular localization annotation: CTP_CleavageSite=41; ConfidenceScore=5.36e-01
MNAAHCHRRVGHASLVPMLLNRAPQPTAPHRFRSWRGFLVLDSLSFSQRSLGGKNGSFRKDKFAYRIIEGHGSTGVALSYAPKSWIFM

SEQ ID NO: 47274 - protein, 144 aa, Zea mays
  Coding DNA Sequence Number=SeqID_5495
  Pfam annotation: Domain name=DUF581; Domain location=57-102; Score =20.0; E_value=6.5e-05; Accession=PF04570.5; Description=Protein of unknown function (DUF581)
  Subcellular localization annotation: CTP_CleavageSite=42; ConfidenceScore=5.20e-01
MEFTSSSYFHASGNPDFAAVFSDGGGSAQAHRPRRSTDDGTKAEDGRSPTTARRPPSAFCVPDTEAEEPNSFLDECTLCRKALCGDIFMYRREQIEMDRIRHRRKKQHALIQQQLQLQQQQQAAAAAMAQKDQRAQRRQLQPQH

SEQ ID NO: 47275 - protein, 34 aa, Zea mays
  Coding DNA Sequence Number=SeqID_5496
MEEDNIEVDDLGENLVDYGASLEHPEAAFTKPKE

SEQ ID NO: 47276 - protein, 114 aa, Zea mays
  Coding DNA Sequence Number=SeqID_5497
MALGPLGRPFFLPCHSLSLRWRLVFYCAGLQCPVSSCDTALGSAIVLGRVEPGGVADPYSVSLLHARVVSPAVFSAGKPYFQVRVSLGFHRFALVSPLHRFPLASLVAPGLGEV

SEQ ID NO: 47277 - protein, 161 aa, Zea mays
  Coding DNA Sequence Number=SeqID_5498
MQQKRRGAQQGKGIGEGQVAFRGPRTWGAGTPVAAETGEDGSGQQQAQVNVVVRGDMRDGRTDGPALRLPEHRTSVPTARGGNDAAALPACLLGVSGGGGQAAMQLTDARHSTARQGQAAADNQYEKTTALLAWKMAPEDCNSLLRDDVKWPLCTRLLHSA

SEQ ID NO: 47278 - protein, 390 aa, Zea mays
  Coding DNA Sequence Number=SeqID_5499
  Gene Ontology: Mol. function=DNA binding; Biological process =regulation of transcription
  Homolog annotation: Hit_ID=Q8H883; Match level="QueryCoverage=73%, HitCoverage=55%, E-value=6e-96, Identity=55%"; Hit description =Putataive InsB from Escherichia coli
  Subcellular localization annotation: CTP_CleavageSite=44; ConfidenceScore=5.60e-01
MAKPSRQNLTHASVTSLRRFGGQSSLPPSGASPALRLAAAALLLAAAVALPCAVLYRATVETMEPIHVPRVHRPLLPAPPLPPVQVPEDDSDFDPFPTGDLDSEDLKLELVLQEASMDNKTIILTTLNAAWASPGSVIDLFIDSFRRGVGTSSLLRHLVIVAFDFKAYEHCVKIHPYCYALPTKDVDFSEEKRFQTTGYLEMMWKRLDFLRLVLEKGYSFVFSDADIVWFRNPFPHFYTDGDFQIACDHYVGNATDLRNIANGGFNYVKSNDQSIEFYKFWYSSRFRYPGYHDQDVFNFIKHDRYTTDIGLTIKFLSTTYFGGICEPSRDLNKVCTMHANCCIGLQSKIHDLRIMMEDWSNYMSMPPSLKQFRALSWRVPQNCSLSLLSL

SEQ ID NO: 47279 - protein, 123 aa, Zea mays
  Coding DNA Sequence Number=SeqID_5500
MAKKIAQRANKSIVDQAAKGERKQKDRPPTTFRLPRLDVQNPRDGPMPVTTRHPLVAPVWHRVPTNRLFPTLGAQFLVLRRAHDRQTVALRRARNLRRLTRLAVERKASVVAQGVRKASTGRL

SEQ ID NO: 47280 - protein, 392 aa, Zea mays
  Coding DNA Sequence Number=SeqID_5501
  Homolog annotation: Hit_ID=P92683; Match level="QueryCoverage=11%, HitCoverage=27%, E-value=3e-18, Identity=82%"; Hit description =Cytochrome c oxidase subunit Vb
PQLSSLLATAQSPLDAFHGELSVGLPKSPHPYGEACPRHCPRQSLQSRKNHCVPTDLVMEGPSSPSRPHSRSPRPRHGRPSNPPFSLFPTILDPSAHGPGSPHAGMPRRICVRQQPMPCLSPHALSPIAPSPSVQGPASPSHRRAIYAHSPSFHAVVPPPRSRCPRKAQQEGRAGDPPPRSRCSGFLNEVELRLLCCNLPAHPRLRPHSLPLPLRICSPKKFNLESRNNRIDPPNTVAIVNADVDLNHSWMDTTGKVVRRKEEAVGEEGDMERPTLLSEVLRMTQPAAFVSMQSSDGQPTPSNVSKNKMKDGGDVLFLDGFREVAVTIGRNSLFPQPLHPRMNTMLSGFGCKRINRMSAQSAHNTLCSRSPVMVVIQMATMTRMIINEALCR

SEQ ID NO: 47281 - protein, 201 aa, Zea mays
  Coding DNA Sequence Number=SeqID_5502
  Gene Ontology: Mol. function=RNA-directed DNA polymerase activity; Cellular component=mitochondrion; Biological process=RNA-dependent DNA replication
  Homolog annotation: Hit_ID=UPI00004C1731; Match level="QueryCoverage =96%, HitCoverage=13%, E-value=9e-81, Identity=74%"; Hit description =UPI00004C1731 related cluster
  Pfam annotation: Domain name=rve; Domain location=46-200; Score=44.2; E_value=4.4e-10; Accession=PF00665.16; Description=Integrase core domain
MGNAFRQGFYWPTAVADATRIVRSCQGCQFYARQTHLPAQALQTIPITWSFAVWGLDLVGPLQKAPGGFSHLLVAINKFSKWIEVRPLTSIRSEQAVAFFTNIIHRFGISNSIITDNGTQFTGKKFLDFCEDHHIRVDWAAVAHPMTNGQDAQGRHKLTPPWEGPFIIAKILKPGTYKLANDQGEVYSNAWNIQQLRRFYP

SEQ ID NO: 47282 - protein, 742 aa, Zea mays
  Coding DNA Sequence Number=SeqID_5503
  Gene Ontology: Mol. function=binding; Cellular component=kinesin complex; Biological process=lipid metabolic process
  Homolog annotation: Hit_ID=Q8S3S1; Match level="QueryCoverage=94%, HitCoverage=98%, E-value=0.0, Identity=84%"; Hit description =Putative kinesin light chain gene
  Pfam annotation: Domain name=TPR_1; Domain location=251-284; Score =0.8; E_value=4.3; Accession=PF00515.18; Description=Tetratricopeptide repeat
  Pfam annotation: Domain name=TPR_1; Domain location=294-327; Score =3.6; E_value=2; Accession=PF00515.18; Description=Tetratricopeptide repeat
  Pfam annotation: Domain name=TPR_1; Domain location=336-369; Score =8.1; E_value=0.58; Accession=PF00515.18; Description=Tetratricopeptid e repeat
  Pfam annotation: Domain name=TPR_1; Domain location=418-451; Score =26.2; E_value=0.00011; Accession=PF00515.18; Description =Tetratricopeptide repeat
  Pfam annotation: Domain name=TPR_1; Domain location=460-493; Score =19.9; E_value=0.0089; Accession=PF00515.18; Description =Tetratricopeptide repeat
  Pfam annotation: Domain name=TPR_1; Domain location=503-536; Score =12.9; E_value=0.15; Accession=PF00515.18; Description=Tetratricopepti de repeat
  Pfam annotation: Domain name=TPR_1; Domain location=544-577; Score =10.0; E_value=0.34; Accession=PF00515.18; Description=Tetratricopepti de repeat
  Pfam annotation: Domain name=TPR_1; Domain location=586-619; Score =3.4; E_value=2.1; Accession=PF00515.18; Description=Tetratricopeptide repeat
  Pfam annotation: Domain name=TPR_1; Domain location=628-661; Score =9.8; E_value=0.36; Accession=PF00515.18; Description=Tetratricopeptid e repeat
  Pfam annotation: Domain name=TPR_2; Domain location=208-241; Score =3.3; E_value=14; Accession=PF07719.7; Description=Tetratricopeptide repeat
  Pfam annotation: Domain name=TPR_2; Domain location=251-284; Score =0.3; E_value=30; Accession=PF07719.7; Description=Tetratricopeptide repeat
  Pfam annotation: Domain name=TPR_2; Domain location=294-327; Score =8.1; E_value=3.7; Accession=PF07719.7; Description=Tetratricopeptide repeat
  Pfam annotation: Domain name=TPR_2; Domain location=336-369; Score =14.6; E_value=0.36; Accession=PF07719.7; Description=Tetratricopeptid e repeat
  Pfam annotation: Domain name=TPR_2; Domain location=418-451; Score =20.0; E_value=0.0084; Accession=PF07719.7; Description =Tetratricopeptide repeat
  Pfam annotation: Domain name=TPR_2; Domain location=460-493; Score =14.6; E_value=0.36; Accession=PF07719.7; Description=Tetratricopeptid e repeat
  Pfam annotation: Domain name=TPR_2; Domain location=503-536; Score =17.7; E_value=0.043; Accession=PF07719.7; Description=Tetratricopepti de repeat
  Pfam annotation: Domain name=TPR_2; Domain location=544-577; Score =9.6; E_value=2.5; Accession=PF07719.7; Description=Tetratricopeptide repeat
  Pfam annotation: Domain name=TPR_2; Domain location=586-619; Score =7.0; E_value=5; Accession=PF07719.7; Description=Tetratricopeptide repeat
  Pfam annotation: Domain name=TPR_2; Domain location=628-661; Score =7.6; E_value=4.3; Accession=PF07719.7; Description=Tetratricopeptide repeat
  Pfam module annotation: Pfam domain module=TPR_1::TPR_1::TPR_1::TPR _1::TPR_1::TPR_1::TPR_1::TPR_1::TPR_1::TPR_2::TPR_2::TPR_2::TPR _2::TPR_2::TPR_2::TPR_2::TPR_2::TPR_2::TPR_2; Domain location=251
  Pfam module annotation: Domain location=418-451::460-493::503 -536::544-577::586-619::628-661::208-241::251-284::294-327::336 -369::418-451::460-493::503-536::544-577::586-619::628-661
MPGITEDGVVAEEVPNGVNFSPQNESLPAPKSTAASTMAGSMQSEALEMHVEASGAGEPSIEQLYNNVCEMESSSEGGSPSRESFGSDGEESRIDSELRHLVAGEMEAMKVIEEEEENGSVANVVPPAPAENGTPVKEHSSSSSKKSKKASKSQLESDASVGLNGKASTEEGESEVSKPASRVGRRRKSNANPQSGTEDAGLDNPDLGPFLLKHARDLIASENPRRALKYALRATKSFEKCAGGKPSLNLVMSLHVVAAIYCNLGKYEEAVPVLHRSIEIPVIEEGQEHALAKFSGCMQLGDTYGMLGQTAHSLQWYASGLEIQKQTLGEQDPRVGETCRYLAEAHVQALQLDEAQRLCQIALDIHREHRETASLEETADRRLMGLICDTKGDHEAALEHLVMASMSMVANGQETEVASVDCSIGDIYLSLGRYDEAVFAYQKALTVFKTSKGENHATVASVFVRLADLYNKTGKLRESKSYCENALKIYQKPIPGTSLEEIATGLTDVSAIYETMNEHEQALKLLQKALKMYNNSAGQQSTIAGIEAQMGVLHYILGNYGESYDSFKSAIAKLRTCGEKKSAFFGIALNQMGLACVQRYSINEAAELFEEARTVLEQEYGPYHPDTLGVYSNLAGTYDAMGRLDEAIEILEYVVGMREEKLGTANPDVDDEKRRLGELLKEAGRVRSRKAKSLENLLETNPYVSPEYSLYFLNSPSCEEELLNSALKDEYGITRVFAYSFK

SEQ ID NO: 47283 - protein, 175 aa, Zea mays
  Coding DNA Sequence Number=SeqID_5504
  Gene Ontology: Mol. function=calcium ion binding; Cellular component =membrane; Biological process=homophilic cell adhesion
  Homolog annotation: Hit_ID=UPI0000DA43ED; Match level="QueryCoverage =99%, HitCoverage=91%, E-value=1e-10, Identity=35%"; Hit description =PREDICTED: similar to keratinocytes proline-rich protein
MAPPVDVVGPCPGLGDVEAPPRSRSSLSSEAEVESEPLGRARRRPSAEARTESEPWGRAKRSSSSSGAEPESEPWGRAKRSSSSSGAEPESEPWGRAKRSSSSSGAEPEFEPWGLAKRSFPWRLGPGLATVSLTLSSGTAVGAAQAALSSCQIGQWSSEVTAVTLALSTGGRASE

SEQ ID NO: 47284 - protein, 1116 aa, Zea mays
  Coding DNA Sequence Number=SeqID_5505
  Gene Ontology: Mol. function=steroid hormone receptor activity; Cellular component=nucleus; Biological process=regulation of transcription, DNA-dependent
  Homolog annotation: Hit_ID=UPI00004BBF4E; Match level="QueryCoverage =44%, HitCoverage=17%, E-value=6e-27, Identity=24%"; Hit description =UPI00004BBF4E related cluster
MVARHTPLPLLEALLRWRESESPKGAHDASTYQKKLAVECIFSSACIRFAECCPQEGITEKLWIGLESFVFDWLINADRVVSQVEYPSLVDLRGLLLDLVAQLLGALSRIRFSSVTERFFIELNVRRIDSLALRSETLSIINGMRYLKLGVKTEGGLNASVSFIAKANPLNRPPNKRKSELQHALCNMLSSILAPLAEGGKNHWPPLGVEPALSLWYDAVARIRVQLMYWMDKQSKHVAVGFPLVTLLLCLGDANAFNSSFSQHMEILYKYLKDKNHRSMALDCLHRLVKFYLNIYADYQPRNHVWDYLDSVTSQLLTVLKKGLLTQDVQHDKLVEFCVTLAQSNLDFAMNHMILELLKPDSLSEAKVVGLRALLEIVVSPSNQQIGLDVLQVFGIGHYIPKVKSAIESILRSCNKAYSLALLTSSKTTIDNVTKDKSQGSLFRSVLKCIPYLIEEAGRNDKMTEIIPQHGISIDPGVREEAVQVLNRIVRCLPNRRFAVLKGMANFILKLPDEFPLLIQTSLGRLVELMRLWRVCLSEEALAKDMQSGRRLSIGGDALQRSPFHRSRDVSEFRASEMDAVGLVFLSSADVQIRLTALELLRCVRALQNNLRDYSANEWGDNKLKLEPEPIFIIDIIEENGEDIVQSCYWDPGRPYDLRREMDPIPLDVTLQSILESVDKNRWARYLSEIVKYAAELCPSSVQDARHELWSFLERLHAQFTIIGHLINFTAKLHRLEVIRRLEQITPADLGGKAQQPQDSETKLDQWLIYAMFACSCPPDIREEFSIKSAREVFHMIFPSLRHGSEAYALAATSALGHSHLEVCEIMFGDLALFVEEVSSETEGKPKWKNMVLNTDTLQNPRSRREDLRTHVANIHRILAEKVWPGMLSRKPVLCQHFLKFIEETYRQITISLADSFQDLQPLRYALASVLRYLAPEFVDAKAERFDNRIRKKLFDLLLTWSEDSGSSWGQESSSDYRREIERYKSNQHTRSRESFDKLAFDREMAEQLEAINWASMNAIASLLYGPCFDDNARKMSGRVISWINSLFMEPSARAPFGHSPVDPRTPSYSKHTDGRFGGRDKQKTSHLRLLLAKTALKNILQTNLDLFPACIDQVD

SEQ ID NO: 47285 - protein, 292 aa, Zea mays
  Coding DNA Sequence Number=SeqID_5506
  Gene Ontology: Mol. function=DNA binding; Cellular component =mitochondrion; Biological process=DNA integration
  Homolog annotation: Hit_ID=Q2R3U8; Match level="QueryCoverage=98%, HitCoverage=30%, E-value=3e-95, Identity=55%"; Hit description =Retrotransposon protein, putative, unclassified
  Pfam annotation: Domain name=RVT_2; Domain location=1-108; Score= -32.2; E_value=1.2e-13; Accession=PF07727.4; Description=Reverse transcriptase (RNA-dependent
MKTLGFVEAKADTSLFIFHNGTETAYLLLYVDDIILTASSSALLQCVIAALQTNFPMKDLGPLHHFLGIAVEQRPAGLFLHQRTYVLDIIDRAGMSGCKPCSTPVDLQSKLAADSGPAVQDATQYLSLAGTADHGLLLPRSTSISELVVYTDADWAGCPDTRRSTSSYAVFLGDNLVSWSSKRQKVVSRSSAEAEYRVVANGVAEACWLRQLLQELHSPLHRSVVYLSTNPVQHHQTKHVEIDLHFVRERVATGEVRVQHVPTTSQFADIFTKGLPSSVFLEFKSSLNICSD

SEQ ID NO: 47286 - protein, 71 aa, Zea mays
  Coding DNA Sequence Number=SeqID_5507
MDEIASTAVLTAGDPSTPKFAPPPSGFMCDMEWITSGKNSSYVAPFPELGRGYSPAAAVTQWNSAAVARMP

SEQ ID NO: 47287 - protein, 112 aa, Zea mays
  Coding DNA Sequence Number=SeqID_5508
  Subcellular localization annotation: CTP_CleavageSite=61; ConfidenceScore=5.14e-01
MSQHHQPCLRVGSHLCAPSTASRARISCMLTDPCSQVHKGSTQTNKKIKVRVQKLRSKKPKCALVWRIGLSGVPPDSVRCTRTVQLRTLHIRVSQAALRYNSSDCPMHQAEQ

SEQ ID NO: 47288 - protein, 75 aa, Zea mays
  Coding DNA Sequence Number=SeqID_5509
  Subcellular localization annotation: CTP_CleavageSite=50; ConfidenceScore=5.48e-01
MASPLVSGSGCGSVADLAGPVSASTHARLSFYTACVVPVFSKPGLGAFCPCAAPTSARVHSSAPADYFPYRSSSG

SEQ ID NO: 47289 - protein, 123 aa, Zea mays
  Coding DNA Sequence Number=SeqID_5510
  Gene Ontology: Mol. function=sequence-specific DNA binding; Cellular component=nucleus; Biological process=regulation of transcription, DNA-dependent
  Homolog annotation: Hit_ID=Q6Z6W2; Match level="QueryCoverage=58%, HitCoverage=31%, E-value=2e-09, Identity=55%"; Hit description=MADS -box transcription factor 57
MELSRRVHFMSQQKEELYRKASEPRGAAGASSSTPYSFCIATQQADAPVNLEQRHSQPKEGNRCQEFMAPELGEITNPELYRIYTGGGRSIMVNSRHIKVVITVQDSCLMLGATICNTPMANE

SEQ ID NO: 47290 - protein, 129 aa, Zea mays
  Coding DNA Sequence Number=SeqID_5511
MKHEWPILSWSLNLHSSQTSDNEQPQFSATARRGIQKNKADSTTEEAEKLQESGFAQQEGKISVGHTWWALVTCEEPRKLQSVAALDQPSSQQKRESGTQRSNALWPLVVWMEMNGRITTEYSYRTSAQ

SEQ ID NO: 47291 - protein, 493 aa, Zea mays
  Coding DNA Sequence Number=SeqID_5512
  Gene Ontology: Mol. function=zinc ion binding; Cellular component =intracellular; Biological process=regulation of transcription
  Homolog annotation: Hit_ID=Q6Z2L0; Match level="QueryCoverage=85%, HitCoverage=93%, E-value=1e-115, Identity=56%"; Hit description=Zinc finger protein-like
  Pfam annotation: Domain name=CCT; Domain location=406-444; Score =70.5; E_value=5.2e-18; Accession=PF06203.4; Description=CCT motif
  Pfam annotation: Domain name=zf-B_box; Domain location=14-61; Score =51.2; E_value=3.5e-12; Accession=PF00643.14; Description=B-box zinc finger
  Pfam module annotation: Pfam domain module=CCT::zf-B_box; Domain location=406-444::14-61
MSSSKHAAGAVGGKAARACDSCLRRRARWYCAADDAFLCQGCDASVHSANPLARRHERLRLRPTDPHSTTLEAGVATATWKKRQQQVAPAWSKRKARTRRPHVKSVGELLSRKLVVVPEVSPIESSEERKAEEEEEEEEGQLLYCVPTFDRALAELCSPPPPVDDPTASSCCRDDVDGAVENNTKAPPVVVAESPVQQLPDSFAGFGPTDAELREFAADMEALLGQGLDDGNELDRSFYMESLGLMAQQAEDVGRIKMEPNGIVSSRSRGEGAPGFGPTEMKPEASSAAAEVLDTDFNCCSPTVMMDNEDEDSFEQKASASNAAAAAAGTQFLKRSLDLSLNYEAIIESWGSSPWTDGQRPSVQLDDFWPHAHLTGWMAGGGRLGGEAAVTPRLGMGGGREARVTRYREKRRTRLFAKKIRYEVRKLNAEKRPRMKGRFVKRPAAAAGGGGEELPLPPRAPSPSLPIEVARVAAQSPCGVPIGVRPRPCPPNL

SEQ ID NO: 47292 - protein, 115 aa, Zea mays
  Coding DNA Sequence Number=SeqID_5513
MEVSNDDETGWRELDVTGSHLARVITFNISFVIKTRTNERYGASSERGQGGVVVEAGGAGGERFRVIGVVSVERGGSGDELWTRADGGGMHLNVSRAPVRHPRQEQQRRGQHERG

SEQ ID NO: 47293 - protein, 205 aa, Zea mays
  Coding DNA Sequence Number=SeqID_5514
  Homolog annotation: Hit_ID=Q3S4H8; Match level="QueryCoverage=23%, HitCoverage=21%, E-value=8e-16, Identity=87%"; Hit description=Dual -specificity protein-like phosphatase 1
MSDPANQNGGKWIIRFKRHFSVLTSYLWIADVTFHRIVPVNYRNLAFVHVLLGAVPFPSDVLRLKTLGVCGVVTLNESYERLVPTSLYEISFAQALVCGMLVLLPGYEPLGLQFGQQAYGKEKAKDPSEFITHRAKDFVSSMKDIETRFMCIVEAGNKVSRMLETKKILLDICAKIPGTKYMVIQGEPRVVIRGKKFIAFASFVS

SEQ ID NO: 47294 - protein, 122 aa, Zea mays
  Coding DNA Sequence Number=SeqID_5515
  Gene Ontology: Mol. function=translation initiation factor activity; Cellular component=intracellular; Biological process=translational initiation
  Homolog annotation: Hit_ID=Q9SHI1; Match level="QueryCoverage=57%, HitCoverage=6%, E-value=1e-18, Identity=63%"; Hit description =Translation initiation factor IF-2, chloroplast precursor
  Pfam annotation: Domain name=GTP_EFTU_D2; Domain location=44-98; Score=11.6; E_value=0.025; Accession=PF03144.15; Description =Elongation factor Tu domain 2
MAQGHISLSIMLMNFWKLSCLLQRQIHWNAKGTVIEACLDKAKGPLATLVVQNGTLNKADIIVCGEAYGKIRALYDDYGKLVDKAGPSDVVQEALTLASLIDDEKKLDNCQFDIWKQSYVAA

SEQ ID NO: 47295 - protein, 129 aa, Zea mays
  Coding DNA Sequence Number=SeqID_5516
  Subcellular localization annotation: CTP_CleavageSite=35; ConfidenceScore=5.24e-01
MFGSLDVLTTATDKLHLTDPDMPVATNAGPMRSTRSMMERRHLKWRATALKRRLNRLATTIKQQAEGASPSTPVAVIGHQPTSVLDPIEEDSSHYSTKPNSDTNEVAERACFVATLPQNDKWWRERGAP

SEQ ID NO: 47296 - protein, 222 aa, Zea mays
  Coding DNA Sequence Number=SeqID_5517
MGCRRLLLSHEPLGHAHLFGHLLTCAKFSSCSSGVSAPTYLWRVHAHSSCGARGVMGWARGCRGYIRVGKEAGRKRAGRHGEKRHANKHSGGGQTRIRAGMHVCVLACAELVPEKQSARDTSPPNLSSSKPDKTAKLIVVAALSSAALRLPRPLRLIFVTGRQRDAAVAVISGRGEAGLRAVIKLALRGHAIRANSSSLACVVWVTRDTRAGRGGQVLWLTA

SEQ ID NO: 47297 - protein, 96 aa, Zea mays
  Coding DNA Sequence Number=SeqID_5518
MATSDTCACGTGGSVALGDPRTRKNQICGRSSIVTVYRTMPRLQCNYNYYVVCRITNQYTVRHCHAQTVRRSPFRYGLQGLHCPGKGSLINGLVRA

SEQ ID NO: 47298 - protein, 598 aa, Zea mays
  Coding DNA Sequence Number=SeqID_5519
  Gene Ontology: Mol. function=drug transporter activity; Cellular component=membrane; Biological process=multidrug transport
  Homolog annotation: Hit_ID=Q6EP85; Match level="QueryCoverage=92%, HitCoverage=99%, E-value=0.0, Identity=69%"; Hit description =Membrane protein-like
  Pfam annotation: Domain name=MatE; Domain location=121-281; Score =118.2; E_value=2.3e-32; Accession=PF01554.9; Description=MatE
  Pfam annotation: Domain name=MatE; Domain location=343-506; Score =149.0; E_value=1.2e-41; Accession=PF01554.9; Description=MatE
  Pfam module annotation: Pfam domain module=MatE::MatE; Domain location=121-281::343-506
MAEAAVFLFFPAFVRDRNNQGRAARSPASGMSYCAGATAAFRDADGAGEEALTACLLPKTEVRLAVEDLPPVLTSKPPGRFARAVKEAWSVSLSVTFPMMPSMSAGAAGAEARSILSLALPMILTGLLLYLRSMISMLFLGRLSGLALAGGSLAIGFANITGYSVLSGLAMGMEPICGQAFGAGHYELLGVTTQRGVLMLLAAAVPIGGLWVHIRPLLLLCGQDAGIAAVAETYILASLPDLLLQAFLHPVRIYLRTQSINLPLTLCATLAIALHLPINYVLVSVLGLGIRGVALASVLANLNLLLFLFAYILFKGVHKRTGGFALSAESFRGWGELVSLALPSCVSVCLEWWWYEIMILLCGLLANPQATVASMGILIQTTSLIYIFPSSLGLGVSTRVSNELGANRPDHAGRAATVGLMLGFAFGGVASAFAYLVRGAWATMFTADPAIVALTAAVLPILGACELGNCPQTTGCGVLRGSARPKDAASINLRSFYLVGTPVALVLAFWYHYDFQGLWLGLLAAQATCVVRMLLVIGGTDWVAEAKRAQQLTGARTVEETKESSGKSSHVVEVTAAGGDEELGLPIDVVIDRPKDQC

SEQ ID NO: 47299 - protein, 109 aa, Zea mays
  Coding DNA Sequence Number=SeqID_5520
MASVLDAVMETTRALTPTPVKKVAEAVMTRVETEAGPSAPTEAEPTTTEQKDEREFLDISTALEKDVTEKAKSPIPEASSEDIDFIIQHALEKSYLKKKLQKPNTMPGN

SEQ ID NO: 47300 - protein, 95 aa, Zea mays
  Coding DNA Sequence Number=SeqID_5521
MKLWKETSRSSKTTTSSRCGLAATPSRLPVKAAVIYVSFPHFDLLWRNCCLRGHGCEGYSWHRGPLGYCAMVEVGEGVTNVANSREVDVTPRFKG

SEQ ID NO: 47301 - protein, 99 aa, Zea mays
  Coding DNA Sequence Number=SeqID_5522
MTYRGQPSIEVFVKHYYLHWQKRTIGNTVVQLRTCTFTPKTGKTSGKVIELVSCAKTRWINFTDFWFYVEMGEVEQGVAGLPPERDVFTSLCNFSSLQC

SEQ ID NO: 47302 - protein, 397 aa, Zea mays
  Coding DNA Sequence Number=SeqID_5523
  Gene Ontology: Mol. function=catalytic activity; Cellular component =integral to membrane; Biological process=metabolic process
  Homolog annotation: Hit_ID=Q2QX58; Match level="QueryCoverage=97%, HitCoverage=59%, E-value=1e-158, Identity=68%"; Hit description=AMP -binding enzyme family protein, expressed
  Pfam annotation: Domain name=AMP-binding; Domain location=108-396; Score=-104.2; E_value=0.0035; Accession=PF00501.18; Description=AMP -binding enzyme
MNPYFLGFILPFVASLLLTKRKSEKKRGVPVNVGGEPGCAIRNHRFERPVKTRWEGISTLAELFEQSCKQFASTPLFGTRKLIAREMVVAADGRSFEKLHLGNYEWRSYADAFKTVCNFASGLLRIGHLKDERVAIFADTRAEWQIALQTEVTTVVCGRKEFKKLIDISGQLDTVKHVIYIDEEGISVEVSLAENCTSWTVKSFEEVESIGLQRPVEANLPLPSDTAVIMYTSGSTGMPKGVMMSHQNVLAVVSAVMTIVPGLGKKDVYLAYLPLAHILELAAEAIITGVGASIGYGSPLTLTDTSNKIKKGTQGDASVLKPTLMTAVPAILDRVRDGVRKNVDAKGGLAKRLFDIAYSRRLAAVNGSWLGAWGLEKLLWDMLVFRKGSNISRIWLD

SEQ ID NO: 47303 - protein, 513 aa, Zea mays
  Coding DNA Sequence Number=SeqID_5524
  Gene Ontology: Mol. function=galactose oxidase activity; Biological process=cell wall catabolic process
  Homolog annotation: Hit_ID=Q53JH2; Match level="QueryCoverage=98%, HitCoverage=98%, E-value=0.0, Identity=68%"; Hit description =Probable galactose oxidase (EC 1.1.3.9) F15B8.190 [similarity]- Arabidopsis thaliana
  Pfam annotation: Domain name=DUF1929; Domain location=398-506; Score =145.6; E_value=1.3e-40; Accession=PF09118.1; Description=Domain of unknown function (DUF1929)
  Pfam annotation: Domain name=Glyoxal_oxid_N; Domain location=53-259; Score=269.6; E_value=6.2e-78; Accession=PF07250.2; Description =Glyoxal oxidase N-terminus
  Pfam module annotation: Pfam domain module=DUF1929::Glyoxal_oxid_N; Domain location=398-506::53-259
MPMPRSFLLHLLLVASGIANAGGADDALSKEPTPSSFQGEWQLLHASIGVSAMHMQLLPGDLVLMFDRTDTGLSNISLAALAPCAATPDSADCTAHSVLLDLRSNVLHPYPLATNPWCSSGALLPNGTLLQTGGFSNGDRVARLFSPATGWVELPSFLAARRWYATDMILPDGRVLILGGRRQFNLEYFPHDGAAPALTFFPFLDETTEPDAENNLYPFLHLLPDGTVFVFANDRAVVFDPYNRAPAPLALRNGTFVPADRTCARVAPTDPDPVWAIEEMPLARVMGDMVLLPTGDVLIVNGAAAGTAGWELGREPVTRPVLYRPDAPLGARFEASLAASVVPRMYHSSAALDTYGRVLVGGSNPHVGYVFTNVTHPTELSLEAFLPPYMDPRHDGARPRVLAAPAEVGYGEATAVRFGIPAGAADGAATGEEVRVAAVAPAFATHSFGMNQRVVELAVVRIAQLDVGVYEVEVAAPPTPGVAPPGYYMWFVVHAGVPSSAAWVRMRPLGTGA

SEQ ID NO: 47304 - protein, 119 aa, Zea mays
  Coding DNA Sequence Number=SeqID_5525
MNVVVTSHLPVCLYSAAGRTYRFRFRRLLQKEDQPVAEDIASPIFQNKTIFRAPIGGAIIWYWALSFTKDNLVKRGWKGRTYRFRFRRLLQKEDQPIAEDIAMCRASEVVAMEIFTGRE

SEQ ID NO: 47305 - protein, 214 aa, Zea mays
  Coding DNA Sequence Number=SeqID_5526
  Homolog annotation: Hit_ID=Q9XGC8; Match level="QueryCoverage=24%, HitCoverage=18%, E-value=7e-15, Identity=73%"; Hit description=Iron sulfur subunit of succinate dehydrogenase precursor
MAAPPSAAADRRQRAADAERVRTRSAGDSVAELQVTAGGGGTAGRRRMTAGGGGTAGRKRMTVRRSFRETLPELSTQYKLTKSPKRGHKGCKAGRSTDLGRISRWLGLCINSTESYSYTRSECIFVQRQENFTSLPSCQKKIWAPALKKLRGFIELYNDSSDQFTKERLDAINDDLKLYRCHTIKNYTHTSTKALNLTKQINTLKRQQLGASNL

SEQ ID NO: 47306 - protein, 223 aa, Zea mays
  Coding DNA Sequence Number=SeqID_5527
  Gene Ontology: Mol. function=beta-galactosidase activity; Cellular component=beta-galactosidase complex; Biological process =carbohydrate metabolic process
  Homolog annotation: Hit_ID=Q8W0A1; Match level="QueryCoverage=99%, HitCoverage=31%, E-value=1e-101, Identity=69%"; Hit description =Putative beta-galactosidase
MECAGGFTWQSYNEDINFLGDESFATVGLMEQINVTRDNTNYLWYTTYVDIAQNEQFLSNGKNPMLTVMSAGHALHIFVNGQLTGTVYGSVEDPKLTYIGNVKLWSGSNNISCLSIAVGLPVGLKGEALSLHSLSGSSSVEWGEPVQKQPLSWFKAFFNAPDGDEPLALDMSSMGKGQLWINGQGIGRYWPGYKASGTCGICDYPGEYDGKKCQTNCGDSSQR

SEQ ID NO: 47307 - protein, 49 aa, Zea mays
  Coding DNA Sequence Number=SeqID_5528
MDDEADHRSNKIDVIHEADVSQPRATTITVCNAKADREEHTYAIIRFGA

SEQ ID NO: 47308 - protein, 120 aa, Zea mays
  Coding DNA Sequence Number=SeqID_5529
MVTADSFCGDLVGDASAEEAFGGVASSVLARTMASVMLPDSLADSASSCSDLASEDAGAGEKHQRSAEAEMVGAVAPRDAELRKESYRREYEEAEMEEAVAPRDAELRKESYRWEYEDAE

SEQ ID NO: 47309 - protein, 227 aa, Zea mays
  Coding DNA Sequence Number=SeqID_5530
  Homolog annotation: Hit_ID=Q8LQ55; Match level="QueryCoverage=59%, HitCoverage=36%, E-value=7e-16, Identity=34%"; Hit description =Integral membrane protein-like
  Pfam annotation: Domain name=DUF588; Domain location=99-210; Score =43.2; E_value=9.2e-10; Accession=PF04535.3; Description=Domain of unknown function (DUF588)
MTLAIVLAKTEDATPPKASSAEASPTRSPQKESAVTIAKLLSAEDLAAMEAKATPDKVTPPSDAGSLAAAAAVTTVGGVSGGVGSKRWLLGGVPEKVRRAELRRAELGFRVSAAVFCLVALSVMAADTTTGWSGDSFRRYNEYRYVLAASVVTFTYCGFQLVAEMLAYLLLSASSAALSRNGVWMSRFGGDQFTKLINVSASMAFLAFIALGLNSVISAYCFFSLVS

SEQ ID NO: 47310 - protein, 97 aa, Zea mays
  Coding DNA Sequence Number=SeqID_5531
MAKVKVMRVCANGPGTVKDERTCEADRVADADTRSRTDRTPIQDMETRIRYATHGGLVVEPQNHLALLMAGFIEFGPQNSTIRFLRESEAHVVSSRK

SEQ ID NO: 47311 - protein, 293 aa, Zea mays
  Coding DNA Sequence Number=SeqID_5532
  Gene Ontology: Mol. function=RNA binding; Cellular component =cytoplasmic exosome (RNase complex); Biological process=rRNA processing
  Homolog annotation: Hit_ID=Q5SMR4; Match level="QueryCoverage=76%, HitCoverage=31%, E-value=4e-68, Identity=63%"; Hit description=ALM beta-like
MELRRPASSPLVDNYVVPGDVVLDLSEMNNQTIKLGAGLRQECDTIQATSAGKLRQLKPNKYWIENSQKRYIPSVEDTVLGIVVDTKPDNFLVDIKGPNLAFLPVLSFEGGTRRNIPKFEIPWELRAVTLHGAVVDVAFSEISRRRSNRLKSWAEEGEGCGFLGGGEDASNLGEIGTLIYARVVKANSIMNPELSCMDATGKAAEFGQLKDGYMFDTSTGMSRMLLSSPTCPVLEVLGKKLSFEIAVGLNGRVWVNAPAASTVILVSNAIMRSESLSGIKQRAMVENLLERLS

SEQ ID NO: 47312 - protein, 252 aa, Zea mays
  Coding DNA Sequence Number=SeqID_5533
  Gene Ontology: Mol. function=protein binding; Cellular component =membrane; Biological process=defense response
  Homolog annotation: Hit_ID=Q2R1W2; Match level="QueryCoverage=77%, HitCoverage=24%, E-value=7e-34, Identity=38%"; Hit description=NB -ARC domain containing protein, expressed
MGVQAATGTGAAGAAQPRRQLSACDTVTAGAQAAPGLSYDIEDRLDSFMVRMEGLDSTKRKTIMGFIQQTHGLVTKFRIRHGISDNIKDIESKVKKVKERYGRSNVHRIVASLVATTVDPRLLAMHNLFEDGDEPAKKIKTVFVVNFGGLGKTTLVKAVYDKVKEFDCSAFVSIGQKCDLNKVFKDVLYYLDKQHHENIIASKMNEKQLIDKLLEFLADKRYTSYFMMITCSDALFLLENKYQYMDLHFCVY

SEQ ID NO: 47313 - protein, 101 aa, Zea mays
  Coding DNA Sequence Number=SeqID_5534
MGDGVADTERDNNTADAVAGYVGVGIHRAVAEKAVGEPVRECGTGLECQRVHMAVTKRGTGKQVEAHGTGLECQPVHRVMLREGRKNQSGRVRRSQCQHGG

SEQ ID NO: 47314 - protein, 174 aa, Zea mays
  Coding DNA Sequence Number=SeqID_5535
MQGKNGRRTGQGRMASSLARQRAAFRGWVPATEIEQGATSALGWSSPAANGASMVTLGRQQAGARGERRGSWEWSPKGEGERFIERRRENKDTDGEAVVSAINGAAVNGRTTRVEDERKWCRRLELHDGEKIGRDMWLWGPLARETTRKDGAWILAKWVGNVRAGLLARLARTP

SEQ ID NO: 47315 - protein, 134 aa, Zea mays
  Coding DNA Sequence Number=SeqID_5536
  Gene Ontology: Mol. function=unfolded protein binding; Cellular component=prefoldin complex; Biological process=protein folding
  Homolog annotation: Hit_ID=Q2QNJ8; Match level="QueryCoverage=90%, HitCoverage=62%, E-value=4e-58, Identity=93%"; Hit description =Prefoldin subunit 3, putative, expressed
  Pfam annotation: Domain name=Prefoldin; Domain location=6-120; Score =95.9; E_value=1.2e-25; Accession=PF02996.8; Description=Prefoldin subunit
MTTYILQWSIGLEAKIPDIEKCLDIVSTLQAKNDLGEALIADFELSEGIYSCAKIEDTDSVCLWLGANVMLEYSCDEANALLKKNLENAKASLEVLVADLQFLRDQQTITQVTIARVFNWDVHHRRSKQAVKEP

SEQ ID NO: 47316 - protein, 287 aa, Zea mays
  Coding DNA Sequence Number=SeqID_5537
  Gene Ontology: Mol. function=glutathione transferase activity
  Homolog annotation: Hit_ID=Q9FQ99; Match level="QueryCoverage=96%, HitCoverage=95%, E-value=2e-90, Identity=67%"; Hit description =Glutathione S-transferase GST 40
  Pfam annotation: Domain name=GST_C; Domain location=126-257; Score =5.0; E_value=0.066; Accession=PF00043.15; Description=Glutathione S -transferase, C-terminal domain
  Pfam annotation: Domain name=GST_N; Domain location=7-81; Score=67.3; E_value=4.8e-17; Accession=PF02798.10; Description=Glutathione S -transferase, N-terminal domain
  Pfam module annotation: Pfam domain module=GST_C::GST_N; Domain location=126-257::7-81
MAGGGDDELKLLGAWASPFVLRVKLALSFKGLSYENVEEDLSGSKSELLLESNPVHKKVPVLLHNGKPVCESQIIVQYIDEAFAGTGGPSLLPADPHQRAVARFWGAYIDDKVVLLMLLMTLSFIFYLYYSTYDLRRHEYDRCPMHIDGVRRRRTDASFPLQLLASWLQSARAKTQEEKADALKQALAAAENLEAAFTEISEGKPFFGGDSVGYLDVTLGALVAWVHAAEKLNGMRIFDATRTPRLSAFVERFGALGAAKAVLPDVDGLVEYAKQRQADAAAAASDS

SEQ ID NO: 47317 - protein, 241 aa, Zea mays
  Coding DNA Sequence Number=SeqID_5538
  Gene Ontology: Mol. function=glutathione transferase activity; Cellular component=cytoplasm; Biological process=metabolic process
  Homolog annotation: Hit_ID=Q9FQ99; Match level="QueryCoverage=92%, HitCoverage=94%, E-value=8e-77, Identity=66%"; Hit description =Glutathione S-transferase GST 40
  Pfam annotation: Domain name=GST_C; Domain location=110-208; Score =27.0; E_value=6.8e-05; Accession=PF00043.15; Description=Glutathione S-transferase, C-terminal domain
  Pfam annotation: Domain name=GST_N; Domain location=7-82; Score=55.2; E_value=2.1e-13; Accession=PF02798.10; Description=Glutathione S -transferase, N-terminal domain
  Pfam module annotation: Pfam domain module=GST_C::GST_N; Domain location=110-208::7-82
MAGGGGQELKLLGTWTSPFVTRVKLALSFKGLSYENLEEEDLYHNKSELLLRSNPVHRQVPVLIHNGNPICESQLIVQYIDEAFSSANGPSLLAAEPYERAVARFWGAYIDDKLLASAFQAGRAKTEEEKAEALKRTFAAVETLEAAFEGISDGKPFFGGDSVGYLDIVLGGLVPMVYYGEARHGIKLFDGTRSPLLEAWVERFGALDAAKAVLPDVHELVEHSKMKRARAAAMAAATGSD

SEQ ID NO: 47318 - protein, 180 aa, Zea mays
  Coding DNA Sequence Number=SeqID_5539
  Gene Ontology: Mol. function=GTP binding; Cellular component =intracellular; Biological process=sporulation
  Homolog annotation: Hit_ID=Q014L8; Match level="QueryCoverage=94%, HitCoverage=33%, E-value=2e-33, Identity=43%"; Hit description=[R] KOG1489 Predicted GTP-binding protein
  Pfam annotation: Domain name=ATP_bind_1; Domain location=1-171; Score= -71.8; E_value=0.084; Accession=PF03029.7; Description=Conserved hypothetical ATP binding pro
  Pfam annotation: Domain name=Arf; Domain location=1-169; Score=-94.3; E_value=0.018; Accession=PF00025.11; Description=ADP-ribosylation factor family
  Pfam annotation: Domain name=MMR_HSR1; Domain location=1-125; Score =122.2; E_value=1.5e-33; Accession=PF01926.13; Description=GTPase of unknown function
  Pfam module annotation: Pfam domain module=ATP_bind_1::Arf::MMR_HSR1; Domain location=1-171::1-169::1-125
GLPNAGKSTLLSAITLARPDIADYPFTTLMPNLGRLGGDPALGALQFSSEATLADLPGLIEGAHLGKGLGRNFLRHLRRTRVIVHVVDAAADDPVNDYKIVREELRMYNPQYLERPYVVVLNKIDLPKAKAEGVEKELGDYPRPEAVVAASVLRHIGIDEMLKEIRAALRKCFDHKLPEH

SEQ ID NO: 47319 - protein, 256 aa, Zea mays
  Coding DNA Sequence Number=SeqID_5540
  Gene Ontology: Cellular component=endoplasmic reticulum; Biological process=protein transport
  Homolog annotation: Hit_ID=Q6Z4F3; Match level="QueryCoverage=73%, HitCoverage=75%, E-value=2e-36, Identity=58%"; Hit description =Transducin / WD-40 repeat protein-like
  Subcellular localization annotation: CTP_CleavageSite=33; ConfidenceScore=5.57e-01
MRIDPTRSSNNTTKTLSGGPAGSVLKVETRGVRRSAVRKSNGNAHWLCSSNKLAPPRLEARVTVGEDAADTPRAIAVHPGGRELVCATAKGCRLFNLVYKDFGVHLISRDASPLQSVGPQKCLAFSTDGAKFAVGGEDEKIEYCRFSRDGAKPFLFCTLVKGNRDGDFCAVEVKKMEVAHWSKKVHLGFPVSSIEFCPSERVVISTSHQWGAEITKLDVPPEWKVWQIWLALLSLFVSSAVLFYAFFTHARLNLRP

SEQ ID NO: 47320 - protein, 73 aa, Zea mays
  Coding DNA Sequence Number=SeqID_5541
MSRGAIVNEGGPEAYSAWSLRSARREKGTRRAGPSSGTCFESPLQSRNSSVSDHYKSPVQMEVASDADRHPYR

SEQ ID NO: 47321 - protein, 109 aa, Zea mays
  Coding DNA Sequence Number=SeqID_5542
MELGAMINDAELAWFLLSPIHGRDREGIFLVRKEAAENYTSRSKKGILVAGSQRAATSHSIAGMRYIAKVKTVGRQDGSQCETPKKVAGELASVNSNRCPVLDTNDVFD

SEQ ID NO: 47322 - protein, 60 aa, Zea mays
  Coding DNA Sequence Number=SeqID_5543
MARRSCKFLSFSLRREYICCGFGEDCTPLTAIFGAGVLGVKQQPNEEQVRSVKLSGLSSY

SEQ ID NO: 47323 - protein, 704 aa, Zea mays
  Coding DNA Sequence Number=SeqID_5544
  Gene Ontology: Mol. function=metal ion transporter activity; Cellular component=membrane; Biological process=metal ion transport
  Homolog annotation: Hit_ID=Q336V7; Match level="QueryCoverage=46%, HitCoverage=95%, E-value=1e-143, Identity=80%"; Hit description=CorA- like Mg2+ transporter protein, expressed
  Pfam annotation: Domain name=CorA; Domain location=90-465; Score =377.0; E_value=2.9e-110; Accession=PF01544.9; Description=CorA-like Mg2+ transporter protein
  Subcellular localization annotation: CTP_CleavageSite=74; ConfidenceScore=5.78e-01
MGKRSGGRKLPFFTRSSSSSSKRNRSGRRLPSPSKQDNATRALLASPTAASPSATPDSAAAGQTAQPPSPLSVTAGAGGALSGKITKKKPGARLWMRLDRWGASEVVELDKATIIRRAGLPSRDLRILGPVFSRSSSILAREKTMVINLEFIRAIVTAEEVLLLDPLMHEVLPFVDQLRQHLPLRSLVGGNGECAPDGNGEKQGGSHGGQVPRLNEATGAEHEFPFEFHVLEVALEIVCSSLDLSVDDLERHATPVLDELTKNVSTRNLERVRSLKSHLTRLLARVQKVRDEIEHLLDDNEDMEHLYLTRKQVQNQQVEALMSSAASNSIVLAGPGVPRLNSSFRRSLSVATSMHLDNDVEDLEMLLEAYFMQLDGIRNRILSVREYIDDTEDYVNIQLDNQRNELIQLQLTLTIASFGIAANTFIVGAFAMNIPSSLYNTDNTLFWPFVGGTSSGCFVITILLFGKGAGARRILENRGDSMETAVGSDQRHHRKLRSARPRARTRAKSWKKANSARPRARTRAKSRKTANSARPRARTRAKSRKTANSARPRARTRAKSRKTANSARPRARTRAKSQKTAISASPDPGLGLGLGPRRRRSPPQGSDLGSAPEDDELRFARPQGSDSAPAPAGDLRLARTWGSDPTSATEDGLDLGFGGASTSPNLGRRPATSTGGAIITLPRADPGRREQDRRPIGLAPPDRQ

SEQ ID NO: 47324 - protein, 237 aa, Zea mays
  Coding DNA Sequence Number=SeqID_5545
  Subcellular localization annotation: CTP_CleavageSite=64; ConfidenceScore=5.53e-01
MAATPTAAVLLARPLIALSSAFTSPHRARVPSDPSSISVPPLRSRWCQWRGPLRSLPPEGAPAELMEEDSKFVPLNADDPMYGPPALLLIGFEKGETVTIQAFLKELEGEFLKASHASAVTDICKNALSIYMLIRVINLTQVIHCTEEMTKQTLWDAMHTEQPDLEAVKIAGPLPRICIFSGLTGEEMMMFINAFPETGLEAAAFAALVPNSAEKVLGEVIEEIMGDHEMLTGKDSK

SEQ ID NO: 47325 - protein, 128 aa, Zea mays
  Coding DNA Sequence Number=SeqID_5546
  Subcellular localization annotation: CTP_CleavageSite=44; ConfidenceScore=5.67e-01
MGPGRCRGAGHKARPPPSRPRLSVSYSHTASPALLLSTSPHSIRSSAVRPPRRRPCQIFIIGDIGGSPTLLPSPADYVVVVLVPLGPLMYGAEKGDMDDDNDNERYPRVSHEEPPVTLDPLKSTLIFV

SEQ ID NO: 47326 - protein, 85 aa, Zea mays
  Coding DNA Sequence Number=SeqID_5547
  Gene Ontology: Mol. function=transferase activity, transferring nitrogenous groups; Biological process=biosynthetic process
  Homolog annotation: Hit_ID=Q7F2K1; Match level="QueryCoverage=84%, HitCoverage=13%, E-value=3e-11, Identity=55%"; Hit description =Putative aspartate aminotransferase
MALRQAGVPVIGLAAGEPDFDTPPAIAEVRGAISPRYNFLQATFRSMKLNDFVFNYDCTEENGVSYLPDEVLPLGIRLCDCAGFI

SEQ ID NO: 47327 - protein, 82 aa, Zea mays
  Coding DNA Sequence Number=SeqID_5548
MAMVLDGRSALTLGLMDVSTASSRTIAILVLAACFVLPDALRTQPSMEANSSPAVGRGYAYTNIPSPFTKGYTVYVANGAGR

SEQ ID NO: 47328 - protein, 73 aa, Zea mays
  Coding DNA Sequence Number=SeqID_5549
  Gene Ontology: Mol. function=transporter activity; Cellular component= membrane; Biological process=oligopeptide transport
  Homolog annotation: Hit_ID=Q5N742; Match level="QueryCoverage=97%, HitCoverage=10%, E-value=6e-18, Identity=63%"; Hit description =Putative peptide transporter
MGFFERIGFVGVSANLITYLTGPLGMSTAAAAAGVNAWSGTVQVLPLVGALVADSRLGRYRAILAACVLYLLI

SEQ ID NO: 47329 - protein, 400 aa, Zea mays
  Coding DNA Sequence Number=SeqID_5550
  Gene Ontology: Mol. function=transporter activity; Cellular component= membrane; Biological process=oligopeptide transport
  Homolog annotation: Hit_ID=Q94GB5; Match level="QueryCoverage=92%, HitCoverage=71%, E-value=1e-108, Identity=52%"; Hit description =Putative peptide transporter
  Pfam annotation: Domain name=PTR2; Domain location=1-332; Score =158.6; E_value=1.6e-44; Accession=PF00854.12; Description=POT family
MMLTASSPPSPSPARLTLFYVALYLLALAQGFFGPCGEAFGADQFTPSDIDDLSAPTLRSSYFNWFHFSMSWGYAIATAGLSYVQDNAGWTLGFGACWTAMVLCLVVFLLGTRTYRAAKQPIDGVQAWVARVFRRSGTTPTDERLLLAPQPEGEGGLIAKLLPIWLTSLVFAAIYSQTSTLFTKQASTLDRHLGTETGLVVPPAALQCLIDVTFIVMIPLYDRVIVPLARRLTGHASGITMLQRIGASMATSCVAMAVAALVEVRRLRVARDAGLVDRPDVALPMSLWWMIPQYVLMGLAAVLGMVGLEEFFYDQMPDALRSVGLALCLSIFGVGSYASSMLVSVIDWATRVKGESWFSDNLNRAHLDYFYWLLAGLAALEVAVFLHFANRYVYTKKAEL

SEQ ID NO: 47330 - protein, 63 aa, Zea mays
  Coding DNA Sequence Number=SeqID_5551
MPTLELDSYMSMYALVGTVPWTSDHMVVNDFYVPKCGIHFFQMMDDKVKDGTSSKRELELRNT

SEQ ID NO: 47331 - protein, 284 aa, Zea mays
  Coding DNA Sequence Number=SeqID_5552
  Pfam annotation: Domain name=NfeD; Domain location=90-265; Score= -37.9; E_value=0.089; Accession=PF01957.8; Description=Nodulation efficiency protein D (NfeD)
  Subcellular localization annotation: CTP_CleavageSite=42; ConfidenceScore=5.26e-01
MAAASLLEATRFLSTPHPSSRSRPLPYPPGSGLHPHLLRTPRLSTLRVHLHRPAPLGAQKPARPGALLVIDALRRSVLDSLAALKRPALALLLAGVLLAAASAGGPHAAALAASGGRVGGSAFSSRSSSPRSYGYSAPAPRGGYTAAPFYSPSPFVSVGPALGIGFGGSGFLVTLMGFATFLYLAWTRTRRRRTVPPRGAMEGRPAMARRWGCRWGSTGLGRRQRVRPCRWTWAGWAEAGEEDPDASTTDDTDARGRRAAAGRPARARQWGCRRGSPDRGDDRG

SEQ ID NO: 47332 - protein, 405 aa, Zea mays
  Coding DNA Sequence Number=SeqID_5553
  Homolog annotation: Hit_ID=Q6F393; Match level="QueryCoverage=76%, HitCoverage=99%, E-value=3e-65, Identity=48%"; Hit description =Expressed protein
  Pfam annotation: Domain name=ENT; Domain location=348-405; Score=9.2; E_value=0.043; Accession=PF03735.5; Description=ENT domain
MATLDELMRQLIRLSPRGLIPIGLAGAQPNWGLIGIATSRVLVRRGLGLARRIDWFPAAGNPDGGTRLLGLHMFAQYRVVCYLVVGTCIHCLLGRIMKLKNSALETFKENNTIFTPEGNFHSTKMREEYVAGPNQPAVVETRCKWMIGDVTEVLDRNTWKLGKILKMLKNDYFVIRLADCIRLKEFHISSLRIPRGLEAPESKPFHAAADKATGRDKRRPADGASPGTRAVQQTCHRTTYDLGSSGKKRKPDADASRHPGIASAHIRKVAAASNLNGGIADSYLHNDPQAIGDAQCSVASCSVNDLYRLGNGGNAERRPAAAVCLPDDAMSACPCTPGARDGEGEEEAAAALHGLQLEAYRSTMRALYASGPLTWAQEALLTNLRLSLNISNEEHLLQLKRLLSS

SEQ ID NO: 47333 - protein, 77 aa, Zea mays
  Coding DNA Sequence Number=SeqID_5554
MGAMEMEIAEQRRREAKRARRFRGNTDRGKKRKEARRAGAEGQVSVAVTGSAWTGGQGAWAHEEVDGNGDHDAGVIA

SEQ ID NO: 47334 - protein, 103 aa, Zea mays
  Coding DNA Sequence Number=SeqID_5555
  Subcellular localization annotation: CTP_CleavageSite=67; ConfidenceScore=5.13e-01
MAPEPDPRCRGPNPEPPPPQLLPRAPTAAAATPSPQAPIPGASRLPPPPQPLVRFGRLMRGTLTHLEAMKASRRTSSVPCRPPIRTLVLHHDSPSSLNPSLVL

SEQ ID NO: 47335 - protein, 313 aa, Zea mays
  Coding DNA Sequence Number=SeqID_5556
  Gene Ontology: Mol. function=RNA-directed DNA polymerase activity; Cellular component=mitochondrion; Biological process=RNA-dependent DNA replication
  Homolog annotation: Hit_ID=Q8S463; Match level="QueryCoverage=99%, HitCoverage=16%, E-value=1e-143, Identity=80%"; Hit description =Putative prpol
MKNSHCRDPKMEAYCDEVRRLEDKFFGLELNHIARRYNETTDELAKIASRRTTVPPDVFSRDLHQPSVKTDNTPEPEKVSALPEAPSARPEAPSAPEGEALRVEEEQNGVPPNRDWQTPYLQYLHRGELPLNRAEARRLARRAKSFVLLDDGKELYHRSPSGILQRCISIAEGQELLQEIHSGACGHHGAPQALVGNAFRQGFYWPTAVADATRIVRTYQGCQFYAKQTHLPAQALQTIPITWPFVVWGLDLVGPLQKAPGGYTHLLVAIDKFSKWIEVRPLNSIRSEQAVAFITNIIHRFGVPNSIITDNGT

SEQ ID NO: 47336 - protein, 44 aa, Zea mays
  Coding DNA Sequence Number=SeqID_5557
MEMALQDAMRVCNPDVNTPFQSIEDAVNRYTMFANVIDLSQNVV

SEQ ID NO: 47337 - protein, 236 aa, Zea mays
  Coding DNA Sequence Number=SeqID_5558
  Gene Ontology: Mol. function=hydrolase activity; Cellular component =nucleus; Biological process=mRNA transport
  Homolog annotation: Hit_ID=Q2QYE1; Match level="QueryCoverage=92%, HitCoverage=50%, E-value=3e-70, Identity=57%"; Hit description =GDA1/CD39 family protein, expressed
  Pfam annotation: Domain name=GDA1_CD39; Domain location=1-236; Score=- 92.7; E_value=8.3e-07; Accession=PF01150.8; Description=GDA1CD39 (nucleoside phosphatase) family
MAYAVSANAAARAPAVPDGEDPYITKEYFKGKQYNVYVHSYLRYGSFASRAEILMSKNGPFSSCMLRGFSGKYTYNGQQFDATARPEGALYDKCRGEIAKAMNLKAPCKTAKNCTFCGVWKGGGGAGQNDIYVASDSKAPSAKAPPAAFRAAAKKACKFDVNRAKVAYPDVSNSDVPYLCMDLTYTYTLLVDGFGLQPMKKITFVSKVKHGEYYIEATWPLGTAIEAVSPTRQIGN

SEQ ID NO: 47338 - protein, 64 aa, Zea mays
  Coding DNA Sequence Number=SeqID_5559
MADVIPIAPSLDDMWGPFARTPVLVLHLAMPRRRSHRDPNGNNKLAAQDSGKIGEMNLENEFSI

SEQ ID NO: 47339 - protein, 187 aa, Zea mays
  Coding DNA Sequence Number=SeqID_5560
  Homolog annotation: Hit_ID=Q10JZ5; Match level="QueryCoverage=60%, HitCoverage=61%, E-value=1e-21, Identity=50%"; Hit description=ZIM motif family protein, expressed
  Pfam annotation: Domain name=Zim; Domain location=95-130; Score=71.5; E_value=2.8e-18; Accession=PF06200.4; Description=ZIM motif
MRRRPLLPLAQFGCVATDYQEQAVDPDPFFSHSSSSGGEDPAGEVEQQRTPATTNLLSGAEGEEVERRKETMELFPQSVGFSIKDAAAPREEQGDKEKPKQLTIFYGGKVLVFDDFPADKAKDLMQLASKGSPVVQNVVLPQPSAAAAVSTDKAVLDPVISLAAAKKPARTNASGINTLPLASWGIY

SEQ ID NO: 47340 - protein, 293 aa, Zea mays
  Coding DNA Sequence Number=SeqID_5561
  Homolog annotation: Hit_ID=Q2R837; Match level="QueryCoverage=40%, HitCoverage=47%, E-value=7e-40, Identity=65%"; Hit description=PHD finger protein, putative, expressed
  Pfam annotation: Domain name=C1_3; Domain location=99-129; Score=7.6; E_value=0.066; Accession=PF07649.3; Description=C1-like domain
  Pfam annotation: Domain name=PHD; Domain location=100-141; Score =26.1; E_value=0.00013; Accession=PF00628.19; Description=PHD-finger
  Pfam module annotation: Pfam domain module=C1_3::PHD; Domain location= 99-129::100-141
MAPSPGHGEMKHKNRSSSKRKRLFVMINNLPTIYEVVTGTAKKQTKEKTPKSSSKSNKAGPKPPRQPEPNSRGSKMPPPKDEDDSGGEEEEEEEDHENTLCGSCGDNYGQDEFWICCDACETWFHGKCVKITPAKAEHIKHYNAARVAPTAVPLDRVRLPAAKSGLGRHRKLRLARPRARTRARPRKTTNSASPDPGLGLGLGPGRRRTPPRPTQGSDSGSAPEDDELRLARPQGSDSASASADGLRLARPKGSDSTSTSEDRLDLDLGGSSASPYPGLGPTTSRKGPSLPYP

SEQ ID NO: 47341 - protein, 57 aa, Zea mays
  Coding DNA Sequence Number=SeqID_5562
MNGRMLLDSSPELRMHPGSARDVVSTADVFTAAVDLQGRTVRTRRADRPRSAEWPNG

SEQ ID NO: 47342 - protein, 94 aa, Zea mays
  Coding DNA Sequence Number=SeqID_5563
MPYINSPFEGLSFILLSLQSAFELSYAKKLKVPKVLNKPIKRPRKDSNKESKRQPKYALVWRTGLSGVPPDSVRCTRDPTPNYSPSGILEAAPL

SEQ ID NO: 47343 - protein, 466 aa, Zea mays
  Coding DNA Sequence Number=SeqID_5564
  Gene Ontology: Mol. function=protein binding; Cellular component =cytoplasm; Biological process=heat acclimation
  Homolog annotation: Hit_ID=Q8RZQ3; Match level="QueryCoverage=63%, HitCoverage=83%, E-value=1e-120, Identity=71%"; Hit description =Putative F-box protein Fbl2
  Pfam annotation: Domain name=LRR_1; Domain location=144-171; Score =8.5; E_value=7.3; Accession=PF00560.23; Description=Leucine Rich Repeat
  Pfam annotation: Domain name=LRR_1; Domain location=196-219; Score =3.8; E_value=55; Accession=PF00560.23; Description=Leucine Rich Repeat
  Pfam annotation: Domain name=LRR_1; Domain location=246-273; Score =4.0; E_value=50; Accession=PF00560.23; Description=Leucine Rich Repeat
  Pfam annotation: Domain name=LRR_1; Domain location=65-85; Score=0.6; E_value=2.2e+02; Accession=PF00560.23; Description=Leucine Rich Repeat
  Pfam annotation: Domain name=LRR_1; Domain location=91-113; Score =8.1; E_value=8.8; Accession=PF00560.23; Description=Leucine Rich Repeat
  Pfam module annotation: Pfam domain module=LRR_1::LRR_1::LRR_1::LRR _1::LRR_1; Domain location=144-171::196-219::246-273::65-85::91-113
MELLLRIISLVGDDRIVIVASGDRMNDLVISLAHKFTKLQVLSLRQIRPQLEDSGVEAVANHCHDLRELDLSRSFRLSDRSLYALAHGCPQLTRLNISGCSSFSDVALVFLSSQCGNLRCLNLCGCVRAASDRALQAIACYCGQLQSLNLGWCDGITDKGVTSLASGCPELRAVDLCGCVLITDESVVALANGCLHLRSLGLYYCQNITDRAMYSLAANSRVRSRGRGWDATAKSGGGGKDRERDGLASLNISQCTALTPPAVQAVCDSFPALHTCPERHSLNISGCLSLTSVHCACVKACTWGLYSLGNRVEATELSSSEGADGIIHHQRPSHLHLHELPTPQLRHTAAQEPLAKTAQQKLFGGTQHIEGGKVVNCLGKVAKCEVQGEASGVDDPSPIDVRTGADEVVPVCVGKEAVAPASGGGPPRVDGEGETPRHVYRHSPPGSFPKLRTENGDIGSFLRKEE

SEQ ID NO: 47344 - protein, 457 aa, Zea mays
  Coding DNA Sequence Number=SeqID_5565
  Gene Ontology: Mol. function=RNA-directed DNA polymerase activity; Cellular component=intracellular; Biological process=RNA-dependent DNA replication
  Homolog annotation: Hit_ID=UPI00004C1733; Match level="QueryCoverage =99%, HitCoverage=33%, E-value=0.0, Identity=92%"; Hit description =UPI00004C1733 related cluster
  Pfam annotation: Domain name=RVT_1; Domain location=56-225; Score =145.9; E_value=1.1e-40; Accession=PF00078.17; Description=Reverse transcriptase (RNA-dependent
MPGIPRDVAEESLDIRAGARPVKQPLRRFDEEKRRAIGEEIHKLMAAGFIKKVFHPEWLANPVLVRKKGGKWRMCVDYTGLNKACPKVPYPLPRIDQIVDSTAGCETLSFLDAYSGYHQIRMKESDQLVTSFITPFGMYCYVTMSFGLRNAGATYQRCMNHVFGEHIGRTVEAYVDDIIVKTRKASDLLSDLEVTFQCLKAKGVKLNPEKCVFGVPRGMLLGFIVSERGIEANPEKIAAITSMGPIKDLKHVQRVMGCLAALSRFISRLGERGLPLYRLLKKAECFTWTPEAEEALGNLKALLTNAPILVPPAAGEALLIYVAATTQVLSAAIVVERREEGYTLPIQRSVYFISEVLSETKVRYPQIQKLLYAVILTRRTLRHYFESHPVTMVSSFPLGEIIQCREASGRIAKWVVEIMGETISFAPRKAIKSQVLADFVAEWVDTQLPTALIQPEL

SEQ ID NO: 47345 - protein, 287 aa, Zea mays
  Coding DNA Sequence Number=SeqID_5566
MGITSGATGRGHDLDPADTSCCPLIGVENLQGTFISCYRTLLLANMVPFICAAVENMCRIYLADRYEAHLSIQLYTAKAQSLSQLHSRGIPHHGLHFSESVPLRAHNPRRAHPHSRCVRPNADSPRPSPDRAKEEQYGQPLQAEFSSPSPDSGGGGSCVTTESDEDASSPSPDVVRRSLAPQERTVLLEREHSLPPSQAVDGDDDDDLDANVERHHAEDAPGGSGCYPSNSSSRRAPSATAAAEGPGPVGRRRGDEQAIRRLHQEELQLLRPAIGDLRSVTVRPPPR

SEQ ID NO: 47346 - protein, 104 aa, Zea mays
  Coding DNA Sequence Number=SeqID_5567
MPAVKFAMNKRPSQAKTQADSFQFERTRSILHKLKEQISDSTPVIRAGAGTGISAKLFELHRHLCRAAAAALSIQVIFTNDCYVFALCPFAGPQFQMNLKDEEY

SEQ ID NO: 47347 - protein, 225 aa, Zea mays
  Coding DNA Sequence Number=SeqID_5568
  Homolog annotation: Hit_ID=Q7G3M2; Match level="QueryCoverage=37%, HitCoverage=24%, E-value=9e-17, Identity=48%"; Hit description =Expressed protein
  Pfam annotation: Domain name=X8; Domain location=138-222; Score =158.4; E_value=1.9e-44; Accession=PF07983.3; Description=X8 domain
MEFGRLPATHGILAYLPLTRVPGPEAFIKFSCERPVAPDLVCLAAKAMPRAPLLDDEFSTHPSLTTPNSPPQVGPGTPFGSVPPSPIIVVSSPPGSGPDPGSGSGGGGSGSGGGPFQPPIIYPPPLAPPLAPGAGQTLWCVAKPTVPDPIIQEAIYYACGAGAGCDSILPSGSCYRPNTVLAHASFAFNSYWQQAKATDGTCDFGDTATIVTRDPSYEECKFDLL

SEQ ID NO: 47348 - protein, 220 aa, Zea mays
  Coding DNA Sequence Number=SeqID_5569
MRRGGKLSETRGQCRTGEAGPSLPRTVEAIDEQGSCDSAVGPEKAAVLPPPQCPLAFANHVPPNPRDGSAPLGNGRLLRSLLALAMRLCRRVPVSTLTRADVRDLHALGRNGFYYAPLANATTPPPTPPPPPPARRPPAPANAAMDGDRILDPLLSGAEQQNSASLSRPHPAPTTAATTTICDRHRLLCVPSTSSKRSFRVERRPTLPLSPHPLDDTRSV

SEQ ID NO: 47349 - protein, 68 aa, Zea mays
  Coding DNA Sequence Number=SeqID_5570
MNSNIVDEPVADTNADTQTPSLAALPRSSGLDDVGLGSDELALGQLLLVGLGHLLGKLVEDLLDHDRL

SEQ ID NO: 47350 - protein, 186 aa, Zea mays
  Coding DNA Sequence Number=SeqID_5571
  Homolog annotation: Hit_ID=Q5Z800; Match level="QueryCoverage=42%, HitCoverage=10%, E-value=4e-25, Identity=74%"; Hit description =Putative NF-E2 inducible protein
  Pfam annotation: Domain name=DUF544; Domain location=59-174; Score= -11.2; E_value=0.00046; Accession=PF04424.4; Description=Protein of unknown function (DUF544)
MGDPPYVVSFLAQPTAEADPQPTEPTEVMYRTRADDFLGRCKSIVYQNNNGLCPLLTICNVLLLKNVISLNPDAEEVSQKRLLSLVAERLIDPNIAGQHVNGSIRRSWMRGDLDVESFEGSHLVLVATGSDSFEVVSYKNVNCLKQDSLDKGMGASNIICHVSSIKLLSSICQILVSHDLYIRLSH

SEQ ID NO: 47351 - protein, 137 aa, Zea mays
  Coding DNA Sequence Number=SeqID_5572
MAAHAATFASALKKSLSSLPPQRREKEEEQGSLAAIKAMDADVAVQEEEEGRTMVVGVRANAESRALVTGVLVNVATTIDGQTGRHGPTRHDPPGPATKRVVPRWGRRAAAAAQARLVSLLVVSGRPDGTMAHLSIL

SEQ ID NO: 47352 - protein, 92 aa, Zea mays
  Coding DNA Sequence Number=SeqID_5573
MGPGPAHRGSEIDTEPYLSTIMDTTLRSRSALFEPESFIRGSGSGSTHDLLEKARRYIGRYEYNAMMREAGACPAAPKSSDPGTDESETWKP

SEQ ID NO: 47353 - protein, 161 aa, Zea mays
  Coding DNA Sequence Number=SeqID_5574
  Subcellular localization annotation: CTP_CleavageSite=15; ConfidenceScore=5.12e-01
MGAAPPSLSTTLVTRSGGGSTTRSGGLSQHSSGCMWTYHRDMLRLGPVDLWTKAKTHADPVTPMPASSSEGEATGAKPPRQCVVHRATSCEGGKARAVSEATTRSSNIGTWHSQVSTRYTDLALNGPETWIRSGLAQTRIRSGLEFPFLCPLRRTAATRES

SEQ ID NO: 47354 - protein, 383 aa, Zea mays
  Coding DNA Sequence Number=SeqID_5575
  Homolog annotation: Hit_ID=Q9C7B9; Match level="QueryCoverage=38%, HitCoverage=16%, E-value=5e-33, Identity=55%"; Hit description =Kinesin heavy chain, putative; 55116-47986
MVVSGALSGCAIESRPNAVVGGGTLTNSDGSLGLGLGLLCTRQGGEAGAGGQEILPSTAPSVGSKGAVEGCREPAMAEGKRWWRLGLHAREEESSAAPMAARRSSGRWPGRRPVEIKELKQKVSELIEIKAQLEDRNQKLLEESTYAKGLVSAAGVELKALSEEVTKLMNQNEKLATELSSLRSLTPAPRRVSNAPRGTRRESMSRRHEPASRRDTNTSHEREKALGTLLMEKEQKEAELQRKVEESKHKEAFLESELANMQAKPVAVAVAVAVSSSPPCQRLSTYAMDGSAFPSLSPELRDALAKVAVFVLVQGLVYLILRSSSDVFSKDGRLRSLSFRPMRSMSVRRVLAPLSDVPVGTDDASPSLSPAATSSHRKAARED

SEQ ID NO: 47355 - protein, 136 aa, Zea mays
  Coding DNA Sequence Number=SeqID_5576
  Gene Ontology: Mol. function=cation transporter activity; Cellular component=membrane; Biological process=cation transport
  Homolog annotation: Hit_ID=Q6Z7K5; Match level="QueryCoverage=62%, HitCoverage=27%, E-value=2e-12, Identity=45%"; Hit description =Putative cation diffusion facilitator 8
MARGDYFDLPREMPAETLEARRCSLDPLRRGWSPTGFQVLVQAVGGEQTWRVERLIWFYSIMLSAAAVKLALWLYCKSLGKYYVQAYAKDRFCGLSIVPVEAVILVVHTNRSKSVLENAVNFTPNHFNKYRLRLCA

SEQ ID NO: 47356 - protein, 78 aa, Zea mays
  Coding DNA Sequence Number=SeqID_5577
MAGERGAGDSCQVAQSADTDRRRGEGVDVAFLQLGTSTMHDFDPHPAPSETVAVLEHVTKQIKQLALGARLRLAHHLR

SEQ ID NO: 47357 - protein, 78 aa, Zea mays
  Coding DNA Sequence Number=SeqID_5578
  Gene Ontology: Cellular component=chloroplast; Biological process =cell redox homeostasis
  Homolog annotation: Hit_ID=Q6Z7L3; Match level="QueryCoverage=98%, HitCoverage=41%, E-value=2e-33, Identity=82%"; Hit description =Putative hioredoxin 5
MAGWCRKCIYLMPRMEKMAGEYPEVRFYFIDVNKVPQGVVKRGNVTLWKDGEWKAEVIGGHKACLVMDEVREMIENNK

SEQ ID NO: 47358 - protein, 367 aa, Zea mays
  Coding DNA Sequence Number=SeqID_5579
MALDDACAYDCCALPPPLHCLDWDWDSELLHTHRHTTSAGGAAVQAEPPTFFVPATPGVQPSAASSGGYLHDAITHWSDDRRSKRQRMAAAVATTTTPPARRPATTVSEDLQCLLAGFWDSTSEAEGGADFRHDLNTTTPEPEPETTTEIRCSFASVKHCWLPTYVLPRLRVKFAIVCQYAGAASRAEEEADNGSGEDEAVASGREDQQRGASAQVLLPAPAAVAQRGEEEEEEAKATAVVPPPRFPATAPAAAPVQRQLQLQKAAEGAAATTTAPASACSSLLSLSGEDREKRGVGVLYPFAVVKPLGLDDGRMTTLSDVNHRILKRPARPVAMPVVQGNHGTLAATVVNTPSGLVFSAGFCLLYY

SEQ ID NO: 47359 - protein, 118 aa, Zea mays
  Coding DNA Sequence Number=SeqID_5580
  Gene Ontology: Mol. function=nucleic acid binding; Biological process= DNA integration
  Homolog annotation: Hit_ID=Q2QSC3; Match level="QueryCoverage=99%, HitCoverage=8%, E-value=3e-44, Identity=76%"; Hit description =Retrotransposon protein, putative, unclassified
  Pfam annotation: Domain name=RVT_2; Domain location=1-52; Score= -195.8; E_value=0.079; Accession=PF07727.4; Description=Reverse transcriptase (RNA-dependent
MSMMRELKYFLGFQVKQLQEGTFISQTKYIQDILNKFGMKDAKPIKTPMGTSGHLDLDTEGESVDQKKEHIGDLPVLGKILGVLGFKEAKFRRSFYRQSRVYCCRTLLRAIALVEANP

SEQ ID NO: 47360 - protein, 731 aa, Zea mays
  Coding DNA Sequence Number=SeqID_5581
  Gene Ontology: Mol. function=hydrogen ion transporting ATP synthase activity, rotational mechanism; Cellular component=proton -transporting two-sector ATPase complex; Biological process=ATP synthesis coupled proton transport
  Homolog annotation: Hit_ID=Q69T67; Match level="QueryCoverage=99%, HitCoverage=100%, E-value=0.0, Identity=63%"; Hit description =Lustrin A-like
  Pfam annotation: Domain name=DUF231; Domain location=557-721; Score =254.1; E_value=2.9e-73; Accession=PF03005.6; Description=Arabidopsis proteins of unknown function
MKGAWKQSGVVAVADQLGYLGGAGFVGRARPVTLCLYGLALTFAGFAVFLCFAPSLPVPPASSPGAAWFDGLIASASPYRAQVSGFLSSLFPANSSSTVPPGGGVAARRAGPSGGGFAASGSRGNGSTSSAVRPGEQLGSGGGVPPSRVGNGEPPSGKEAPVPGDATAAVPSGAPPDDHVQGEGGAGAKHSVGSAAAEAKGGSGPGPGRPSGGSAQNGTSAKGRVPILINGSYANANSADAGDGNGMRASARNAAGSTHQLRSGTAALGNTVAVSSLNQTASAVAVAAREGNGTATAGNNQTFLIQAPADNKNHSSVASDGSNSSPTNKQNESPASPQGSTSTVKDQSARGPTPAAIVPVKADANAGRRMKADWTENMAGCDLFYGNWVRDDSYPLYPAGSCPHIDESFNCHLNGRPDKAYERLRWQPSGCRIPRLNPTDMLERLRGKRLVFVGDSLNRNMWESLICILRNSVKDKSKVFEVSGRSQFRAEGSYSFLFQDYNCSVEFFRSPFLVQEWEMPVSNGKGTRETLRLDIIDPSFPRYKNADIVIFNTGHWWTHDKTSLGKDYYQEGNRVYSELDVHDAFRRALNTWAKWVDSNVNPKKTTVFFRGYSASHFSGGQWNSGGSCDRETEPITDDQYLTPYPTKMSILEEVLRGMKTPVVYLNITRMTDYRKEAHPSVYRKQKLTEEERKSPELYQDCSHWCLPGVPDSWNELLYAQILLTQQHGMQQ

SEQ ID NO: 47361 - protein, 91 aa, Zea mays
  Coding DNA Sequence Number=SeqID_5582
  Homolog annotation: Hit_ID=Q9ST48; Match level="QueryCoverage=52%, HitCoverage=7%, E-value=6e-14, Identity=84%"; Hit description=DELLA protein DWARF8
MGSSKDKTDGGGGGDRGTGGGGRAAGRARVQGAFVGYGGRRSKAGAARDGHGEDKGSTIGVGCGRAVAMRAQSSKVVQDGSNPYTLEGTDG

SEQ ID NO: 47362 - protein, 173 aa, Zea mays
  Coding DNA Sequence Number=SeqID_5583
  Homolog annotation: Hit_ID=Q6QP54; Match level="QueryCoverage=65%, HitCoverage=40%, E-value=2e-08, Identity=41%"; Hit description =Putative kinase
MTRVPDFCELWRAFNAPAEDSAACAAPTAVPLDRVRLTAAKSGLGRHRKLRLARPRTQGSDSGSAPEDDELRIAQPQGSDSGSAPEDDELRITRPQGSDSALASADGLRLARPRGSDSTSASEDRLDLDLGGASTSPNPGLGPTTSQEAPSLPYPKLTQATGNKTGVPSGSPQ

SEQ ID NO: 47363 - protein, 88 aa, Zea mays
  Coding DNA Sequence Number=SeqID_5584
MEVNRNGSTMFGVKNQSYFRKGVAGDWRNYIRTCSEFDSMWHLGMPKPYALLYTTIWKHASIYGPGPMVGERRCTLKADEQVVPLTCE

SEQ ID NO: 47364 - protein, 297 aa, Zea mays
  Coding DNA Sequence Number=SeqID_5585
  Subcellular localization annotation: CTP_CleavageSite=28; ConfidenceScore=5.12e-01
MQAACNRTKWAHPFDSNTPSTGAQAHTSCNRRAGCYVQETAPPLAPLPCLLDCGTGTATRGNPAYDPTVPTRHIGHGDRERGYPERDPSPRRKRALSPLLIRGSKAGPSEGFNSRLRTLGLRARYWLALEGFTAASDAERGMTLGLGLGLGPGRRRTPPRPTQGSDSGSAPEDDELRLARPRAQTRAWSRKTTNSASPDSGLGLGLGPGRRRTPPRPTQGSDSGLGPEDDEPRLARPQGSDSASASANGLRLAQPKGPDSTSTSEDRLDLDLGGASASPYPVLGPTMSQEGPSLPYP

SEQ ID NO: 47365 - protein, 630 aa, Zea mays
  Coding DNA Sequence Number=SeqID_5586
  Gene Ontology: Mol. function=RNA-directed DNA polymerase activity; Cellular component=mitochondrion; Biological process=RNA-dependent DNA replication
  Homolog annotation: Hit_ID=UPI00004C1731; Match level="QueryCoverage =99%, HitCoverage=51%, E-value=0.0, Identity=68%"; Hit description =UPI00004C1731 related cluster
  Pfam annotation: Domain name=RnaseH; Domain location=236-363; Score =11.6; E_value=4.9e-06; Accession=PF00075.14; Description=RNase H
  Pfam annotation: Domain name=rve; Domain location=365-554; Score =94.7; E_value=2.8e-25; Accession=PF00665.16; Description=Integrase core domain
  Pfam module annotation: Pfam domain module=RnaseH::rve; Domain location=236-363::365-554
MSFGLRTAGATYQRCMNHVFGEQIGRTVEAYVDDIVVKTRKASDLLSDLETTFRCLKAKGVKLNPEKCVFRVPRGMLLGFIVSERGIEANPEKIAAITNMGPIKDLKGVVSAAIVVERREEGHALPVQRPVYFISEVLSETKIRYPQIQKLLYAVILTRRKLRHYFESHPVTVVSSFPLGEIIQCREASGRIAKWAVEIMGETISFAPRKAIKSQVLADFVAEWVDTQLPTAPIQPELWTMFFDGSLMKTRAGAGLLFISPLGKHLRYVLRLHFPASNNVAEYEALVNGLRIAIELGVQRLDARGDSQLVIDHVMKNSHCRDPKMEAYCDEVRRLENKFFGLELNHIARRYNETADELAKIASGRTTVPPDVFSRDLHQPSVKTDETTEPEKASAQPEAPSAQSEAPSAQPEKAPGGYTHLLVAIDKFSKWIEVRPLNNIRSEQAVAFFTNIIHRFGVPNSIITDNGTQFTGRKFLDFYEDHHIRVDWAAVAHPMTNGQVERANGMILQGLKLRIYNGLNKFGKRWMKELPPVVWSLRTTPSRATGFTPFFLVYGAEAIFPTDLEYGSPRTRAYDDQSNRANREDSLDQLEEARNMALLHSARYQQSLRRYHARGVRSRDLQVGNLVLRL

SEQ ID NO: 47366 - protein, 87 aa, Zea mays
  Coding DNA Sequence Number=SeqID_5587
MRVEWGTLSRIIRGSEVIMRLMVLGFDSGHASPLQPNMILAEYVDVYSPLLYTPNPPSPGCQHCNHCSGEDKAVEGDHREFQDYDEF

SEQ ID NO: 47367 - protein, 356 aa, Zea mays
  Coding DNA Sequence Number=SeqID_5588
  Gene Ontology: Mol. function=cysteine-type peptidase activity; Biological process=proteolysis
MNDLQCEAVARKGFQSILEMSTDGLAVGLFLSWLMDKLDPVDMTIRLGRGKELKITKETVRLILGLPSAGGGKPFMNCYGKIDAADSLRKDLKISRDEFDIATLQEIIVKGRDGDLTIRNTNHVTTTIYGCSIVVAIYYVDHLHHEVAPENKYGIPRIKYFDKETIDALTKADRRKPRHAGETYGHCYFRSMTDTCYVAAPERPVNDTFHIHVPRMKDLISSKVLCLPPPYRPRFESLLKAHDQEVDKYCATLERTHHKLVSKQLHLSETFTYMIDDVIRIGSKVQGSQQPDTQTDEFKVTDHCSDVMDNMREDISTNIDQTPLPSPTASPPKLQEDLMEADVDLLTTINKIVDLL

SEQ ID NO: 47368 - protein, 36 aa, Zea mays
  Coding DNA Sequence Number=SeqID_5589
MDLPSRVGSHPRKLNRRVTGDPPSRVVCDATVIARK

SEQ ID NO: 47369 - protein, 95 aa, Zea mays
  Coding DNA Sequence Number=SeqID_5590
MAETTGELVGVDPRPEARPSMAPVTDPATTSEEKQRATQAGRGPGHRMPMGWASMEDKQCLTIRAHMAETSVALLNETADDPAPRSEAWRNREHS

SEQ ID NO: 47370 - protein, 148 aa, Zea mays
  Coding DNA Sequence Number=SeqID_5591
  Gene Ontology: Mol. function=cysteine-type peptidase activity; Biological process=proteolysis
MRSVDRPPSNAKRLTIESSQEVFSVDISRCTRSSNSAQHADNPQNKQQIDPQLLPVTRVRRKALACQVKKSQPTTPSALSDDDFMPAPTLKHNFKSAAPSTSINNRSKKKSRVLNIDIPPPQVPIMSSRSKSDIDFKSNDIMKTSSPN

SEQ ID NO: 47371 - protein, 55 aa, Zea mays
  Coding DNA Sequence Number=SeqID_5592
MAVMEARVVGGFQRSQRPAVHFIKMRYGYGKYRLWQGRLESLASLKLRGYATIGG

SEQ ID NO: 47372 - protein, 99 aa, Zea mays
  Coding DNA Sequence Number=SeqID_5593
MEHMHAPIDRQGQRKRQACGAAPRSAVNKSVPQCGSRVNDAGGCRAPACGMPDATQFNARTAGMVACVALYGEETVRMQAKRCSVQQAGGGNTGEESKR

SEQ ID NO: 47373 - protein, 150 aa, Zea mays
  Coding DNA Sequence Number=SeqID_5594
MSWLRAALAGARGRAHRAEPHGGREPRQQGREGAGVGASATTAPSQTGPRAVPGQAAPRRARGGGSHAEARKRRGRQGDGEDERREGLRKGSWGRRGRRGEDAPGTRAPRVMAARLGRGSSLRAARAMARGGGQGGRTGEWAGARWAKWP

SEQ ID NO: 47374 - protein, 136 aa, Zea mays
  Coding DNA Sequence Number=SeqID_5595
  Subcellular localization annotation: CTP_CleavageSite=38; ConfidenceScore=5.24e-01
MCSRLSALFRSKACQPAFASSGCCSLESLALTPAFSPRCRTRGEGGGAAGLRSEAGQKDIRRRGPAALQLSREGIGEGGGGGGSSLTSKREQGKHKLKAGGEEKGEGAGLSSRTKEEASERRKLRSSDGEGEQGIQ

SEQ ID NO: 47375 - protein, 88 aa, Zea mays
  Coding DNA Sequence Number=SeqID_5596
MAALQEQQEEDRDEGEGGKDDDEESEDDGGPFGTAPAPDSKRGSGGAVPNGRKIGSRFCEERWDLKKPAPPSLKTAPQPTKYGPPLKV

SEQ ID NO: 47376 - protein, 184 aa, Zea mays
  Coding DNA Sequence Number=SeqID_5597
  Homolog annotation: Hit_ID=Q9SK36; Match level="QueryCoverage=92%, HitCoverage=94%, E-value=2e-07, Identity=29%"; Hit description =Expressed protein
MAADPSRRRPEYHPAVNDVLLTLTNARGTLADVQRRLDLEFRAAYPDHANPAKLVARVKRLEEEAAALKEMCRDLLTQKQELIDQIRVSLMAQRGMTQRLLAASGLPPLVRRRRDRPQQPQRGTGNRLEATMENLPLDLGIHTHSHEAIDIPVPVLTQFVTLAGEIEDLDKKKNANQMLFSAII

SEQ ID NO: 47377 - protein, 314 aa, Zea mays
  Coding DNA Sequence Number=SeqID_5598
  Gene Ontology: Mol. function=isopentenyl-diphosphate delta-isomerase activity; Cellular component=cytosol; Biological process=isoprenoid biosynthetic process
  Homolog annotation: Hit_ID=Q6K683; Match level="QueryCoverage=99%, HitCoverage=36%, E-value=1e-136, Identity=78%"; Hit description =MutT/nudix protein-like
  Pfam annotation: Domain name=NUDIX; Domain location=68-210; Score =50.6; E_value=5.2e-12; Accession=PF00293.18; Description=NUDIX domain
MAAAPEERLDVLNAAGDKIGVSKPRHAPVPTPEPNPPVSVGFLRSDGVILPIARFAFLRSEVHRDGDYHRAVHVWIYSESTGELLLQRRADCKDSWPGQWDISSAGHISAGESSLFSAQRELEEELGINLPVDAFELIFVFLQECVINNGTYTNNEYNDVYLVTTLTPIPLEAFTLQESEVSAVRYMRCDEYKSCLAKESREYVPYDVNGQYGQLFSIIEERYKENTESQSLTLQKQMNRYVPIHLEPDLTSLSEGDREALGYILKAAIVIDDIFYEQVWNSNKMLRDWLKGHSEFSPFDKLKWAYYSINKSTW

SEQ ID NO: 47378 - protein, 612 aa, Zea mays
  Coding DNA Sequence Number=SeqID_5599
  Gene Ontology: Mol. function=isopentenyl-diphosphate delta-isomerase activity; Cellular component=cytosol; Biological process=isoprenoid biosynthetic process
  Homolog annotation: Hit_ID=Q6K683; Match level="QueryCoverage=78%, HitCoverage=63%, E-value=0.0, Identity=77%"; Hit description =MutT/nudix protein-like
MGQSPIQQQIYTSDLTPPAVATLAITDVETEPKLREHRGGEALGEDIRELGGGRDADIADNNTRRRSEGRSPHASCADAARVWWRGQPSQSVGVDDQLEGQRRSKENAVVQGAMEYTEIGRRLLRILRSCLDENKAFLSTADSAVQLLTEATKPVSGWKGIEYRAAFPLHKPPGANFYPPDMDKAEFELWKSKLTDKEQNDATGFFTVIKRHDSLSSSSLTQSDGSDQTKTKDDLFIVPYSKEYRPFLEKAAELLEKASACSDSPSLKNLLRTKANAFLSNDYYESDIAWMELDSNLDLTIGPYETYEDSLFSYKATFEAFVGIRDDTATSQVKLFGDQLQDLEKNLPMDNIFKSDSISAAPIRVINLLYNAGLHDALTGLLVQDVKGPQTIAFNLPNDERIVNERGTSMVMLKNISEAKFKHILKPIADACIREEQKEYVDFEPYYTHIVCHECCHGIGPHSITLPSGKKTTVRRELQEFHSALEEAKADIVGLWALNFLIKKGLLPKSLSQSMYVSFLAGCFRSIRFGLEEAHGSLEFVLWKVEDAVESLSREILTIQAKGDKPSAQSLLQSRATLTQPLRMALERIEHMQVPVDIAPVFSTANKLFADI

SEQ ID NO: 47379 - protein, 44 aa, Zea mays
  Coding DNA Sequence Number=SeqID_5600
MRGPTSQTYSKSPTVQLVQFPLGGCGVPLQGQRNILNKVLDTVA

SEQ ID NO: 47380 - protein, 143 aa, Zea mays
  Coding DNA Sequence Number=SeqID_5601
  Subcellular localization annotation: CTP_CleavageSite=51; ConfidenceScore=5.27e-01
MSNKQTYFQSNKQTPAFLHAYMLPACQQPCIQSNNQTANTRSHTNSQDEVRADARSLASWPLDLGGGKLGAGAAERTPELELQRSRARAGAEHRTSGAVEPNAGHREPAGGLAFLLAAGSGVGPWATFLQAWRAWAAGGGACE

SEQ ID NO: 47381 - protein, 458 aa, Zea mays
  Coding DNA Sequence Number=SeqID_5602
  Gene Ontology: Mol. function=pepsin A activity; Cellular component =cellulose and pectin-containing cell wall; Biological process =proteolysis
  Homolog annotation: Hit_ID=Q6Z674; Match level="QueryCoverage=96%, HitCoverage=97%, E-value=1e-119, Identity=54%"; Hit description =Putative 41 kD chloroplast nucleoid DNA binding protein
  Pfam annotation: Domain name=Asp; Domain location=121-457; Score= -73.5; E_value=2.9e-09; Accession=PF00026.14; Description=Eukaryotic aspartyl protease
  Subcellular localization annotation: CTP_CleavageSite=70; ConfidenceScore=5.23e-01
MASISKFLLALLFSYHTLIAHAADDRRHKVLSVGSLMKSSTACSEPKVTPPSTGVTVPLHHRYDPCSPVPSKKVPTLEERLRRDQLRAAYIKRKFSGAGDIEQSDAATVPTTLGTSLSTLEYVITVGIGSPAVTQTMSMDTGSDVSWVQCKPCSQCHSEVDSLFDPSSSSTYSPFSCSSAPCAQLSQSQEGNGCMSSQCQYIVNYGDSSSTTGTYSSDTLTLGSSAMTDFQFGCSQSESGGFNDQTDGLMGLGGGAQSLASQTAGTFGTAFSYCLPPTSGSSGFLTLGTGSSGFVKTPMLRSTQIPTYYVVLLESIKVGSQQLNLPTSVFSAGSLMDSGTIITRLPPTAYSALSSAFKAGMQQYPPATPSGILDTCFDFSGQSSISIPTVTLVFSGGAAVDLAFDGIMLEISSSIRCLAFTPNGDDSSLGIIGNVQQRTFEVLYDVGGGAVGFKAGAC

SEQ ID NO: 47382 - protein, 210 aa, Zea mays
  Coding DNA Sequence Number=SeqID_5603
MGRPKSDPMRMVVSRPIKPFTGGFNDQNDGLMGPDVGFIDREAGVERRSWCTVMPPFPDILPLCSAPHRALLTLPAASAPLPIALSSPSQLRSPSPAIPGGDAPVPELAAIFRVMVDLLGDPAWPQLHPRPCTDTPWPGLQCELAPDDACVLRANRLHLGLDVATPPCRPRARLDPTSLRGLLHLRTQSIFGCFGAAQAPVELSPALFTS

SEQ ID NO: 47383 - protein, 470 aa, Zea mays
  Coding DNA Sequence Number=SeqID_5604
  Gene Ontology: Mol. function=pepsin A activity; Cellular component =cellulose and pectin-containing cell wall; Biological process =proteolysis
  Homolog annotation: Hit_ID=Q6Z675; Match level="QueryCoverage=93%, HitCoverage=95%, E-value=1e-155, Identity=62%"; Hit description =Putative chloroplast nucleoid DNA-binding protein cnd41
  Pfam annotation: Domain name=Asp; Domain location=136-468; Score= -101.2; E_value=1.2e-07; Accession=PF00026.14; Description=Eukaryotic aspartyl protease
MGSPVVRHALLLSLLCAGALGFLLCCHGAAVAPAYVTVSAASFAPSSTCSASDPVAPQQNDTFTVLRLTHRHGPCAPLRASSLAAPSVADTLRADQRRAEHILRRVSGRGAPQLWDYKAAAATVPANWGYDIGTSNYVVTASLGTPGMAQTLEVDTGSDLSWVQCKPCAAPSCYRQKDPLFDPAQSSSYAAVPCGRSACAGLGIYASACSAAQCGYVVSYGDGSNTTGVYSSDTLTLAANATVQGFLFGCGHAQSGGLFTGIDGLLGFGREQPSLVQQTAGAYGGVFSYCLPTKSSTTGYLTLGGPSGVAPGFSTTQLLPSPNAPTYYVVMLTGISVGGQPLSVPASAFAAGTVVDTGTVITRLPPAAYAALRSAFRSGMASYPSAPPIGILDTCYSFAGYGTVNLTSVALTFSSGATMTLGADGIMSFGCLAFASSGSDGSMAILGNVQQRSFEVRIDGSSVGFRPSSC

SEQ ID NO: 47384 - protein, 775 aa, Zea mays
  Coding DNA Sequence Number=SeqID_5605
  Gene Ontology: Mol. function=zinc ion binding
  Homolog annotation: Hit_ID=Q6ZI16; Match level="QueryCoverage=97%, HitCoverage=98%, E-value=0.0, Identity=46%"; Hit description =Bactericidal permeability-increasing protein-like
  Pfam annotation: Domain name=C1_3; Domain location=328-358; Score =17.7; E_value=0.0042; Accession=PF07649.3; Description=C1-like domain
  Pfam annotation: Domain name=PHD; Domain location=329-379; Score =23.1; E_value=0.00028; Accession=PF00628.19; Description=PHD-finger
  Pfam module annotation: Pfam domain module=C1_3::PHD; Domain location= 328-358::329-379
  Subcellular localization annotation: CTP_CleavageSite=41; ConfidenceScore=5.03e-01
MGDAATAAAAAAASPACAARKRRRGDDSAGLRRVAEIVMVLAAAGEVRGGRQPTAAERALAAEARETLATAVAERAVRPKDLFPGEAVRAVVEDLGLNRSKDPAAMGFRPPKASIADRLMLTKRKMEEVKEAPVVSAPQTVVSSGTSEFHGLNGATKFGVGVPRNPPVPSLAATGPLTSTSPVTLKPPGSSPVKPVANSSVVPLVNTGPSNLKLDKNVSGPLNLAFSGATVVHSNKSTLDTSARPDVNAVQSSNQTVKNHDTKPVAVQAATGNPVMGHRATPGVAFAPPKPTFINHNEIAKNVLQFLHQPANHPSWTPPSTEYMHSRLCCQICKVDIIGTDNLLVCDACERGVHLKCLHQYGNKGVPKAEWHCSACLTQSKGKPLPPKYGKVTRTVVASKTAPPGGGAQLSLQESAENMAAKENHQKLAANGNLMKPFSIHGGSTVPDSNVLALSAVMAGSQSQLVSTLRPSIVVKAETPSNGKEGTGQPCNTAIQPNVRSSSLNNRLRSDSCLNPADSANEIMHGKHAAEISGVEAKVKSEANSEVVVSTDEELVHSSGTSIETERAKVVAIEENRAQSTFETDKMKVGETTINTGTTDQCINTEEKLPSLATSEAHTITDVKMTSNTGIPVQQHNIATIEEKTQIDAVSDPHPHAIQDIQDMEMGTNNGPPIDQTSSLVEENPPGQSSSIADACVTANTGIPTDQTQHPNESTENAVKKSPNRELYKEKPGCNITSDITQKVTSNGIMCPEDKTLCVHEDKAVGCDTEAKEEN

SEQ ID NO: 47385 - protein, 66 aa, Zea mays
  Coding DNA Sequence Number=SeqID_5606
MSSPACARGPTDSGPPRRQTAHRRDRRDLPYVIDHLPRAISPPVSSDSYQRGRSSKDTKVYTAPKL

SEQ ID NO: 47386 - protein, 262 aa, Zea mays
  Coding DNA Sequence Number=SeqID_5607
  Gene Ontology: Mol. function=hydrolase activity, hydrolyzing O -glycosyl compounds; Cellular component=cellulose and pectin -containing cell wall; Biological process=carbohydrate metabolic process
  Homolog annotation: Hit_ID=Q9AXL6; Match level="QueryCoverage=63%, HitCoverage=30%, E-value=3e-56, Identity=58%"; Hit description=Beta -glucosidase
  Pfam annotation: Domain name=Glyco_hydro_1; Domain location=29-261; Score=-156.7; E_value=7.8e-11; Accession=PF00232.9; Description =Glycosyl hydrolase family 1
MNAKAHVAQRRHARFCLLALIKARACSVLGPWDPTMGGLDPIRGGPDPILGVREDFTAYADVCFSNFGDRVKYWSTINEPNVETIGGYDQGILPPRRCSSPFSFGCEEGNSTMEPYVAAHHRLLVHACTVSLYRDKYQAEQGGRIGLTLLGWWYDPRTQTPNDVAVAARMDDFHIGWFMHPMVFGDYPPVMRKNVGSRLPTFTDEEAARVRGSFNFVRFNHALTRPPRNWIEAACRVVGQRFRLWRCWRGIGTREDSEFEME

SEQ ID NO: 47387 - protein, 160 aa, Zea mays
  Coding DNA Sequence Number=SeqID_5608
MAWTPDELPGARPSPAELLLSLPRVFLSLPWTPEFRCSAMAAVELPARAYLPPWLRFIKLSARREAPARRGLPSSPWLPDESLPSLLDIFELGSCARAALLPWRVPTPGWISLLSSVTCLGTVFCTLAGFLASISRGNMLLLGPLVATQVVFSAGHQRVV

SEQ ID NO: 47388 - protein, 84 aa, Zea mays
  Coding DNA Sequence Number=SeqID_5609
  Subcellular localization annotation: CTP_CleavageSite=51; ConfidenceScore=5.06e-01
MGRKAPPQPTNFPGVAPCLLVRCRCFVCRGLGSRREVDDGTSAVGSGRSVRDSSKWGDDRWPLDDNRRATITQQVYRFEVVFSP

SEQ ID NO: 47389 - protein, 136 aa, Zea mays
  Coding DNA Sequence Number=SeqID_5610
MDRTWPCRAQKWLARPHKDGDKGQLISHQKISPMMAEGSRARSNEHLPRHSRLEVSSSIPLERIFFCSIGCCNGTKKTKRIERCNYSGAATSKSQTHARYDFFCARSVTRRIKLIKRLRIMHALKASDTREKVIER

SEQ ID NO: 47390 - protein, 138 aa, Zea mays
  Coding DNA Sequence Number=SeqID_5611
  Gene Ontology: Mol. function=RNA-directed DNA polymerase activity; Cellular component=mitochondrion; Biological process=RNA-dependent DNA replication
  Homolog annotation: Hit_ID=UPI00004C1731; Match level="QueryCoverage =75%, HitCoverage=7%, E-value=6e-53, Identity=96%"; Hit description =UPI00004C1731 related cluster
MAHNVERSSTPSYSKKHLEGQPRVCGRTQNTDNNDLNKFGKRWMKELPSVVWSLRTTPSRATGFTPFFLVYGAEAILPTDLEYGSPRTRAYADQSNQANREDSLDQLEEAQDMALLHSARYQQSLRRYHARGVRSRDL

SEQ ID NO: 47391 - protein, 141 aa, Zea mays
  Coding DNA Sequence Number=SeqID_5612
  Gene Ontology: Mol. function=small conjugating protein ligase activity; Cellular component=cellular_component; Biological process =protein modification process
  Homolog annotation: Hit_ID=Q6ZD28; Match level="QueryCoverage=64%, HitCoverage=51%, E-value=1e-39, Identity=82%"; Hit description =Putative RUB1 conjugating enzyme
  Pfam annotation: Domain name=UQ_con; Domain location=34-136; Score =38.2; E_value=2.9e-08; Accession=PF00179.16; Description=Ubiquitin -conjugating enzyme
MGMADFDTHGYFIGSFVMPIRYGGRGWLFSITFTFLADIVELNLLKTTKITFKNGKDDLMNFESTIKPDEGYYMGGKFIFTFQVYLHEPPKVKCKTKVYHPNIYLEGNVCLNSLLEDWKPVLNINTIVYMVESSFLGELLR

SEQ ID NO: 47392 - protein, 231 aa, Zea mays
  Coding DNA Sequence Number=SeqID_5613
  Gene Ontology: Mol. function=identical protein binding; Cellular component=cytoplasm; Biological process=negative regulation of enzyme activity
  Homolog annotation: Hit_ID=Q6ESH8; Match level="QueryCoverage=75%, HitCoverage=27%, E-value=6e-24, Identity=33%"; Hit description =Subtilisin-like serine protease
MGEVMIIGILDAGITTIGQINANSKAKGMPPPPVKWKDRCDNNQACNNKLIGFKTFVDTSDTCGNSLLQRASVLGIEYDKAFAVAPKAHLVMYHVCDEECHPKEVRAGMDSAVDDDVDVISMSFNGTEDNMYTPAGRNNPDMLKVERNVPWLLTVAASGVVRRVVTNIELDSKIFKPDVSAPCTNTLTVVPHGDVGYTNTQIVLATSLAAVHASPRGDGQEGTPGLVDLRD

SEQ ID NO: 47393 - protein, 535 aa, Zea mays
  Coding DNA Sequence Number=SeqID_5614
  Gene Ontology: Mol. function=pseudouridylate synthase activity; Cellular component=nucleus; Biological process=tRNA processing
  Homolog annotation: Hit_ID=Q6ESS0; Match level="QueryCoverage=97%, HitCoverage=98%, E-value=0.0, Identity=63%"; Hit description =Putative pseudouridine synthase 1
  Pfam annotation: Domain name=PseudoU_synth_1; Domain location=56-161; Score=39.0; E_value=1.6e-08; Accession=PF01416.10; Description=tRNA pseudouridine synthase
MAAASPPPSPPHAKRPKMSSSSDPEADAEPTSASAAVEGADPAQRRPRYKRRKVAILLGYCGAGYQGMQKNPGARTIEGDLEEALYQAGAVPEADRSAPRRYDWARAARTDKGVSAAAQVVSGRFYVDPPGFIDRLNAQLAPQIRAYGYVRVTNSFNAKKFCDRRRYLYLLPVFALDPSAHPDREAVMASMGSGSELTKCLECSERGRKIPGVMGREGKLPSPGQNGVDAPVEGSSHDESGTLGDAKCDHTSSDGNNPFAHGEVGSNSKEKPDLPVSGDRTEVANAKMGSNGDGAVVSSDFCSDLNSSADADIYIGNEEKKLEPAATENKAQGMESEKINGEEKLPTKSTFSYTDEVKERFNRILKYYIGTHNFHNFTTRTKAEDPAAKRFIISFAADRVVSLDGIDFVRDVNLNVPTAPEVGLYLDECMFTSYNKKWKDSHEAVSMEPYSEEAEEFKVKYIFTHIAAMEHKEGAVALWLHSLNHRNYPDFRYMETAEHNPGAEVESIAAGAEPKVGAEVENTEEVQMPSDNLSE

SEQ ID NO: 47394 - protein, 90 aa, Zea mays
  Coding DNA Sequence Number=SeqID_5615
MEKDDVGLAIIVHEFLANLSACYIAADNHGVDVRGIAEIDVVLVEGVVGRPLLLLAVVAVDASDGGEREMASTISYNRFWYLTLITNLMD

SEQ ID NO: 47395 - protein, 173 aa, Zea mays
  Coding DNA Sequence Number=SeqID_5616
MACTVLQKESKYDTCKHDWSPNQQLVRNEWGLQEAKRDLVDLILEDASADGAALLGEWIGGHRTPLLLEDSVGGGAALRSLTRRIRASILASLASTSSAWKATSSTERECFLAAAVSVTRRSVPPVSGDPVAGNGRELWRDVVARRGPMRRMRHREVVAQSAEANATASVREA

SEQ ID NO: 47396 - protein, 105 aa, Zea mays
  Coding DNA Sequence Number=SeqID_5617
MGREKWTIEAPLTTKETNSRLGLRRGDDSGAGLVVADSGPGVGLGRGCPGASWVAWRGAAVRCRAPGGATWGSREGRREEREGRVGTTRKRGKGRKQRVVAAAGS

SEQ ID NO: 47397 - protein, 459 aa, Zea mays
  Coding DNA Sequence Number=SeqID_5618
  Homolog annotation: Hit_ID=Q69P50; Match level="QueryCoverage=58%, HitCoverage=44%, E-value=9e-28, Identity=35%"; Hit description =Streptococcal hemagglutinin-like protein
  Subcellular localization annotation: CTP_CleavageSite=73; ConfidenceScore=5.00e-01
MDGRKLEQRLCKLAAVEKNNAVLTTSHPRTKEVSSSYEAPTPPTSSVPRRFPSPNLTRTSPTPFQVVQKRAVSAERKHPSTPPSHQNPSTPVHDSSTSMPISSRRLSADRIPESLWPSTMRSHSVSFQSDDISIPVSQMEKEKSGSIVSLDRTLKPPSNVAHKQQSETFTLSRKPSPERKRNLLEGKNVADQSENAKPIDDLPSRLIDHHRWPSRIGGKLSSNSLNKSVDFGDKIVKNLSTPIPGTVSSLKRMLMSNNLGKPLQKTSSDAARLLPHEEIGRVGSEAILINDKPLRTTVPIGILCASSLEKLTVANSGSRSQSPSTTSVSRSISPYPAGPSSPPPRGVGPTPRGVSLPPREVSPTRIRTSIASSQSQNSTSVFSSTPRGVIPTPRKWRYANAHSEAVLYIQKVTAEETLYNVWNATLVLWDALIKKRINLQRLKLELKLNSILNDQGKGD

SEQ ID NO: 47398 - protein, 106 aa, Zea mays
  Coding DNA Sequence Number=SeqID_5619
  Gene Ontology: Mol. function=DNA binding; Cellular component =chromatin; Biological process=DNA integration
  Homolog annotation: Hit_ID=Q7XYU6; Match level="QueryCoverage=51%, HitCoverage=16%, E-value=6e-24, Identity=89%"; Hit description =Integrase
MSKRYVLSASHVNKKNLRFYKIAHFIPCHKTDDATHVADLFFKDVVRLHGIPKIIVSDRDAKFLSHFWKVLWDSRTNLFEEGGMIRVTKAQLRLKNMMGSNYHKAQ

SEQ ID NO: 47399 - protein, 41 aa, Zea mays
  Coding DNA Sequence Number=SeqID_5620
MSPKSFDYTMPPMSKALIPNDTICVDVESSRICVAKSSMMK

SEQ ID NO: 47400 - protein, 42 aa, Zea mays
  Coding DNA Sequence Number=SeqID_5621
MGKLFSSQGGFIKVIEFGYLMAKETCILGAVNMQGTAFKEGH

SEQ ID NO: 47401 - protein, 59 aa, Zea mays
  Coding DNA Sequence Number=SeqID_5622
MATVDGGCNTVDAGADIYVLPLVLLEQQDRGPAGAMNSSSGYRKRDRERDREADQVGHN

SEQ ID NO: 47402 - protein, 123 aa, Zea mays
  Coding DNA Sequence Number=SeqID_5623
MASVVDFRRTAKTGHGDGRHLPLMASNNGKDEREIRASGEGDGRSTSLRRRRRESRSRAADTKWRSALQLSHGVVVVIRFVHAGKGLEDKQGWEGPHVSEMRGEGNASWKQLGLLGQVPVRVG

SEQ ID NO: 47403 - protein, 109 aa, Zea mays
  Coding DNA Sequence Number=SeqID_5624
MGECRTPVYTVQTSKFGPGPPRLQIGPLEWDPDPPVWGPSCPQRGPKVPGENTPEPQLGPRRGSRADTCPDQVWRRAQSMIHGPRSYSPLLPHYSYGNCPSMQHGLQTS

SEQ ID NO: 47404 - protein, 83 aa, Zea mays
  Coding DNA Sequence Number=SeqID_5625
MGIFSHLSTCVCTQSPKYLEMAQGHISLSRCGDERVLIGILSARGGFYFALQDRGPAGAMNSSSGYRKRDRERDREATQVGHN

SEQ ID NO: 47405 - protein, 93 aa, Zea mays
  Coding DNA Sequence Number=SeqID_5626
MEVHPMAYGQWTWASGRDAYIRTSGSNTFGLKLRVQNDRDICSSVDSDAMNGDVVYWYDHMTLKRKGGEHEDDHDQRGIVVHTPDKKCGMSQA

SEQ ID NO: 47406 - protein, 129 aa, Zea mays
  Coding DNA Sequence Number=SeqID_5627
MATAALCVTDAGDFIGSWIVKILLARGKRRDTEDLSGQQEVDMGGAVCELCASAGARERRILDCELAEGRGGEADRGRRGEHTGGVASGWFIDRGWGRHHEVVEMPRGAAGVEMAMGTRSPIPRGEFPY

SEQ ID NO: 47407 - protein, 107 aa, Zea mays
  Coding DNA Sequence Number=SeqID_5628
  Homolog annotation: Hit_ID=Q6QP51; Match level="QueryCoverage=58%, HitCoverage=29%, E-value=6e-13, Identity=63%"; Hit description =Putative growth-regulating factor 1
MATVTVLGLPLRVYIYEEGRLLLVTTIVRENTRHSQTRCVQPIPVPPSVSTDTVGEQASEIAVCRETFARPHPGGWHSSRSRAGIAVFLSSRSAEGRSDCGHFDLAD

SEQ ID NO: 47408 - protein, 116 aa, Zea mays
  Coding DNA Sequence Number=SeqID_5629
  Gene Ontology: Mol. function=acyl-CoA binding; Biological process =lipid transport
  Homolog annotation: Hit_ID=Q10B01; Match level="QueryCoverage=67%, HitCoverage=12%, E-value=3e-30, Identity=82%"; Hit description=Acyl -CoA binding family protein, putative, expressed
MDEYIRADNDFRQRREEAYSFSENDQGLQRKSPSEARQELQAVRGQLASEQSRCFKLEVDVAELRQKLQSMDALEKEVELLRRQRAASEQAAMDAKQRQSLGGMWGWLAGSPTPAV

SEQ ID NO: 47409 - protein, 84 aa, Zea mays
  Coding DNA Sequence Number=SeqID_5630
MDPLGIPSHQISPKVTINGYQRPALFFSLTTRNDVREESYKNEKAPLEDKDKNKNKVPSGEGIEESTHSNSHKRKDGKKKRIKK

SEQ ID NO: 47410 - protein, 147 aa, Zea mays
  Coding DNA Sequence Number=SeqID_5631
  Gene Ontology: Cellular component=nucleolus
  Homolog annotation: Hit_ID=Q6BTJ4; Match level="QueryCoverage=95%, HitCoverage=29%, E-value=3e-11, Identity=32%"; Hit description =Similar to CA1621|CaIFF6 Candida albicans CaIFF6 unknown function
MDPPVTWSVRARGRVRRRPSSEDEVESEPWGRARWRPSSGVEAESEPWGRARRRPSSEVEAESEPWSRARRRPSSEVEVESEPWGWAGRRPSSEVKVESEPWGRARRSSSSEVEVESEPWGRARRSPSSEVEVMSEPWGRARRSPSS

SEQ ID NO: 47411 - protein, 93 aa, Zea mays
  Coding DNA Sequence Number=SeqID_5632
MGKTMKNVKYVRCVSLSLREILPKVEVKWSKEVWLSLAKHGPSAVKKTVSRRDTVVSVINIVEGSIYLIDRSEQMEKGVEIDSKPRWANSNED

SEQ ID NO: 47412 - protein, 102 aa, Zea mays
  Coding DNA Sequence Number=SeqID_5633
  Homolog annotation: Hit_ID=Q10MX4; Match level="QueryCoverage=91%, HitCoverage=21%, E-value=2e-25, Identity=65%"; Hit description =Expressed protein
MRQLCSSPDREQDSGGRHAVLQRDVARHAEGVLMQRRGPADDGDGVRRAGSITGARHAAQRQAAHGAPLDTYVSVYTETGGEQLTDDAQRADPLTYTDCIHS

SEQ ID NO: 47413 - protein, 228 aa, Zea mays
  Coding DNA Sequence Number=SeqID_5634
MELDATPVTAGVGAAGTSSVSADGVLDSVAVVEAVAKDGLRPVGIIITQRYKKGATLTSDPRPSSGPGSGTPTAATVVVVVVVAAGAPGGHHPQAVVVAAGTRWWRRRWWRICWWRWRRTSVPLRALGLGADLLGPASCPLMLLGWVRINRPFALVQEAGGREGDSGARSSGLGTSGRYTEDLDPAVGVPAAGLANRHAALIEGRQTVQDRRPQPCVFAEQRDALGRD

SEQ ID NO: 47414 - protein, 198 aa, Zea mays
  Coding DNA Sequence Number=SeqID_5635
  Homolog annotation: Hit_ID=Q7Y245; Match level="QueryCoverage=33%, HitCoverage=63%, E-value=5e-30, Identity=83%"; Hit description=Fiber protein Fb21
MTGVGNTLKRHYETYLLEYELAHDDIDGECCLICHSGALGDWVNCGLCGEWAHLGCDRRKGLSTFKSSRYRPASSTSQSATPESHPGCLLVHESVLQKTLEGGNTTRFEQHLTLRGGNVQDCRNVPSEVANYFWREIDKGQYKRKVRMVKEVRRLALAGLSRGSDDDNDNKLQATLRASRKDEELRRVRDPISERLLD

SEQ ID NO: 47415 - protein, 281 aa, Zea mays
  Coding DNA Sequence Number=SeqID_5636
MPLPEILHAPAPEIPPSPSRTFHRRYAVIPSTGHSTICFQLLGVQVVHKHKQGALPSMARPAQAGGPSNDGAPRPAHAGPPSIHESMQADLPLPPCKAVRSDYPQIVPAPQHPSIHGEILSLRASSADPQTASATTVHFHPRRGAAPEEDRCGLPRPAGWARAALGCMVAGARPRPPLRRIRGRGRALARRQSSSLLVATRRPSGPACARRVARPNTTHICAHAVAGEPGGVPDHGVHRDAESQFLKIRQAPHGVLAEATRRHRTDHQGTKHSMSRGGQIE

SEQ ID NO: 47416 - protein, 97 aa, Zea mays
  Coding DNA Sequence Number=SeqID_5637
MAAVERATDHDERWRNSLGVRAVMNDDRGVELLSYPNAWPWGTSAMGYIPSMESVGKPELAIQLWDPQDVWRWFVVARGARSGLLRRPHGEKKVLTS

SEQ ID NO: 47417 - protein, 136 aa, Zea mays
  Coding DNA Sequence Number=SeqID_5638
  Gene Ontology: Mol. function=tRNA isopentenyltransferase activity; Biological process=tRNA processing
  Homolog annotation: Hit_ID=Q5N7L0; Match level="QueryCoverage=64%, HitCoverage=23%, E-value=2e-21, Identity=67%"; Hit description =Cytokinin synthase-like
  Subcellular localization annotation: CTP_CleavageSite=8; ConfidenceScore=5.12e-01
MRRILRTYAAARSRVLAFMLPIAAQKLARPAKQAPSSGTPKALPSPAACAARSVAMVVAKYYRSSSTMPSCTMSSAHRSRYSARSAASMWTQRTRGGSTGIGARGGSPTAAPAQDPRAVVGGGGDGIAVVIGVVDE

SEQ ID NO: 47418 - protein, 328 aa, Zea mays
  Coding DNA Sequence Number=SeqID_5639
  Gene Ontology: Mol. function=zinc ion binding; Cellular component =intracellular
MADAWGWPIQRLDASATVYARLRGVGVLGAQRARARPRCHPELLVGAGRRQRRRRRCGGGGAAVAMLRGDFESADEVLKHLAPEISYRSLVALGIAWVNGTPVSSFDRQDADRLLFFCSNQCGDQAIQNGSYAHVSSWSAPLTKDRTTGSLESKQMSFGAKGVVGDNTISLSSLKPRLKPATMRPLPHSRKQQMHPFMGFPQSIIHDASQVKPSLPAPPVKHNAVPVTAVTPRKSSSGSPSSWSRVQLPIPLNPLPIKKHECNRLPIHSCSEEDFLKDVMQFLLQRGHIRLVPQGGLAEFPDAVLNSKRLDLYNLYKEMWKEDYDASF

SEQ ID NO: 47419 - protein, 165 aa, Zea mays
  Coding DNA Sequence Number=SeqID_5640
  Subcellular localization annotation: CTP_CleavageSite=37; ConfidenceScore=5.51e-01
MSASRGLALPSYGLAASAASAGAQTVLPPRLLPGGPRGAMVQLAHSALQRGSPPPPRFALSPAIWHGSARPPDVARRTISLARKQPDTDVQRPRHGMAPSGSRPSAPACSCSSPHSHSRSCTTCSHAARLPNHTHSVVRSTPSQLALVFSCAQHIARFSSTFAYP

SEQ ID NO: 47420 - protein, 279 aa, Zea mays
  Coding DNA Sequence Number=SeqID_5641
  Homolog annotation: Hit_ID=Q10GW0; Match level="QueryCoverage=34%, HitCoverage=70%, E-value=2e-22, Identity=66%"; Hit description =Single-strand binding protein family protein, expressed
  Pfam annotation: Domain name=SSB; Domain location=61-124; Score=4.2; E_value=0.0074; Accession=PF00436.15; Description=Single-strand binding protein family
  Subcellular localization annotation: CTP_CleavageSite=52; ConfidenceScore=5.03e-01
MLRRLVGGAAAVRSPLPPPFCRLLHNGGGGGGCSSGEPESVAYRMSMLRRPSTVSKKGLTWNWCSLIGRLAAPLNGELANVGLKHLKHDDLVYVSGHLGSYHKVSPSGERHIVYKIYVRELNYVVDQNKKPQNDADSTSPPSMTSVTLQMLKENECIGRLRLWQVFFANPYEWWDNRRSKPWANYPDFKHKDTREKIWLRPDDPPWSAADFGGQKLQKAETNRVTVNSQKPCLQGLPVQFHCSSVQQPRRVVVKPVHLRPVNVEDIIQLLAEYKRTLTQ

SEQ ID NO: 47421 - protein, 421 aa, Zea mays
  Coding DNA Sequence Number=SeqID_5642
  Gene Ontology: Mol. function=oxidoreductase activity; Cellular component=integral to membrane; Biological process=potassium ion transport
  Homolog annotation: Hit_ID=Q10GW4; Match level="QueryCoverage=99%, HitCoverage=99%, E-value=0.0, Identity=78%"; Hit description =Oxidoreductase, aldo/keto reductase family protein, expressed
  Pfam annotation: Domain name=Aldo_ket_red; Domain location=51-413; Score=115.2; E_value=1.9e-31; Accession=PF00248.11; Description =Aldoketo reductase family
  Subcellular localization annotation: CTP_CleavageSite=39; ConfidenceScore=5.35e-01
MAMPSFAVTSPPSHGTTLWAPHARRPQRLHKRHVRSQVRAVAQAQLQYQKLGDSDLLISEVTLGTMTFGEQNTEKEAHDIIAYSFDQGVNILDTAEIYPVPMNKETQGRTDLYIGRWMQSKPRDKIILATKVAGYSERSTFLRDNAKVVRVDAANIKESIEKSLKRLSTDYIDLLQIHWSEDSGLEAEGVFFYSMLHIRPDRYVALFGEFSYNPTKWRPSIPFEEQLKALQELVDEGKVRYIGVSNETSYGVMEFVHAAKAQGLPKIVSIQNSYSLLVRCRFEVDLVEVCHPNNCNVGLLAYSPLAGGVLTGKYLDANADISKSRLNLFPGYMARYNDSLAKEATLEYVKLAKKHGLTPVQLALGFVRDRPFTASSIIGATTMEQVKENIDAFTSTPRPLPQEVLDGIEDLFKRYKDPAIL

SEQ ID NO: 47422 - protein, 112 aa, Zea mays
  Coding DNA Sequence Number=SeqID_5643
MSLKLNVQFSNWTEKGTPDELQNKRKSRGGEWRRRRARRWKFLVMNEADEADEVACQPATGNAKDEVGSGADALWVGGGYAKSPTANARECQLRPRLGIELSTYVETGCSPV

SEQ ID NO: 47423 - protein, 281 aa, Zea mays
  Coding DNA Sequence Number=SeqID_5644
  Homolog annotation: Hit_ID=Q9FKZ3; Match level="QueryCoverage=41%, HitCoverage=37%, E-value=5e-43, Identity=70%"; Hit description =Protein ASYMMETRIC LEAVES2
  Pfam annotation: Domain name=DUF260; Domain location=7-107; Score =212.1; E_value=1.3e-60; Accession=PF03195.5; Description=Protein of unknown function DUF260
  Subcellular localization annotation: CTP_CleavageSite=44; ConfidenceScore=5.01e-01
MSSSNSPCAACKLLRRKCTQGCVFAPYFPPDNPGKFASVHRVFGASNVSKLLNDLDQLQREDAVNSLAYEADARIRDPVYGCVAYISVLQMKIKRVRDEIANARKELAAYIGTAAFAPYVATPQYHHHQYAAGAVPLAVGVGPQHGHPHHQQQQIMVHQHLHHQQQMAAAAEVQQQLAVAVEVAREQDLMMRQAAVYAHAVPSGGPTVAVVPPDALPYEGGFLFQQQPPPSQAQTAVALTYQMEQSPPSSSSGQSHPEVSQQHNTDGSDEGSGGGGVVPPA

SEQ ID NO: 47424 - protein, 201 aa, Zea mays
  Coding DNA Sequence Number=SeqID_5645
  Gene Ontology: Mol. function=cyclin-dependent protein kinase inhibitor activity; Cellular component=nucleus; Biological process =cell cycle arrest
  Homolog annotation: Hit_ID=Q52PU9; Match level="QueryCoverage=99%, HitCoverage=100%, E-value=4e-65, Identity=66%"; Hit description =Cyclin-dependent kinase inhibitor 1
  Pfam annotation: Domain name=CDI; Domain location=153-201; Score =72.8; E_value=1.1e-18; Accession=PF02234.9; Description=Cyclin -dependent kinase inhibitor
MGKYMRKAKASSEVVIMDVAAAPLGVRTRARALALQRLQEQQTQWEEGAGGEYLELRNRRLEKLPPPAGDHEEVGRGGKRQPRPPQLRRLRRRTGRTCSSWRPWRDTFVCLFVARRITRETTPCSLINTQMTSTPGSTRSGHSCHRRVNAPPVHAVPSSREMNEYFAAEQRRQQQDFIDKYNFDPANDCPLPGRFEWVKLD

SEQ ID NO: 47425 - protein, 390 aa, Zea mays
  Coding DNA Sequence Number=SeqID_5646
  Gene Ontology: Mol. function=receptor activity; Cellular component =cellulose and pectin-containing cell wall; Biological process =protein amino acid phosphorylation
  Homolog annotation: Hit_ID=Q75J37; Match level="QueryCoverage=85%, HitCoverage=85%, E-value=1e-168, Identity=83%"; Hit description =Putative leucine-rich receptor-like protein kinase
  Pfam annotation: Domain name=LRRNT_2; Domain location=58-97; Score =15.4; E_value=0.021; Accession=PF08263.3; Description=Leucine rich repeat N-terminal domain
  Pfam annotation: Domain name=LRR_1; Domain location=107-129; Score =1.0; E_value=1.9e+02; Accession=PF00560.23; Description=Leucine Rich Repeat
  Pfam annotation: Domain name=LRR_1; Domain location=131-153; Score =4.5; E_value=40; Accession=PF00560.23; Description=Leucine Rich Repeat
  Pfam annotation: Domain name=LRR_1; Domain location=155-177; Score =6.6; E_value=16; Accession=PF00560.23; Description=Leucine Rich Repeat
  Pfam annotation: Domain name=LRR_1; Domain location=179-202; Score =10.7; E_value=2.9; Accession=PF00560.23; Description=Leucine Rich Repeat
  Pfam annotation: Domain name=LRR_1; Domain location=204-227; Score =2.6; E_value=92; Accession=PF00560.23; Description=Leucine Rich Repeat
  Pfam annotation: Domain name=LRR_1; Domain location=228-250; Score =5.0; E_value=33; Accession=PF00560.23; Description=Leucine Rich Repeat
  Pfam annotation: Domain name=LRR_1; Domain location=253-275; Score =6.2; E_value=20; Accession=PF00560.23; Description=Leucine Rich Repeat
  Pfam annotation: Domain name=LRR_1; Domain location=277-299; Score =17.1; E_value=0.062; Accession=PF00560.23; Description=Leucine Rich Repeat
  Pfam annotation: Domain name=LRR_1; Domain location=301-323; Score =13.1; E_value=1; Accession=PF00560.23; Description=Leucine Rich Repeat
  Pfam annotation: Domain name=LRR_1; Domain location=325-348; Score =1.2; E_value=1.7e+02; Accession=PF00560.23; Description=Leucine Rich Repeat
  Pfam module annotation: Pfam domain module=LRRNT_2::LRR_1::LRR_1::LRR_ 1::LRR_1::LRR_1::LRR_1::LRR_1::LRR_1::LRR_1::LRR_1; Domain location
  Subcellular localization annotation: CTP_CleavageSite=41; ConfidenceScore=5.06e-01
MAPLSGPTSKSKKRALRHVLLLCLLLPCISQPLPAPSPSPTAAPPATTLPLSPFNDRLDAAYIALQAWKHAIIEDPKNLTADWCGPFVCNYTGVFCTAAQDDPHILTVAGIDLNHGRIAGFLPDHIGLLADVALIHLNSNRFHGTLPPSMQHMRLLYELDASNNLFSGGFPSFLTSLPSLKYLDLRFNSFDGDLPDAVFGRQLNLDALFANNNRFNVTLSSQSLTNSTASVIVLANTELTGCLPPSIGDMADTLVELILLNTSISSCIPPEIGKLKKLRVLDLSHNELAGELPESVGDMESLEVLNVAYNQLSGVVPESICLLPKLKNLTVAGNYFCGEPVSCLHVPLRDDRMNCIPEWPHQRTHEECIAFEHRPPVHCGANGCIVHHPL

SEQ ID NO: 47426 - protein, 473 aa, Zea mays
  Coding DNA Sequence Number=SeqID_5647
  Homolog annotation: Hit_ID=Q2QMH3; Match level="QueryCoverage=62%, HitCoverage=66%, E-value=4e-51, Identity=46%"; Hit description=IQ calmodulin-binding motif family protein, expressed
  Pfam annotation: Domain name=IQ; Domain location=145-165; Score=30.7; E_value=5.2e-06; Accession=PF00612.17; Description=IQ calmodulin -binding motif
  Pfam annotation: Domain name=IQ; Domain location=167-187; Score=18.3; E_value=0.027; Accession=PF00612.17; Description=IQ calmodulin -binding motif
  Pfam module annotation: Pfam domain module=IQ::IQ; Domain location =145-165::167-187
MGKAGKWLRSFLPGSRRGRDNKAGALAPAAEPDLALALPLPGVATTPGSTPGAKEKRRWSFRRPAAAASPGPGSAAAAKDVARGHLAPYGFLEPRVDPDQHAIAVAIATAAAAEAAMAAKQAAAVAARLSMSAPGSKRTVIGIEEAAAIKIQAVFRSYLARKALCALRGLVKLQALVRGHLVRRQASHTLRCMQALVAAQNRARVERLRMLEDEKPVRTPRTTPGRRSSPHHPRFRHHHQDTAEDNVKIVEVDTGAGGPEAHGTPRTSRRSSCYATPLCRTPSKNDLYQKISPTPSALTDASARTYSGRYDDFSFATARASPYRYAPSRQQQQQQQHDDKPSAEYALLVPSYMANTESSRAKARSQSAPRQRLSVSSAAAEAAWQPSGRRRASLEAQAQATPAPRGQAPRYGPARVQRCPSQASAPAACPWGARLDRWSASVHDSECGSTSTVMTAATTTYCWSLATDTAGMA

SEQ ID NO: 47427 - protein, 160 aa, Zea mays
  Coding DNA Sequence Number=SeqID_5648
  Subcellular localization annotation: CTP_CleavageSite=50; ConfidenceScore=5.56e-01
PSLGPRSAPIPGSPARPTSRGLARPFPARGGGARPFPDPGGLARPSPGPRPALARPSPAPGGLPLPFPDPGSLARPPPVPRPRGGDPARPCSPVRVPGAAPGAAFGPGAAPADSAAPGRFNRPSPPPFGRPFPSRPRPTILSCVASCASSRDDPFLFQVV

SEQ ID NO: 47428 - protein, 100 aa, Zea mays
  Coding DNA Sequence Number=SeqID_5649
MTHRVERDQRSSRDIDGLNRCCKKPSNTTWRGTALAGLQQAGRRTRHHRRCARKLHAHSKLCDAGSDRQSSGLRRNRSRGRTSAGGLSEHQRRVAAASRM

SEQ ID NO: 47429 - protein, 104 aa, Zea mays
  Coding DNA Sequence Number=SeqID_5650
MAAARGPRPGEKGRGGGEGEEGERLTMEGEAGVEGAVPVGDEVEEEGETSCTGKKETCARGRGGRERKAVWRGGGADEWAPPGVAAAAIPTDRALRAGGTRGGG

SEQ ID NO: 47430 - protein, 321 aa, Zea mays
  Coding DNA Sequence Number=SeqID_5651
  Gene Ontology: Mol. function=RNA-directed DNA polymerase activity; Cellular component=nucleus; Biological process=RNA-dependent DNA replication
  Homolog annotation: Hit_ID=Q8S472; Match level="QueryCoverage=99%, HitCoverage=29%, E-value=1e-156, Identity=82%"; Hit description =Putative gypsy-type retrotransposon RIRE2
MLKEPCPYHQGPVKHTLEECVMLRRHFHKAGPPAEGGKALDNAKKEDHKAGEFPEVRDCFMIYGGQVANASARHRKQERREVYSVKVAAPVYLDWSDKPITFDQADHSDHVLSPGKYPLVVDPIIGNVRLTKVLMDGGSSLNIIYAETLGLLRIDLSSVRTGAAPFHGIIPGKRVQPLGQLDLPVCFGTPSNFRRETLTFEAVGFRGTYHAVLGRPCYAKFMAVPNYTYLKLKMPGPNGVITVGPTYRHAYECDMECVEYAEALAESEALIADLESLSREAPDVKRHAGNFEPAETVKSVPLDPCNDASKQIRIGSELDPK

SEQ ID NO: 47431 - protein, 374 aa, Zea mays
  Coding DNA Sequence Number=SeqID_5652
  Gene Ontology: Mol. function=transposase activity; Biological process= transposition, DNA-mediated
  Homolog annotation: Hit_ID=Q852E2; Match level="QueryCoverage=69%, HitCoverage=64%, E-value=1e-103, Identity=65%"; Hit description =Putative regulatory protein
  Subcellular localization annotation: CTP_CleavageSite=68; ConfidenceScore=5.23e-01
MGSRQAAAFLLGCVAALTVVVLLLQRRPEELTSRAPLLQVFGGGGAGPSPSPSQSSSSSPPADSNNTTAAAGDPRLPPPPNHGEDEDEDEDEEEFRGLAAAVSRAATADDRTVIITCVNQAWAAPGSLLDLFLESFRVGDGTAPLLRHLLIVAMDAAAMARCRALHPHCYLYSPARGVDFAPAKPFLSRDYLELVWSKLRLQRRVLRLGYSLLFTDADVLWLRNPLKHVTAYADMTVSCDVFFGDPDGVDNFPNTGFFHVRPNSRTIAMAAAWHRARDRFPGKNEQPVFNAIKKGLVADLGLRLQYIDPAFVAGFCSYGRDLGKVCTMHANCCVGLRAKITDLRTLLHDWKNYTAMPHWAKHQAKWTVPGACIH

SEQ ID NO: 47432 - protein, 578 aa, Zea mays
  Coding DNA Sequence Number=SeqID_5653
  Gene Ontology: Mol. function=pyridoxal phosphate binding; Cellular component=extracellular space; Biological process=biological_process
  Homolog annotation: Hit_ID=Q10AM0; Match level="QueryCoverage=92%, HitCoverage=45%, E-value=0.0, Identity=75%"; Hit description=Ser/Thr protein phosphatase family protein, expressed
  Pfam annotation: Domain name=Metallophos; Domain location=190-437; Score=66.0; E_value=1.2e-16; Accession=PF00149.18; Description =Calcineurin-like phosphoesterase
MRRGSLSLLLLAAVAAVAATAVPAEPASTLSGPSRPVTVAIGDRGHAVDLPDTDPRVQRRVTGWAPEQIAVALSASPTSAWVSWITGDYQMGGAVEPLDPGAVGSVVRYGLAADALDHEATGESLVYSQLYPFEGLQNYTSGIIHHVRLQGLEPGTRYLYRCGDPAIPDAMSDVHAFRTMPAVGPGSYPGRIAVVGDLGLTYNTTSTVDHLVRNRPDLVLLLGDVCYANLYLTNGTGADCYSCAFAKSTPIHETYQPRWDYWGRYMEPVTSSIPMMVVEGNHEIEQQIHNRTFAAYSSRFAFPSEESGSSSPFYYSFDAGGIHFVMLASYADYSRSGEILGPGPVDCCLTKQCSANHLTAIKTTWSARSGAQYKWLEADLEKVDRSVTPWLIAGWHAPWYTTYKAHYREAECMRVEMEELLYAYGVDVVFTGHVHAYERSNRVFNYTLDACGPVHISVGDGGNREKMATAHADEAGHCPDPASTPDPFMGGRLCAANFTSGPAAGRFCWDRQPEYSAYRESSFGHGVLEVRNDTHALWRWHRNQDLHAAAAANVAADEVYIVREPDKCLAKTARLLAY

SEQ ID NO: 47433 - protein, 575 aa, Zea mays
  Coding DNA Sequence Number=SeqID_5654
  Gene Ontology: Mol. function=receptor activity; Cellular component =membrane; Biological process=Golgi organization and biogenesis
  Homolog annotation: Hit_ID=Q84LH7; Match level="QueryCoverage=99%, HitCoverage=69%, E-value=0.0, Identity=73%"; Hit description =Putative conserved oligomeric Golgi complex component
  Pfam annotation: Domain name=COG2; Domain location=1-575; Score =289.2; E_value=7.8e-84; Accession=PF06148.2; Description=COG (conserved oligomeric Golgi) complex component, COG2
MEKRIQGATKLLDGSLERCFVDGLEHRDAKVIYNCLRAYAAIDNTSSAEELFRTTVVSPLIQKIVPQNYARAVAGASSDELEEDYQQIKACVEKDCKFILEISSSENSGLHVFDFLGNSILKEVLSAIQKGKPGAFSPGKPKEFLRNYKVSLGFLDFLEGYCFSKSAVTKLRYEPAYTDFMRQWNVGVYFSLRFQEIAGGLDSTLTNTFSPTGLNEAQQKPLLLKQSIKLLESLDSCWSDEVLVFSHCDKFLRLSLQLISRYTTWLSCGLSARKASDRSPNSPADAEWALSIPIEDFIYFMLSLKFLEFRSSYKMTSCFRSAQETCTGVGSVEKELQFVLCSPICGNSEIMHDVHAVIGELSESGSFIGHVNQSLGSCPIEVFNLVKGSILQAAEPLKELLPAIMDVMIGIIVKKSNEDLKHLKGITATYRMTSKLPVRHSPYVSGILHPLKVFLEGDRMHYLSEDDKTKLCRGSANKITATYYDLVSEVVTVARKTESSLQRLRQGAQRRVGASTDASDSIISDTDKICMQLFLDIQEYARNLRAIGIDAREIDSYRALWQCVAPKDRHENIQF

SEQ ID NO: 47434 - protein, 141 aa, Zea mays
  Coding DNA Sequence Number=SeqID_5655
  Subcellular localization annotation: CTP_CleavageSite=56; ConfidenceScore=5.54e-01
MARPGGARRWGRATPGGLAAPATPTARGRVRTPPGPHARTGWPRATAHWRSAPRPRARAAGHRVPRAVATPYTAGGGERRHDVQGESTERRPEKKKDRGREGLRRGGWGRRGRLVRERWFPGRDDAWDPHTGGGGWGVPML

SEQ ID NO: 47435 - protein, 72 aa, Zea mays
  Coding DNA Sequence Number=SeqID_5656
MAAVTGATDGRGRMGVEGEGACLPGPLERRWRELETKATVAGAVGKRGRVGFGREDGARDIYHLAHRKKGVI

SEQ ID NO: 47436 - protein, 61 aa, Zea mays
  Coding DNA Sequence Number=SeqID_5657
MALPLPPSSVFPCCHLGFRTWMHPILPALFYACERVIRHPFSITLAPGYNELLDYAYPHAG

SEQ ID NO: 47437 - protein, 138 aa, Zea mays
  Coding DNA Sequence Number=SeqID_5658
MALAVLKATSDPNERAEQREVAVERKKNIPLTRSKKKEGLRSPKIVSTMYSSSSSSKKELCWRCALVLVRVARSMAETRPGPSRPGATTRAPWRRRDREAKPGQGLRPRSRRCARPRRAPAEHADLTAGRAERRIGRA

SEQ ID NO: 47438 - protein, 380 aa, Zea mays
  Coding DNA Sequence Number=SeqID_5659
  Gene Ontology: Mol. function=transcription factor activity; Cellular component=nucleus; Biological process=regulation of transcription, DNA-dependent
  Homolog annotation: Hit_ID=O65008; Match level="QueryCoverage=91%, HitCoverage=72%, E-value=1e-117, Identity=61%"; Hit description =Indeterminate spikelet 1
  Pfam annotation: Domain name=AP2; Domain location=124-188; Score =85.1; E_value=2.2e-22; Accession=PF00847.10; Description=AP2 domain
MALDDFHFLLLLSLLLLLDLSRDCGKQVYLGGFDTAHAAARLGSVCLFEFASICISVIDRRVDTVKFGSSRAYDRAAIKFRGLDADINFSLSDYEDDLKQMRNWTKEEFVHILRRQSTGFARGSSKYRGVTLHKCGRWEARMGQLLGKKYIYLGLFDSEVEAARAYDRAALRFNGREAVTNFEPSSYNAGDNNLRDTETEVSEVYLMVLSTLSAIDDGDAIDLDLRISQPNVQDPKRDNTLAGLQPTCDSPESSNTMASQNHERLIMLADIQSWLFVRSVSCERLKGGNVHCGQNLTNKAHARAAAILQVQERPVERRPELGAQPFPSWAWQAQGSPHVPLHHSAASSGFSTAAGANGGMPLPSHPPAQFPTTTNPFFFP

SEQ ID NO: 47439 - protein, 63 aa, Zea mays
  Coding DNA Sequence Number=SeqID_5660
MGTGRAAVLLPPLWALAVLLVLLKRWSGNVEWTTGTMGEKQVFLKVLLVEFTGSIGVSDKIAQ

SEQ ID NO: 47440 - protein, 45 aa, Zea mays
  Coding DNA Sequence Number=SeqID_5661
MDQLTKLELPSPPKKYWFFASIRRAPALFNIKAFCVHMNPLLEHF

SEQ ID NO: 47441 - protein, 161 aa, Zea mays
  Coding DNA Sequence Number=SeqID_5662
  Homolog annotation: Hit_ID=Q5N9R6; Match level="QueryCoverage=53%, HitCoverage=9%, E-value=1e-23, Identity=64%"; Hit description =Transducin family protein / WD-40 repeat family protein-like
  Subcellular localization annotation: CTP_CleavageSite=65; ConfidenceScore=5.01e-01
MAPQYQAATLIASPSYPSAIAWSSDNLVAVASGHIVTILNPSALDGPRGLVGLCRSDPFPIGLVNREAAQQSSEAQLKRPRRAQYCSMRSGRLLTCSAIEQTTEEDISALEGGLCRLHPSRDAGGAIAARGEGRTAGEEGATMEKGRRHKRRGGGAGEGCS

SEQ ID NO: 47442 - protein, 449 aa, Zea mays
  Coding DNA Sequence Number=SeqID_5663
  Homolog annotation: Hit_ID=Q5N9R6; Match level="QueryCoverage=67%, HitCoverage=45%, E-value=8e-67, Identity=42%"; Hit description =Transducin family protein / WD-40 repeat family protein-like
  Pfam annotation: Domain name=WD40; Domain location=109-148; Score =0.0; E_value=36; Accession=PF00400.22; Description=WD domain, G-beta repeat
  Pfam annotation: Domain name=WD40; Domain location=269-319; Score =3.4; E_value=14; Accession=PF00400.22; Description=WD domain, G-beta repeat
  Pfam annotation: Domain name=WD40; Domain location=337-382; Score =28.9; E_value=1.7e-05; Accession=PF00400.22; Description=WD domain, G-beta repeat
  Pfam module annotation: Pfam domain module=WD40::WD40::WD40; Domain location=109-148::269-319::337-382
MDPVDWLDFVAVTLFLYDWLIEKCEMVWMDLHSGWHDYFKSRLHGLQGESFPYRHMDVTASQGVAHVVHTPTLCTGATPGISGPNNQRIQGPSEESPAGVGQGGVKELLELVKDWRSRRSLGAMFIVHFLSACLLAVCTMDGHVKLYRSPIWELCDEWVEKNTNTGETEVLGSAYELQESLYFRCPGQRKLKRSRVDGFIYDVNEVDLDASKDADFSIEPCSKSKKKYLKKTVKPRHEVVAVNERNNTGNIKGSLSSNGENKSLPLITAKQYACRAAHLSSLVVSWSPVVSSSDKTSCLLRHWCIIAVGSKSGNLSFWKLPKPEYYTIDAGVVTSDPMLIGVLQAHKSCVSVIAWQVLSAGSSKSSLLLATGCSDGSVKIWLGNIEGLNQCASGEVPFALVAVVATDLSSPVSSISLAIPAQSQHEHQNLFPNIGLIEAIGLLKVGESK

SEQ ID NO: 47443 - protein, 483 aa, Zea mays
  Coding DNA Sequence Number=SeqID_5664
  Homolog annotation: Hit_ID=Q10N06; Match level="QueryCoverage=49%, HitCoverage=28%, E-value=1e-26, Identity=33%"; Hit description =Expressed protein
  Subcellular localization annotation: CTP_CleavageSite=37; ConfidenceScore=5.26e-01
MGGTGASSRRRWARRSFRTAGGGGGRGTGGVVRRTVAASTTMAPRGTQGFAHVDKQQRHVHGVLSDFRCNSGSTDHLSLYVEEFKHKSSHRSSVRCLPSAQGNVTEISRMQPVARKVQVDMTFNDKGLCRASRTVSGMRIQPKYYISSPNNNLKNSPTVKSYSGMSDFNYQLVRSAKSDSIDDLQVSSSSDTSDSFNLSSLGVIDGDEWNTTFKRVYYPHAACLDSISVIYAKEIGQVSPISVLQPLSEDCSDSENIRHEPADPYDLQLRLELGTSAPRETAAEASNFRGTSVCLTSEVQSSDEKPIQLVEDILEEFEDDEERDFSYLLDILIASGIHGTAEDQMYKVCQSLDHPAGDDVFEKLEKKYNKVVQWSRSDRKLLFDMANTILSQILAPCLNMQPWVYTTRNLAPLWGPDGLLEKVLQMLVQRREHLAPSETKPEKKGFDPKWPGLADCIDRAGRDIERMVKDDLLEELVVELLSS

SEQ ID NO: 47444 - protein, 80 aa, Zea mays
  Coding DNA Sequence Number=SeqID_5665
MGRYLGSCEEEDDLQKSVCMVGLKDLNDVSLDHNTRLTNLSATEHEDYMKKVEEEFKRQRAQRREMAEKWYLSHFGIDRH

SEQ ID NO: 47445 - protein, 214 aa, Zea mays
  Coding DNA Sequence Number=SeqID_5666
  Gene Ontology: Mol. function=carboxyl- and carbamoyltransferase activity; Cellular component=ornithine carbamoyltransferase complex; Biological process=amino acid metabolic process
  Homolog annotation: Hit_ID=Q5VPM1; Match level="QueryCoverage=17%, HitCoverage=6%, E-value=6e-11, Identity=78%"; Hit description =Putative nitrate transporter NTL1
MAPPVDVVGPRPRLGDVEAPPRSRLSLSSVAEVESEPLGRARRRPSAEARAESEPWGRAKRSSSSSGAEPESEPWGRADRSSPSSGAEPKSEPLGRAERSSPSSGAEPESEPWVGRSGVRRLLGLSPSPSPGSGGAEFPNVPEAGPDCLSASLCQVAQQSERRRRRCPSVRPEEDGGGGARHVERWEGYVDWRNRPATRGRHGGMAAASFVLGT

SEQ ID NO: 47446 - protein, 1125 aa, Zea mays
  Coding DNA Sequence Number=SeqID_5667
  Gene Ontology: Mol. function=protein serine/threonine kinase activity; Cellular component=integral to membrane; Biological process=protein amino acid phosphorylation
  Homolog annotation: Hit_ID=Q2R0X3; Match level="QueryCoverage=98%, HitCoverage=98%, E-value=0.0, Identity=43%"; Hit description=Leucine Rich Repeat family protein
  Pfam annotation: Domain name=LRRNT_2; Domain location=26-67; Score =43.9; E_value=5.4e-10; Accession=PF08263.3; Description=Leucine rich repeat N-terminal domain
  Pfam annotation: Domain name=LRR_1; Domain location=121-143; Score =13.1; E_value=1; Accession=PF00560.23; Description=Leucine Rich Repeat
  Pfam annotation: Domain name=LRR_1; Domain location=145-167; Score =6.6; E_value=17; Accession=PF00560.23; Description=Leucine Rich Repeat
  Pfam annotation: Domain name=LRR_1; Domain location=169-191; Score =19.6; E_value=0.011; Accession=PF00560.23; Description=Leucine Rich Repeat
  Pfam annotation: Domain name=LRR_1; Domain location=193-215; Score =14.3; E_value=0.45; Accession=PF00560.23; Description=Leucine Rich Repeat
  Pfam annotation: Domain name=LRR_1; Domain location=218-240; Score =10.3; E_value=3.4; Accession=PF00560.23; Description=Leucine Rich Repeat
  Pfam annotation: Domain name=LRR_1; Domain location=242-265; Score =8.4; E_value=7.5; Accession=PF00560.23; Description=Leucine Rich Repeat
  Pfam annotation: Domain name=LRR_1; Domain location=266-289; Score =1.5; E_value=1.5e+02; Accession=PF00560.23; Description=Leucine Rich Repeat
  Pfam annotation: Domain name=LRR_1; Domain location=291-313; Score =13.1; E_value=0.99; Accession=PF00560.23; Description=Leucine Rich Repeat
  Pfam annotation: Domain name=LRR_1; Domain location=315-337; Score =7.9; E_value=9.5; Accession=PF00560.23; Description=Leucine Rich Repeat
  Pfam annotation: Domain name=LRR_1; Domain location=339-361; Score =8.7; E_value=6.9; Accession=PF00560.23; Description=Leucine Rich Repeat
  Pfam annotation: Domain name=LRR_1; Domain location=363-386; Score =7.1; E_value=13; Accession=PF00560.23; Description=Leucine Rich Repeat
  Pfam annotation: Domain name=LRR_1; Domain location=388-410; Score =3.5; E_value=65; Accession=PF00560.23; Description=Leucine Rich Repeat
  Pfam annotation: Domain name=LRR_1; Domain location=412-433; Score =11.3; E_value=2.2; Accession=PF00560.23; Description=Leucine Rich Repeat
  Pfam annotation: Domain name=LRR_1; Domain location=435-460; Score =6.9; E_value=14; Accession=PF00560.23; Description=Leucine Rich Repeat
  Pfam annotation: Domain name=LRR_1; Domain location=462-484; Score =13.1; E_value=1; Accession=PF00560.23; Description=Leucine Rich Repeat
  Pfam annotation: Domain name=LRR_1; Domain location=487-509; Score =18.8; E_value=0.019; Accession=PF00560.23; Description=Leucine Rich Repeat
  Pfam annotation: Domain name=LRR_1; Domain location=511-533; Score =16.9; E_value=0.073; Accession=PF00560.23; Description=Leucine Rich Repeat
  Pfam annotation: Domain name=LRR_1; Domain location=535-557; Score =10.9; E_value=2.6; Accession=PF00560.23; Description=Leucine Rich Repeat
  Pfam annotation: Domain name=LRR_1; Domain location=559-581; Score =10.5; E_value=3.1; Accession=PF00560.23; Description=Leucine Rich Repeat
  Pfam annotation: Domain name=LRR_1; Domain location=583-606; Score =5.8; E_value=23; Accession=PF00560.23; Description=Leucine Rich Repeat
  Pfam annotation: Domain name=LRR_1; Domain location=608-630; Score =6.5; E_value=17; Accession=PF00560.23; Description=Leucine Rich Repeat
  Pfam annotation: Domain name=LRR_1; Domain location=632-654; Score =15.3; E_value=0.22; Accession=PF00560.23; Description=Leucine Rich Repeat
  Pfam annotation: Domain name=LRR_1; Domain location=656-678; Score =11.4; E_value=2.1; Accession=PF00560.23; Description=Leucine Rich Repeat
  Pfam annotation: Domain name=LRR_1; Domain location=680-702; Score =14.6; E_value=0.35; Accession=PF00560.23; Description=Leucine Rich Repeat
  Pfam annotation: Domain name=LRR_1; Domain location=704-727; Score =4.9; E_value=35; Accession=PF00560.23; Description=Leucine Rich Repeat
  Pfam annotation: Domain name=LRR_1; Domain location=97-119; Score =12.9; E_value=1.1; Accession=PF00560.23; Description=Leucine Rich Repeat
  Pfam annotation: Domain name=Pkinase; Domain location=819-1110; Score= 98.6; E_value=1.8e-26; Accession=PF00069.15; Description=Protein kinase domain
  Pfam annotation: Domain name=Pkinase_Tyr; Domain location=819-1110; Score=80.0; E_value=7.2e-21; Accession=PF07714.7; Description =Protein tyrosine kinase
  Pfam module annotation: Pfam domain module=LRRNT_2::LRR_1::LRR_1::LRR_ 1::LRR_1::LRR_1::LRR_1::LRR_1::LRR_1::LRR_1::LRR_1::LRR_1::LRR_1: LRR_
  Pfam module annotation: Pfam domain module=LRR_1::LRR_1::Pkinase::Pkin ase_Tyr; Domain location=26-67::121-143::145-167::169-191::193 -215::218-240::242-265::266-289::291-313::315-337::339-361::363
  Pfam module annotation: Domain location=435-460::462-484::487 -509::511-533::535-557::559-581::583-606::608-630::632-654::656 -678::680-702::704-727::97-119::819-1110::819-1110
MAHPVRLLCLLAFFGSLHVAATSNERENDQQALLCFKSQLSGTVGTLSSWSSNTSMEFCSWHGVSCSEHSPRRVIALDLASEGITGTIPPCIANLTSLTRLQLANNSFRGSIPPELGLLSQLRILNLSMNSLEGTIPSELSSCSQLQALGLWNNSLRGEVPPALGQCVQLEEIDLSNNDLEGSIPSRFGALPELRTLVLAGNRLSGAIPPSLGRSSLSLTHVDLGANALTGGIPESLAGSSSLQVLRLMRNSLGGELPRALFNTSSLIAICLQENKFVGPIPPATAVVSPPVKHLHLGGNFLSGTIPASLGNLSSLLDLRLTRNRLHGRIPESIGYLPALSLLNLNLNNLSGPVPLSLFNMSSLRALAMGNNSLSGRLPSGIGYTLPRIQILILPSNRFDGPIPASLLHAHHMQWLYLGQNSLTGPVPFFGTLPNLEELQVSYNLLDAGDWGFVSSLSGCSRLTRLYLAGNSFRGELPSSIGNLSSSLEILWLRDNKISGPIPPELGNLKNLSTLYMDHNRFTGSIPAAIGNLKRLVVLSAARNRLSGTIPDAIGDLVQLTDLKLDANNLSGRIPASIGRCTQLQILNLARNALDGGIPRSILEISSLSLELDLSYNRLAGGIPDEIGNLINLNKLSVSNNMLSGSIPSALGQCVLLEYLKMQNNLFTGSVPQSFAGLVGIRELDVSRNNLSGKIPGFLTSLNYLNYLNLSFNDFDGAVPEGGVFGNASAVSIEGNGRLCAAVPTRGVTLCSARGQSRHYSLVLAAKIVTPVVVTIMLLCLAAIFWRKRMQAAKPHPQQSDGEMKNVTYEEILKATDAFSPANLISSGSYGKVYKGTMKLHKGPVAIKIFNLGIHGAHGSFLAECEALRNARHRNIVKVITVCSSVDPAGADFKAIVFPYMLNGNLDMWLNQKTHQNSQRKTLSLSQRISVSLDVANAVDYLHNQCASPLIHCDLKPSNVLLDLDMVAYVGDFGLARFQRDTPTAHEGSSASFAGLKGSIGYIPPEYGMSEGISTEGDVYSFGVLLLEMMTGRRPTDEKFSDGTTLHEFVGRAFRNNNNNMDEVVDPVLIQGNETEVLRDCIIPLIEIGLSCSVTSSEDRPGMDRVSTEILAIKKVLSNIHDKLK

SEQ ID NO: 47447 - protein, 377 aa, Zea mays
  Coding DNA Sequence Number=SeqID_5668
  Gene Ontology: Mol. function=pectate lyase activity; Cellular component=anchored to membrane
  Homolog annotation: Hit_ID=Q5VP91; Match level="QueryCoverage=98%, HitCoverage=85%, E-value=1e-136, Identity=63%"; Hit description =Putative pectate lyase
  Pfam annotation: Domain name=Pec_lyase_C; Domain location=121-294; Score=150.1; E_value=5.9e-42; Accession=PF00544.9; Description =Pectate lyase
MMYRRTRARSRTSIEKEDTSTRREMMEQKKSKLSGPCTATNPIDRCWRCRQDWATDRKRLARCAKGFGRNTTGGLAGKFYVVTDGTDDDVVNPRPGTLRWGVIQIEPLWITFAKTMIITLKEELIIRGDKTIDGRGAQVRIANGAQLTVQFVNNVIIHNIHINDIVSSNKNGGYVRDSADHFGWRIVSDGDGVTVFGSTNVWLDHLSLSNCQDGLIDVIAKSTGVTISNCHLTNHNDRHALQLQRQAPRGPEDAEVPLGLLPRGQQRVNDYTHWLMYAIGGSKAPTIISQGNRYIAPPNFAAKQVTKQHDAPESEWKNWAWHSENDLFMEGAYFTVTAGQINRQLNKKDLIKPKPGSYVTRLTRYAGSLACRPGEPC

SEQ ID NO: 47448 - protein, 65 aa, Zea mays
  Coding DNA Sequence Number=SeqID_5669
MAPSLVSHQRHDVCLCQRNTYLGAIAYDAEQRPQQAAANKPFVSFLDATIEKWRSPSYLHIPRKI

SEQ ID NO: 47449 - protein, 61 aa, Zea mays
  Coding DNA Sequence Number=SeqID_5670
MAPSVASLSTFLSSTASQRWPELGAQHHHRHQPDAATTRETHSLRVTNAAVRDAQRRSRAR

SEQ ID NO: 47450 - protein, 81 aa, Zea mays
  Coding DNA Sequence Number=SeqID_5671
MALVIHSAFFALALHSTSLVATPGNEARQRLSEYLRSKVGAHAPRNPAAVRWLSSRENHGIKHRIFMEEELLTVEVHTSAA

SEQ ID NO: 47451 - protein, 97 aa, Zea mays
  Coding DNA Sequence Number=SeqID_5672
MQRLDEPSPCFLASPINRRIAATFLVAILGKRWECGTLEESNGGLEAKAKAEEMEDTRYTSDAITRNADPKLHQSDAMVIPAFIAHVPAESRLEGGG

SEQ ID NO: 47452 - protein, 202 aa, Zea mays
  Coding DNA Sequence Number=SeqID_5673
  Homolog annotation: Hit_ID=Q5Z9Q8; Match level="QueryCoverage=38%, HitCoverage=19%, E-value=2e-23, Identity=76%"; Hit description =Putative spastin protein
MRSSEVSSRLVQELVLYAASVALSCLVLFAGLRHLDPNCAASQKAQQKKKEITKRLGRPLVSTTPYEDVIACDIINPDSMALFASAASTGRGSRVEKVRRIFERFDTNGDGGLDRNKMATPHRRHQPSGQVQRGPDLRHPRRGVPHLHRVHPPRRLRGGGCAGKGGGGGCGSGSGIGRVGDGRNRTVGIQRGHGLCLVYTII

SEQ ID NO: 47453 - protein, 39 aa, Zea mays
  Coding DNA Sequence Number=SeqID_5674
MAAAPRRRRKWAWHRANSGFELIRGEDLFTMKRYPGNGH

SEQ ID NO: 47454 - protein, 240 aa, Zea mays
  Coding DNA Sequence Number=SeqID_5675
  Gene Ontology: Mol. function=calcium ion binding; Cellular component =membrane; Biological process=homophilic cell adhesion
  Homolog annotation: Hit_ID=UPI0000DA43ED; Match level="QueryCoverage =52%, HitCoverage=98%, E-value=5e-15, Identity=34%"; Hit description =PREDICTED: similar to keratinocytes proline-rich protein
MGRRETEREGGKKPEGDRRKRGNPRPSCLSRAQVGPRLGEVEAPLRSRSSLSSKAEVESEPLGRARRRPSAEARAESEPWGRVKRSSSSSGAEPESEPWGRAMRSSSSSGAEPESEPWGRAKRSSSSSGAEPESEPSGQAMRSSSSSGAEPESEPWGRAKRSSSSFGAEPESEPWGRAMRSSSSSGAEPESEPWVGRGGASYGARGRTWLLSAALCRVAQQSERRRRRCPFVRPVRGATK

SEQ ID NO: 47455 - protein, 148 aa, Zea mays
  Coding DNA Sequence Number=SeqID_5676
MAAEIGHCVYNTLDLRSALTGAIFAQPKSHRRRPEAPSHPRRSPSVPEFALEVSTLPMPLFRQELPQLPRNCSPELAAPPRNLFYCDLHSLVPLCRFCAHGRVRRVALNLFDLFLKSPEPRRGQPSRLRRTLAAGPSGATTPKPAPGR

SEQ ID NO: 47456 - protein, 313 aa, Zea mays
  Coding DNA Sequence Number=SeqID_5677
  Gene Ontology: Mol. function=nucleic acid binding; Cellular component= intracellular; Biological process=chromatin modification
  Homolog annotation: Hit_ID=Q9XFG4; Match level="QueryCoverage=76%, HitCoverage=91%, E-value=1e-119, Identity=84%"; Hit description =Putative transcription repressor maize TRM protein
  Pfam annotation: Domain name=zf-C2H2; Domain location=120-145; Score =32.3; E_value=1.7e-06; Accession=PF00096.16; Description=Zinc finger, C2H2 type
  Pfam annotation: Domain name=zf-C2H2; Domain location=184-209; Score =27.8; E_value=4e-05; Accession=PF00096.16; Description=Zinc finger, C2H2 type
  Pfam annotation: Domain name=zf-C2H2; Domain location=60-84; Score =26.7; E_value=8.2e-05; Accession=PF00096.16; Description=Zinc finger, C2H2 type
  Pfam annotation: Domain name=zf-C2H2; Domain location=90-114; Score =33.1; E_value=9.8e-07; Accession=PF00096.16; Description=Zinc finger, C2H2 type
  Pfam module annotation: Pfam domain module=zf-C2H2::zf-C2H2::zf -C2H2::zf-C2H2; Domain location=120-145::184-209::60-84::90-114
MHITRRRYRWVKEWVPQDLVVTGGPCTLYKWVRATKDVGRHFFDVGALKKHAHVHGERQYICHYENCGKKFLDSSKLKRHFLIHTGEKNFVCPHEGCGRAFSLDFNLKAHMKTHSADNYHVCQYPECGRRFTQESKLRAHIRAQHEKNPGASSMNHSAIGGPHQPPRPAKVSAAPPAPSAERPYVCPYDGCDKAYIHEYKLNLHLKKEHPNHYQDGGPNGAAAPSKRSISKSSHRSKLDITSRMPPANIPKHRGYATPLPAVVSLPEEQQLLRKVVYEDDSEETEEEGDNNGEDRWNYKRAASSDDEETEDEE

SEQ ID NO: 47457 - protein, 113 aa, Zea mays
  Coding DNA Sequence Number=SeqID_5678
  Gene Ontology: Mol. function=protein binding; Cellular component =nucleus; Biological process=regulation of timing of transition from vegetative to reproductive phase
  Homolog annotation: Hit_ID=Q5QN32; Match level="QueryCoverage=70%, HitCoverage=43%, E-value=3e-30, Identity=77%"; Hit description =Putative terminal flower1
REVICYESPRPPAGIHRVVFVLYQQTARGAVDQPPLLRHNFCTRSFAVDHGLGAPVAAAFFTCQPEGGTGGRRHVLRQPARSPAPIDVQTVRAVRLARDPARFWPGPSTVRHG

SEQ ID NO: 47458 - protein, 235 aa, Zea mays
  Coding DNA Sequence Number=SeqID_5679
  Subcellular localization annotation: CTP_CleavageSite=21; ConfidenceScore=5.21e-01
MGHRLSFIGASRAIPNGILKLAASGSNNPARKLRGRYSRRGDAFVSEVLLVGIELTLGAHTRRWAGREGFQPKQPCRGGEMSGPKGMKSAHVQFPQIHNKVASLPKQTTLPSAALETLGNDIFADCHLLLRKKKSHYDATSDDDKAFAECLIAWHLAKEALVGPHGSLCDESHKLALGKTIFCRVPAYLALGEGSTCGPLCQSLCLVRWLVLDKRSFFIFIFFVECLPTWHSAKS

SEQ ID NO: 47459 - protein, 841 aa, Zea mays
  Coding DNA Sequence Number=SeqID_5680
  Gene Ontology: Mol. function=protein dimerization activity; Cellular component=nucleus; Biological process=regulation of transcription, DNA-dependent
  Homolog annotation: Hit_ID=Q8S983; Match level="QueryCoverage=99%, HitCoverage=89%, E-value=0.0, Identity=62%"; Hit description =Arabidopsis Monopteros-like protein
  Pfam annotation: Domain name=Auxin_resp; Domain location=272-354; Score=188.5; E_value=1.7e-53; Accession=PF06507.4; Description=Auxin response factor
  Pfam annotation: Domain name=B3; Domain location=142-250; Score=69.0; E_value=1.6e-17; Accession=PF02362.12; Description=B3 DNA binding domain
  Pfam module annotation: Pfam domain module=Auxin_resp::B3; Domain location=272-354::142-250
MTSSYEKATSGVLRNAAALLDEMQLMGETQGAKKVINSELWHACAGPLVCLPQRGSLVYYFPQGHSEQVAATTKKIPNSRIPNYPSLPSQLLCQVHNITLHADKETDEIYAQMTLQPVHSETDVFPIPTLGAYTKSKHPSEYFCKNLTASDTTSAHTHVFNPQDYSMQPPNQELIVRDLHDNMWTFRHIYRGQPKRHLLTTGWSLFVGAKRLKAGDSVLFISAKPPMTEKCWCRDEKSQLLVGVRRATRQQPALSSSVLSTDSMHIGVLAAAAHAASSGGSFTVYYNPRTSPSPFVIPLARYNMATYLQPSVGMRFAMMFETEESSKRRCTGTIVGISDYEPMRWPNSKWRNLQVEWDEHGYGERPERVSLWDIETPENMVFSSPLNSKRQCLPSYGVSGLHVSSISKPQGSPFGNLQHMPGISSDIALLLLNQSAQNLGSSIACQQSSFSSIIQNAKQSYFPPTTLGASTGWNESQQQLNALGIQKGDQVSCDVQPGIDSITAPEMNVKPRVPRSTDSYSSQSISDPNSKSDPKTKTRRSKKSSSHKTISDKSEISSVPSQICDKQRHGSEPTSADFEAEQATCGNNEDSSGALTRGDFAGELQVQQVEQDGLLPPPKLESSKSPDGGKSVSSFPNQGCFSQFFEGLDWMIPPSCYQDSNGIHSVTTSDSIFNPSEGIPPSTMNADGMDAFQTSCLSECFPNSIQEFISSPDINTLTFMSPEMQHLDAQHDGSNLQSTSNSYVQMSFSEESQSASLSGLHMEAVHINSSCLQPLATGSFDAGTFSKLSNIKECQALPLQEIHNSSMGTPSCSMDAAAVEYCMDRSVKPLKPPVRTYTKVH

SEQ ID NO: 47460 - protein, 269 aa, Zea mays
  Coding DNA Sequence Number=SeqID_5681
  Homolog annotation: Hit_ID=Q3E0G9; Match level="QueryCoverage=29%, HitCoverage=10%, E-value=2e-07, Identity=42%"; Hit description=Ig -like, group 1
MATLRTARPVALTPRQDRRRLRREKQVMLRLHHNDCVEKGLGLGLSPGRQRTPLRPTQGSDSGSAPEDGELRSARPRARTRAQPRKTANSAPPNPGLGLGLSPGRRRTPLRPTQGSDSGSAPEDGELRSAQPRARTRAQPRKTANSVRSTQGSDTGSVLEDGELRSARPRARTRAQPRKTANSASPDPRARTRAQPRKTTNSASPDPRARTWVQPRKTTNSASPDPRARTQPWPQPTVSASPDPRARTRPRPWKTDSTSTSEEPPHRPT

SEQ ID NO: 47461 - protein, 88 aa, Zea mays
  Coding DNA Sequence Number=SeqID_5682
MLVDPDDLSFNYALLVLSSEALCRALPLEVAFEHNPCQVFAGRSEPILIIDPRLSNHFGHGTLINRVMRKTIQVDPKRGLIRKMMLMD

SEQ ID NO: 47462 - protein, 217 aa, Zea mays
  Coding DNA Sequence Number=SeqID_5683
MSGAPEDSNSNSLPSGNSRGNSAIIHRTVWCSKEERPQELASLGNSERLLRYNSPDMSGVHRTVRCNCGATTTSGANDYLRRIKCAPARAEFRRIHPPLGDFQAAWARSVTPRRARGGGRRKAGGGVPGTWGGRRPGAWARPAAACRERGGGRRSGVSGEPGAWAGRRSGGGVRGGWQRREKEESERREGKEKREEGRDGGLLTFFAECPRSGTRQR

SEQ ID NO: 47463 - protein, 592 aa, Zea mays
  Coding DNA Sequence Number=SeqID_5684
  Gene Ontology: Mol. function=hydrolase activity, hydrolyzing O -glycosyl compounds; Cellular component=apoplast; Biological process =carbohydrate metabolic process
  Homolog annotation: Hit_ID=Q56UD0; Match level="QueryCoverage=97%, HitCoverage=98%, E-value=0.0, Identity=76%"; Hit description=Beta -fructofuranosidase, insoluble isoenzyme 6 precursor
  Pfam annotation: Domain name=Glyco_hydro_32C; Domain location=402 -520; Score=164.3; E_value=3.1e-46; Accession=PF08244.2; Description =Glycosyl hydrolases family 32 C termi
  Pfam annotation: Domain name=Glyco_hydro_32N; Domain location=43-361; Score=513.5; E_value=2.3e-151; Accession=PF00251.10; Description =Glycosyl hydrolases family 32 N termi
  Pfam module annotation: Pfam domain module=Glyco_hydro_32C::Glyco _hydro_32N; Domain location=402-520::43-361
MAANPLATLAIAVFLICLLLPTSSSSSSICVARTQDHVRTAFHFQPAKNWQNGPVYYNGMYHLFYQYNPHGALWDVGNLSWGDSVSGDLVNWAALGNALDPTAPFDANGCASGSVTILPDGTPAILYSGIDADRRQVQNVAFPKNPRDPLLREWAKPAYNPVVPLPADVSANDFRDPTTAWVGRDGLWRFAISAVADGVGATLVYRSADFLRWERRAAPLHASQDAVMAECPDLFPVAARGAEGLDASARGAGVRHVLKVSMPDTLEDYYAVGTYDDAADTFTPDEDCGGGDYRRWRRIDRGHLYASKTFLDARRMRRVLWAWVNESDSEADDVARGWSGLQSFPRALWLDGGGKQLVQWPVEEIETLRTRRAAPLQEVEPGGGVREVTGIVSSQADVDVVFEIPSLRRAEGLDPGRLHDPDALCREKGGSLTGGVGPFGLLVMASGDMREHTAVFFRVFRILHEYAVLMCTDLSRSSTKAGVYKPTHGGFVDVDIEKDMSISLRTLIDHSIVESFGGGGRTCMTARVYPEHVAAGSSSHLYVFNNGSAAVKVSKLEAWELASASVNVDDDGGLMAGGSFANMCRAEEYNSS

SEQ ID NO: 47464 - protein, 43 aa, Zea mays
  Coding DNA Sequence Number=SeqID_5685
MLTPLLLQLLGCPSLPLRSHSPAPALLTNAMRLIGRRFSDASV

SEQ ID NO: 47465 - protein, 210 aa, Zea mays
  Coding DNA Sequence Number=SeqID_5686
  Subcellular localization annotation: CTP_CleavageSite=18; ConfidenceScore=5.29e-01
MVGVTRSTFLGGRSSSVVVFRLVGVARVRFLRRKSFSGAGEMIPQGNLAGHDCGSGSMLTDETVALARVNSGFWRGGALVGVLESSEELRWTGWGSGWGGVCPEMVAHHNRALAAMATTVLLLSGGWYFCGGTTQIIPAYVPKSRLRAFENKFPTLVPTSSVLTSTTFDKASTFVMPPKKITAPGAALQPLDTNQETLSPRSSKPEEKGH

SEQ ID NO: 47466 - protein, 47 aa, Zea mays
  Coding DNA Sequence Number=SeqID_5687
MEFYSENHLASVQLWDIDSPDLDPKLGVIRYGAEVTHLGVIAYSVEL

SEQ ID NO: 47467 - protein, 136 aa, Zea mays
  Coding DNA Sequence Number=SeqID_5688
  Subcellular localization annotation: CTP_CleavageSite=49; ConfidenceScore=5.28e-01
MTMVVLSPLRKQGDVSKIPAAPTTVLLQGSGTSPTAKLPHTQGSSTSPTAMLALGKNEDGAYKGTTEYTPLVVLTVGDDIVYGAPFPLFNSNRGSFSIGMENFSYNRTRENKEWATKLEAKGLQLNMLMKLKYDND

SEQ ID NO: 47468 - protein, 51 aa, Zea mays
  Coding DNA Sequence Number=SeqID_5689
MARVVCTLCGKRLDGGVSVLSVGVNPIPSWVLIDSDRRYFSDMKTWSLPYT

SEQ ID NO: 47469 - protein, 306 aa, Zea mays
  Coding DNA Sequence Number=SeqID_5690
  Homolog annotation: Hit_ID=Q6ZGB6; Match level="QueryCoverage=75%, HitCoverage=58%, E-value=1e-70, Identity=60%"; Hit description=Kelch repeat-containing F-box family protein-like
  Pfam annotation: Domain name=F-box; Domain location=15-62; Score =30.3; E_value=6.8e-06; Accession=PF00646.23; Description=F-box domain
  Pfam annotation: Domain name=Kelch_1; Domain location=55-96; Score =1.3; E_value=2.7; Accession=PF01344.15; Description=Kelch motif
  Pfam annotation: Domain name=Kelch_1; Domain location=98-144; Score =45.1; E_value=2.4e-10; Accession=PF01344.15; Description=Kelch motif
  Pfam module annotation: Pfam domain module=F-box::Kelch_1::Kelch_1; Domain location=15-62::55-96::98-144
MAMEAEEDGGGIEGELIPGLPDDVAMECLARVPSRSHRRMRRVCRRWRGTVGARPRATGGMSQWWGGWDPDTLRPTSDVRLLDVPAGTWRRGPKMPDSRSFFGCAGGGGNVYVAGGHDECKNALRSAFAYSVAADAWRALPDMLEERDEPQLVVATPGRVLAASGYPTEAQGAFKDTAEWYNAGGGAWTSECDVVPDGDTAGTCLASVRGTVWAVGAGNGGVREWDGAARAWKDVADGPPGMKACLKAVGVGNGGAVLVFGTVADAAAEGVNYSAWVMEASSGAWKRVPVPSGFGGFVYSAAAVPV

SEQ ID NO: 47470 - protein, 296 aa, Zea mays
  Coding DNA Sequence Number=SeqID_5691
  Gene Ontology: Mol. function=zinc ion binding; Cellular component =integral to membrane
  Homolog annotation: Hit_ID=Q6Z7F4; Match level="QueryCoverage=96%, HitCoverage=92%, E-value=4e-90, Identity=59%"; Hit description =Putative nucleic acid binding protein
  Pfam annotation: Domain name=C1_3; Domain location=241-271; Score =10.0; E_value=0.034; Accession=PF07649.3; Description=C1-like domain
  Pfam annotation: Domain name=PHD; Domain location=242-292; Score =51.1; E_value=3.6e-12; Accession=PF00628.19; Description=PHD-finger
  Pfam module annotation: Pfam domain module=C1_3::PHD; Domain location= 241-271::242-292
MDGDREGAAAVHHHARSPEDVFRDFRARRAGIVKALTTDVEKFYQQCDPEKENLCLYGLPNETWEVTLPAEEVPPELPEPALGINFARDGMVEKDWLSLVAVHSDAWLLSVAFYFGARFGFDKDARGSGGISCCGEMHMLLPQVVEASDAIVETGHWRGIVGFCGQERRLFTMINNLPTVYEVVTGVAKKQSKAPNGSSKSSKSNSKPSKQINSNSKPVKPAHPNEEEDSGREDAEEDQAYLCGSCGESYANGEFWICCDICEKWFHGKCVRITPAKAEHIKQYKCPSCSTKRSRE

SEQ ID NO: 47471 - protein, 208 aa, Zea mays
  Coding DNA Sequence Number=SeqID_5692
MHTRDEAGSVEMCARENELMVPRVDGEQDTDQGAERSRDGAGQPLDNRGSEELAMAEEDAARPSAMEMAGPSAQGARHRQRPASGELETTAGHAQEREPSRGKCAAPMEAGKELGRAARRAGAEERGAEEKGERLSAMKGLGWAQGGAPSSRKLHARKDSMAPEEQRPSREGERTEGAGALARELREREMGAGERARHGRKKREQTCV

SEQ ID NO: 47472 - protein, 228 aa, Zea mays
  Coding DNA Sequence Number=SeqID_5693
MTTYGGEPSIQVFGKHYFLHWQKKTIGGRVIQFGSCTFTLKTRKTCGKVYELVSSPKNRCGSWFKSWFYDDLGEGVPGVAQPAGSVMMAHDFVAFSDFKVRDNDSDDVVVVSPNFAVELGGQDGVAFISEVEVDAIKIVGKYSAKGSRSPDEAEIVSEDFVGLNAETTEFTEYLADTTGEATSHVSLVAAHARAATVTEAFMEKDWKSKSKKRKEVIRIVDPRRSAKA

SEQ ID NO: 47473 - protein, 42 aa, Zea mays
  Coding DNA Sequence Number=SeqID_5694
MPWIWDRVKCVAVEEGLCYFCAKVVLKQEEEPKIEVCCCGWC

SEQ ID NO: 47474 - protein, 114 aa, Zea mays
  Coding DNA Sequence Number=SeqID_5695
MVLVYNDLEDYAHELHEQVHQLYYQLHPNAVPGAVEAEGGVVLADGGEPDADLDIEATPMLVLGGESPSDSDVSEVATDTEEANLNPPPPPVSPTLADTIAALVNATTDNARIL

SEQ ID NO: 47475 - protein, 112 aa, Zea mays
  Coding DNA Sequence Number=SeqID_5696
MGARHPVPLLLFPGGWAELPSMDKPPTFPWCPCELYGRARQAFAICGAWRCPLRRVLLILSPLPSLQLGDPPDASSERVEVATSTNSGVIASYLGRFLAGVKNGRYAALCCG

SEQ ID NO: 47476 - protein, 240 aa, Zea mays
  Coding DNA Sequence Number=SeqID_5697
MGEAHRRRRSSMEPRRKSSIGGEPAVGSMNRKHRDEALDETKQRYSRIPTKTHRLKRTDYNEMVIRWFLAIAEIDIEEKTIVLMTGHMSLDLYHEDIFEEYEQYYERARLGICKRFDETLGLKHHPTFINKIARVTILPKSGDKSKIRDKFWNIIHHVMNADATGVSDPHGWTVLGSTTSYGCRFQTLQTHVNEQFREMFEAVDDRFSAINSEFSKLHGHIQESVHDPIMTRMNNMHQSF

SEQ ID NO: 47477 - protein, 72 aa, Zea mays
  Coding DNA Sequence Number=SeqID_5698
MAQLTVTGRARMGENLLCYSSAGPHHWCAECVREQSLARGRVELAGGVHGSGACAKGSCLAPGTLAIGADDP

SEQ ID NO: 47478 - protein, 50 aa, Zea mays
  Coding DNA Sequence Number=SeqID_5699
MGERERDPRRSKMIYRKWSLLSSTVVIWCGVATAGLAGIFLLGGKMVKSL

SEQ ID NO: 47479 - protein, 454 aa, Zea mays
  Coding DNA Sequence Number=SeqID_5700
  Gene Ontology: Mol. function=DNA binding; Cellular component=nucleus; Biological process=multicellular organismal development
  Homolog annotation: Hit_ID=Q5ZBN2; Match level="QueryCoverage=85%, HitCoverage=47%, E-value=1e-146, Identity=68%"; Hit description =Putative LEUNIG
  Pfam annotation: Domain name=WD40; Domain location=186-224; Score =24.2; E_value=0.00046; Accession=PF00400.22; Description=WD domain, G-beta repeat
  Pfam annotation: Domain name=WD40; Domain location=228-266; Score =46.1; E_value=1.2e-10; Accession=PF00400.22; Description=WD domain, G-beta repeat
  Pfam annotation: Domain name=WD40; Domain location=271-310; Score =33.2; E_value=8.8e-07; Accession=PF00400.22; Description=WD domain, G-beta repeat
  Pfam annotation: Domain name=WD40; Domain location=314-352; Score =4.1; E_value=12; Accession=PF00400.22; Description=WD domain, G-beta repeat
  Pfam annotation: Domain name=WD40; Domain location=370-407; Score =11.2; E_value=1.8; Accession=PF00400.22; Description=WD domain, G -beta repeat
  Pfam module annotation: Pfam domain module=WD40::WD40::WD40::WD40::WD4 0; Domain location=186-224::228-266::271-310::314-352::370-407
  Subcellular localization annotation: CTP_CleavageSite=20; ConfidenceScore=5.23e-01
QQQQQQSHSQQQQLQQPALSGQQSQSSNQLLHQHGKPGVGSLPIDGNLPNSFGFPEQGSKKRKKPVSSSGRANSSGTANTAGPSPSSAPSTPSTHTPGDAMSIPQLQYNGGPSKPLMMFGSDGTGSLTSPANPLQDNKNSHLQGDVERLLEDGSLDENVESFLSQDDMDPRETMGRCMDSSKGLGFTEVAKARASTNKVVCCHFSLDGKLLATGGHDKKVVLWFTDVLKRKSALEEHSSLITDVRFSPGMTRLATSSFDKTVRVWDADNPDYSLRTFTGHSASVMSLDFHPNKEDIVCSCDSDGEVRCWSINNGSCVTCVRVFNGGATRLRFQPRQGKYLAAASEKGISILDAETLQVCRTPLQVCNLAAILSYNFTGHVQIIQSVCWDAAGNYLASVSEDSVRSLELWDIREKNTVTISNAHDGMVAALAASSASGLVASCRGKSERAADLIS

SEQ ID NO: 47480 - protein, 208 aa, Zea mays
  Coding DNA Sequence Number=SeqID_5701
  Subcellular localization annotation: CTP_CleavageSite=48; ConfidenceScore=5.74e-01
MLPSPQNILHPNYTSLRPRHPRRLSRLSDALSVPPSPRCLSRRRAACSAAAGARRRLWSTGGGRGRRVAGRCAEDRRRGREAIGDRQEGSLSGRVMYHRDADKRMEFLHLTPLPPTQLEAVVGCCVDGELLEMLFMFSVSSDSYPPFAHYIIRNWGVVRFAVVPLMGLGVCGSLCQGGDKDDVYDYGNGKEGVEADLQKFQDVDEFED

SEQ ID NO: 47481 - protein, 141 aa, Zea mays
  Coding DNA Sequence Number=SeqID_5702
MLLPLQVAVVVTMLASPAGVLGIATDEDCRCFMCVCDLDPYPPPPEAPTHHSPPAQPQPQPVPSPPPPPPPPPAPALPAYYPPQPYGYPWPTTYGPPAGEMYPRDDRRRESKSGAPPRHGGCGRASLALASTSLALLLWLE

SEQ ID NO: 47482 - protein, 159 aa, Zea mays
  Coding DNA Sequence Number=SeqID_5703
  Subcellular localization annotation: CTP_CleavageSite=37; ConfidenceScore=5.34e-01
MEEGFIGARRRSCTGYQRLRAPPPTTPGRGTCRLGRRAVLGSGGWRFVRLRRRRRRRASAPRWSSPLQLLSRILDTYITSMLSQPPPNILKPLNMPPPKLRRDASPGTGSSRRRDAGGSGRGVLLNICVAEVLLRRTTSEVRRSPLQPTKDARRRSVRA

SEQ ID NO: 47483 - protein, 90 aa, Zea mays
  Coding DNA Sequence Number=SeqID_5704
  Gene Ontology: Mol. function=transcription regulator activity
  Homolog annotation: Hit_ID=Q9FUY2; Match level="QueryCoverage=89%, HitCoverage=8%, E-value=3e-32, Identity=82%"; Hit description =Transcriptional corepressor LEUNIG
  Pfam annotation: Domain name=LisH; Domain location=10-36; Score=37.3; E_value=5.4e-08; Accession=PF08513.1; Description=LisH
MSQTNWEADKMLDVYIYDYFMKRNLQATAKAFQAEGKVSFRSSWPFDAPGGFLFEWWSVFWDIFIARTNEKHSDVAASYIEPLAWSEAGV

SEQ ID NO: 47484 - protein, 173 aa, Zea mays
  Coding DNA Sequence Number=SeqID_5705
  Subcellular localization annotation: CTP_CleavageSite=51; ConfidenceScore=5.40e-01
MAVLTKGLDHFRSGILQQKPFMQSPQQFQQLQFLTPQQQQQLLLHAQQNLSSSMSSDVDTRRLRMLLNNRNVVLGQDGQTNSGGDVIPNIGSPGQSGGSRNDIDILIKFVKGHIKYHAISLVYRVACPICEMMSKVDGDIETKSTSANLIYCKIHICLLPSDRHILDFGMLQI

SEQ ID NO: 47485 - protein, 115 aa, Zea mays
  Coding DNA Sequence Number=SeqID_5706
MVTNPRRPIGHGEQFVVAGDCAPNFNLAPNSTRWLDDARGKERLRWHCDFLQRRHDREKEKRAMGRRLDEMRRKGQRPSVLIPRIGGNGLPEHRGDPGWADVVPWARSTEKKVPR

SEQ ID NO: 47486 - protein, 124 aa, Zea mays
  Coding DNA Sequence Number=SeqID_5707
MTWQGAPDCPKHQGLLRKDPKTQRTVPVDCGFITKFFRGSLAKRAWRRGIRSYWPHDPLWTTQIKSDPTSKRNPEIDGRRSSSSLDSRTVVDVSRGEATAVAQPQDGHYVNPTVLARGSIVALP

SEQ ID NO: 47487 - protein, 94 aa, Zea mays
  Coding DNA Sequence Number=SeqID_5708
MATKYQESAFAFSDDTVLSESVEQAVDMRLYPNRIRCNLLGKTHTGRGLPQVVTGANEQTPASQQQGKQISILRAKQLSLNTKKLQDFTFTQRT

SEQ ID NO: 47488 - protein, 163 aa, Zea mays
  Coding DNA Sequence Number=SeqID_5709
  Gene Ontology: Mol. function=carboxyl- and carbamoyltransferase activity; Cellular component=ornithine carbamoyltransferase complex; Biological process=amino acid metabolic process
  Homolog annotation: Hit_ID=Q3E0G9; Match level="QueryCoverage=86%, HitCoverage=23%, E-value=2e-11, Identity=32%"; Hit description=Ig -like, group 1
MAPLGRGRSEPEVGRGGGSSEVEAESGPGGRARRRPLSEVEAESEPGGRARRRLSSEVEVESEPWGRARRRPPSEVEVESKPWGRARRRPPSEVRVESKPWGRARRRPPSEVGVESEPWDRARRSPSSSVEVKSEPWGRARRSPSSGVEVEPKLWGRARRSFL

SEQ ID NO: 47489 - protein, 273 aa, Zea mays
  Coding DNA Sequence Number=SeqID_5710
MGWGCVGWRWAPLRRPATGYAGSPRGYATRGAPPMKPHASDDTWDPPRVGPTRRRAREALVWPRAASSSLRRRGVGAAHVRRDPALPPGPQGCALTRLGLCARAGRAGQAVATLPGPQGCALTRLGHCARVGRARMPSQNVAGRLAAPWPPTRYRRPREAVRRRGRAAVPRVGPATPRPPRLRCWCLRPREPRLAPSGRGCRASASQAATAAPQEPTPMRGLGRRAPRRRGCRGRAVAVWPRSRPRCQWAAPHDAAFAPAQGLRSHRAREPAQ

SEQ ID NO: 47490 - protein, 192 aa, Zea mays
  Coding DNA Sequence Number=SeqID_5711
  Subcellular localization annotation: CTP_CleavageSite=55; ConfidenceScore=5.58e-01
MAPSARSAVAAPPPAFPPPPPRPRAPLAAPATPCACAPDGSCPPSPVVVPLPAARAPAPRSCPSPAVAPPMARPPPRPCPSGAPSSPPRLRPPRQARPPVGWSPRWLALPWWLAPPRQRCPTPCTRPPCPAAPRRAPAAARAPRAPVRPCGDEDDGYAYGKGGDEDDGYAYGKGEDKVVEEDFQEFQEYDEF

SEQ ID NO: 47491 - protein, 121 aa, Zea mays
  Coding DNA Sequence Number=SeqID_5712
  Pfam annotation: Domain name=Collagen; Domain location=3-62; Score= -41.8; E_value=0.047; Accession=PF01391.8; Description=Collagen triple helix repeat (20 copies)
MGGEEAGPRYRGAPGAEAARGWWGTSARGGEPGARPTAGRHCHVEGKGQGWACGGAGARGRCEVVGREEREGTMATQEKRSRKMTNNGDYLPGEKALTGANNEFVDCQRFGGPIDELDIET

SEQ ID NO: 47492 - protein, 184 aa, Zea mays
  Coding DNA Sequence Number=SeqID_5713
  Homolog annotation: Hit_ID=Q6QP51; Match level="QueryCoverage=69%, HitCoverage=84%, E-value=1e-07, Identity=33%"; Hit description =Putative growth-regulating factor 1
MEDRERGHCGKDPSWRRKRAPSPPTDQGFEGWPLGRVSTAAPEHSDFKPITDQGFEGWPLGRENGAARSALTAVSATPATTDNKSRSTTEFSLGRNRKLCLARPHAPASGGGLRLARPQAPASGGGLRLARPPDSASTPVSGGIVSSPDPGLGLKRSLRLDRPWARTDHANRGYIISLFLACSG

SEQ ID NO: 47493 - protein, 184 aa, Zea mays
  Coding DNA Sequence Number=SeqID_5714
MITSSASPEVPLRGLPRTSPLPSLISEGACARENLCPHRGPLILGHQSLPRLSLSRTRRTKPGARLAQRPLEDNNIECAYLPHSDLRVYRDNRPWGTGQPSGTNSVCPKHNSPSGANSASPELGLDYFLPRESRRWPYLQTVAHDSESQDRVGRDLERTSASPKLDSDLDISDEGPQCHQLWWS

SEQ ID NO: 47494 - protein, 107 aa, Zea mays
  Coding DNA Sequence Number=SeqID_5715
  Pfam annotation: Domain name=Spt4; Domain location=33-96; Score= -36.7; E_value=0.011; Accession=PF06093.4; Description=Transcription initiation protein Spt4
MESVDSGEEEGTEEVIKSIIAGTWNVVEDMADACVWCLFRQNRCENYPFLEMDREHDNIVNCTAPNFTSSNCRGDELSKMKLIFCALIYLNERDEHHETSAGETGEI

SEQ ID NO: 47495 - protein, 144 aa, Zea mays
  Coding DNA Sequence Number=SeqID_5716
  Homolog annotation: Hit_ID=Q9SNJ6; Match level="QueryCoverage=41%, HitCoverage=10%, E-value=1e-12, Identity=65%"; Hit description=EST AU070346(S12172) corresponds to a region of the predicted gene
MPIELSPAQAPTDEEVKAVEEDNKVVVKHHFVMESSTGLHGYVPTLRMTMAEKMERTTAPHRLPTTHLAYACQVFDRVSLSTLDAPHVPLQQLDLHLGMAARDSVNAYLCDVRPTDIYCTIMRHRVTYMCGVPIVFNILLDGVS

SEQ ID NO: 47496 - protein, 87 aa, Zea mays
  Coding DNA Sequence Number=SeqID_5717
MELPTGEEGVHGDGRSQEAVEDDDFVDSWGRWHCGRWHKLVVASADRGAGGGGDEQSGHGDARVAAPRGMRRRQWREERLAAAAMKK

SEQ ID NO: 47497 - protein, 585 aa, Zea mays
  Coding DNA Sequence Number=SeqID_5718
  Gene Ontology: Mol. function=DNA binding; Biological process =regulation of transcription
  Homolog annotation: Hit_ID=Q6YYW1; Match level="QueryCoverage=79%, HitCoverage=74%, E-value=0.0, Identity=70%"; Hit description =Putative NAC2 protein
  Pfam annotation: Domain name=NAM; Domain location=119-247; Score =270.2; E_value=4.1e-78; Accession=PF02365.6; Description=No apical meristem (NAM) protein
MACGSLDTGSAGLERQNKQNHQCYVIILGFCAVYHGVPKRPLAFLIAQATPFFLLSSLSGLSPIHSTPIHFPPLSTLAAPPAVCSGGAYMTHPSSPSSSAPPPPPAAAAAAAAAEATSLAPGFRFHPTDEELVSYYLKRKVLGRPLKVDAIAEVDLYKLEPWDLPPRSRLRSRDSQWYFFSRLDRKHANRARTNRATSGGYWKTTGKDREVRHGPRVVGMKKTLVFHAGRAPKGERTNWVMHEYRLEGDAAVEIPQDSFVVCRIFQKAGPGPQNGAQYGAPFVEEEWEEDDADVGLLPVEGDAAVDPEVPPGPVEIPGALERGYLQMSDLIQGLGDRNGNGTPSLPVSDTSHNSNHSEDVDGNSGDILSDPNLGSNFIQCVEPGEQNSLMLNGNIISNANAGDFFNNSSPSDGFLELKDFADAADLDFPLGNGSTIWPSDGWAWKTPDSAEAVNGANDEIPPLPDDQIFQPDELEQLLQSIQEDSHLGSTIIDPMHSSMTNSVLPEDDYLMFYDAPFDSTMCDGYGQNGILGSAAANLSGIGMMEDGMAYFDAMDDNSFNDTLGSIQQSAGSSSHAFNGPVLTQE

SEQ ID NO: 47498 - protein, 105 aa, Zea mays
  Coding DNA Sequence Number=SeqID_5719
MGTLKLTAGQTRRWRRSSRRWVDCLGFGRRGGEERGLGLCGGEERGGGATASAILGPFPGDGVSAVEKAIPGLCDGECECDGGGTTGENLYGFGGRGREEAHGGD

SEQ ID NO: 47499 - protein, 128 aa, Zea mays
  Coding DNA Sequence Number=SeqID_5720
MSGDHAKKEMKTGDKPTTSHGKASSKESRNKGKGKEKKSPSHKSHRSRDKKKKMRKVVYYETDTSSPSTSGSDASSITSKRHERKKFKFSLRTWLKLDKSRSSLEQVANWSLRVLKARLRTEKNYDFG

SEQ ID NO: 47500 - protein, 230 aa, Zea mays
  Coding DNA Sequence Number=SeqID_5721
  Subcellular localization annotation: CTP_CleavageSite=72; ConfidenceScore=5.23e-01
MARPEATGGGGGAVVVGLRARARVRGVFAGGGSGGGVGRRVGGSPAAVGQQRRGWRGWQRRTGGAGGRTAWSAAARRGSEAGLEDGLESSGLERPREQRPGGRTAWRAAAWSGGGLEQRHAEAGLAAPDGRRRRVGAAAAAAWRLERALECGGCHKNFLQFMTENGMSTGVILYDGVEDCMTTVTGREMGLNFLNYIFNKFKERKCWSDGWELSDMEIEIEAGRKFVITK

SEQ ID NO: 47501 - protein, 114 aa, Zea mays
  Coding DNA Sequence Number=SeqID_5722
MPGSDDTTSEIASATTAVPTNSALEQKIDTMTKVIADLAAKVSSLSLHVTDIDSRTAHIAAPISIPLYGLPGYGRIPELPATSAAAQPTTSTAPPLPTTQPPSRPVSGGPRFFT

SEQ ID NO: 47502 - protein, 134 aa, Zea mays
  Coding DNA Sequence Number=SeqID_5723
  Subcellular localization annotation: CTP_CleavageSite=56; ConfidenceScore=5.17e-01
MDGDKDEVLKGFDPVKLFSLFPSYSTSSLLECGAPRVCKSVKPSPQSLILLLQLVSANPLSGELVTTPFVGPVVPPPSSVAVFRCLHGLIERVPEFFEGRGGVGTLIVICDGLRCRIRCQVAGVEHGGVGAEEL

SEQ ID NO: 47503 - protein, 135 aa, Zea mays
  Coding DNA Sequence Number=SeqID_5724
MAHFAPYGSAPEDEVAGASTECRQLAARLGEGVAELDEVQHVDIGLEGGADGSTEEGRLRGNAEVYTGFAPKRGLYLIYSRDGQEGAEETCEASAARVFCIKPNLHITTKGTIDRSLKLQTKYPVTEKEDLVFNI

SEQ ID NO: 47504 - protein, 68 aa, Zea mays
  Coding DNA Sequence Number=SeqID_5725
MAVQPRAPTTVCLHCRCCSAAVGEPGHRCRSPYMICPFAGNLPRLDVWRVRRSRKKKAYAKTIFLVGN

SEQ ID NO: 47505 - protein, 230 aa, Zea mays
  Coding DNA Sequence Number=SeqID_5726
MQGDGFTADSGVQILSCPGPWGSATRRHSQAPGGGASRAIGQRHMSIFLNDQQINADQQINAAPQTLRIGRFAECLKHSANPEKTLGKVFDGCRTRQKEFNEQYIDKGFFAKYFLSGIRQRLCRVPDGTRQRKSVVTTSYNGDDVSSNTPGKEVTSLPSACVPALGKGSASSSLYQVLCRVLCATLGKAGPLCRVSRPQHSAKMLYRCPGIGSLPSAMSLTLGKTRLCRV

SEQ ID NO: 47506 - protein, 301 aa, Zea mays
  Coding DNA Sequence Number=SeqID_5727
  Homolog annotation: Hit_ID=Q84T64; Match level="QueryCoverage=42%, HitCoverage=28%, E-value=9e-50, Identity=88%"; Hit description =Putative DNA-binding protein
  Pfam annotation: Domain name=WRKY; Domain location=191-250; Score =5.9; E_value=0.00014; Accession=PF03106.6; Description=WRKY DNA -binding domain
MDSMEDAVSGTAAQGDLAEVVARAGAMAAAASHHHHRRPPSPAAADHGHIVSAARATARSQIMLVPAAACYDDETRPAAACGDAVMFDAPSSSMAAAVGPYHHLSSSSAALAPAHGGYWLPPQQISQEHARDGGLDEPPVVTRISPVTTPPPPSHHHQIMNSRKNEVKKVVCIPALPPPASSRPGGGEVIPSDLWAWRKYGQKPIKGSPYPRSFSCLLFLKRIAVFFVAQRLLQMQQLKGMYGKEASRAQSQRPQHARDHLHGRTQPPLANATQCARWLLPASHCYSHVVQLQEEEEQLQR

SEQ ID NO: 47507 - protein, 388 aa, Zea mays
  Coding DNA Sequence Number=SeqID_5728
  Gene Ontology: Mol. function=RNA-directed DNA polymerase activity; Cellular component=chromatin; Biological process=RNA-dependent DNA replication
  Homolog annotation: Hit_ID=UPI00004C1733; Match level="QueryCoverage =99%, HitCoverage=28%, E-value=1e-154, Identity=72%"; Hit description= UPI00004C1733 related cluster
  Pfam annotation: Domain name=RnaseH; Domain location=37-164; Score =8.8; E_value=8.9e-06; Accession=PF00075.14; Description=RNase H
  Pfam annotation: Domain name=rve; Domain location=270-387; Score =27.6; E_value=2.9e-05; Accession=PF00665.16; Description=Integrase core domain
  Pfam module annotation: Pfam domain module=RnaseH::rve; Domain location=37-164::270-387
MGETISFAPRKAIKSQVLADFVAEWVDTQLPTAPIQPELWTMFFDGSLMKTRAGVGLLFISPLGKHLRYVLCLHFPASNNVAEYEALVNGLRIAIELGVRRLDARGDSQLVIDQVMKNSHCRDPKMEAYCDEVRRLEDKFYGLELNHIARRYNETADELAKIASGQTTVPPDVFSRDLHQPSVKIDDTPEPEAPSGQPEAPSVQPEVPSAPEGEALPSRRSEAGSRLIETGRPRTCNISTEESYPSTEPKLGDWRGAPSRLSCWEMGRSSTTATPQASSSDASPSPKKAPGGYTHLLVAIDKFSKWIEAVAFFTNIIHRFGVPNSIITDNGTQFTGRKFLDFYEDHHIRVDWATVAHPMTNGQVEYANDMILQGLKPRIYNDLNKFGK

SEQ ID NO: 47508 - protein, 255 aa, Zea mays
  Coding DNA Sequence Number=SeqID_5729
  Gene Ontology: Mol. function=transporter activity; Cellular component= membrane; Biological process=oligopeptide transport
  Homolog annotation: Hit_ID=Q9SDN4; Match level="QueryCoverage=86%, HitCoverage=51%, E-value=2e-40, Identity=59%"; Hit description=Amino acid/peptide transporter
MAPTGATLSACSTPQVVASSTALTASRLQEYEPYTCDGSVDINGDPASKKHTGKWRACYSILGGEFCVSLAYYGVGTNLGMLVLTLAAASIHALDISPQGQDALPSLGLFLAALGLGGVWPCVPTFGADQFDDTDGAEKAQKERYYNWYYFAVNGGSLASTLLVYVQDSWGWGWGFGIPALFSVVGIAGFLASTKLYRYQKPGGSALTRVCQVVVAAVRKAHVDVPSDSSLLYEVPGKEAAAVVGSRKLVHTQGL

SEQ ID NO: 47509 - protein, 226 aa, Zea mays
  Coding DNA Sequence Number=SeqID_5730
  Gene Ontology: Mol. function=nucleic acid binding
MNDPGEYVDYGDVVTFDTTPKDHLYDKPLGMFIGDQDPAMPIALRNDDHNIVTGCGSALELVPVGKQVDNSNMHQLVCDTSSPLHVSHDQIEQLGTSTEAKKRLDFNVDVINLGMLDRAKPKGRTIKNTEERILKLGAKGEKKKNRRCQLCGIADGHNNMTCLSLEENIARLATLANRKRGRPPGSRINSKTNVPQWNETSTTKNIVWLKKKTMNQLVNRWVWVKN

SEQ ID NO: 47510 - protein, 485 aa, Zea mays
  Coding DNA Sequence Number=SeqID_5731
  Gene Ontology: Mol. function=diphosphate-fructose-6-phosphate 1 -phosphotransferase activity; Cellular component=6-phosphofructokinase complex; Biological process=glycolysis
  Homolog annotation: Hit_ID=Q84QT9; Match level="QueryCoverage=99%, HitCoverage=83%, E-value=0.0, Identity=83%"; Hit description =Putative pyrophosphate-dependent phosphofructokinase alpha subunit
  Pfam annotation: Domain name=PFK; Domain location=38-318; Score= -128.1; E_value=7.3e-05; Accession=PF00365.10; Description =Phosphofructokinase
MNADFGAPKELAGGLQQRRALYQPRLPPCLQGPTVRAEVGVVFSGRQSPGGHNVVWGLHDALKAYNPQSLLYGFVGGTEGLFANKTLEITDDVLASYKNQGGFDLLGRSIDQIRTTKQVNAAMTTCHSLNLDGLVIIGGVTSNSDAAQLAETLIQNNCKTKVVGVPVSLNGDLKNQFVETTVGFDTVCKVNSQLVSNVCLDAISAGKYYYFVRLMGRKASHVAFECALQSHPNMLILGEEVALSKLTLMEIISKICDGVQARAELGKYHGVLVIPEGLIESIPEMYALIQEINILHNSNVPVAEMSSQLSPWAAALFQFLPPFIRRELLLHQESDNSAQLSQVCDSECPTTTQSKLNIDTEQLLAHLVETEMIKRTKEGRYKGRKFSSVCHFFGYQARGSTPSNFDCDYAYALGRISLHMIAVGLTGYMATVANLKDPVDKWRCAAAPLTAMMSVKRHLRGPGAIPIGRPSIHPSPIDLKGKAYE

SEQ ID NO: 47511 - protein, 105 aa, Zea mays
  Coding DNA Sequence Number=SeqID_5732
MKLQNALSGCLMELAMVQCSCRSNRQRKMFTASDLFAPKFVPPPSGFVRDRKWIESKLNGAYVAPFPESSRRLHRRPPRPVNSAAVALMPKFSRTVPPTDVVGMR

SEQ ID NO: 47512 - protein, 1060 aa, Zea mays
  Coding DNA Sequence Number=SeqID_5733
  Gene Ontology: Mol. function=cellulose synthase (UDP-forming) activity; Cellular component=membrane; Biological process=cellulose biosynthetic process
  Homolog annotation: Hit_ID=Q7PC66; Match level="QueryCoverage=99%, HitCoverage=95%, E-value=0.0, Identity=84%"; Hit description =Cellulose synthase-like D3
  Pfam annotation: Domain name=Cellulose_synt; Domain location=224 -1058; Score=1818.2; E_value=0; Accession=PF03552.5; Description =Cellulose synthase
MEGELAADYTNYTVQIPPTPDNQPMMDPASVAMKAEEQYVSNSLFTGGFNSVTRAHLMDKVIESEVTHPQMAGSKGSRCAMPACDGKVMRNERGEDIDPCECRFKICRDCYLDAQKEGCLCPGCKEHYKIGEYADDDPNDASSGKHYLPGPGGGMMNNSKSLLARNQNGEFDHNRWLFESSGTYGYGNAFWPKGGMYDDDLDDEGGPGGGGGDGMLPEQKPFKPLTRKIPMPTSIISPYRIFIVIRMFVLIFYLTWRVRNPNMEALWLWGMSIVCELWFAFSWLLDMLPKVNPVNRSTDLAVLKEKFETPSPSNPHGRSDLPGLDVFVSTADPDKEPVLTTATTILSILAADYPVEKLACYVSDDGGALLTFEAMAEAASFANIWVPFCKKHDIEPRQPDSYFSIKGDPTKGKRRSDFVKDRRKVKREFDEFKVRINGLPDSIRRRSDAFNAREDMKMLKHLRETGADPAEQPKVMLKPPSPDPLYGMHDEEQLIDFSDVDIRLPMLVYMSREKRPGYDHNKKAGAMNALVRCSAVMSNGPFILNFDCDHYINYAQAIREAMCFVMDRGGERIAYIQFPQRFEGIDPSDRYANNNTVFFDGNMRALDGLQGPMYVGTGCMFRRFALYGFDPPRTTEYTGWLFKKKKVTTFGKADQGETDTQSLNSKGAEDFDAELTSMLVPRRFGNSSALMASIPVAEFQARPLADHPAVLHGRPPGSLTVPRPPLDPPTVAEAVSVISCWYEDKTEWGDRVGWIYGSVTEDVVSGYRMHNRGWRSVYCIPKRDAFLGTAPINLTDRLHQVLRWATGSVEIFFSRNNAFLASRRLMFLQRVAYLNVGIYPFTSIFLLVYCFIPALSLFSGFFIVQTLNVAFLCYLLTITVTLIALGVLEVKWSGIELEDWWRNEQFWLISGTSAHLYAVVQGLLKVMAGIEISFTLTAKAAVDDNEDIYADLYVVKWSSLLIPPITIGMINVIAIAFAFARTVYSDNPRWGKFIGGGFFSFWVLAHLYPFAKGLMGRRGKTPTIVFVWSGLISITISLLWVAISPPEASAGGRGAGFQFP

SEQ ID NO: 47513 - protein, 84 aa, Zea mays
  Coding DNA Sequence Number=SeqID_5734
MAPAEAGVDGRRDVDCGEDGSIGVEGGLGKGARIWGEDGSSGGAVLMGGATAALMARALLEVAALMAQAQLEAPHDGGGLARAW

SEQ ID NO: 47514 - protein, 61 aa, Zea mays
  Coding DNA Sequence Number=SeqID_5735
MESHDLRAEWESRLVGGYEIDGFGYDYDAGLEPETSCRETIVNDGMYSHLQIIQTISRRPK

SEQ ID NO: 47515 - protein, 95 aa, Zea mays
  Coding DNA Sequence Number=SeqID_5736
MTPFYENEGGAVRGPSLSEFPARGAFRDEDVQDTYMQGEGHGGCEDPDSSRDPRHKPSRPPRDSVGEKLGHLLLPTWGLGMDLTPGPRMEEAVIP

SEQ ID NO: 47516 - protein, 723 aa, Zea mays
  Coding DNA Sequence Number=SeqID_5737
  Gene Ontology: Mol. function=RNA-directed DNA polymerase activity; Cellular component=intracellular; Biological process=RNA-dependent DNA replication
  Homolog annotation: Hit_ID=UPI00004C1731; Match level="QueryCoverage =95%, HitCoverage=51%, E-value=0.0, Identity=83%"; Hit description =UPI00004C1731 related cluster
  Pfam annotation: Domain name=RnaseH; Domain location=312-439; Score =5.3; E_value=1.9e-05; Accession=PF00075.14; Description=RNase H
  Pfam annotation: Domain name=rve; Domain location=441-616; Score =95.0; E_value=2.3e-25; Accession=PF00665.16; Description=Integrase core domain
  Pfam module annotation: Pfam domain module=RnaseH::rve; Domain location=312-439::441-616
MPFGLRNAGATYQRCMNHVFGEHIGRTVEAYVDDIVVKTRKASDLLSDLEVTFRCLKAKGVKLNPEKCVFGVPRGMLLGFIVSERGIEANPEKIAAITSMGPIKDLKGVQRVMGCLAALSRFISRLGERGLPLYRLLRKAECFTWTPEAEEALGNLKALLTKAPILVPPAAGEALLVYVAATTQVVSAAIVVERQEEGHALPVQRPVYFVSEVLSETKIRYPQVQKLLYAVILTRRKLRHYFESHPVTVVSSFPLGEIIQCREASGRIAKWVVEIMGETISFAPRKAIKSQVLADFVAEWVDTQLPTAPIQPELWTMFFDRSLMKTGAGAGLLFISPLRKHIRYVLRLHFPASNNVAEYEALVNGLRVAIELGVRRLDARGDSQLVIDQVMKNSHCRDPKMEAYCDEVRRLEDKFYGLELNHIARRYNETADELAKIASGRTTVPPDVFSWDLHQPSVKIDNTPEPEAPSAQSEKAPGGYTHLLVAVDKFSKWIEVRPLNSIRSEQAVAFFTNIIHRFGVPNSIITDNGTQFTGRKFLDFCEDHHIRVDWAAVAHPMSNGQVERANGMILQGLKPRIYNDLNKFGKRWMKELPSVVWSLRTTPSRATGFTLFFLVYGTEAVLPTDLEYDSPRTRAYSDQSNQASREDSLDQLEEARDKALLHSARYQQSLRRYHARGVRSRGLQEGPFVIAKVLKPGTYKLANSQGEVYDNAWNIQQLRRFYP

SEQ ID NO: 47517 - protein, 102 aa, Zea mays
  Coding DNA Sequence Number=SeqID_5738
MAWRSRMRDRGFGTKAWWVRGRRRRSERRRRRFCGPKIGEGAADKTRLFREPVVLFGGVRRGAGPVLFLTSGGVRRGAGLGWDPRKSANPPNAGRRPKGFTF

SEQ ID NO: 47518 - protein, 498 aa, Zea mays
  Coding DNA Sequence Number=SeqID_5739
  Gene Ontology: Mol. function=tetracycline:hydrogen antiporter activity; Cellular component=integral to membrane; Biological process=tetracycline transport
  Homolog annotation: Hit_ID=Q9ZVW6; Match level="QueryCoverage=94%, HitCoverage=89%, E-value=2e-61, Identity=33%"; Hit description =Putative tetracycline transporter protein
  Pfam annotation: Domain name=MFS_1; Domain location=7-455; Score =72.1; E_value=1.8e-18; Accession=PF07690.6; Description=Major Facilitator Superfamily
MEGLGHLLLFAFLFWFSTFMVAPVMTDVTMAALCPGRDECSLAIYLTGLQQAVSGLGALVLTPVVGNLSDRYGRKALLALPATASIVPLGILAYGRTKGYFYAYYVTKTLTAMVCEGTMMTLSLAYVVLLLPTYTTYQAAAVCPSPSDRRVQVCPPGSLPPAQADRVPETRRAAAFGVFSGVCSAGFVGGTVAARFLPVSSTFQVSAVAAVATAVYMKAFLQETDGGASVSSSSSSSSGSGSDEEAACRRPLCLPSSSSSEEAASLPRLPPLRKAPSLSEIAAALTSSSTFCCAAVVTFFHGLGETGLLSALLYFLKAKFHYSKNQYANLLLIIGITGSFSQLTVMPLLVRKLGEQKLLVISLVASCGQVNSANNYLIGCDFDVQAFLYSISWSSWVPYLAASSVILSMLVTPCIRSIVSKKVGPFEQGMVQGCMTGISSTASVVSPLIFTPLTAWCLSEATPFYLKGFSVACAGFATLVALATSISMRPAEVQPDRK

SEQ ID NO: 47519 - protein, 114 aa, Zea mays
  Coding DNA Sequence Number=SeqID_5740
MASRGNGEEGLQPWLYRPRQGEGVSGKGRETAAGHHAIDGVHQWGRNERFDAPLTREANCAGSVGSLGLLGAGLVRARAAARAGASGVAVGQGAAASRERREEEGVGGGGADGN

SEQ ID NO: 47520 - protein, 66 aa, Zea mays
  Coding DNA Sequence Number=SeqID_5741
MASDRRSRDKWSILGYVIPVRMGAILAAVCRSDGSDGRWDEQATEDLGVQQVETAEQELVEAKLCP

SEQ ID NO: 47521 - protein, 121 aa, Zea mays
  Coding DNA Sequence Number=SeqID_5742
MARMVGSHRTTSSEVDRSTTSGAAQRVARSRDKATDQVRDELQRGRWREEASAGGGSRLRDDDRIRALQGMRTRECPGRAPTCETGSRASSYRRRGHTREARLKAGKAGASSEIGEGRPWR

SEQ ID NO: 47522 - protein, 54 aa, Zea mays
  Coding DNA Sequence Number=SeqID_5743
MARVACTLRGKRLDGGVSVLSVDVKKRQTFVASVLRWYQGKSTRNEVAGGKDPP

SEQ ID NO: 47523 - protein, 106 aa, Zea mays
  Coding DNA Sequence Number=SeqID_5744
  Gene Ontology: Mol. function=transcription factor activity; Cellular component=nucleus; Biological process=regulation of transcription, DNA-dependent
  Homolog annotation: Hit_ID=Q6J832; Match level="QueryCoverage=96%, HitCoverage=45%, E-value=3e-15, Identity=47%"; Hit description =Ethylene-responsive element binding factor
MPLSPSLELDLFHRAAAAGTGAAAVRFPFGNIPVTHSYYFFGQAAAAAEVGCRVLKLASAVTVAQSDSDCSSVVDLSPSPPAAVSARKPVVFDIDLNCSPPTEAGA

SEQ ID NO: 47524 - protein, 64 aa, Zea mays
  Coding DNA Sequence Number=SeqID_5745
MTRGGSEGPGVTSVRLVSGYRGHLPGDGQKVKAGHGDAMEVPGHVHKAGKAAVTASLSKVVYCT

SEQ ID NO: 47525 - protein, 110 aa, Zea mays
  Coding DNA Sequence Number=SeqID_5746
MARRGGGCLVRDVRMVGGGGGLGGMTGGPGDTAAAAAAAGQARAGGWAYAQQRARANARSGAGVGRAGCGWTGELWAARESAGGARWATRELGCGEACWATKGGRSGPRC

SEQ ID NO: 47526 - protein, 213 aa, Zea mays
  Coding DNA Sequence Number=SeqID_5747
MARRGGGCLVRDVRVVGGGGGLGGMTGGPGDTAAAAAAGQARAGGWAYAQQRARANARSGAGVGRAGCGWAGELWAARESAGGGLGGPRESWAAGRRAGPRRGGGVGRAADGLREDEFDGNEAGRAEGNGAAAGFCAQCSGERAYAHVTLGRAVGCTGRGTHRSRGAAPRGEPHPRLARDTETPELGENGRDEHAFGGVLAKMGARGRGSAPH

SEQ ID NO: 47527 - protein, 38 aa, Zea mays
  Coding DNA Sequence Number=SeqID_5748
MGRAPCCEKWAQRGVTRETVLATTLRARRGSWSRCQNA

SEQ ID NO: 47528 - protein, 81 aa, Zea mays
  Coding DNA Sequence Number=SeqID_5749
  Gene Ontology: Mol. function=DNA binding; Cellular component=nucleus; Biological process=regulation of transcription, DNA-dependent
  Homolog annotation: Hit_ID=P27898-2; Match level="QueryCoverage=98%, HitCoverage=58%, E-value=1e-38, Identity=88%"; Hit description =Isoform Short of P27898
  Pfam annotation: Domain name=Myb_DNA-binding; Domain location=14-54; Score=38.5; E_value=2.3e-08; Accession=PF00249.21; Description=Myb -like DNA-binding domain
MGRAPCCEKVGLKRGRWTAEEDQLLANYIAEHGEGSWRSLPKKCSCRLRWINYLRADVKRGNISKEEEDIIIKLHATLGNR

SEQ ID NO: 47529 - protein, 84 aa, Zea mays
  Coding DNA Sequence Number=SeqID_5750
  Gene Ontology: Mol. function=DNA binding; Cellular component=nucleus; Biological process=regulation of transcription, DNA-dependent
  Homolog annotation: Hit_ID=P27898-2; Match level="QueryCoverage=75%, HitCoverage=41%, E-value=5e-31, Identity=96%"; Hit description =Isoform Short of P27898
  Pfam annotation: Domain name=Myb_DNA-binding; Domain location=14-61; Score=48.1; E_value=3e-11; Accession=PF00249.21; Description=Myb -like DNA-binding domain
MGRAPCCEKVGLKRGRWTAEEDQLLANYIAEHGEGSWRSLPKNAGLLRCGKSCRLRWIYYLRATSEETSPRGETPLHLAHPRQQ

SEQ ID NO: 47530 - protein, 94 aa, Zea mays
  Coding DNA Sequence Number=SeqID_5751
  Gene Ontology: Mol. function=DNA binding; Cellular component=nucleus; Biological process=regulation of transcription, DNA-dependent
  Homolog annotation: Hit_ID=P27898-2; Match level="QueryCoverage=98%, HitCoverage=58%, E-value=7e-25, Identity=65%"; Hit description =Isoform Short of P27898
  Pfam annotation: Domain name=Myb_DNA-binding; Domain location=14-51; Score=16.8; E_value=0.081; Accession=PF00249.21; Description=Myb -like DNA-binding domain
MGRAPCCEKVGLKRGRWTAEEDQLLANYIAEHGEGSWRSLPKNAVRTRMQACSGAARAAGSGGSTTFGRTSRGGTSPKEEEDIIIKLHATLGNR

SEQ ID NO: 47531 - protein, 110 aa, Zea mays
  Coding DNA Sequence Number=SeqID_5752
MAAPTGYMPNLQAPETLTFITPLEQDLIKEHELKLQAESQTLMLEVTQGRAKISGGYSFSGLSFRSLLFISYFASCRARGQSSLGGVEVSRPKAGGRLDLGVHGEGVQRA

SEQ ID NO: 47532 - protein, 175 aa, Zea mays
  Coding DNA Sequence Number=SeqID_5753
MAEDKRSEDPAQARLYKAMERTNAEKIIDEILAGLSEDSGDNKDIDVDSDNDNDEQLGADRSEHDVDIDGRGDDSIERGTSEWHSSRRQGQRRAATKGPKLRRQDMQLDTDWGSFGDDDASGKARAATLCERGAGNRLDEEVLYLDAVAGGRLQQAARQQRDNNSARGGGTEARN

SEQ ID NO: 47533 - protein, 193 aa, Zea mays
  Coding DNA Sequence Number=SeqID_5754
MEVSVLSERERPRGRLTGERVPQAALLVWCLDAAGTLVTRAHRCTNKNPNMMHNLMAFINPLFLNEVFTCDRIQSFKCRVTLSLRLLHLIKMDLGCYIFLLERNISVPIRGSLRRSALVNAKELQPRKGPLTNIPHIKQHPMSAFVRQGEGNQDVLALPPTVETDAGAPDLPRLRHYLLLALLQQLDTEEVPP

SEQ ID NO: 47534 - protein, 99 aa, Zea mays
  Coding DNA Sequence Number=SeqID_5755
MDMVTTDQDWKTAIRSGRTGPIYSEQRDELSQPSWMLTFTRVESRVVAPEQKQWSCGVLTALVRLRVFRKPTPLILLVPGSSASLRSCLVSKQCCRIEQ

SEQ ID NO: 47535 - protein, 59 aa, Zea mays
  Coding DNA Sequence Number=SeqID_5756
MGLTGLEARIEPGRAELGPDPNNGLRVGLTGLMLIGHLYARLCLVDPGKPQFMSQTATR

SEQ ID NO: 47536 - protein, 52 aa, Zea mays
  Coding DNA Sequence Number=SeqID_5757
MAGDAELPLEEAEAAMRSADDDSVTATVLAPPFVNKPYFLYEAGRCHVYVPH

SEQ ID NO: 47537 - protein, 358 aa, Zea mays
  Coding DNA Sequence Number=SeqID_5758
  Gene Ontology: Mol. function=binding
  Homolog annotation: Hit_ID=Q10NF0; Match level="QueryCoverage=98%, HitCoverage=99%, E-value=1e-144, Identity=72%"; Hit description=HEAT repeat family protein, expressed
  Pfam annotation: Domain name=Arm; Domain location=104-145; Score =12.5; E_value=0.34; Accession=PF00514.13; Description=Armadillobeta -catenin-like repeat
  Pfam annotation: Domain name=Arm; Domain location=189-229; Score =11.5; E_value=0.45; Accession=PF00514.13; Description=Armadillobeta -catenin-like repeat
  Pfam annotation: Domain name=HEAT; Domain location=115-147; Score =4.2; E_value=13; Accession=PF02985.12; Description=HEAT repeat
  Pfam annotation: Domain name=HEAT; Domain location=194-231; Score =10.2; E_value=2.4; Accession=PF02985.12; Description=HEAT repeat
  Pfam annotation: Domain name=HEAT; Domain location=74-104; Score=3.4; E_value=17; Accession=PF02985.12; Description=HEAT repeat
  Pfam module annotation: Pfam domain module=Arm::Arm::HEAT::HEAT::HEAT; Domain location=104-145::189-229::115-147::194-231::74-104
MAGDRLSWAGLLKWSLSYVDGAGPSRAVREEERRWLADAVEQHMMMDVVSRMREIALLMSTPPAVLEAQGITHDDIEVIKYLRNSNARIRAKAADVVTTVVQNNPTSQQLVMEASGFEPLLSNFRSDPDLTARIKALGALSSLIRNNKPGVSAFRLANGYSGLRDALNSESARFQRKALSLTHYLLSESHSDCSVFAQLGFPHLMMRLASSDDSGVREAALGGLLELARDTTLGNRNLLAEHDRLRRLLRGRMESIRTMTPEDLDAAREERQLVDSLWITCYHEPSMLRNEGLLVLPGEESFEQPPDVAGRLFEPMRRASARRAPPAERSDPRDETGGGMVLLLGGPAQDGRSNSPNH

SEQ ID NO: 47538 - protein, 429 aa, Zea mays
  Coding DNA Sequence Number=SeqID_5759
  Gene Ontology: Mol. function=binding; Cellular component =intracellular; Biological process=protein kinase C activation
  Homolog annotation: Hit_ID=Q75HW7; Match level="QueryCoverage=91%, HitCoverage=68%, E-value=6e-60, Identity=35%"; Hit description =Putative pentatricopeptide repeat-containing protein
  Pfam annotation: Domain name=PPR; Domain location=106-140; Score =24.8; E_value=0.00031; Accession=PF01535.11; Description=PPR repeat
  Pfam annotation: Domain name=PPR; Domain location=141-175; Score =33.3; E_value=8.3e-07; Accession=PF01535.11; Description=PPR repeat
  Pfam annotation: Domain name=PPR; Domain location=252-286; Score =42.6; E_value=1.4e-09; Accession=PF01535.11; Description=PPR repeat
  Pfam annotation: Domain name=PPR; Domain location=287-321; Score=4.8; E_value=2; Accession=PF01535.11; Description=PPR repeat
  Pfam module annotation: Pfam domain module=PPR::PPR::PPR::PPR; Domain location=106-140::141-175::252-286::287-321
MKQLMNASRQGRHGRVLHLLFTHLRRGDRGVVELHRAAVPTALRACARLGNASSGRLIHALVLTRFPSLASDAVAATALLDMYAKCGLVASAQRVFDEMPSRDDLVAWNALVACYARHALPERALVLAIKMRGQCLCPDLVTWNAVVSGFALAGDDQMATKLVGAMEVDGFQPDVVTWTSLVSGSVLNFHILPAFANVADVKRGKEVHAYAVVTGVEQELNVSSALVDMYTKSGFVVEARRLFDKMSERSTVTWNSMIFGLANSGHCQEAIGLFNRMLCDGARPDHLTFTAALTVCSYAGMVELGKGLYRAMQEEHGIEPRLEHCACMVHLLGRAGWLAEAYDFIKAMPLGPDCFVWGALLGACRSHGDIKLAELAASHLLTVEPANAASCLLLSDSLASVGRQDDVMKMKRLAKRRRMKKLHGCSWLE

SEQ ID NO: 47539 - protein, 125 aa, Zea mays
  Coding DNA Sequence Number=SeqID_5760
MSGDHAKKEMVTGEKPATSHGKGPSGESGNKVKGSPSHDKSRRSDEKKKKMNKVVYYETDSSSPSTSGSNTPSVTSKRHERKKFSSKKIIEQGASSSVPEAQPVAFKATEEKKEDSTPSRVLSAF

SEQ ID NO: 47540 - protein, 163 aa, Zea mays
  Coding DNA Sequence Number=SeqID_5761
MADPRRSVDNGEQFLSGSTSPGAEEPVDTTGTTSRSPQIKHRGTYAGESTGRQRRTVAYSHGCYDGEGKGEAGPRFLYPSAGEVRVRACGEDGPAQGSHQQRKKGRRRARPRPTWVARMEVSVLSERERPRGRLTGERVPQAALLVWCLDAAGTLVTRAHRSA

SEQ ID NO: 47541 - protein, 206 aa, Zea mays
  Coding DNA Sequence Number=SeqID_5762
MESVWEETTLRPTAPDGRGRGGRVGERTRQGEGRLGTSGRQRRAGGGGHESRRRGRDAEGPDVAGSRRGEAGRSGIRHRAAAGIQQGGRGLGGETGREGARWQGAWARLGTERQRSRRWSSCARRGRAARLLLLERRERALCREAALAPCRGRALRRHGRGQGRGRRARAAGETLHHQGCRLLGKGRSRVPPVEGSGRGGCRQADD

SEQ ID NO: 47542 - protein, 72 aa, Zea mays
  Coding DNA Sequence Number=SeqID_5763
MAMDQITTGLVADPDTRGVESDLVRILFELRSMGRRTDCRGGPPVSNRGRYARVSAVDGVVSPVGAEGEELA

SEQ ID NO: 47543 - protein, 148 aa, Zea mays
  Coding DNA Sequence Number=SeqID_5764
MGKSKKGGSSSHHSGDKRKREPTPPSEDFGDSEYSEEEFSSKSEGSPVHASPPALSDDSDDSQGITAEVWTYIRAVERAGLEGSDESEVSSDEGGSSESSEEGSDGDDGGEGDGGDGDGSDDGSKGNDKGDGGSGNDKGGSGSGKASG

SEQ ID NO: 47544 - protein, 1231 aa, Zea mays
  Coding DNA Sequence Number=SeqID_5765
  Gene Ontology: Mol. function=phosphatidylinositol phosphate kinase activity; Cellular component=mitochondrion; Biological process =phosphatidylinositol metabolic process
  Homolog annotation: Hit_ID=Q94LF4; Match level="QueryCoverage=77%, HitCoverage=71%, E-value=1e-138, Identity=68%"; Hit description =Putative phosphoinositide kinase
  Pfam annotation: Domain name=PIP5K; Domain location=781-927; Score =3.2; E_value=5.6e-11; Accession=PF01504.9; Description =Phosphatidylinositol-4-phosphate 5-Kinase
ALEYHRVTNQLSSIDTLLQQETDHLKMAVAKIVAQRPNLLLVENSVSRYAQDLLLEKNISLVLNIKQPLLQRIARCTGAQIVPSIDLLPSQKLGYCELFHVDKYDEQSVSSVNVSKKMVKTMMFFEGCPKPLGCTVLLKGGSMDELKKIKHVVQYGIFAAYHLALETSFLADEGATLPELPLLSPLTVALPDKRSTADSSISAVPGFTINVSISQQTDSFDHIGTDYIMSTQPGENAVAEAPVSSECFSSQNTYSHSLGPWCANNSNFNNGTGDGDGLANVTATPNSVSISSLSTSGALTNHTSRYSSVEKNSMHFGDYHDGSMRLHGKTVTIDSTSTASHYHQSTVKASTNINVNESLEGPYALANVKTINENNSIVVQPVSTAAVQYQETSQGDDSTSNKDEVLLRIKYYGNFDKPLGRFLRDYLFDQKGQPDILEINRLRRQLLFHSYLWDKRLESIYGGNHTGVDVGTVNSNHVHQMATGELDSLQRDIKAPLYSSVSVNGESIPLEPDLVARRTLSEGQFPSVLDVTNALEAKWTGKDDPVSSKVTMPESTASSEDSEEHMGDNTPSYASILLSKLGDSAADHSNWIEMPFLLFYRSLNKQWNRSNRFDALNEYSPEYVPFLREVERHIGPKFFFPIGISDTVVGVYDDEPTSIISYALASHEYHLQMSDELEREMTDTSLPLCDSRSVSLTELDECTSELLRSVVSTEDIILSMSGRKNPLASDSLVPRKVSHIKVNFGDEGPLGQVKYTVICYYAKQFDALRRLCCPSERDFVRSLSRCKKWGAQGGKSNVFFAKTMDDRFIIKQVTKTELESFMKFAPDYFKYVSESICTGSPTCIAKILGIYQSIDVMDYSLLVGVDEKRHELVMGIIDFIRQYTWDKHLETWVKASGILGGPKNVSPTVISPKQYKKRFRKAMSAYFLVVPDQWSPPVVIPSKQAESGQDRDEQVVLTELLGGHPYSSLGTGKLLCFCPAGRSKAQRWSDDGDSSFGVSPEPLQVQASYKDVLISSGELVHPASSREEEGSWVKVLGRRDRRRRSQSSPLVWLLWTCVGGASTASRHLIGLLSVGGRCGAPSSKWQRRWKPLEAVWRIMQGVPGEALLMADEGVLAVGRGRGGDGALVVMVIVMPPMPPLPLSHSDTTVDLEGSGGATEVLIALSLSFNLDADVIDLRMVAPNSSIALFPNVGMDDQVLSGGQSLYVPPIRLIIKRWSRQAMVSGGGAAGY

SEQ ID NO: 47545 - protein, 98 aa, Zea mays
  Coding DNA Sequence Number=SeqID_5766
  Homolog annotation: Hit_ID=P51568; Match level="QueryCoverage=45%, HitCoverage=11%, E-value=5e-12, Identity=68%"; Hit description =Serine/threonine-protein kinase AFC3
MREGLECWDRETREYVAIKVVRSTRKYRDAAIIEIDVLNRLAKNEKYRSLSFVLYPSSDCFFCSTTNMLNMTGRGLEVKPGPTVKCVLGHDFILHFLV

SEQ ID NO: 47546 - protein, 88 aa, Zea mays
  Coding DNA Sequence Number=SeqID_5767
MGSGAARHATRDSRVGTTPSYRSRGYPYFREPAPKQYDSWVQAPVSATGSLFLVEMKGRTTAGDGLLLVAVRLLRTQRPMPKEYDSWA

SEQ ID NO: 47547 - protein, 297 aa, Zea mays
  Coding DNA Sequence Number=SeqID_5768
  Gene Ontology: Mol. function=kinase activity; Cellular component =nucleus; Biological process=fatty acid biosynthetic process
  Homolog annotation: Hit_ID=Q18PR9; Match level="QueryCoverage=73%, HitCoverage=74%, E-value=1e-106, Identity=84%"; Hit description=Beta subunit 1 of SnRK1
  Pfam annotation: Domain name=AMPKBI; Domain location=209-295; Score =113.8; E_value=5e-31; Accession=PF04739.5; Description=5'-AMP -activated protein kinase, beta subunit, complex-interacting region
MAPPQTRPWHPAAEGRSRSTLVVGSHISWQRRVLASCSSAQWRWMPRKEEAAIYGARELQPKLSQQKIPEFSCKDTSQTPVPPLQRAADVTPVFNQILMNDQEEEYDGPPQKEIPSLIVWTLGGKNVYVEGSWDNWKSRKAMQKSGKDHSLLLVLPSGVYRYRFVVDGERRCLPDLPCETDAMGNAVNLLDVNDFVPESVESVVEFEPPLSPDSSYSFQAPEDKDFAKEPPALPAQLHLGVLNSQNSEESCARPQHIVLNHLFIEKGWGAHPLVALGLTHRFESKYVTLVLYKPIER

SEQ ID NO: 47548 - protein, 98 aa, Zea mays
  Coding DNA Sequence Number=SeqID_5769
  Subcellular localization annotation: CTP_CleavageSite=42; ConfidenceScore=5.22e-01
MDGRPRSLPHSRPTSKARRTSMETALDAIGRSPPASRPDPRRSAMLPGAAAPQSIQAQALRHRTMATNVNLHSSSRAPAIYQQDPLGTADDYSEFPNE

SEQ ID NO: 47549 - protein, 301 aa, Zea mays
  Coding DNA Sequence Number=SeqID_5770
MGLEESAPSSPAATLLRPVVPSRPPPPPPAAAPETAAEKRRKLLGALEKCDEDLKTLRRIIAAVRAAEMRAASASEVCPAAAKTTAHAGKGATGTFARDNEHVEQSPSPSPSPPTQQQQHPSPDSVLDAISSPRFPCRKRPSPCTDLDVGGKGGACGAVGSKIVKPSRTLVFSGDYCKIKPGGELPLHAVHYYPVPLAVGMPRSAGAESWRHHRRRWEQEAAAAGRVISRAMAESVGEAIMWVRQQQAGAGDDERGRVAAALERAIVQDLVGDLVAEMMQQQQAQAGHGAGGGGCRKRLCF

SEQ ID NO: 47550 - protein, 195 aa, Zea mays
  Coding DNA Sequence Number=SeqID_5771
MAGGGARGLSQLERRCSGAIVGLRGASQERRRRTAVVISCCTVGFVGEAAGEAEGCWAAAFFLGDDEDGGGGGAWEAPRCWRVLGGEALPVVAPVPSGSSEARRVGACRGIIIGGARGGRNIMTASPLSLRPSPRRWQGQLRVSSRASFARGGDKSCGLVVVGWGSIRVELHTPLRALRWPLAACLPVLLLLPSG

SEQ ID NO: 47551 - protein, 92 aa, Zea mays
  Coding DNA Sequence Number=SeqID_5772
MKTFLAGTSNPTGKITHAGMGMDKILYLRHYTGNSTETTDQAKDGGKKSFKVPSAREKIKETRNPKPGVKKKTCKVKVDRVKMSYDAPRITT

SEQ ID NO: 47552 - protein, 139 aa, Zea mays
  Coding DNA Sequence Number=SeqID_5773
  Subcellular localization annotation: CTP_CleavageSite=13; ConfidenceScore=5.18e-01
MPSYNFAKRLNFTLNMIKGAWQENNTIYPIPTTVPTTRVRLTTVSHGLSRVQPRAQQGSPPRPTPGLDLSLGLGRRSSPRPTPGLGLSLGLGRRSPPRPTPDLGLSLGLGRRSPPHPTSASASGEVTASPDLGLGPTTL

SEQ ID NO: 47553 - protein, 45 aa, Zea mays
  Coding DNA Sequence Number=SeqID_5774
MQPGEVEEEGHDLERLGRLRVAERMRARETAAATKNQRKGENDDA

SEQ ID NO: 47554 - protein, 340 aa, Zea mays
  Coding DNA Sequence Number=SeqID_5775
  Homolog annotation: Hit_ID=Q6QP54; Match level="QueryCoverage=21%, HitCoverage=26%, E-value=3e-11, Identity=52%"; Hit description =Putative kinase
MALPVDMAGLRPRLGDVEAPPKPRSSLSSMAEAESEPLGRARRRSSVEARAVSEPWGRAKRSSSSSGAEPEPWGRAKRSSSSSGPSPSPGSGGAEFAVFRVLARVRALGRAERSSPSSGAWLPVSITPSSGAAVGVAQAALSFCQTGQWSGEVTALYADGGYQLRIRSLEGSKLPLPLPGFVRLSAGNDLCVLLGFSLAERGGRLLRPRGAPGRIRHRAGQESRHRAGQGSCHRAGQSCNRAGQGRHRSGHDAGAALLAPADHEVWHDCLPVIAETDACFSPDAMATNSSPMSATMDAPNLETPTSDSKLHKSGTVKSCLEFSEARKWTDAGCSWLFGGY

SEQ ID NO: 47555 - protein, 57 aa, Zea mays
  Coding DNA Sequence Number=SeqID_5776
GVAPGHAGDRAAVPRHGAAPGGRAGGVTPAKDGRGHVKWVKMEGASYSMTKMEGALG

SEQ ID NO: 47556 - protein, 140 aa, Zea mays
  Coding DNA Sequence Number=SeqID_5777
  Homolog annotation: Hit_ID=Q18PR9; Match level="QueryCoverage=40%, HitCoverage=18%, E-value=5e-08, Identity=57%"; Hit description=Beta subunit 1 of SnRK1
MAVAIRPRAPAPVPVPVLLLFFPLPSGTAPGPPWWHLRNFAPLRRQGVGPWGWQEEEVWATPAAARRTLQLLTATGADVEDGGGDSSVRSSERAFPPYGSVGANHVRRACSVGVVGGGGGAGSPPGSPGHSLSPRMFVPQ

SEQ ID NO: 47557 - protein, 284 aa, Zea mays
  Coding DNA Sequence Number=SeqID_5778
  Subcellular localization annotation: CTP_CleavageSite=22; ConfidenceScore=5.18e-01
MPAPATLEPSTTPVAPTASTTLASTTPALASAPPIPPPRFRERDETEYVEDWVRVFYATIWIDPDHQWMRFRFEREDITLHTTQIQELFGFPKSTTRLHSLCYGTSDPPRRPHGRVAPDTAHVAALFRPLFLDGSRGSPADFTPAAKFLYELMRRTPQPRMGYREATTHIQLWLLGASATLDASRLQFGFYHLAPKDIAMASVDPLAPNFRDEDDAIHRFEDQYAATETSLDDDDLGIPPPPHVPPHSHDHEVGGSSAAPPAIDPALAAILQSLTQQQAHLAVE

SEQ ID NO: 47558 - protein, 104 aa, Zea mays
  Coding DNA Sequence Number=SeqID_5779
  Homolog annotation: Hit_ID=Q6H6P5; Match level="QueryCoverage=56%, HitCoverage=30%, E-value=6e-07, Identity=40%"; Hit description =Replication protein-like
MKITLWADQAIMFTLHDVYDANTNKPILVLFVECLPKFYKGVYLSGGPACRWYFNPAIPEAEPYLTSANKSNINSPEKDDGDKDTAQDVIVGTCSPGRVNPTGE

SEQ ID NO: 47559 - protein, 171 aa, Zea mays
  Coding DNA Sequence Number=SeqID_5780
MKINSDHAAVYRRRPDRLHCLSPSPKFVAERSPTPELQGFLAASTTHIFLHRRDGFRAFSKICGRALTDARATVLPGRLSHPHPPPPSVHDCPPDVDSILAIEVEPLDDKKKESYWCDLVETEVRRDRAKNSLDKLISIMEVAAKLAEGRFEVVLLPEFADEDHLLYLAEW

SEQ ID NO: 47560 - protein, 85 aa, Zea mays
  Coding DNA Sequence Number=SeqID_5781
MDELFSKLKSTEIDHQIRSKIKNPEEQVESLEDDELGLMASRFTRFHNNRQNQRRVEASPHNHHSGRRKGKREHTSSKHKSSGRL

SEQ ID NO: 47561 - protein, 90 aa, Zea mays
  Coding DNA Sequence Number=SeqID_5782
MKGLNKDKEQKVHALLLCSMDLVDYMRHRDDVVEVGPHVMDPKTKSQRIVEKHFCCIEGTNDIGGAKVMALVSSEHDYMRDPIGTFVFGG

SEQ ID NO: 47562 - protein, 97 aa, Zea mays
  Coding DNA Sequence Number=SeqID_5783
MARGTGWFRCVHLLVSWFVRVGEAECPVGVGKKSRVPNLMWLPEVNADELAIGVKDVAWHANGPPTWRANCRGFWNRRTIRFVFDMGVSVDSLRMVS

SEQ ID NO: 47563 - protein, 60 aa, Zea mays
  Coding DNA Sequence Number=SeqID_5784
MEPGGGTAVGAVESLLTSSCFRHGFKPHLLADMTCLGQSCGRLASGPYRTAVWPSMRGYF

SEQ ID NO: 47564 - protein, 278 aa, Zea mays
  Coding DNA Sequence Number=SeqID_5785
  Gene Ontology: Mol. function=binding; Cellular component=thylakoid; Biological process=photosynthesis
  Homolog annotation: Hit_ID=Q2QML3; Match level="QueryCoverage=99%, HitCoverage=96%, E-value=2e-49, Identity=48%"; Hit description=TPR Domain containing protein, expressed
  Pfam annotation: Domain name=Ank; Domain location=103-135; Score =29.1; E_value=1.6e-05; Accession=PF00023.20; Description=Ankyrin repeat
  Pfam annotation: Domain name=Ank; Domain location=138-167; Score =19.9; E_value=0.0093; Accession=PF00023.20; Description=Ankyrin repeat
  Pfam annotation: Domain name=Ank; Domain location=36-69; Score=20.9; E_value=0.0046; Accession=PF00023.20; Description=Ankyrin repeat
  Pfam annotation: Domain name=Ank; Domain location=70-102; Score=21.7; E_value=0.0026; Accession=PF00023.20; Description=Ankyrin repeat
  Pfam annotation: Domain name=TPR_1; Domain location=237-270; Score =36.8; E_value=7.6e-08; Accession=PF00515.18; Description =Tetratricopeptide repeat
  Pfam annotation: Domain name=TPR_2; Domain location=203-236; Score =9.3; E_value=2.7; Accession=PF07719.7; Description=Tetratricopeptide repeat
  Pfam annotation: Domain name=TPR_2; Domain location=237-270; Score =35.2; E_value=2.3e-07; Accession=PF07719.7; Description =Tetratricopeptide repeat
  Pfam module annotation: Pfam domain module=Ank::Ank::Ank::Ank::TPR _1::TPR_2::TPR_2; Domain location=103-135::138-167::36-69::70 -102::237-270::203-236::237-270
MPALSDVALQAAIAGNLRLLKLVASKMNLREAKDAAGRNALHLAAEMGRLEVCRFLVEESGFEVNFACAEGGSPVHCAAAGGSESVLGYLLDHGGDPVMPDSMGSTPLHDAAEEGHCAAVRMLLSKGVDVDPHGCRGTPLHLACSNDRDQVVRILLEHGADDAAVVEKKIADAKSQGKEAFARGEYPAAVYFYTMVLENDLDATAFANRSLCWLRLREGAKALLDAQQCKMIRPRWSKAWYREGAALSLLKDYQGAVNAFTEALKLDPASLEIKKALR

SEQ ID NO: 47565 - protein, 145 aa, Zea mays
  Coding DNA Sequence Number=SeqID_5786
  Homolog annotation: Hit_ID=UPI00004BCBCB; Match level="QueryCoverage =68%, HitCoverage=91%, E-value=1e-09, Identity=33%"; Hit description =UPI00004BCBCB related cluster
  Subcellular localization annotation: CTP_CleavageSite=46; ConfidenceScore=5.21e-01
MATPYEAPPPLALRGCPHSPALGPWGRHRSPPRCPATARPLGWGVAATMLPNLGTATTTSDRETATTARLNRGDTSAMPSDRGAATTALPNLGTVVATTDRETAAAACVNRGATAVVPPDQGATTTVPGVHRRARSWATAVVARA

SEQ ID NO: 47566 - protein, 49 aa, Zea mays
  Coding DNA Sequence Number=SeqID_5787
KQINKIGKEYVVQVDIESLTMESVGDLRHPKVGITADQNNTKVGTAPKV

SEQ ID NO: 47567 - protein, 36 aa, Zea mays
  Coding DNA Sequence Number=SeqID_5788
MPLPSSDAPGSPLGSLSCRQNFCRLVSRLGQMCDVF

SEQ ID NO: 47568 - protein, 183 aa, Zea mays
  Coding DNA Sequence Number=SeqID_5789
MPICRYPRYGIPLLLCPGSGRVHSDTDLRISPPTFGAQGREQALDPGPLIDMTSRSPSSKHDQGDLADIWRKVKKRRLKRLTIDLKQRLNRRAAAIIRRATEALPMAFEVAFFGTPPGSTALEVATIGLQPHTVAFEVAVIGQQPSMGEVNPTSWPLGSMVHGAVTPNPGSDFFYLPMGFRKP

SEQ ID NO: 47569 - protein, 550 aa, Zea mays
  Coding DNA Sequence Number=SeqID_5790
  Gene Ontology: Mol. function=transcription factor activity; Cellular component=nucleus; Biological process=regulation of transcription, DNA-dependent
  Homolog annotation: Hit_ID=Q10EE7; Match level="QueryCoverage=75%, HitCoverage=47%, E-value=3e-84, Identity=48%"; Hit description=AP2 domain containing protein, expressed
  Pfam annotation: Domain name=AP2; Domain location=158-248; Score =23.9; E_value=1.1e-06; Accession=PF00847.10; Description=AP2 domain
  Pfam annotation: Domain name=AP2; Domain location=277-379; Score =75.8; E_value=1.3e-19; Accession=PF00847.10; Description=AP2 domain
  Pfam module annotation: Pfam domain module=AP2::AP2; Domain location =158-248::277-379
MALSLDSSSFYYGCGHGHGHDQGGYLQPMQCAVMPGSGGHDVYGGGHAQMVDEQSAAAMAASWFSARGNGGYDVDGAGAGAIVPLQGHPHPLALSMSSGTGSQSSSVTMQVGSAHADAVTEYIAMDGSKKRGAGNGASAGQKQPTIHRKTIDTFGQRTSQYRGVTRYPPNSRPSVRRRCRRRARPAASGARAIESLTGRVVSHRAKAGIGGRGGGYDVEEKAARAYDLAALKYWGTSTHVNFPVEDYREELEEMKNMTRQEYVAHLRRKSSGFSRGASIYRGVTRHHQHGRWQARIGRVSGNKDLYLGTFSMCSSFTFSRFQVDRYQCWRSLRCKLNSYLSRIMVTAGTQEEAAEAYDVAAIKFRGLSAVTNFDITRYDVDKIMESSTLLPGEQVRRRKEGADAAVSEAAAALVQAGNCMTDTWKIQAALPAAARADERGAGQQQRQDLLSSEAFSLLHDIVSVDAAAGTGTGGMSNASSSLAPSVSNSREQSPDRGGASLAMLFAKPAAAPKLACPLPLGSWVSPSAVSARPPGVSIAHLPVFAAWTDA

SEQ ID NO: 47570 - protein, 804 aa, Zea mays
  Coding DNA Sequence Number=SeqID_5791
  Gene Ontology: Mol. function=hydrogen ion transporting ATP synthase activity, rotational mechanism; Cellular component=proton -transporting two-sector ATPase complex; Biological process=ATP synthesis coupled proton transport
  Homolog annotation: Hit_ID=Q9LIW7; Match level="QueryCoverage=97%, HitCoverage=84%, E-value=0.0, Identity=60%"; Hit description=Similar to an Arabidopsis thialiana chromosome BAC genomic sequence
KQLRREAELQAQLESTHEDLKKAKDQLAFILGERDRLVGELNEAKRVADETHEKLQDALMAKRWAEEATEIEKFRADELEQAGIDEAQRREEEWQREIECVHGQHAADLETLVNTTEELERLRRDLSMVNDAKKAALGHADDAMKIAEANAEKVEILSNEAARLKGLLDSSAASEESKSREAELLVKNLRSEVSSLKGKLEKAIVLEERLAEAEKIIEELKSEIADAQKVKADICLQLEEWKEKSGSLEMKLVGVTLSEKLKSDSLASTTEELDKVKSILQDRELEIDVLKGKITAMEIEVARLLADVTDSNEHLDASQQEVFGLQTTIDVLRNKLDAAELAASEALDNERTAITKIEGLAEEKIKLISELDDARDREEREKMAIEDLTAALDKASCEAQEAHDRFQKKEDDYEHALAQIGDLKMSAKTMEECYSVMLDEAKHDITGLRETVEKLEAEVSKCREECECKELDLITASKQSEQEIAALKEEAQHLSASLQVAEHELEAVNEERERFQEKLACTESAVAEANHAVQEAKAEKERLQEKLAHTESEVAVANMAAHESKIEFDRLQEKLTYTELVVAEANKAVQEAKAESSHLKERLLDKENALQSITQENDEFRMREADAMKKIDELSALLAEAMTKKHPEEEEKLVVVDEAHNSMRDEVICSVAENGDTEETDDKKPKLEVEAVDMKSNGQSKHEEKDDSKVEQEELKTELSLQESKKVSFDKDTWTKNKKQETESPNDELGSKKVSSSTENASRAIIPEDTATKVSASPTKPQHQKKNKPLLKKFGSLLKKKNSK

SEQ ID NO: 47571 - protein, 223 aa, Zea mays
  Coding DNA Sequence Number=SeqID_5792
  Subcellular localization annotation: CTP_CleavageSite=58; ConfidenceScore=5.03e-01
MVSSASGDVSASPELSFGYLPHCFYPYRSPITTTTVWVTPPLGARMYDQPLSLDLGSPAMLVIPTAGTSVLGTVIRFGSLKFMSLGIKYDMVLLPPVPLERSSTRHRPSYRKRQRQNNHNHATHGTLFPDDTLRMVNGIDSLSRDLANISIVPGAPTAAPASTFLVPPPPAWEAPSPHAVERAIPATQNLPPAGGESSVFSPIPFQLSFDTSSVIRMYAGLPF

SEQ ID NO: 47572 - protein, 112 aa, Zea mays
  Coding DNA Sequence Number=SeqID_5793
MACQAMVALGLACACAWRGQCSMSRWGGAMPAPRPCIPRALGRIVAVGGQGHTCPRLGRVAQRGCCAWPGPASLPTPWLGHPTPACRGDVGATHPCLAVTVGAHNVVTAMVL

SEQ ID NO: 47573 - protein, 162 aa, Zea mays
  Coding DNA Sequence Number=SeqID_5794
  Subcellular localization annotation: CTP_CleavageSite=76; ConfidenceScore=5.53e-01
MMIPKEQSPSEMRIKPFDRASTVPRSLSPSLFVRRLNAKLPSPTKCHNVVARHPPLRNFATLSPHPPSRVPTEAVLAELSAALRQLGEGCRGSGERGALTELENQRVTEDADAIDVEVAGVGQRVRESVRELEVARASEVTAMARLRAAVEAASPRRWPGLP

SEQ ID NO: 47574 - protein, 431 aa, Zea mays
  Coding DNA Sequence Number=SeqID_5795
  Gene Ontology: Cellular component=nucleus
  Homolog annotation: Hit_ID=Q8VWL4; Match level="QueryCoverage=78%, HitCoverage=88%, E-value=5e-38, Identity=40%"; Hit description =Putative proline and glutamic acid rich nuclear protein
METPLSSRRITRSLAAASAQKSAAAGPDSAALFSRAKNAAAGETQPRAALHDITNDSPIVGLAAGALHATDTTPASTAAKTRRRAPRRTPGSGEALLRGQVKALLHKVEEEQGCAAAAIVRPARIQALLGVSRSPAQLLAPTPANTPQIEPVPTPREGLLLLDGATVVPCVLDEEELLIPKLQVIAASLPPPHQAEEKLGDCQLNRALVFDDSPEKCEESSGSAVSSTFSLQESSTGSYVDKSSSPEDDSSSAWSIQVHASSEKGDEEELGVEELAAEYTDEEEEEEEEDWDEDSDDDCYDDLCEEMSRMTVLEEEEKKKTVLPQFEGKHTRFIYNSDDEIERVEEADAAEATAELRALMLRGLLDEDAEPLSKCCGEGMVKESVKDVGEDKLHKSRAGAARGKARNALEDVVVTVALKNSIDEGVIRRGR

SEQ ID NO: 47575 - protein, 96 aa, Zea mays
  Coding DNA Sequence Number=SeqID_5796
MGSHDPRADWESRLVGLPLNLGVTGVGLLTQGEEPGQGIVRLSSTSCLTCHHNAEDVGCPIERADELGHGAGERRRGRGPGPQGSSPSRCFHHTSL

SEQ ID NO: 47576 - protein, 643 aa, Zea mays
  Coding DNA Sequence Number=SeqID_5797
  Gene Ontology: Mol. function=catalytic activity; Cellular component =intracellular; Biological process=metabolic process
  Homolog annotation: Hit_ID=Q8LI18; Match level="QueryCoverage=97%, HitCoverage=97%, E-value=0.0, Identity=72%"; Hit description =Selenium-binding protein-like
  Pfam annotation: Domain name=PPR; Domain location=136-170; Score =41.6; E_value=2.7e-09; Accession=PF01535.11; Description=PPR repeat
  Pfam annotation: Domain name=PPR; Domain location=14-48; Score=2.7; E_ value=3.6; Accession=PF01535.11; Description=PPR repeat
  Pfam annotation: Domain name=PPR; Domain location=237-271; Score =39.2; E_value=1.4e-08; Accession=PF01535.11; Description=PPR repeat
  Pfam annotation: Domain name=PPR; Domain location=338-372; Score =36.1; E_value=1.2e-07; Accession=PF01535.11; Description=PPR repeat
  Pfam annotation: Domain name=PPR; Domain location=373-407; Score =15.1; E_value=0.12; Accession=PF01535.11; Description=PPR repeat
  Pfam annotation: Domain name=PPR; Domain location=409-442; Score=4.6; E_value=2.1; Accession=PF01535.11; Description=PPR repeat
  Pfam annotation: Domain name=PPR; Domain location=475-509; Score =13.0; E_value=0.22; Accession=PF01535.11; Description=PPR repeat
  Pfam module annotation: Pfam domain module=PPR::PPR::PPR::PPR::PPR::PP R::PPR; Domain location=136-170::14-48::237-271::338-372::373 -407::409-442::475-509
  Subcellular localization annotation: CTP_CleavageSite=40; ConfidenceScore=5.25e-01
MSVSEAAYPPPPPSSWAQQIRAAAAEGHFCDAVSLFLRMRASAAPRSSVPASLPAALKSCAALGLSALGASLHALAIRSGAFADRFTANALLNLYCKVPCSYLDSTGVAIVDVPGSSTAFESVRKVFDEMIERDVVSWNTLVLGCAEEGRHHEALGFVRKMCREGFRPDSFTLSTVLPIFAECADVKRGLEVHGFAFRNGFDSDVFVGSSLIDMYANCTRTDYSVKVFDNLPVRDHILWNSLLAGCAQNGSVEEALGIFRRMLQAGVRPVPVTFSSLIPVCGNLASLRFGKQLHAYVICGGFEDNVFISSSLIDMYCKCGEISIAHCIFDKMSSPDVVSWTAMIMGYALHGPAREALVLFERMELGNAKPNHITFLAVLTACSHAGLVDKGWKYFKSMSNHYGIVPTLEHFAALADTLGRAGELDEAYNFISKMQIKPTASVWSTLLRACRVHKNTMLAEEVAKKIMELEPRSIGSHVVLSNMYSASGRWNEAAHLRESMRKKGMKKDPACSWIEVKSKLHVFVAHDRSHPWYDRIIDALNAFSEQMAREGHVPNTEDVFQDIEEEHKSYVLCGHSEKLAIVFGIISTPAGTKIRVMKNLRVCIDCHTVTKFISKLADREIVVRDANRFHHFKDGNCSCGDFW

SEQ ID NO: 47577 - protein, 410 aa, Zea mays
  Coding DNA Sequence Number=SeqID_5798
  Gene Ontology: Mol. function=nucleic acid binding; Cellular component= intracellular; Biological process=DNA integration
  Homolog annotation: Hit_ID=Q8H6I0; Match level="QueryCoverage=98%, HitCoverage=23%, E-value=1e-140, Identity=65%"; Hit description =Putative gag-pol polyprotein
  Pfam annotation: Domain name=zf-CCHC; Domain location=26-43; Score =26.9; E_value=3.7e-05; Accession=PF00098.13; Description=Zinc knuckle
MALIIKSFHQILKQRRGKDYKSRSKKVCYKCGKPDHFIAKCPLSSDSDRDNDKKEKRRENKRYYKKKGGDAHVCREWDYDESSTDSSSDEDAANIAVTKGLLFPNVDHKCLMAKDDKKKKVKSKSSTKYATSSDEASSSDDEDDLLTLFADLNMQQKEKLNELISAIHEKDELLDTQEDFLIKENKKHVKVKNAYALEVEKCEKLSSELSTCHDVISNLRNENAKLIAKVEKSNVCDDSIDKLRNDNASSIAKIEKLNASLASLRNENEKLIAKAKELDVCNTSISNLRDENAILHAKIVELNSCKPSTSTMEHVTICTRCRDVNIDAIHDHIAIIKQQNDHIAKLDAKIAEHELENEKFKFARSMLYSGRRPGIKDGIGFQQGGNVKLNAPPKRLSNFVKGKARSHASG

SEQ ID NO: 47578 - protein, 90 aa, Zea mays
  Coding DNA Sequence Number=SeqID_5799
MSSAPPHVRSCSKDSCTSPASLGGDHHRSMDLGEWRSRIYSTGVDEFRLQRFNNSRLRVWFSNTIVKSCEHFFEPHSLPMKHFPVTRTEL

SEQ ID NO: 47579 - protein, 402 aa, Zea mays
  Coding DNA Sequence Number=SeqID_5800
  Gene Ontology: Mol. function=small conjugating protein ligase activity; Biological process=protein modification process
  Homolog annotation: Hit_ID=O24560; Match level="QueryCoverage=39%, HitCoverage=95%, E-value=5e-75, Identity=85%"; Hit description =Ubiquitin carrier protein
  Pfam annotation: Domain name=UQ_con; Domain location=11-159; Score =262.6; E_value=8.1e-76; Accession=PF00179.16; Description=Ubiquitin -conjugating enzyme
MAATTSQASLLLQKQLRDLAKHPVDGFSAGLVDDSNVFEWQVTIIGPPDTLYDGGYFNAIMSFPENYPNSPPSVRFTSEMWHPNDGLVCISILHPPGEDPSGYELASERWTPVHTVESIVLSIISMLSSPNDESAANIEAAKEWRDKREDFKKRVRRIRLFIGAPEMHWDVVYRVAWALLMFDNPEVPPVVNLPRPASGVIGNSASPDPRARTRAQPRKTANSAPPDPGLGLGFSPGRRRTPLRPTQGSDSGSAPEDGELRSARPRARARAQPRKMANSAPPDPGLGLGLSPGRRRTPPRPTPGLGHGLNPRRRRTPLRPTQGSDLGSAPEDDELRSARPRARTWAQPQETTDSASPDPRARTQPWPQPTVSASPDPGARTRPRPRKTDSTSTSEEPPHRPT

SEQ ID NO: 47580 - protein, 103 aa, Zea mays
  Coding DNA Sequence Number=SeqID_5801
MESSLPAQRDPPAGTLEASRLHFGSYRPTLEDPVSVPDPVTDIQAKDVTFHQFETHGTAVPDDDDDDFWIPPPPLPPMPPRSHDHEVGSSSAAPAALLPWTLL

SEQ ID NO: 47581 - protein, 155 aa, Zea mays
  Coding DNA Sequence Number=SeqID_5802
  Subcellular localization annotation: CTP_CleavageSite=73; ConfidenceScore=5.55e-01
MGAIQVNAPSTQGTRSRLAQAQPRAGTVDPDGFTPRQRASSSNGRTFDSPEAPARENSAACLAPTAVPPARVRLTAAESTSGTIGSSASPDPRARPLPRPQKTVFASPDPRARPPPRPRKTVSASPDPRARPQPRPRQTVSASPDPRARPLPRPR

SEQ ID NO: 47582 - protein, 62 aa, Zea mays
  Coding DNA Sequence Number=SeqID_5803
MAADWMRRLGVTPARLERGKKKQCGAARWVRLEWGPHMAVYQGTEAAAWAAQSYGIGPRLQP

SEQ ID NO: 47583 - protein, 107 aa, Zea mays
  Coding DNA Sequence Number=SeqID_5804
MGGKGGSGGGGGKGGGGGGKSGGGGGGKGGGGGKGGGGVGGKTGGGKSAGGGGGGYGGAGKSGSGGSGGDGMMKAPGGGGEYISRSVFEASPQEFFHGLHQGGGNNK

SEQ ID NO: 47584 - protein, 180 aa, Zea mays
  Coding DNA Sequence Number=SeqID_5805
MAETRVFSGDDCATRESAAKPARPRRTSVPKDEINGGSPPSHCSRVPVLHLQTAPAPRRPTLQRDCTTVVPTGGGVPWRDSKIDDHRNTLDIDSPSAANRIVPREDAPRVPTAVSTATWPPLHRLDPHRKWAHCRLAAQFRPGVRHPTPLLGGTSGGAVLILADVVLSAFRDRGVPQADE

SEQ ID NO: 47585 - protein, 75 aa, Zea mays
  Coding DNA Sequence Number=SeqID_5806
MATRPEASVVSMGGGVHEDGGRDPRAGRQLGGGFVKKNDLAIDDYFDLIMANIDEVTDKRMVALREIEKDNILVD

SEQ ID NO: 47586 - protein, 140 aa, Zea mays
  Coding DNA Sequence Number=SeqID_5807
MTDTVDSILCVYTKVLKPLVGLRNTEQQQQYRKESAEVGQMLLLFLPYDTHCFVNNPNLCGPDTTKPCPDAPPFSPPPPYNPTTPMQSPGSSSSTTGAIAGGVVAGAALLFAVPAISFAYWRHRKPQEHFFNVYGFKVSL

SEQ ID NO: 47587 - protein, 81 aa, Zea mays
  Coding DNA Sequence Number=SeqID_5808
  Gene Ontology: Mol. function=protein kinase activity; Biological process=protein amino acid phosphorylation
  Homolog annotation: Hit_ID=Q9M7J5; Match level="QueryCoverage=84%, HitCoverage=16%, E-value=7e-07, Identity=48%"; Hit description =Protein serine/threonine kinase
MRDRRKLRVALFNSAKENTLRLDGRSVKLGYCVLLIDSALMSETFKEVKSEPERTSRSVDMQKVEINWRDYQYFTCERELK

SEQ ID NO: 47588 - protein, 166 aa, Zea mays
  Coding DNA Sequence Number=SeqID_5809
MALPTRSVVPLSAIRALIPFLRAAPFHPWLASRNPPTYGAASQSGIHPQNHYPLCGDGRESKRVLPPSILGVARIAWPSFRAPNPSMQGTRASPFHPRRCANCRLRIAWSSFRPSSLPASDGRAPRSASPPCKYLICCAQSLADFFLMLPRVLSSLTGFPWRLFQG

SEQ ID NO: 47589 - protein, 345 aa, Zea mays
  Coding DNA Sequence Number=SeqID_5810
  Gene Ontology: Mol. function=binding; Cellular component =mitochondrion; Biological process=embryonic development ending in seed dormancy
  Homolog annotation: Hit_ID=Q1S6U5; Match level="QueryCoverage=96%, HitCoverage=35%, E-value=1e-103, Identity=57%"; Hit description =Pentatricopeptide repeat
  Pfam annotation: Domain name=PPR; Domain location=100-134; Score =16.8; E_value=0.077; Accession=PF01535.11; Description=PPR repeat
  Pfam annotation: Domain name=PPR; Domain location=135-169; Score =13.8; E_value=0.17; Accession=PF01535.11; Description=PPR repeat
  Pfam annotation: Domain name=PPR; Domain location=206-239; Score=8.9; E_value=0.65; Accession=PF01535.11; Description=PPR repeat
  Pfam annotation: Domain name=PPR; Domain location=240-274; Score=0.5; E_value=6.5; Accession=PF01535.11; Description=PPR repeat
  Pfam annotation: Domain name=PPR; Domain location=287-321; Score =11.4; E_value=0.33; Accession=PF01535.11; Description=PPR repeat
  Pfam annotation: Domain name=PPR; Domain location=65-99; Score=21.0; E_value=0.0043; Accession=PF01535.11; Description=PPR repeat
  Pfam module annotation: Pfam domain module=PPR::PPR::PPR::PPR::PPR::PP R; Domain location=100-134::135-169::206-239::240-274::287-321::65-99
MEQKEGDAQIYPDMPAYHCIAVTLGRAGLLKELIKIIEYMRQKPSKLVMKMRRKDWDPSLEPDVLVYNSVLNACVLSQQWKGVFWVFQQMRIGGLPPTGATYGLAMEVMLKAKKYDFVQKFYEKMQKNGVPPRAITYKVLVRSFWEQDKINEAVEAVNDMEQRGVVGAASVYYELACCLCNNGRWRDAMLQVEKLKQLPLTKPLEYAFTGMILASFNGGYIYDCISIFELMKDHCMPNIGTVNVMLKVYGHCDMFGKAKDLFETTKACFLNSQTYIHEHSSFKADTYTYNSMLEASASAQQWEYFEYVYREMALSHHCLDQSKYSWLLIKACRAGKVRVRALPQK

SEQ ID NO: 47590 - protein, 148 aa, Zea mays
  Coding DNA Sequence Number=SeqID_5811
MAGWIPLHLVSGVASTGSTREAERGERGDGGGDDRSSCHGEDVNTQMEAVVVGRDVDGGWRGIQRRGQKRDDFGASGVGLDGGGGGGGVCAWPESSEESSGASFTQANREAGSGVAEESPCASSAPANVEVGDGVCVRAQTTDIKWRV

SEQ ID NO: 47591 - protein, 859 aa, Zea mays
  Coding DNA Sequence Number=SeqID_5812
  Homolog annotation: Hit_ID=Q10M67; Match level="QueryCoverage=99%, HitCoverage=99%, E-value=0.0, Identity=63%"; Hit description =Expressed protein
  Pfam annotation: Domain name=DUF630; Domain location=1-59; Score =84.5; E_value=3.4e-22; Accession=PF04783.3; Description=Protein of unknown function (DUF630)
  Pfam annotation: Domain name=DUF632; Domain location=394-776; Score =298.1; E_value=1.6e-86; Accession=PF04782.3; Description=Protein of unknown function (DUF632)
  Pfam module annotation: Pfam domain module=DUF630::DUF632; Domain location=1-59::394-776
MGSRSKNEDDKALVLCQERKRFVREALDGRCAFAATHFAYIQSLRHTGFALRKFVEPEVPTDSSLFTSTSATPEPPTIMQKPMTISPSLSHHASDSFSPVPSPLSSGRFHVNHMKAGGNSVTTVKEKVIEPVTATLETSSPVRGQAIHDLDDSSTFEAPPGTPPWDYFGLFQPVESQMSFHDDKELGHDFENDDDIRRLREKEGIPELEEELEKSPAYPDYLKRRLGQEKPPDLKDVEKSPMNGGEDDLALSEDDFDNPTSESLVRMFKNRNDTPVAHIATDHSSTSLPKDDLVSETIDSQPERPKDDRAVDSQTERLKDVTPDDPQTEKPKDHAGVDSPTEKTKDHPGVDSPAEKPKHDMRVLDISMYESDETPVTSPPKEISSSTAAFQVNGKFKKPLHDVRNVARDLNSCIKEIEILFIKASDSGKEVPRMLEADKVNFRPLLPEEKGCILVGFFTLLFHNSRIGSFDSKRKMESRKRRDQQHQAFLQHYLLVAERKSLFLNYNMVEVEIARIPLGTTSKEDTDGLNGNIFGGVYMNSGSHASTLDRLYAWERKLYDEVKASSVVCRQYDEKCRQLRHQESRGESQMSIDKTRAVVKDLHSRILVAIQRIDMISKNIEDLRDKELQPQLEELIGSLTRMWATMLECHRHQHDIIKLVSSTRNMKTSIRSESQFQATLLLQVELNTLCSNFQKWIASHKAYLQSLNSWLLKCVKALQRKRKSSRKKNIKADPITKYAVAPIFKTCESWINLLDDLPTDLEDAIKDLAADINRYVPHQEKQRGGSKLTLSLSRSGRSNGEMGEVHRSYTPMDLQSSLETFLGKLEMFSDVSLQKYMKLKEDIDEAKERYEEAQAAQRI

SEQ ID NO: 47592 - protein, 138 aa, Zea mays
  Coding DNA Sequence Number=SeqID_5813
MGKNNKRKREPTPPEEFGDLEYSEEEFPSESEGSPAPIPLRESSDDSDDSQGLAAEVWTYIRAVDRSGLEGSDESEYSSDEEDSDGGGEDEDDDDDDGDDNDDGDGGGSGRGSGGGSKDGDGGGSRGSNHGGSSRASG

SEQ ID NO: 47593 - protein, 140 aa, Zea mays
  Coding DNA Sequence Number=SeqID_5814
MAMWRTRTTARERLGGREESTVSNSSSTRTPDPRRLQQSGSRHVGKPPTPGLAGAAALPAWFVSGGFTLVRKRRRRLWLVPRVEVAAIWLKESQGRPTTLISLLRRARPGQRWGPGSRSAAPFSRNRCGNHAPTTKGRSY

SEQ ID NO: 47594 - protein, 208 aa, Zea mays
  Coding DNA Sequence Number=SeqID_5815
  Gene Ontology: Mol. function=nucleic acid binding
  Homolog annotation: Hit_ID=Q9FR79; Match level="QueryCoverage=89%, HitCoverage=66%, E-value=2e-37, Identity=82%"; Hit description=Pre -mRNA splicing factor
  Pfam annotation: Domain name=RRM_1; Domain location=5-64; Score=38.8; E_value=1.8e-08; Accession=PF00076.12; Description=RNA recognition motif. (a.k.a. RRM, RBD, or
MRRAEDLRVPFERFGPVRDVYIPKDYYSGEPRGFAFVEFVDPYDASEAQYHMNRQVFFGREIAVVLAAESRKRPEEMRSRTRFYASVPIMYSFEMTFCDCCAEVTLVMKVAGLLTMVGLVLALLAIGAVLGRDHTLLLQGGGMTTLPLQGDRKPIAHLLPGACQRSMMKIRSGGPTLLPVEMMLTMFMRSVAADSKFTFTCSKHSYVL

SEQ ID NO: 47595 - protein, 99 aa, Zea mays
  Coding DNA Sequence Number=SeqID_5816
  Subcellular localization annotation: CTP_CleavageSite=32; ConfidenceScore=5.63e-01
MPAHAPSSLLRAPTVPRAHPSPHFAQLHPLSRSAHAVSRRQRPTLAFSAIQLAGDRFKRPQAPPRDNEQSKVPECVVGDLPEQPPSEGKCPLTYYVLHT

SEQ ID NO: 47596 - protein, 147 aa, Zea mays
  Coding DNA Sequence Number=SeqID_5817
MTSDCSQPPTEARQRQQDPCHTDSCATTGLKALLRQPWLGLNLDLGRRTPPRPTPELGLSLDLGRRSPPRPTLGLGLNLDLGRRTPPRPIPELGLSLDSGRRSPPRPTPGAQTQPRPRATVSASPDPRARAQPQPRRSHRGPSLPYS

SEQ ID NO: 47597 - protein, 81 aa, Zea mays
  Coding DNA Sequence Number=SeqID_5818
MSRVVFGASLASTLAYICAATVLLVGELRTGCDLYEVVGPPSVLLDKGTKEMLEYYDNASSHVVHRLSVGDIVRSAPNPTL

SEQ ID NO: 47598 - protein, 172 aa, Zea mays
  Coding DNA Sequence Number=SeqID_5819
MRTRTRLPEAGIWFYHKRGQQSGTSEKRIQAGRGRPRSAAPLGFSAVTEDEEEGASTAVPHPHLNRAGAQINRATAATLVPQGRHASDDRDASSSNDDDDGDVTTGEEELEGGFEKRPLREILDDNPPAPKKARLELISSLSLVAQTPPNSSESNLASSVRAGNSLGDEKAC

SEQ ID NO: 47599 - protein, 107 aa, Zea mays
  Coding DNA Sequence Number=SeqID_5820
MPRALGANRVPRDRQRGEVSHGRHPGFTGYELRGLNLGPGHCAVSRGRPDSSPPLLIAVKPPQSLRPLVAVGSFTTATISGMDCAPRFTNSSASSRIYQSRESRIGV

SEQ ID NO: 47600 - protein, 75 aa, Zea mays
  Coding DNA Sequence Number=SeqID_5821
MAAADLDGIRDGGREVGRRTAAAMAAGEVPQRRPGRAATAAQDEPAATTATRSRDGGGRRARSRDGGQEEGGGPR

SEQ ID NO: 47601 - protein, 130 aa, Zea mays
  Coding DNA Sequence Number=SeqID_5822
MDKGKRGRGSPHRADDKQKRDPSPPSEDFGDSEYSEEEVSSESEGSLALASPSASSDDSNDSQGIVAEGSDESKVSFDEEDSFGSSEERSGNDRDDEGSGGGGDNDGGRGGEGDDGSNGGSGGGGKAPLV

SEQ ID NO: 47602 - protein, 106 aa, Zea mays
  Coding DNA Sequence Number=SeqID_5823
MKMTGLSSTLGSASTKSNPMPTHNMVGIENDKRRLDGWRICNSTLEEVVDKPNVEATSPAKLWTLVGSMHGEDDVNMADQSIHILLKMRMSSKTRTKCRRVSFIKA

SEQ ID NO: 47603 - protein, 244 aa, Zea mays
  Coding DNA Sequence Number=SeqID_5824
  Gene Ontology: Mol. function=structural constituent of ribosome; Cellular component=ribonucleoprotein complex; Biological process =translation
  Homolog annotation: Hit_ID=Q8LNG5; Match level="QueryCoverage=98%, HitCoverage=63%, E-value=5e-18, Identity=32%"; Hit description =Putative ribosomal protein
MVSSALRRCLPCHASLCHAFPPHPLLAAAGVFRRSFQSGEHPTLFCPCSFLASHEWYLLKQKIPHMGGDGETMDEFEERLFGGKDTDKGSLYEKLDRAENTGRRYNMGSGMGGLTGLSDKSRSGLSKGGFTWLSDSSSSGFPGFPASGDRSNSGWMDGYDSFNDGLNDTIANAARNIQMEEDEDVDGDWEDDFEFRPDVRFRQGSTYSVRDLDLRKPAAAKNPPRRQFETTTAEVLKKADFRGC

SEQ ID NO: 47604 - protein, 81 aa, Zea mays
  Coding DNA Sequence Number=SeqID_5825
MGPPPFPLLSALHAELPQVTTDLRGRRPPDRGAIPLPWTSNPAEPSQMVCRLPMLYRAKFISVIHVLQMSWKFYGGYSCDT

SEQ ID NO: 47605 - protein, 83 aa, Zea mays
  Coding DNA Sequence Number=SeqID_5826
  Subcellular localization annotation: CTP_CleavageSite=68; ConfidenceScore=5.00e-01
MAHWSGSSDARARITLTGWWGIAVRDSVPHFGVRMSRDFPAVPSLRLLGVNRILGHPVACRSCRLGARCGRCGQPRKPVLPPL

SEQ ID NO: 47606 - protein, 434 aa, Zea mays
  Coding DNA Sequence Number=SeqID_5827
  Subcellular localization annotation: CTP_CleavageSite=61; ConfidenceScore=5.25e-01
MDPHPSAPSLPLSFTLDAGADAWLGAAAAGLDTRVTVASRPNATVVASLPTSATTAYATIGAAPGVTPSSVELHTALRTTGDLNPSLGTGPSSIDLHATLGERPSFADSLRLPHGTSIRSDLVVGGAPYIAGLRPPPRRDCHCSTASQFPSGLPRPCCSYMDRGRRFLVGFLNVDYDYRHHPRSLLPPRTERVATLTLGARVCHGRSSNHQMATAQRLILGHSPVIHEAPPLTPEAPLASGLDDDHIAALHAQAARLHKIRTIVSIVLDPASSHSPLPSLTGSGAFRGADPSSSFDRGPYLPSSRDPCISSSGFHRQRRSSPPQGRPRGCDSTRGGPSNRGGSQAWSSFYSPSASHPPTSALLTVSPNAVHLAPPYDVPPTSPAPPQLPPTRTPTSTPWSPLAGGWDHASLTAAVSTMAMAPPSSDWVIDPTLL

SEQ ID NO: 47607 - protein, 420 aa, Zea mays
  Coding DNA Sequence Number=SeqID_5828
  Gene Ontology: Mol. function=oxidoreductase activity, acting on the CH-OH group of donors, NAD or NADP as acceptor; Cellular component =mitochondrion; Biological process=metabolic process
  Homolog annotation: Hit_ID=Q67U69; Match level="QueryCoverage=94%, HitCoverage=95%, E-value=1e-166, Identity=72%"; Hit description =Formate dehydrogenase 2, mitochondrial precursor
  Pfam annotation: Domain name=2-Hacid_dh; Domain location=90-411; Score=47.1; E_value=5.8e-11; Accession=PF00389.20; Description=D -isomer specific 2-hydroxyacid dehydr
  Pfam annotation: Domain name=2-Hacid_dh_C; Domain location=197-376; Score=227.6; E_value=2.7e-65; Accession=PF02826.9; Description=D -isomer specific 2-hydroxyacid dehydr
  Pfam annotation: Domain name=DapB_N; Domain location=234-325; Score= -34.4; E_value=0.034; Accession=PF01113.11; Description =Dihydrodipicolinate reductase, N-terminus
  Pfam module annotation: Pfam domain module=2-Hacid_dh::2-Hacid_dh _C::DapB_N; Domain location=90-411::197-376::234-325
MAMRRAAQQAARFAMGPHVPHVIAPAERSLHASAASKKIVGVLYKGGEYADRNPSFVGCAEHALGIRGWLESQGHQYVVTDDKDGPNCGKRAVRARAHVTITTEQQAVCRVVLTRCRAGNPRAELEKHIADAHVLITTPFHPAYVTADRIARAKNLELLLTAGIGSDHVDLAAAAAAGLTVAEVTGSNTVSVAEDQLMRVLVLTRNFLPGHRQAVGGGWDVAAVAHRAYDLEGKTVGTAGAGRIGRLLLQRLKPFNCRLLYHDRLRIDPALEAEIGAQFEADLDAMLPKCDVVVINMPLTEKTRGMFDKERIARMKKGVIIVNNARGAIMDTQAVADACATGHIAGYGGDVWHPQPAPKDHPWRYMPNNAMTPHISGTTIDGQLRYAAGVKDMLERYFKGQDFPVQNYIVKEGKLAGQYQ

SEQ ID NO: 47608 - protein, 255 aa, Zea mays
  Coding DNA Sequence Number=SeqID_5829
  Gene Ontology: Mol. function=transferase activity, transferring nitrogenous groups; Cellular component=chloroplast; Biological process=histidine biosynthetic process
  Homolog annotation: Hit_ID=Q9FEW2; Match level="QueryCoverage=87%, HitCoverage=66%, E-value=8e-97, Identity=67%"; Hit description =Histidinol-phosphate aminotransferase, chloroplast precursor
  Pfam annotation: Domain name=Aminotran_1_2; Domain location=43-253; Score=-56.0; E_value=0.00014; Accession=PF00155.11; Description =Aminotransferase class I and II
MASAAPVEEPTAAAEAKGRLTGDSFIRRHLRTLAPYQPILPFEDIIKLDANENPYGPPPEVAAALGSLKFPYVYPDPESRQLRAALAEDSGLESDYILAGCGADELIDLIMRCVLEPGDKIVDCPPTFTMYEFDASVNGALVIKDVDLIVEVVEQEMPKCIFLTSPNNPDGSVINDEDLLKILDLPILVVLDEAYIEFSSLQSRMAWVKKHDNLIVLRTFSKRAEVSACAALQNPTYLEECLEEYAICSITHMFY

SEQ ID NO: 47609 - protein, 167 aa, Zea mays
  Coding DNA Sequence Number=SeqID_5830
MSSCAGETGLVVWCCCPCLVLQVTVFLLVRLPRKVVVKTKRIILRRRHRRRPPAPSNAAAGLKMDDLLDLDDDGFGAAFGVGEEDVGGGGGGDGDGDDSANDWKGRWCFAVVRDDGVWEAIIEQEGLFWFGSFWGQREQERSAPEGEDRMGGSFRLPVALERSNACT

SEQ ID NO: 47610 - protein, 167 aa, Zea mays
  Coding DNA Sequence Number=SeqID_5831
MTSDYSQPLRKQDNVSRIHVAPTAVLLQGSRHFSDGHKCSRLFKFSRRKKGDQSSEVPAEKNIPFGARLEEATQSDGDYEPTPVYEIAHDCFDAEDVLPSDGGIRENEEYERHDDDAHLESSVGVADNSVYIHGTQSFDGTNDMAVQATIASVDQNVKDSADPSEAA

SEQ ID NO: 47611 - protein, 137 aa, Zea mays
  Coding DNA Sequence Number=SeqID_5832
MEAARRAGARDLGKNQGQSAVAVPEGGGRSEQRSRRTWAPLKSSAASRELLPRGKGSVVGEEWRGERGDMFCFRSLRYGEEGSDAEAPRSSGACAFKEYPDWRSPHASGGCRFARGWASKMGKEQREMGRATPNSAQ

SEQ ID NO: 47612 - protein, 500 aa, Zea mays
  Coding DNA Sequence Number=SeqID_5833
  Gene Ontology: Mol. function=methyltransferase activity
  Homolog annotation: Hit_ID=Q5QLT2; Match level="QueryCoverage=80%, HitCoverage=71%, E-value=1e-141, Identity=65%"; Hit description =Putative early-responsive to dehydration stress protein
  Pfam annotation: Domain name=DUF248; Domain location=188-499; Score =311.9; E_value=1.1e-90; Accession=PF03141.7; Description=Putative methyltransferase
  Pfam annotation: Domain name=Methyltransf_11; Domain location=308 -413; Score=30.9; E_value=4.4e-06; Accession=PF08241.2; Description =Methyltransferase domain
  Pfam module annotation: Pfam domain module=DUF248::Methyltransf_11; Domain location=188-499::308-413
  Subcellular localization annotation: CTP_CleavageSite=82; ConfidenceScore=5.68e-01
MAIYSFLSVRKRPVVVVAAVTLFIVVSSLFLLFSPAPTALPFFSSSSSHLSSQASIAAVSSNAFPPETPTSVVSNWVSSNTSADRVSADASPPVVGTAIASDAVSNSTADPPRPDTTAAAGDAKADVSQPDHGMPPAATEASGSAGNGETAAGVSSERDEEGQGGGGAVEELPSWELCKVGKGVAAADYIPCLDNVKAVKALKSLRHMEHRERHCPTDPRPRCLVPLPERYRRPVPWPRSRDMIWYNNVPHPKLVEYKKDQNWVRKSGNYFVFPGGGTQFKNGVASYIKFIEQILPNIQWGIHTRTVLDVGCGVASFGGYLLDRNVITMSVAPKDEHEAQIQFALERGIPAFLAVIGTQKLPFPDNSFDVIHCARCRVHWYADGKYFGTLIFSCGKPLLELNRVLRPGGYYIWSATPVYRKNPRDIDDWNGINLSIVASFLQFRVQFPQEKIDSDTSYWKDLVSEIYLNEFAVNWSSVRNVMDMNAGFGGCVRQSLNQNH

SEQ ID NO: 47613 - protein, 408 aa, Zea mays
  Coding DNA Sequence Number=SeqID_5834
  Gene Ontology: Biological process=heat acclimation
  Homolog annotation: Hit_ID=Q10M69; Match level="QueryCoverage=68%, HitCoverage=77%, E-value=6e-76, Identity=57%"; Hit description=F-box domain containing protein, expressed
  Pfam annotation: Domain name=F-box; Domain location=12-60; Score =17.0; E_value=0.068; Accession=PF00646.23; Description=F-box domain
MLWRAAAAEGEDHFDRVPDSLVLLIFNKLADARSLGRCSAVSRRFSALVPLVDDACLRIDRVIPADAADAGAPRPRAALSHLLESVLLAVLKPFAHCDAKSASPQKHAQQQQQHHSPAQVLRNFSSIRSLRMELPVSDVGTDDGVVLRWKAVFGSTLQSCVILDGTRVDRAAAAGPPHAPSSAPPAGDDDGGSIPESLYTNGGLKLRAVWTISSLIAAATRHYLLREIVKEHPTLERVALTDADGPMKEAVATLGKRHAYLLEMNGFYGATATSRAMVDCNAFNARLRAQRTEHTQLAHRTVYRTCLVHHRTAQRPHKSELQRSNPNGWLTWLAHRTVSGFLPDRHRSKINQGPPYTDHSPTALALFGYQDDLQMTRDLTLVRVLFAKRKPKGYLALTVVRSTSDDED

SEQ ID NO: 47614 - protein, 647 aa, Zea mays
  Coding DNA Sequence Number=SeqID_5835
  Gene Ontology: Mol. function=transmembrane receptor activity; Cellular component=exocyst; Biological process=exocytosis
  Homolog annotation: Hit_ID=Q941X1; Match level="QueryCoverage=99%, HitCoverage=100%, E-value=0.0, Identity=81%"; Hit description =Leucine zipper protein-like
  Pfam annotation: Domain name=Exo70; Domain location=80-643; Score =403.6; E_value=2.9e-118; Accession=PF03081.6; Description=Exo70 exocyst complex subunit
MAENGEEKLLATVQHIVQTLGRTDTMTEDILKVFSNYDGRLSLDKLYATRAAAAAAAVGGAGERSVPASPPMPPPPVAPSAAAAMPPVTSLERTVRTLDRQISQFVAMDRLIWADSADADAFLEAVDDLIGTVQELDAAGTNRGLLDRADELLSRCMARLEDEFRALIERPDDAAPQVTGGFGSDESEEDEYDADDGFGDEPIPIARPVSDFDIVIDALPPGSVSDVHQIARRMVDAGFGRECAEAYAAARRGFIDESVARLGIRSRTVDEVHSLPWEELEFDIARWIPAFKMVFRILIPSERRLCDRVFEGLAPYGDLAFVAAVRTQALQLISFGDAVAAASRAPERLFRVIDMYEAVRDLLSDLDPVFSDPYSAALRAEVSAVCNTLGSSIKGIFMELENLIRRDPARVAVPGGGIHPITRYVMNYLRAACGSRQTLEEVMEGDLGAVGTAAIAVDPDRPTSSLAVHIAWIMDVLHKNLETKSKIYRDPPLASIFLMNNGKYIIHKVNDSELGVLLGDEWMKQIMSRVRRWSVEYQRGAWAKVISVLQTGGPGVGSITAKSMLQKMQMFNSYLEEICAVQSDWVIADEQLRADVKSAIVDSVMPAYRGLIGRLRSSPEAARDLFIKYTPEDVQERIQHLFEGVAK

SEQ ID NO: 47615 - protein, 546 aa, Zea mays
  Coding DNA Sequence Number=SeqID_5836
  Gene Ontology: Mol. function=transmembrane receptor activity; Cellular component=exocyst; Biological process=exocytosis
  Homolog annotation: Hit_ID=Q5QLT4; Match level="QueryCoverage=98%, HitCoverage=96%, E-value=0.0, Identity=68%"; Hit description=Leucine zipper protein-like
  Pfam annotation: Domain name=Exo70; Domain location=1-541; Score =197.2; E_value=3.9e-56; Accession=PF03081.6; Description=Exo70 exocyst complex subunit
LVIGMDETLQALDDLISQFLSLDRSLWSSSDDAEAFLEAVDELTSTIHGLESTSADHALLESFDLLLERCSARLKDEFQRLVGTSGFSDDDHGDRSSKRSQNEDANDHTFVAQPVRNFDIIVDALPEGVVTEANRVARRMIAAGFGDTCAETYASARRSFIDESIARLGVDAHWEEEELCNKSTTAWEELETRIMRWIPATRVVFHILIPSERHLCDCIFEGFTSYADLAFATACRPFLQPLSFAEAIAAAAGHRPESLFRMVDMYDALTDILPVLDEALDHEVVAAPRERLGLSIKGIFVALEKLIRGDPCESSPPDGGLHPITRYVMNYLMAACVSRHTLEEVMLVEFGRADETCPVDPDRPTSSLAICFAWIVDVLIANLESKSRIYGHAPLGCVFLINNGIYIIKKVSGCELKILLGEDWTRVMSAKVHQWVLEYRRATWGRAVAILETDRRPGSSSSSVMLEKLNRFHTFLEAICQVQSRWVLVDKQQAVDLSVMVEELVAPVYRDTVEMLKATEDVGVSYVRPEDVKSRIQRLFKAMAKS

SEQ ID NO: 47616 - protein, 266 aa, Zea mays
  Coding DNA Sequence Number=SeqID_5837
  Homolog annotation: Hit_ID=Q6QP51; Match level="QueryCoverage=44%, HitCoverage=51%, E-value=7e-07, Identity=41%"; Hit description =Putative growth-regulating factor 1
MGRRETEREGGKPEGDRRKGETRGLRVCPAPRSGVRRGPSRGRVRALGSGEAEFVVFRGRGRVRALGSGEAEFVVFRGRGRVRALGSGEAEFVVFRGRGRALGSGEAEFVVFRGRGRVRALGSGEAELPMAPEAELGCCQPHSVQWHSSRSGAGGAVLSSGRSVERRSDCGHFGSVDWRACIRIRCQDIFALNASAVRSVGVAIWPRLLLGEDWASGEPKLCADGGYQLRLGVLGTLSGGAPDSPVNYSGAPLRIPEGVEFDLEFP

SEQ ID NO: 47617 - protein, 226 aa, Zea mays
  Coding DNA Sequence Number=SeqID_5838
  Gene Ontology: Mol. function=phospholipase A1 activity; Biological process=lipid metabolic process
  Homolog annotation: Hit_ID=Q88TG3; Match level="QueryCoverage=61%, HitCoverage=12%, E-value=2e-08, Identity=23%"; Hit description=Cell surface protein
  Subcellular localization annotation: CTP_CleavageSite=43; ConfidenceScore=5.13e-01
MRLVPGLSSPLPPLCRSGHLISLAFSLTSWMDGATATVDRTVRLTAAKSGLGRHRKLRLARPQGSDSASAPEDDELRLARPQGSDSASAPEDDELRLARPQGSDSASAPEDDELRLARPQGSDPASAPEDDELRLARPQGSDSASAPEDDELRLARPQGSDSASAPEDDDRPWPQPTVSASPDPGGSDSTSTSEDRLDLDLGGASVSPDPGLGPTTSQEGPSLPYP

SEQ ID NO: 47618 - protein, 526 aa, Zea mays
  Coding DNA Sequence Number=SeqID_5839
  Gene Ontology: Mol. function=phospholipid binding; Cellular component= coated pit; Biological process=endocytosis
  Homolog annotation: Hit_ID=Q69SJ3; Match level="QueryCoverage=84%, HitCoverage=84%, E-value=1e-180, Identity=70%"; Hit description =Clathrin assembly protein AP180 short form-like
  Pfam annotation: Domain name=ANTH; Domain location=30-273; Score =280.4; E_value=3.6e-81; Accession=PF07651.6; Description=ANTH domain
  Pfam annotation: Domain name=ENTH; Domain location=30-159; Score= -6.6; E_value=0.0001; Accession=PF01417.11; Description=ENTH domain
  Pfam module annotation: Pfam domain module=ANTH::ENTH; Domain location=30-273::30-159
MAGGGTGIRKYMGALKDTTTVSIAKVNSDYKELDIAIVKATNHVENPTKEKYVRDIFYHLSPGRPRADVAYCIRALGRRLSKTRNWAVAMKTLIVIHRALREVDPAFREELISYGRSSSHMLYLSYFKDDSSAEAWDYSAWVRNYALYLEEKLESFRVLNYDVEKDPLQIRDLDTNGLLDQLPALQQLLFRLLGCQPQGASSYNVIIQHALSMVALESVRIQTAINDGILNLVDKFFEMQRDDAIRALGMYRRAIEQPPASFLATMEEYVSNAPLASTVQRNQAVLAIEDSKKSEVEESQPTLPPPHSPAQESGPEPVQQVPPAADPTDLLGINEPTPATSEIDQKNAGALAMVPQDNAPKAPASTTSSGSVETSWELALVTAPSSNGTAVTPSKLAGGLDLLTLDSLYNEAHRRAQQNASYNPWETNPASGPVMQQQMYDPFYASNHPVAAARNVQMAAMEQQQQQQHAFVLQQQQQQQMIVMMMAQQQQQQASSNPLYTAAAAHTYGAGVQLHAGNAYSGAGMM

SEQ ID NO: 47619 - protein, 540 aa, Zea mays
  Coding DNA Sequence Number=SeqID_5840
  Gene Ontology: Mol. function=structural constituent of ribosome; Cellular component=ribonucleoprotein complex; Biological process =translation
  Homolog annotation: Hit_ID=Q69SJ7; Match level="QueryCoverage=58%, HitCoverage=78%, E-value=2e-88, Identity=53%"; Hit description =Ribosomal protein S15-like
  Pfam annotation: Domain name=Ribosomal_S15; Domain location=318-398; Score=68.0; E_value=3e-17; Accession=PF00312.12; Description =Ribosomal protein S15
  Subcellular localization annotation: CTP_CleavageSite=18; ConfidenceScore=5.23e-01
MALRRITPRRRPVLPVPRAFSSSPPFPPPPPPANDPDPDAAQPPSSSPPPNSGAPRNPESSFFQDIKDRLRSSPTSPSPRRIPTTLPRPDPARGAPSSGPPIGDIRRMLQNFRLTGSTSDAPSTSAPGSNPSFMDLLKNHLDQGANARQAELGFNAIGESLKRPRPPKPFITPSSRNIFCRELERTSKALGARQEENGSAIELKGSYSYEELGKRLGELRPAGAGKDGKEWFSLKELQGRIAKLAEQESQLAGPFSEMRRGIRNLQKQGKPGRPVNIQALLNPVGQPTPDYMSGPPQVELLEKYFHPDHMSSEEKMKLELQRVRDEFKMSENDCGSARVQIAQLTLKIKHLSTVLHKKDKHSRKGLQEMVQRRKKYLKYLRRTDWDSYCLVLSKLGLRDVPEYKAPDYKSKATTKAKSKKSKSKGKKRKAATRPAVLGQRLVGCALVPRPPSHHATSKNIPPIPNPSAAAAAAAAVAKEQERDTAYPLVAAPDLAAARLSSMEARSSSSAAAVPPPLSIPSSSDQCVWADASPLLAAACR

SEQ ID NO: 47620 - protein, 245 aa, Zea mays
  Coding DNA Sequence Number=SeqID_5841
  Gene Ontology: Mol. function=hydrolase activity; Cellular component =membrane
  Homolog annotation: Hit_ID=Q69II6; Match level="QueryCoverage=90%, HitCoverage=57%, E-value=3e-79, Identity=53%"; Hit description =Putative beta-glucuronidase
  Pfam annotation: Domain name=Glyco_hydro_79n; Domain location=1-198; Score=21.3; E_value=1.8e-14; Accession=PF03662.4; Description =Glycosyl hydrolase family 79, N-terminal domain
  Subcellular localization annotation: CTP_CleavageSite=48; ConfidenceScore=5.18e-01
MYDTGDARQPSCAPFAKNASAMFGFSQGCLPLRRWDELNAFFQRTGVRAGNELSGSGVGARVDADQYAADVIALKRIIDSTYHQSSSPAKPLVLAPGGFFDAAWFTELVGKTKPEQMDVITHHIYNLGPGVDDHLVQKILDPSYLDGEASTFSDLEGILRSAGSTHLVSLDAQQPNTRLVTDAFVFSFCALLWHRLMGTKVLSATFNGTNKIRAYAHCAKRSVKERAQNSVCIVSSWQQQLVASV

SEQ ID NO: 47621 - protein, 106 aa, Zea mays
  Coding DNA Sequence Number=SeqID_5842
MDGMLTAKAKERCSILPEVILIVVSGQPTQPSLLVAVDLNSFIVGDGHRPTSGSESRFLNGVSRSTRARREEGMTGPANRFLHGFESGAPELGETGARRDRSTRRR

SEQ ID NO: 47622 - protein, 58 aa, Zea mays
  Coding DNA Sequence Number=SeqID_5843
MALAAGDGQEDARSGEVVARSLMPRWAEVKLVLSSRIMGIGVTTTRDIVEIGVGTWGR

SEQ ID NO: 47623 - protein, 174 aa, Zea mays
  Coding DNA Sequence Number=SeqID_5844
  Subcellular localization annotation: CTP_CleavageSite=70; ConfidenceScore=5.29e-01
MAAPQSPTRYSAAVASGWVLDVRVIPNLWSVPTSAKISGPIPSRRSPRLRQYKGGRITTSPSTRWPWTVSGEHDQGAELTECIHGKREAPPRAKSSNTVAPTPTCSFGASTGCRGISGGDRWHGDCSKSFKTGRGPPITASDPLSISSTGKDPSVGFAIASALRRSFRIGGFVL

SEQ ID NO: 47624 - protein, 64 aa, Zea mays
  Coding DNA Sequence Number=SeqID_5845
MVDLDSSEVLILFISFLVDVDLLFSGLDVFNQGTTVRVEYGDDAIASDSSGPHVISHVFPHTYG

SEQ ID NO: 47625 - protein, 106 aa, Zea mays
  Coding DNA Sequence Number=SeqID_5846
MALTFGSREDLAGWRCEELGPVELGERLSSRYRAEAELDRIRSPVCAMLDPVATVGKGARVRSPVGGEGELWWGRERSPVGKGLDGGGNGVALVMAGEWLRRGNLP

SEQ ID NO: 47626 - protein, 341 aa, Zea mays
  Coding DNA Sequence Number=SeqID_5847
  Gene Ontology: Mol. function=protein binding; Cellular component =integral to membrane; Biological process=protein amino acid phosphorylation
  Homolog annotation: Hit_ID=O49534; Match level="QueryCoverage=74%, HitCoverage=55%, E-value=4e-61, Identity=50%"; Hit description=LRR -like protein
  Pfam annotation: Domain name=LRR_1; Domain location=159-181; Score =16.2; E_value=0.12; Accession=PF00560.23; Description=Leucine Rich Repeat
  Pfam annotation: Domain name=LRR_1; Domain location=183-205; Score =12.6; E_value=1.3; Accession=PF00560.23; Description=Leucine Rich Repeat
  Pfam annotation: Domain name=LRR_1; Domain location=207-229; Score =14.6; E_value=0.36; Accession=PF00560.23; Description=Leucine Rich Repeat
  Pfam annotation: Domain name=LRR_1; Domain location=231-252; Score =9.1; E_value=5.5; Accession=PF00560.23; Description=Leucine Rich Repeat
  Pfam module annotation: Pfam domain module=LRR_1::LRR_1::LRR_1::LRR _1; Domain location=159-181::183-205::207-229::231-252
MKFFTCVRFPAAVLHRSLAEWLLQEGRHLPVVLVLHTDDKLEALQNLHSRSEFPTTVSKVQMSRHHHFAAAIAVVLILFAPPPCAGDPNDERCLTHLHQSLSNPSGGLNWTKAAISAPCDGFFSHLQGVTCNNGRVYKLALPELSLGGTVPPELSNCTNLQSLDLSANALSGAIPTELSALLNLAVLNLSANALSGAIPRELASCAYLNVIDLHGNQLSGPIPDELGLLVRLSAFDVSHNRLSGPIPVLLANRTGAGTAAVGTARFNASSFVGNKGLYGYPLPPMRTRGLSVLAIAGIGLGSGLLSLVLSFSAVCLWLRATDRTATISGEEGKISQLMPDY

SEQ ID NO: 47627 - protein, 134 aa, Zea mays
  Coding DNA Sequence Number=SeqID_5848
  Homolog annotation: Hit_ID=Q6QP51; Match level="QueryCoverage=78%, HitCoverage=45%, E-value=2e-14, Identity=63%"; Hit description =Putative growth-regulating factor 1
MAGFSFVPTDSRRGRSEPKAGQGGDSSEVEVESGPWGRARRRPSSEVEVESGPWGQARRRPSSEVEAEAEPRGRAWRSFLWRLRLDSATVSLTLAGGTAVGAGQAALFSYHVSQWRGEVIAVTSALSTEERASG

SEQ ID NO: 47628 - protein, 100 aa, Zea mays
  Coding DNA Sequence Number=SeqID_5849
MQTACNCTIGAHPFDFDASNMKAQAHTSCNRRAGYYERKTAPPIALVPRLLDYGTGAATRGNPTHGPTVPNQAHQSRGPRKGILRKGSFSTKEAGPEPSY

SEQ ID NO: 47629 - protein, 244 aa, Zea mays
  Coding DNA Sequence Number=SeqID_5850
MESGRGLGGGGHRGHWFGLVADCGCAASLAESPCRSGSSTVERDSDIPAEATQREWDGDEVESDDGEVQSPYKGSSFDTMDVLQEALPFRKRGYPKVFTNGGVWIYCKSFKDLPGTQKHPSPREAQKAFFPFSFKMGQKRYTPMGDAIKSPTNCRRMTTSPAATSSSTSNSGSDDEHNRSQKLSSRRPLRMPINALGVFASPPGPRPPQPFSAHMRSQSMLDVQDVTETDSAAMVTPRDKRMKK

SEQ ID NO: 47630 - protein, 122 aa, Zea mays
  Coding DNA Sequence Number=SeqID_5851
  Subcellular localization annotation: CTP_CleavageSite=22; ConfidenceScore=5.25e-01
MAGGGRVRQHRGPPLLLPWHVRISRPRSHARLLATLAPGRGPCGSPLFPRVAAMNPLLRRILSPPLLRPAPGQLTVATLGTSTAAATMGAYLPASALGTVTVASLVGFPCGSPPGDLQLRWA

SEQ ID NO: 47631 - protein, 92 aa, Zea mays
  Coding DNA Sequence Number=SeqID_5852
MDRRAAPQLGRSGGHENMEVVSGSKEGSCVLGSREGVWWCEVPGKGRESGGWGGGRPREERMSLPGTTAQEQMVDVGGRRKGGSCWRYNYDN

SEQ ID NO: 47632 - protein, 453 aa, Zea mays
  Coding DNA Sequence Number=SeqID_5853
  Gene Ontology: Mol. function=polygalacturonase activity; Biological process=carbohydrate metabolic process
  Homolog annotation: Hit_ID=Q69P92; Match level="QueryCoverage=98%, HitCoverage=92%, E-value=1e-124, Identity=49%"; Hit description =Putative polygalacturonase
  Pfam annotation: Domain name=Glyco_hydro_28; Domain location=73-425; Score=-58.3; E_value=2.9e-06; Accession=PF00295.8; Description =Glycosyl hydrolases family 28
MVDTGGGRLYQRRGAVAFVAANKALLAAAWVVGFALVFLWQSASMSFGSAGGGGYLRLLSVPPPPPRPAPRLRPTAYNITDFGAVGDGRAVNTAAFERAVEAIAALAERGGGQLNVPPGRWLTAPFNLTSHMTLFLAEGAEILGITDEKYWPLMPALPSYGYGRERKGPRFGSLIHGQNLRDVVITAFEYIIHVLNALALYQTLEVPVDIHPFFYNILSILTLALVTDSCQDVLIENCYISVGDDAIAIKSGWDQYGIAYGRPSSDILIRNVTARSLVSAGISIGSEMSGGVANVTVENVRIWESRRGVRIKTATGRGGYIRNISYRNITFDNVRAGIVIKVDYNEHADDGYDRTAFPDITSISFKGIHGQGVRVPVRAHGSDVIPIKDISFQDMSVGISYKKKHIFQCSYLEGRVIRPVFPKPCENLDVYDEQGQLVKRAVALNSTELDYDI

SEQ ID NO: 47633 - protein, 281 aa, Zea mays
  Coding DNA Sequence Number=SeqID_5854
  Subcellular localization annotation: CTP_CleavageSite=83; ConfidenceScore=5.25e-01
MAGHTRRPQPHVLPRAPRSVPHPVRGRTPPRILPPSRAPSILRPHPAAHVPSILARALPIHPVLPGRDPRLQSMSAPVVTPTRCPPRTSPVMPMDEMREMDSVTDAHHVAWLQHDLLGLLVLRQLHPIRPSICLHLHGDATVRHPIMGGARGHGGQLLLPEAASARRFFAGARDQRLFFYDHTMGEGRGLTLPSAAAWPFSGGGPPAASCEPPQVQRQLTLPPHRSLNPHPAGLLYLAQLQPLVSLTPITSAGPSSPPCPTRSGTLNPDGLNSFLCLVGYV

SEQ ID NO: 47634 - protein, 155 aa, Zea mays
  Coding DNA Sequence Number=SeqID_5855
MQIEENINVGLMQHLEQSIPDPAYEDYLARKCLNSWADIFPCNSDLVTVPKVWAAFFMGLLLRSNSFDWAKKFLTSGAISALVEPSMETVSLKIPPKCLPPPSQELHVEPQSPTAAEAVSKHKQPIMVELKLEGVPDFGRRLGASRTAQGLEKCS

SEQ ID NO: 47635 - protein, 1262 aa, Zea mays
  Coding DNA Sequence Number=SeqID_5856
  Gene Ontology: Mol. function=ATPase activity, coupled to transmembrane movement of substances; Cellular component=integral to membrane; Biological process=transport
  Homolog annotation: Hit_ID=Q8GU75; Match level="QueryCoverage=96%, HitCoverage=96%, E-value=0.0, Identity=72%"; Hit description=MDR -like ABC transporter
  Pfam annotation: Domain name=ABC_membrane; Domain location=46-323; Score=134.3; E_value=3.3e-37; Accession=PF00664.13; Description=ABC transporter transmembrane region
  Pfam annotation: Domain name=ABC_membrane; Domain location=689-967; Score=131.2; E_value=2.9e-36; Accession=PF00664.13; Description=ABC transporter transmembrane region
  Pfam annotation: Domain name=ABC_tran; Domain location=1037-1221; Score=217.3; E_value=3.4e-62; Accession=PF00005.17; Description=ABC transporter
  Pfam annotation: Domain name=ABC_tran; Domain location=398-582; Score= 221.1; E_value=2.5e-63; Accession=PF00005.17; Description=ABC transporter
  Pfam annotation: Domain name=SMC_N; Domain location=938-1225; Score= -133.1; E_value=0.072; Accession=PF02463.9; Description=RecFRecNSMC N terminal domain
  Pfam module annotation: Pfam domain module=ABC_membrane::ABC _membrane::ABC_tran::ABC_tran::SMC_N; Domain location=46-323::689 -967::1037-1221::398-582::938-1225
MSSPENGAAPEASGKKKKKAEEEEVVAKVPFLKLFSFADRWDCVLMAVGSLGACAHGASVPVFFIFFGKLINIIGLAYLFPTTVSGRVAKYSLDFVYLGIVIFFSSWTEVACWMHTGERQAAKMRLAYLRAMLDQDIAVFDTEASTGEVINAITSDILVVQDAISEKVGNFMHYISRFLAGFAIGFSQVWQISLVTLAIVPLIAIAGGTYAYVTIGLMARVRKSYVKAGEIAEEVIGNVRTVQAFVGEEKAVRSYREALLRTYKYGKRGGLAKGLGLGSMHSVLFLSWALLIWFTSVVVHKRISNGGESFTTMLNVVIAGLSLGQAAPNISTFLRARTAAYPIFQMIERSTVNTASSRTGRTLPVVDGHIQFRNVDFSYPSRPDVVILDRFSLNFPAGKIVALVGGSGSGKSTVVSLIERFYEPLSGSILLDGHDIKELDVKWLRRQIGLVNQEPALFATSIRENILYGKGDATAEEINHAAKLSEAITFINHLPDRYETQVGERGIQLSGGQKQRIAISRAILKNPSILLLDEATSALDAESEKSVQEALDRVMVGRTTVVIAHRLSTIRNADTIAVVDGGRIVETGTHEQLMANPYSAYSSLIQLQEAAQLQHKPSLSDSASITRPLSFKYSRELSGRTSMGASFRSDKDSISRYGGAGEAHDEVRKGKPVSMKKLYSMVRPDWFFGLSGTISAFVAGSQMPLFALGVTQALVSYYMGWETTKLEVRKIAVLFCCGAVLTVVFHVIEHLSFGIMGERLTLRVREKMFSAILRNEIGWFDDTSNTSAMLSSRLEADATLVRTIVVDRSTILLQNVGMIVTSLIIAFILNWRITLVVLATYPLMVSGHISEKMFMKGYGGNLGKSYLKANMLAAEAVSNIRTVAAFCSEEKVIKLYADELREPSKRSFRRGQGAGLFYGVSQFFLFSSYALALWYGSVLMSKELASFKSVMKSFMVLIVTALAMGETLAMAPDIIKGNQMASSVFEILDRKTDVRIDTGEDIKRVEGLIELRGIEFRYPSRPDVTVFKGLDLLMKAGKSMALVGMSGSGKSTVLSLILRFYDPIAGRVLIDGKDVKKLKLKCLRKHIGLVQQEPALFATTIYDNILYGKDGATEAEVVEAAKLANAHSFISSLPEGYKTKVGERGVQLSGGQKQRIAIARAIVKDPAILLLDEATSALDVESERVVQQALNRVMRNRTTVMVAHRLSTVKNADVISVLQDGKIIEQGAHQHLIEDKNGAYHKLVSLQQQQQMQTQQSSSEDI

SEQ ID NO: 47636 - protein, 85 aa, Zea mays
  Coding DNA Sequence Number=SeqID_5857
MKIQTIRTLVARSAIGPKDYNEDFAWTARRGPGGVLSGHKGYTGSGRMSLLPFFGCSHYRHLIACSRDYKQARAGRTPSLYMLFF

SEQ ID NO: 47637 - protein, 535 aa, Zea mays
  Coding DNA Sequence Number=SeqID_5858
  Gene Ontology: Mol. function=ubiquitin thiolesterase activity; Cellular component=nucleus; Biological process=ubiquitin-dependent protein catabolic process
  Homolog annotation: Hit_ID=Q9FPS6; Match level="QueryCoverage=48%, HitCoverage=35%, E-value=1e-57, Identity=46%"; Hit description =Ubiquitin-specific protease 21
  Pfam annotation: Domain name=UCH; Domain location=27-292; Score =124.5; E_value=3e-34; Accession=PF00443.19; Description=Ubiquitin carboxyl-terminal hydrolase
MAEQDDAAGQSPLDSVPIDETCDAEDMHSPLSFSYRSQPKSVIIRMGFVLSVPLKNMLMNQFKELSSDFWPGQQEDAHEFLRCLLDNLHKCTLDPMSKGKGSSFDEESIVNEIFGGQLKSHLSCCECGHSSETFEPFLDLSLEIDQVDHLVDALQSFTKVEQIGDSENKLTCESCNAQVSKNKQLTLHRAPDVIAFHLKRFTTLDNSVEKIDKHVVYPLEVDLKPFHSNPDTVGGLKYDLYGVVEHSGLPNYGHYTCTIRSSPSTWYFMNDSKVDSCTDSSALNQEAYILFYVRQGKFPWFSSLLEGKDALQAENTCGSSPVSVLENIDANCSTSFAGGSGSSSGDKLEKNEASQLEETEKDEMGRYKPSFLPEEPSTRSSLGASNSNNTIDENNPPRASLQNDVATCLRCVETTNLDKPSTPPRSKRLAFDNEFSVFEFEDFGEEDETLFPNLKLTPKAKKAKAASASKAEKGPCIDQNAVRLMRGMTSTRRKGLMDCIAQQTAKHESSRYPASDPLDKKKRKPVLQYYVNVKN

SEQ ID NO: 47638 - protein, 1664 aa, Zea mays
  Coding DNA Sequence Number=SeqID_5859
  Gene Ontology: Mol. function=RNA-directed DNA polymerase activity; Cellular component=chromatin; Biological process=chromatin assembly or disassembly
  Homolog annotation: Hit_ID=Q8SA91; Match level="QueryCoverage=94%, HitCoverage=65%, E-value=0.0, Identity=50%"; Hit description =Putative gag-pol polyprotein
  Pfam annotation: Domain name=Chromo; Domain location=1563-1617; Score= 55.3; E_value=2e-13; Accession=PF00385.14; Description='chromo' (CHRromatin Organisation MOd
  Pfam annotation: Domain name=DUF1375; Domain location=1230-1294; Score=-9.7; E_value=0.063; Accession=PF07119.2; Description=Protein of unknown function (DUF1375)
  Pfam annotation: Domain name=RVP_2; Domain location=510-631; Score= -51.4; E_value=0.01; Accession=PF08284.2; Description=Retroviral aspartyl protease
  Pfam annotation: Domain name=RVT_1; Domain location=747-916; Score =142.8; E_value=9.1e-40; Accession=PF00078.17; Description=Reverse transcriptase (RNA-dependent
  Pfam annotation: Domain name=Retrotrans_gag; Domain location=280-374; Score=56.9; E_value=6.5e-14; Accession=PF03732.7; Description =Retrotransposon gag protein
  Pfam annotation: Domain name=RnaseH; Domain location=1011-1127; Score= -11.8; E_value=0.00072; Accession=PF00075.14; Description=RNase H
  Pfam annotation: Domain name=rve; Domain location=1262-1418; Score =118.5; E_value=1.9e-32; Accession=PF00665.16; Description=Integrase core domain
  Pfam module annotation: Pfam domain module=Chromo::DUF1375::RVP _2::RVT_1::Retrotrans_gag::RnaseH::rve; Domain location=1563 -1617::1230-1294::510-631::747-916::280-374::1011-1127::1262-1418
MAGAEDPSVAAAIAAQSKSIETQSKTIATQSKLLQQLCDRLETQDARWTQLEKAVSANTNNISAISTKLDTSEGHPSFLTTQVDAQVAAIETVAMERLDAMAAAASTRVTALENATQAFESWKPRIESSVDAMRSELTKLTRLLERGAFEDRGTKPGILGHYSSTQDRPPPVQQVGTHGEAHRHRDQGGGTSIGPNHHQAPGMNDWISSHDHPSFDTFAAHNHPPPRDVGRSFESSSSQYLGNLPKLQVPSFDGEHPKLWQSRCQAYFRMYDVDYSMWIKVSSMQFTGPAARWLQSIEPKLPYLSWEEFGTLIQERFAKNQHQFLLRQLFHIRQLSSVSAYVEEFSQLVDQLTAYQNQSDPLYYTLKFIDGLKDDIKAVVMLQRPQDFDSAAVLAQLQEEAADLLRKRDSRRAYSGVSSAARDSKPPLNSKQEDQKPGNTSTEAKLASLYAYRKAQGLCYKCGLQYSRGHKCADTVQLHLVEELWNMVPVAEPELITSDDEQEAKLCMLTLSQTAVENGNSPRTMRFMGHIAGMEILALLDSGSSHSFLSEAVAAQLAGVTLMDKPVNVQVANGSKLSCAYELVNAKWSISGVSFSSTLKVLPLPTYDLIIGMDWLEAHSPMVVHWSQKWLRISLPTSMVTLSGLASSVLHSSVIQVCSLLELPDKEQLILQGLPADIQDLIQHYAPVFELPTGMPPARDCDHQIELLPGASPVQMRPYRYAPALKDEIEKQISEMLQSGIVQPSKSAFASSVILVKKKDNTYRFCVDYRHLNALTVKTKFPVPVIDEFLDELHGATWFSTLDLRAGFHQIRMNPRDQHKTAFQTHHGHFEFRVMAFGLSGAPATFQGAMNSTLAPLLRKCALVFFDDILVYSRTWTDHLLHLSQVLQLLQKDQWHIKLSKCAFAQQQISYLGHVISTQGVATDPAKVKAVQAWPVPTNCKELRGFLGLAGYYRKFVRNFGLIAKPLTNLLKKGELFVWTHIHEQAFSALKQSLTTAPVLALPNFDKPFAIEADASGTGIGAVLLQQEHPLAFVSKALGPRNQGLSTYEKEYLAIILAVDQWRQYLQHSEFVIYSDHRSLSHLTEQKLSTPWQQRMFSKLLGLQYRVVYKKGVENGAADALSRRPPASDDILFSLSSCKPQWLLQVVDSYTNDDQAQKLLAQLALHKSSTGPYTLHSGLLRYKGRVWIGADSRLQTTIVSSLHDSPMGGHSGFPVTYRRIKQLFAWSGMKAQIKSYVACCSVCQQAKADRSRYPGLLQPLPVPEQSWQVIGLDFIEGLPKSANVDTILVVIDTFSKYAHFLPLSHPFTAFKVAQLFLDSVYKLHGMPTSIISDRDRVFTSHLWQDLFRLSGTTLKMSSSYHPQTDGQTERINQCLETFLRSFVHACPSKWSSWLSLAEYWYNTSFHSSLGRSPFEVLYGHPPRHFGITVADASVSVDLQTWLTDRELMVKVIRQHLLRAQQRIKHQADKGRSEREFQVGDSVFLKLQPYVQTSVATRANHKLSFKYFGPYTVVQHIGKVAYKLQLPATAAIHPVFHVSQLKRALGVPPPLVSGTLPDDLGHLQVPVQILNRRVVFRGGRQVPQVHVRWSQSDEALATWEDEDSLHARFPAAAAWGQAASQGRGTVSDPVRRSTEDEAALQESRQPLGRRVRRPNIRVTGKEWAA

SEQ ID NO: 47639 - protein, 70 aa, Zea mays
  Coding DNA Sequence Number=SeqID_5860
MALGPIGVWAPIVGLLIFRLAELLGDTWSAKMGRHELWAYFGYTIPGYLSATLKPSYNSLELFDEPPSNP

SEQ ID NO: 47640 - protein, 84 aa, Zea mays
  Coding DNA Sequence Number=SeqID_5861
MAGPLEHRERRMKLRHNGCIPVIAVVTADDGKTLAYNRHGRLLGKGRLCRLRASRLCTTLIYQRRLRTVGGQAIDHLLFPQTTD

SEQ ID NO: 47641 - protein, 332 aa, Zea mays
  Coding DNA Sequence Number=SeqID_5862
  Gene Ontology: Mol. function=transcription regulator activity; Cellular component=nucleus; Biological process=regulation of transcription
  Homolog annotation: Hit_ID=Q6ZGS3; Match level="QueryCoverage=98%, HitCoverage=94%, E-value=3e-65, Identity=46%"; Hit description =Putative basic-helix-loop-helix transcription factor
  Pfam annotation: Domain name=HLH; Domain location=81-132; Score=56.1; E_value=1.1e-13; Accession=PF00010.16; Description=Helix-loop-helix DNA-binding domain
MPALVGAPPGDATVLVYDTFNAASFLLDTAAFCDGAGIIAVAPASANQQQHAPPEREAPTRARKRRRRARNCKSREEAETQRMTHIAVERNRRRQMNEYLAALRSTMPEAYVQRGDQASIVGGAIVFVRELEQQLQCLEAQKRKLLHVPAAAKPDATPAHASSSSTKIRVDSAAASTSNCSSSSSVTEDAAGHARPAPFARFFTYPQYLWCHSARGAAAAAAAEEEEDGRRLGVADVEVALVEAHGSIRVMTARRPGQLVCLVTALQALRLAVLHLSVTTLDALVLYSISVKVEEGCGLATADDVAAAVHHVLCIVDAEATDQQLLAAARPQ

SEQ ID NO: 47642 - protein, 66 aa, Zea mays
  Coding DNA Sequence Number=SeqID_5863
MPRTVADEANWRQPHIGHRASSSMVYLQREKPTVLCVEGCYAVDAPDMFDEYKTRDTNVRCHIKHV

SEQ ID NO: 47643 - protein, 151 aa, Zea mays
  Coding DNA Sequence Number=SeqID_5864
  Homolog annotation: Hit_ID=Q6Z8A4; Match level="QueryCoverage=98%, HitCoverage=52%, E-value=6e-21, Identity=42%"; Hit description =Putative zinc-binding protein
  Pfam annotation: Domain name=PLATZ; Domain location=48-151; Score= -0.9; E_value=8.1e-06; Accession=PF04640.4; Description=PLATZ transcription factor
  Pfam annotation: Domain name=zf-B_box; Domain location=47-88; Score =6.2; E_value=0.027; Accession=PF00643.14; Description=B-box zinc finger
  Pfam module annotation: Pfam domain module=PLATZ::zf-B_box; Domain location=48-151::47-88
MAIDHATPLGLKRRGAMGGGGECDDGSDTRRWPPWLRPLLSASFFVQCRVHADAHKSECNMYCLDCMGGALCALCLAARHRDHHSIQLMGMRCRHGLSVLPSEGEVVVPGKDRGVGDTERSTHPGVQTHIINSAPLDRRQEWPLKLAGHGS

SEQ ID NO: 47644 - protein, 136 aa, Zea mays
  Coding DNA Sequence Number=SeqID_5865
MAPLPFLLGFLLGALALAAVEAAAILLLLRRLRRSQAAAGDALPAADELPGERPFPYEKQGFLWILEPEKMPKLSNDRLSAGGPRETKDKKNIVEVFPAKKMAKIKGNSLCLSGPDGSQATIELLNCTLTVKGVGS

SEQ ID NO: 47645 - protein, 219 aa, Zea mays
  Coding DNA Sequence Number=SeqID_5866
MPLLGLLVAISLNVVATTSPKHGGEFGHGRGVRVRTGAVHHELCPRLHHVGTGRHGAVPGPGVRGHRPPVAPPKQAQWVAPMSTLQERIAEEWRRKEKKGSCSGSATTSGHLAEMHAVERAARELNSVLEEIAEEEEEEEDEGRRRQGIVDEERARDVTERAEELAAACRTLEETCSALWRPALCDPCWTSLPTQRERGIRGWEIREDGRERWGSTRQS

SEQ ID NO: 47646 - protein, 311 aa, Zea mays
  Coding DNA Sequence Number=SeqID_5867
  Gene Ontology: Mol. function=protein serine/threonine kinase activity; Cellular component=cell surface; Biological process =protein amino acid phosphorylation
  Homolog annotation: Hit_ID=O82103; Match level="QueryCoverage=84%, HitCoverage=31%, E-value=2e-54, Identity=46%"; Hit description=S -domain receptor-like protein kinase precursor
  Pfam annotation: Domain name=PAN_1; Domain location=69-130; Score =11.5; E_value=0.011; Accession=PF00024.16; Description=PAN domain
  Pfam annotation: Domain name=PAN_2; Domain location=70-112; Score =32.8; E_value=5.3e-07; Accession=PF08276.2; Description=PAN-like domain
  Pfam annotation: Domain name=Pkinase_Tyr; Domain location=199-307; Score=-167.8; E_value=0.036; Accession=PF07714.7; Description =Protein tyrosine kinase
  Pfam module annotation: Pfam domain module=PAN_1::PAN_2::Pkinase_Tyr; Domain location=69-130::70-112::199-307
MLVLVLINKILGPRCGYSAGGEEQVKWRRNLLDWRSGFGGYAPKLGMIDQSREREYVHQGFETDVYDFCCNPDANAGSPEDCQVTCFNSCSCSAYTYNDTDCFVWHGDLVNLQEQHTSDGGGTLLFTQACRSELPAAAVHKATLIGIVASGVVAVLLILPVLTRRRCCCRQESVLLVFENTTARLTTFRHNDLQRATDNFSVKLGEGAFGSVFKGQLPAGSSSTPIAVKRLDGFQHGDKQFRAEVSTVGMINHVMNLVRLLGFCAEKTSRLLDYESDTGSLFPCWAAIQQVYSWILLEGTEQPSSQFNFIP

SEQ ID NO: 47647 - protein, 666 aa, Zea mays
  Coding DNA Sequence Number=SeqID_5868
  Homolog annotation: Hit_ID=UPI000065CD39; Match level="QueryCoverage =44%, HitCoverage=31%, E-value=3e-21, Identity=24%"; Hit description =Homolog of Homo sapiens "Uncharacterized hypothalamus protein HT008
MIPGCQGRWFLRAKRFPVKLESKDNEIYNGSKVCYLYTDTSWEKESWCKALRIAATADKEKLNWHAKLSEKFLNYISSLNSEYPCFLKPPILSGEDHEVMDKTSKTDGSSKVRLFLKKLAKKASTKAALESKTSSGMSVQGEKKILDKLRSYQGAPFIEALIGPQEDKLGGNSSQDTVKATAPPAALNQIGQLSTSPDVNADDRVADEGTLCWNLLSSRLFFDAKMSDEINKAIKARIQRTLSNMRTPTYVGEITLTDFSLGELPPYVHAMRVLPLDLNELWAFEVDFEYSGGILLHIETRLEVQEPELQKDIMKSNFGADANGDVDSDLLESIEQYGNQFKGSHNSASSIGENDEADASSQSKSIGWTSAYISRWKTILHSIADHVSQVPLSLAIRISSVRGILRIQMKPPPSDQIWYGFTSMPDLEWDLESSVGDRKITNSHIAALIGNRFKASLRDSLVLPNCESISMPWMLAEKDDWVPRKDAPFIWLNHEPTEMRIHATATASTQSEEGGLKDGGSEESSRVVASIDEAKQEPKAEASLHGQSSSAPGSESAHSDANDELRKPLLITEKLQEEASEGIAMSPMSTSRRAVIPAGEQPQVSASPIGEDAKRKSGRRARMMDFGKRMGDKLEEKRRTIEEKGRHIVEKMRENARTNSMERTSS

SEQ ID NO: 47648 - protein, 42 aa, Zea mays
  Coding DNA Sequence Number=SeqID_5869
MELTVGEQCAATWAQRKAAVGDSRTMRVVVRVERDVREGLRS

SEQ ID NO: 47649 - protein, 64 aa, Zea mays
  Coding DNA Sequence Number=SeqID_5870
MKFKSLCSQELLLCSFMPLLSFTKIDRHIYNVINLKCTKPKRVTISFKNNSNNKRKDVVVQRTK

SEQ ID NO: 47650 - protein, 133 aa, Zea mays
  Coding DNA Sequence Number=SeqID_5871
  Gene Ontology: Cellular component=chloroplast; Biological process =translation
  Homolog annotation: Hit_ID=Q6YTV7; Match level="QueryCoverage=66%, HitCoverage=33%, E-value=7e-35, Identity=86%"; Hit description =Putative Ribosome recycling factor, chloroplast
  Pfam annotation: Domain name=RRF; Domain location=57-133; Score= -67.0; E_value=0.012; Accession=PF01765.9; Description=Ribosome recycling factor
MALHDVSPAAVSSPLRALSRSLPQRPVLMHATIEEIEAEKSFIEDQAKEKMEKAIEIVQANFNTVRTGRANPAMLDRIEVEYYRTLVNLKSIAQISTPDATSLLNQPYDKSSHRALNAPPLYHDSYKIANGGF

SEQ ID NO: 47651 - protein, 438 aa, Zea mays
  Coding DNA Sequence Number=SeqID_5872
  Homolog annotation: Hit_ID=Q6K9W5; Match level="QueryCoverage=99%, HitCoverage=100%, E-value=2e-96, Identity=52%"; Hit description =Putative AT-hook protein 1
  Pfam annotation: Domain name=AT_hook; Domain location=122-134; Score =17.5; E_value=0.022; Accession=PF02178.9; Description=AT hook motif
  Pfam annotation: Domain name=AT_hook; Domain location=183-195; Score =12.6; E_value=0.15; Accession=PF02178.9; Description=AT hook motif
  Pfam annotation: Domain name=DUF296; Domain location=240-372; Score =116.0; E_value=1e-31; Accession=PF03479.5; Description=Domain of unknown function (DUF296)
  Pfam module annotation: Pfam domain module=AT_hook::AT_hook::DUF296; Domain location=122-134::183-195::240-372
MDGRESTVASGPNFSSFYTQHRGIGAPGVPGHSAVLHDPPPAGYRQHLDAVSAGYAFQTPQVGGSHIGQGYHHVEASPHVAQYSSGGGTSSGGDMDIGMGSAVCTNVKGELGSGPAQDEQVKKKRGRPRKYKPDGAVTLGLSPSSSLTPHSASLGMGTMISAPGSGFGSEGSGASGLGAPSEKRGRGRPPGSGKMQQLASLVMLLGYVYDLTVAAFWAVLFTYCPLESRRVYIVSSGTIGVSIIAVLSVQDVAARIMAFSQQGPRAVCIISATGAVSAATLHQDSESGSVVTYEYKHLPTMQIKQKGRFEILCLSGSYLVVDEGGGARTRSGGLCIALCGPDNRVIGGSVGGVLMAAGAVQVIVGSFMYGGGSKKNKVKAELDAEPEEANAGDQEVALAEHSSMAPHPAMSGGGGWASGMMRQMESRTPNIDINSIRE

SEQ ID NO: 47652 - protein, 239 aa, Zea mays
  Coding DNA Sequence Number=SeqID_5873
  Gene Ontology: Mol. function=oxidoreductase activity, acting on paired donors, with incorporation or reduction of molecular oxygen, 2-oxoglutarate as one donor, and incorporation of one atom each of oxygen into both ...
  Gene Ontology: Mol. function=donors; Cellular component=cytoplasm; Biological process=protein metabolic process
  Homolog annotation: Hit_ID=Q6K7Q8; Match level="QueryCoverage=90%, HitCoverage=84%, E-value=4e-72, Identity=58%"; Hit description =Putative prolyl 4-hydroxylase
  Pfam annotation: Domain name=2OG-FeII_Oxy; Domain location=141-224; Score=2.2; E_value=0.073; Accession=PF03171.10; Description=2OG -Fe(II) oxygenase superfamily
  Subcellular localization annotation: CTP_CleavageSite=55; ConfidenceScore=5.32e-01
MAPSRPLMRGIRPPRVFPTRGGRASPYAVALTALLLVSAALLALIAFGVFSLPVSAPNAAATTTAGGETESADTRPARPRARRDLGEGLGERGAQWTEVISWEPRAFVYHNFLSKEECEYLIGLAKPHMVKSTVVDSTTDHGEGLQVLHYEVGQKYEPHFDYFLDEFNTKNGGQRMATLLISDVEEGGETIFPDANVNVSSLPWYNELSEIVKTDLALYFLLQMDLYACDLGLSTGLTP

SEQ ID NO: 47653 - protein, 100 aa, Zea mays
  Coding DNA Sequence Number=SeqID_5874
MAVLGIHERTTLSICRQDRLVRETVLGRPLERWEGLDAGGAEQVTLSIGLLSSECIRRGAFVPLSKGSNMFPIPSSSKHRLGSNGGYGQGGVSESDIRGK

SEQ ID NO: 47654 - protein, 147 aa, Zea mays
  Coding DNA Sequence Number=SeqID_5875
  Homolog annotation: Hit_ID=Q6Z302; Match level="QueryCoverage=43%, HitCoverage=19%, E-value=2e-20, Identity=75%"; Hit description =YbaK/prolyl-tRNA synthetase protein-like
MVPIALPTIFLPAALSSSNLDKFLISIGKQPAYVDLEAAPAVGKDNPPDLAHLVPTGVPNSSEQPVENTAPTNVLKETAPQRYQSWAGNRQQIDQRSPRAILFGHCLPHDHDNLISVSSDPPMGSVMDQFKIQMLVSLGRALWVIYS

SEQ ID NO: 47655 - protein, 88 aa, Zea mays
  Coding DNA Sequence Number=SeqID_5876
MTPGGLLFLHELISGAAAGQEAGTDVAADEGVEREGAALPTIPAVEHPEALKNTASSTHSLACNGEEIDSMESCLKTCSSMRASLHIA

SEQ ID NO: 47656 - protein, 262 aa, Zea mays
  Coding DNA Sequence Number=SeqID_5877
  Gene Ontology: Mol. function=transcription factor activity; Cellular component=nucleus; Biological process=regulation of transcription, DNA-dependent
  Homolog annotation: Hit_ID=Q6Z301; Match level="QueryCoverage=85%, HitCoverage=86%, E-value=9e-51, Identity=52%"; Hit description=AP2 domain-containing transcription factor-like
  Pfam annotation: Domain name=AP2; Domain location=38-102; Score =118.2; E_value=2.3e-32; Accession=PF00847.10; Description=AP2 domain
MVKGAQLQDAAADAARNAAAAAARQQGCGGGGPAGCGKRQYKGVRMRSWGSWVSEIRAPNQKTRIWLGSYSTAEAAARAYDAALLCLKGSAADLNFPVHLPFHIPAAAMSPKSIQRVAAAAAANATCGSPLQAGAGAAAAAPHYYSYSSSAASTMAADGATPPCSYGDASSGVSSPETAGNTDDLCYGVAHDDDVDMVAGDADLAALADIESFFRSPKCMEYAMMDPCSTFFAPAPMATDAASEWEWEEEGEIDLWSFSSLN

SEQ ID NO: 47657 - protein, 96 aa, Zea mays
  Coding DNA Sequence Number=SeqID_5878
PVVPVVKAEPLKNQWADEDVVEDDVKESWEEEEEEEVGRGCRGKCGIVDGSAFMVGAIKGGRREATRGWKERVLGSARLRDTRVGLGRQRDFCSEM

SEQ ID NO: 47658 - protein, 115 aa, Zea mays
  Coding DNA Sequence Number=SeqID_5879
MHNGREQDNGEQTDVRSSKPEEGGHKVNRGGFGSIQERRGQEPRSEDQSRSHGDKDYGGDDSMSSNGGGKGWNHGGVQGRSREEKGIYGVELKQLSEALNEPLGRSGRCDVVRGP

SEQ ID NO: 47659 - protein, 374 aa, Zea mays
  Coding DNA Sequence Number=SeqID_5880
  Gene Ontology: Mol. function=transcription factor activity; Cellular component=nucleus; Biological process=regulation of transcription, DNA-dependent
  Homolog annotation: Hit_ID=Q6K7E6; Match level="QueryCoverage=99%, HitCoverage=100%, E-value=2e-93, Identity=52%"; Hit description =Ethylene-responsive transcription factor 1
  Pfam annotation: Domain name=AP2; Domain location=126-190; Score =134.8; E_value=2.4e-37; Accession=PF00847.10; Description=AP2 domain
MCGGAILAELREPAPRRLTERDIWQQKKKPKRGGAGGRRSFAAEDDEDFEADFEDFEADSGDSDLELGEGADDDVIEIKPFAAKSTFSREAMLLRFDSFLLADGLSTMTTAGYDAPAARLAKRKRKNQYRGIRQRPWGKWAAEIRDPQKGVRVWLGTFNSPEEAARAYDAEARRIRGKKAKVNFPDAPAVGQKCRSSSASAKALKSCVEQKPIVKTDMNILANTNAPFYQSVNYASNNPFVPAMNSTVSFEDPIMNLHSDQGSNSLGCSDLGWENDTKTPDITSIAPIPTIAEGDESVFVNSNSNSSMVPPVLENNAVDLTDGLTDLESYMRFLMDGGASDSIDSLLNLDGSQDLGSNMDLWTFDDMPIAGDFF

SEQ ID NO: 47660 - protein, 370 aa, Zea mays
  Coding DNA Sequence Number=SeqID_5881
MGIGQRRTVTRVEVNRGSTAPPNLANGDGEFGHPRSTAAHGPVPRWRCWRSGGGALTWLTAKRRPQPRAVLGVRRSVAADPVARAARRRAGSSRPDRGTTLGAAVDQAMPSAHRHDGRPRARTLMRRHWRPCRRDDMDVPGTAAQSRCGLTGGESRGWKPSHGITGGEKTAQSRCPPSRAHCGPTCTVTHASVRRRRRSRETLSEQQYREPPYSTLGQLNDRDSVVPPIPLMTTFCRLASGAAEVVFFFTSPANYRPTQFAFDWAANANAIERRASNTTANELQPIKNRHALFVCLPGELIGSSWMTSPSASSHMTPLSAVAPYVRVVGGARKKLQRAPRPTVDHHTAGSTDFYSQKAEARFYSFPNKRK

SEQ ID NO: 47661 - protein, 69 aa, Zea mays
  Coding DNA Sequence Number=SeqID_5882
MSSGVPDLGWGAGGMVASDLAVEYGSSVLTPMWRCPVVVVACTHQHMDARRFLVGRDADGVVAVQPPKT

SEQ ID NO: 47662 - protein, 197 aa, Zea mays
  Coding DNA Sequence Number=SeqID_5883
MDYRLDDGLAAMAGEPQVSDDAASAKLPPTPPDLTTHGAGVCACCLRERLSHLSLPPSVVRGCGEEEGYRHSRYHEEEASSSCSEVSTAYSSEGSSVASASECASPAPGEPRFHDEVRRAARVSLLMRHERVVGDADAVAAFLLARRRRRTAATSFWAKLLHAARAGGGKKDRGCSLAAPGTKTLEERAAAAKWVLF

SEQ ID NO: 47663 - protein, 415 aa, Zea mays
  Coding DNA Sequence Number=SeqID_5884
  Gene Ontology: Mol. function=metal ion binding; Cellular component =integral to membrane; Biological process=ubiquitin cycle
  Homolog annotation: Hit_ID=Q6PU50; Match level="QueryCoverage=84%, HitCoverage=80%, E-value=1e-62, Identity=45%"; Hit description =RING/C3HC4/PHD zinc finger-like protein
  Pfam annotation: Domain name=PHD; Domain location=126-171; Score=3.3; E_value=0.027; Accession=PF00628.19; Description=PHD-finger
  Pfam annotation: Domain name=zf-C3HC4; Domain location=127-168; Score= 34.4; E_value=3.9e-07; Accession=PF00097.15; Description=Zinc finger, C3HC4 type (RING finger)
  Pfam module annotation: Pfam domain module=PHD::zf-C3HC4; Domain location=126-171::127-168
MPRHGHTLLAALLASALAAASAQPSYDDNGQVHVSTAMIALLAAVIAVFVFIAFFTVYLRHCTGSYAARPDDYDHRAMPNFDAFISRSRRQRRPRGLDADVVEAFPTMKYAEAKALRVGKGCSALECAVCLSEFEDEERLRLLPRCSHAFHPDCIGEWLASHVTCPVCRRNLDPYKDTSSDEDPASFVPPIPVASSISSETTAVLGQGRPLPVAVVIDVITQQEEEARRQEALELQQIGTQRRAMRRSRSGRKPVPTQLARSHSTGHSLAVRLDRDLERFTLRLPEHVRREMVAAAGEHSHSMQLRRGRRAGEGSSRGGRSAPLGRTPRWQLLLARTLSGKLSFFSASRVTVSSELGEVSSWSSITRARGNRVAAVEADDVPAKGIGGGSGAASREVAAAADEEKKKAATQQVRT

SEQ ID NO: 47664 - protein, 116 aa, Zea mays
  Coding DNA Sequence Number=SeqID_5885
  Subcellular localization annotation: CTP_CleavageSite=51; ConfidenceScore=5.44e-01
MAQPAWPMQVVRVSMRAVQPRSCRHSASGPVAACAAKPLETASKGPATFARASRGPGKTKPVWDTDRERDSSPRTSAWTRACADDLSWGPPKPACRLVLVLVPACRLDLDGASCLP

SEQ ID NO: 47665 - protein, 74 aa, Zea mays
  Coding DNA Sequence Number=SeqID_5886
METEDFFYSTLPSVSLLVDSPTHPLPIWLFFKETLNPASNSDSLLPRAIPDAGTNWLMFELLWRDFFRFRTCIL

SEQ ID NO: 47666 - protein, 157 aa, Zea mays
  Coding DNA Sequence Number=SeqID_5887
  Subcellular localization annotation: CTP_CleavageSite=58; ConfidenceScore=5.34e-01
MMDGPPSRGRPTGPGNQAAAQQDPRLLFRPSLPPGSYYSARHSPSPNPCARGHVSHCCCSTSTGSGSRGSEWRGGGDDVGGGAVEAKGGGEAERGRVGGGGRGRATRQRVRGRLGIGWSRGGEGWSVGDADIRCDIDGLDPWTAERQNEGGRLLLLS

SEQ ID NO: 47667 - protein, 609 aa, Zea mays
  Coding DNA Sequence Number=SeqID_5888
  Gene Ontology: Mol. function=transcription coactivator activity; Cellular component=nucleus; Biological process=SRP-dependent cotranslational protein targeting to membrane
  Homolog annotation: Hit_ID=Q6K8D9; Match level="QueryCoverage=99%, HitCoverage=100%, E-value=0.0, Identity=72%"; Hit description =Putative GAMYB-binding protein
  Pfam annotation: Domain name=SKIP_SNW; Domain location=187-353; Score= 399.7; E_value=4.2e-117; Accession=PF02731.6; Description=SKIPSNW domain
MATLKDLLPAPKTSASTFYDHSSDPWFKERYGGESAQAAAATRPAAAARPVPPYGKRTGFVPRRPEDFGDGGAFPEIHVAQYPLGMGRRDDKGGSKILALTVDAHGSVAFDAVVKQGENAGKIVYSKHSDLVPKIATADSQATSDDDEEQKQIEETTERTKAALEKVVNVRLSAAQPKNVPTHDSESKFIKYKPSQQSAAFNSGAKERIIRMSEMAVDPLEPPKFKHKRVPRASGSPPVPVMHSPPRPVTVKDQQDWKIPPCISNWKNPKGYTIPLDKRLAADGRGLQEVQINDNFAKLSEALYVAEQKAREAVQMRSKVQRELMLKEKERKEQELRALAQRARMERTGAPPAPSGVPAGGGRGAIQDVDEVMDMEQPREPRESREQRRESREEREGRIERDRIREERRRERERERRLEAKDAAMGKKSKITRDRDRDISEKIALGMASTGGAKGGEVMYDQRLFNQDKGMDSGFATDDQYNIYSKGLFTAQSTMSTLYRPKKDGDSDVYGDADEQLEKVMKTERFKPDKGFTGASERTGKRDRPVEFDKQEENDPFGLDQFLTEVKKGKKAVEKIGGGGTMKASGGSSMRDDYDGGSGRSRINFERGR

SEQ ID NO: 47668 - protein, 101 aa, Zea mays
  Coding DNA Sequence Number=SeqID_5889
MVDSSLRPQQQDSLEAQVPPADAGALESAAVPEGYESNTPDRKSDSTDERPPSKREALLGSKKMEDAVELRSSQEFEEKQYEEKLVLMNTSGGGFNDPRTE

SEQ ID NO: 47669 - protein, 149 aa, Zea mays
  Coding DNA Sequence Number=SeqID_5890
MGAPNEEVQVQPSPATPTEALPLPAGAGNAMRGPRTVEDDEDEDDGLILIIMRFHRADNGIMARSTSAPGGTDSVWVHRRKQYIWNGHSAIDSSLRASAWIWFGFCLRPANAKQELVGSMTGGQGAGSIATAVVASWSGHLSGTVAERN

SEQ ID NO: 47670 - protein, 291 aa, Zea mays
  Coding DNA Sequence Number=SeqID_5891
MRWDQAPSPAWLGDVVWVRHLHAVEESIPDLGKHGRLQSVNGERRLQAAAAAEVPNRVDAVTRLSSRCLAAVKRRSSSARASEALACDGWLAPLSRRSGENGVGVGVGTGRRGGELQLQLCRPAQFGMGTPLRCGDEDYSLAVLGPLDRLEAASLSAGSAPCMDPPACVQFGTPTGGRRWVGVGGCESFGGWMHRSFHTSLPSTRGSGMAGASSFGLGWSLGPATYGLGKVGRGRRRSPTGAHRDAKWPGGHARTLARSVLLVPCLVVRGTGRSAGLPLPVAVWLYIGAVV

SEQ ID NO: 47671 - protein, 84 aa, Zea mays
  Coding DNA Sequence Number=SeqID_5892
  Gene Ontology: Cellular component=chloroplast thylakoid membrane
  Homolog annotation: Hit_ID=Q8LCA1; Match level="QueryCoverage=76%, HitCoverage=39%, E-value=1e-09, Identity=47%"; Hit description =Thylakoid membrane phosphoprotein 14 kDa, chloroplast precursor
MPAFDSMLNIEVTPILILTGSGAFVALWILSSVVSAVDSVPLLPKLLELVGTGYSIWFTARHLLFKESRDGMFAKFKDIKERII

SEQ ID NO: 47672 - protein, 145 aa, Zea mays
  Coding DNA Sequence Number=SeqID_5893
MNVCELTLAVSHPPTGQEQDFGDSKLLEERFSSEGEESLPPVPLSPSSDYSDNSMGLSVAERAYVQFVKRAGLEGSDDSKEEDSSKDSEEEDFEEEGSGSDDESGYEGSDEGGNDDNGNKRAATAQATTTRVATTGGSGNVGGVV

SEQ ID NO: 47673 - protein, 586 aa, Zea mays
  Coding DNA Sequence Number=SeqID_5894
  Gene Ontology: Mol. function=nucleotide binding; Cellular component =endoplasmic reticulum; Biological process=negative regulation of caspase activity
  Homolog annotation: Hit_ID=Q53RJ5; Match level="QueryCoverage=98%, HitCoverage=85%, E-value=0.0, Identity=81%"; Hit description=DnaK protein
  Pfam annotation: Domain name=HSP70; Domain location=41-586; Score =933.8; E_value=7.1e-278; Accession=PF00012.10; Description=Hsp70 protein
  Pfam annotation: Domain name=MreB_Mbl; Domain location=39-420; Score=- 234.9; E_value=0.0041; Accession=PF06723.3; Description=MreBMbl protein
  Pfam module annotation: Pfam domain module=HSP70::MreB_Mbl; Domain location=41-586::39-420
MPPKPSILALVLVSLLCSGYLCGAADGAEAWKRRKAASSPVIGINLGTTYSCVGVYRNGHVDIVANDQGNRITPSWVAFTDDERLVGEAAKNQAPLNPQRTIFDIKRLIGRRFDDEEVQRDVRYLPYKVVNKGGKPYVEVPMKGGERRAFSPEEISAMILSKMRETAESYLGQRVADAVFTVPAHFNDAQRLATKEAGTIAGLNVLRIINEPMAAAIAYGLDREGAEVNVLVYDLGGSTFDVTVLSIDGGVFEVLATSGDTHLGGEDFDQRVMDHFIRLIRRKHGRDISKDGRALGKLRRECERAQDALRSQHQVRVEVESLFDGVDFAEQLTRAKFEELNVDLFRKTLGPVNKAIGDAKLNKSDIDEILLVGGSTRIPKVQELLREMFDGKEPSKGINPDEAVAYGAAVQGSIFSDERGAETEDTLFDFDMGRTRMTLGVETAGGVMTKLIPRNTLIPVKKSQVFTTSEDHQTTVSIKVFESERSLTKDCRELGRFNLTGIPPAPRGVPQIEVTFELDENHILHVTAADKAGGRSRSIAITNDMGRLSNSQEEIDRMVREAEGFAEDNRRVRELVDERNCWLRLF

SEQ ID NO: 47674 - protein, 450 aa, Zea mays
  Coding DNA Sequence Number=SeqID_5895
  Gene Ontology: Mol. function=ferredoxin hydrogenase activity; Cellular component=periplasmic space; Biological process=electron transport
  Homolog annotation: Hit_ID=Q8W303; Match level="QueryCoverage=99%, HitCoverage=98%, E-value=0.0, Identity=74%"; Hit description =Putative hydrogenase
  Pfam annotation: Domain name=Fe_hyd_SSU; Domain location=384-440; Score=5.8; E_value=0.04; Accession=PF02256.8; Description=Iron hydrogenase small subunit
  Pfam annotation: Domain name=Fe_hyd_lg_C; Domain location=89-378; Score=226.6; E_value=5.3e-65; Accession=PF02906.5; Description=Iron only hydrogenase large subunit, C-terminal domain
  Pfam module annotation: Pfam domain module=Fe_hyd_SSU::Fe_hyd_lg_C; Domain location=384-440::89-378
  Subcellular localization annotation: CTP_CleavageSite=34; ConfidenceScore=5.26e-01
MSSSRFSPALQASDLNDFIAPSQDCIISLNKNTSSSSRRPQFIIYSLSSKPLPIFLTQKFYRTNRKKLHGCITSAETVMLEKQSLGDFIDRINSDKAVIVSVSPQSRASLAAFFGLSQSQVLRKLTSLFKSIGVKAVFDTSSSRDLSLIEACNEFVSRYQRSQPSSGQEAGANLPLISSACPGWICYAEKTLGSYILPYISSVKSPQQAIGAAIKHHVAERLGLKPYHVYHVTVMPCYDKKLEAVRDDFTFSVDGKEVTEVDSVLTTGEVLTNVDEEGHLYGVSGGSGGYAETIFRYVAHVIYKREIEGPLDFRILRNSDFREITLEVEGKPVLKFALCYGFRNLQNVVRKIKMGKCEYHFIEVMACPSGCLNGGGQLKPVEGQSAKELIQQLESVYTQDILISDPFRNPIAKKLYDEWLGQPGSENAKKYLHTEYHPVVKSVASQLQNW

SEQ ID NO: 47675 - protein, 279 aa, Zea mays
  Coding DNA Sequence Number=SeqID_5896
  Gene Ontology: Mol. function=oxidoreductase activity
  Homolog annotation: Hit_ID=Q8W301; Match level="QueryCoverage=98%, HitCoverage=98%, E-value=1e-124, Identity=85%"; Hit description =Putative arginine-rich protein
  Pfam annotation: Domain name=RRM_1; Domain location=9-77; Score=39.2; E_value=1.4e-08; Accession=PF00076.12; Description=RNA recognition motif. (a.k.a. RRM, RBD, or
MGKRAVRTVRVRNISDLATEREVREFFSFSGEIEHVDIRFDTVSSGRTAYVTFKDPKALEIALLLSGATIVDQIVNITPAEDYIYIPVTEQQLMVHEVTSRSSASNAELEYSSEANVSPNSRVYVSKAHDVMTNVIAKGSAMRQDAVNKAKAFDEKHQFRANASARINSFDKRVGLSEKINNGISVVNERVKSVDQRLHVSDKTMAALLAAERKLNDTGSAVKTNRYVSAGTSWLNGAFSKVAKAGHVAGSRTREKFQLAVSNLTAKSGKHYQGPAVVA

SEQ ID NO: 47676 - protein, 464 aa, Zea mays
  Coding DNA Sequence Number=SeqID_5897
  Gene Ontology: Mol. function=ammonium transporter activity; Cellular component=membrane; Biological process=transport
  Homolog annotation: Hit_ID=Q84KJ6; Match level="QueryCoverage=95%, HitCoverage=92%, E-value=1e-172, Identity=65%"; Hit description =Ammonium transporter
  Pfam annotation: Domain name=Ammonium_transp; Domain location=16-431; Score=226.7; E_value=5.1e-65; Accession=PF00909.11; Description =Ammonium Transporter Family
MATEAAPEWLDKGDNAWQLAAATLVGLQSVPGLVILYGSIVKKKWAVNSAFMALYAFAATFVCWCFWAFRMSFGDRLLPFVGRPDLAALDQAFLTQQGFAGAYPAATLLFFQFVFAAITLILAAGSLLGRVNFRAWMLFVPLWLTFSYTIGAFSLWSPNGFLFKAGVMDFAGGYVIHLSSGIAGFTAAYWVGPRTAKDREAFPPNNILLTLAGAGLVWMGWTGFNGGAPYAANIDASLAVVNTHLCAATSLLVWLCLDCLVFGRPSVIGAVQGMITGLVCITPAAGLVQGWAAMLMGVASGSVPWCTMMVLHKRSRFLKRVDDTLAVLHTHGVAGSLGGVLTGVLAEPRLSRLFFGDDPRYVGLVYAVKDGRTAAGLRQVGMQLAGIAFVAALNVAVTSAVCLVVGLLVPLRLSEEQLAAGDDAIHGEDAYAVWGDGETYEQSVHGNHSYPMTSNPMSKADEMI

SEQ ID NO: 47677 - protein, 585 aa, Zea mays
  Coding DNA Sequence Number=SeqID_5898
  Gene Ontology: Mol. function=hydrolase activity, hydrolyzing O -glycosyl compounds; Cellular component=integral to membrane; Biological process=carbohydrate metabolic process
  Homolog annotation: Hit_ID=Q9XE93; Match level="QueryCoverage=95%, HitCoverage=94%, E-value=0.0, Identity=83%"; Hit description =Exhydrolase II
  Pfam annotation: Domain name=Glyco_hydro_3; Domain location=102-323; Score=262.0; E_value=1.2e-75; Accession=PF00933.12; Description =Glycosyl hydrolase family 3 N terminal domain
  Pfam annotation: Domain name=Glyco_hydro_3_C; Domain location=395 -581; Score=155.1; E_value=1.8e-43; Accession=PF01915.12; Description= Glycosyl hydrolase family 3 C terminal domain
  Pfam module annotation: Pfam domain module=Glyco_hydro_3::Glyco_hydro_ 3_C; Domain location=102-323::395-581
MALLTAPAVAALLLFFWSAAAQGVPPYKDASKDVEVRVRDLLARMTLAEKVGQMTQIERLVASPQVLRDYYIGSLLSGGGSVPRKQATAAEWVAMVGDFQRACLSTRLGIPMIYGIDAVHGHNNVDPNLVKRIGAATALEVRATGIQYAFAPCIAVCRDPRWGRCYESYSEDRRLVQNMTELIPGLQGDVPQNFTSGMPFAAGKNKVAACAKHFVGDGGTHDGINENNTIIDRKGLMSIHMPAYLDALRKGVSTVMISYSSWNGLKMHANHNLITGFLKGEHKFQGFTISDWEGIDRITSPPGANYSYSVQASILAGIDMIMVPNNYQDFITILTGHVNSGLIPMSRIDDAVTRILRVKFTMGLFENPMPDPSLADQLGKQEHRDLAREAVRKSLVLLKNGKPGDAPLLPLPKKAAKILVAGSHADNLGYQCGGWTIEWQGDTGRITVGTTLLDAVKAAVDPSTAVHPYTETKGDSMNLTIPEPGPSTIQTVCGAVPCATVLISGRPVVIQPFLGTVHALVAAWLPGSEGQGITDVLFGDYGFTGTLPRTWFKSVDQLPMNYGDEHYDPLFPLGFGLTTQGKKGC

SEQ ID NO: 47678 - protein, 159 aa, Zea mays
  Coding DNA Sequence Number=SeqID_5899
  Homolog annotation: Hit_ID=O23408; Match level="QueryCoverage=40%, HitCoverage=11%, E-value=2e-08, Identity=50%"; Hit description=SEN1 like protein
MENHNKSLPARSERQPDVRMSSWIDALIDSKVVGSASTLKQDKHWNILVESAKERNCLFKVPKPFTAFFAEGNPKTMKVERHRLPEPNARVLEEINQEVVRQETMNVDDAADHADVGDDDDDEVTNMSLMSVFRGSHFTVKLMGLEPGGAPAPVFDFTD

SEQ ID NO: 47679 - protein, 123 aa, Zea mays
  Coding DNA Sequence Number=SeqID_5900
MSEKASGTCRLQQEGSVGVWRLKAGGPSTGQQATAIRPYLQDRLQQSTPENREALNLDSGDWRQYLQAGCWRRRAGDGGGDDAAVSPVTASAHVVGIGKKKLGWAAGQVKWATGPKFQSSQPG

SEQ ID NO: 47680 - protein, 824 aa, Zea mays
  Coding DNA Sequence Number=SeqID_5901
  Gene Ontology: Mol. function=endonuclease activity; Cellular component=nucleus; Biological process=regulation of transcription, DNA-dependent
  Homolog annotation: Hit_ID=O23408; Match level="QueryCoverage=61%, HitCoverage=91%, E-value=1e-129, Identity=47%"; Hit description=SEN1 like protein
MAVEKSSSGTSTPSTTSTMDRFQKIVLSWDYLRLIAESKGGKQAKVLQHVKNTYVSVAEYLGVFEPLLFEEVKAQIIQGRSNDEEESGMDWRRGAVGSCTESEGFHKLSVAVEDNFQDNVSENDLLLISKEKFEEGSTPNAYAFALVEQRGGGIHISLRTFVAGEIQNLNVAKPVKSTRLQHFASIIASQNSLLWILKVCSLSTIMREFTAMHSVASLPFKDLILSATEAHKDGDDQSRAWNVPEPLMDYLKVNLNDSQLEAVNAGLSRRSFVLIQGPPGTGKTQTILGLLSAVLHSAPARMQIKGGFDVLKHGPELDIDGKRAHWIKASPWLLGANPRDLIMPVDGDDGFYPTGNELVLGLFTPYMEKKKIFIETRNRIRDENNNTYNPKIVRIGVKALHSVKAVSMDYLIQQKLSGVDRTLDGGRRGAGEYDRIRASILDEAAIVHLLINYKCSLIIPITVFSLPSKICRMTRAFDVVIIDEAAQAVEPATLIPLIHGCRQIFLVGDPVQLPATVISQTAQKLGYGTSLFKRFQAAGFPVQMLKIQYRMHPEISTFPSKEFYEGVLQDGEGLSRKRPWHSYSCFGPFCFFDVDGIESQPSGSGSWVNQDEVEFITLLYHQLALRYPELKSSPEVGVISPYRHQVKLLKDSFRSTFGDQSRELIDVSTVDGFQGREKEIVIFSCVRCNKEQKIGFVSDFRRMNVAITRAKSAVLKGRPGVVVVGSASTLKQDKHWNNLVESAKERNCLFKVPKPLTAFFAEDNLKTMKVERRPPPELNARVLEEINQEVVRQELMNVDDAADHADAGDDDDADMDADDGGGDD

SEQ ID NO: 47681 - protein, 69 aa, Zea mays
  Coding DNA Sequence Number=SeqID_5902
MGRRGGGGEFQPVVPVVKAEPLKNQWADEDVVEDDVKESWEEEEEEECRSDFLFTLPFYLHTYLGICIC

SEQ ID NO: 47682 - protein, 362 aa, Zea mays
  Coding DNA Sequence Number=SeqID_5903
  Gene Ontology: Mol. function=zinc ion binding
  Homolog annotation: Hit_ID=Q69T47; Match level="QueryCoverage=53%, HitCoverage=20%, E-value=4e-31, Identity=42%"; Hit description=PHD finger protein-like
MEVELRAFCSKHSAVGYTSSVENSNLASELNPRKSGPDNTTLNSGKIPILRFTRKNKDKFTNCGTSTSSSGNLIRVKTIEQGALANTVRNANTQPIQIWERGTGHPSVGGDHMGSSGDIAVVLRKLIDSGKISVSDIASEVGISSESLEAALVGETTTFSHGLTLKIMKWLQNYVQMHSAQGDVCKGSSEVVQESKSDRLVTTDTVDVKNPLVLDDDKGVGVLVDLLDSSVTEPAQTRSESNSKILNENSATCATGVTILQNGKKNMVKEGYNPECSAKEFANESTQDFSPISNKYVLKDEHGILHYQLYQFFELVALQFILREILNATSGNKEFGTSTEIPNENQGCGVFIWKKTAKGPLA

SEQ ID NO: 47683 - protein, 636 aa, Zea mays
  Coding DNA Sequence Number=SeqID_5904
  Gene Ontology: Mol. function=RNA-directed DNA polymerase activity; Cellular component=mitochondrion; Biological process=RNA-dependent DNA replication
  Homolog annotation: Hit_ID=UPI00004C1731; Match level="QueryCoverage =94%, HitCoverage=52%, E-value=0.0, Identity=81%"; Hit description =UPI00004C1731 related cluster
  Pfam annotation: Domain name=RnaseH; Domain location=210-337; Score =9.9; E_value=6.9e-06; Accession=PF00075.14; Description=RNase H
  Pfam annotation: Domain name=rve; Domain location=363-514; Score =94.3; E_value=3.8e-25; Accession=PF00665.16; Description=Integrase core domain
  Pfam module annotation: Pfam domain module=RnaseH::rve; Domain location=210-337::363-514
MPFGLRNAGATYQRCMNHVFGEHIGRTVKAYVDDIVVKTRKASDLLSDLEVTFRCLKAKGVKLNPEKCVFGVPRGMLLGFIVSERGIEANPEKIAAIVSMGPIKDLKGVQRVMGCLAALSRFISRLGERGLPLYRLLRKAECFTWTPEAEEALGNLKAFLTNAPILVPPAAGEALLIYVAATTQAIKSQVLADFVAEWVDTQLPTAPIQPELWTMFFDGSLMKTGAGAGLLFISPLGKHLRYVLRLHFPASNNVAEYEALVNGLRIAIELGVRRLDASGDSQLVIDQVMKNSHCRDPKMEAYCDEVRRLEDKFYGLELNHIARRYNETADELAKIASGRTTVPPDVFSRDLHQPSVKIDDTPEPEAPSAHPEKAPGGYTHLLVAIDKFSKWIEVRPLNSIGSEQAVAFFTNIIHRFGVPNSIITDNGTQFTGRKFLDFCEDHHIRVDWAAVAHPMSNGQVERANGMILQGLKPRIYNDLNKFGKRWMKELPSVVWSLRTTSSRATGFTPFFLVYGAEAILPTDLEYGSPRTRAYADQSNQVSREDSLDQLEEARDKALLHSARYQQSLRRYHARGVRSRDLQVGDLVLRLRQDARGRHKLTPPWEGPFVIAKVLKPGTYKLANSQGKVYNNAWNIQ

SEQ ID NO: 47684 - protein, 167 aa, Zea mays
  Coding DNA Sequence Number=SeqID_5905
MAHRDLFIHYADNLFGRVLCPKLSVCACLGVYLYADLVAVVDVLTPLARAREEEAAAKAESATVKASLKEKKAKADRERQRAKFAKAEVAFLRKELETAMNKLFVERLRSAGFAHSVQVYVWVVFNDFRQPNAVSQKPEGFFALNSPLPMLFLKYSTLKKSYYTSSG

SEQ ID NO: 47685 - protein, 136 aa, Zea mays
  Coding DNA Sequence Number=SeqID_5906
MGKNKKGRVLGGGVLLRVWGSPVYASPPVSSDDSDDSQGIAVDVWMYIRAIEHSGLEGSDEAEVSSDEENSSDSSEEESSSDDDDEYDDGDDSDDDDKGGEGDGGKGDGGSDDKGDDNGGKGSGGGSKASGKAPLA

SEQ ID NO: 47686 - protein, 125 aa, Zea mays
  Coding DNA Sequence Number=SeqID_5907
  Gene Ontology: Mol. function=metal ion binding; Cellular component =proton-transporting two-sector ATPase complex; Biological process =ATP synthesis coupled proton transport
  Homolog annotation: Hit_ID=Q6EPF2; Match level="QueryCoverage=95%, HitCoverage=33%, E-value=3e-21, Identity=54%"; Hit description=Ring zinc finger protein-like
  Subcellular localization annotation: CTP_CleavageSite=70; ConfidenceScore=5.26e-01
MATQTMWRTHWAAYPQMQKQSGMEELSSWLSTSTTADTRIKAMFQKKSSVTTRRESSYSAAASCTSSEVPASLYARPTAVAAPWSDGRHSEHRDGDALLDSSSLLGDVGWRGGGSGNAVSPSWEP

SEQ ID NO: 47687 - protein, 129 aa, Zea mays
  Coding DNA Sequence Number=SeqID_5908
MDSRGKPGGARPTRLLADHGEDDFLLQPLARRRSKEGARLLLCEEEGAGGVAPWLAEGKELLRAGCYCRGAGRKKLAAGKNWRGGSAKMPPVARRGLLFIEGALGLGFSHGPNGTGWNGLGPKHVIGLR

SEQ ID NO: 47688 - protein, 151 aa, Zea mays
  Coding DNA Sequence Number=SeqID_5909
  Subcellular localization annotation: CTP_CleavageSite=78; ConfidenceScore=5.65e-01
MTTGLRKNSKQPASVDGVLFTALHNTANRQRARTSGLLHISSSTLRTLERSKGRGCPRKATRCCNKERSTGRKGKICRGTMEGRGLLLGAMDIRERKGAMEQGKMERGTRASCCWRYKKGWGRANMGAGRKLVHFLVVPAAKPEGGAAHRE

SEQ ID NO: 47689 - protein, 833 aa, Zea mays
  Coding DNA Sequence Number=SeqID_5910
  Gene Ontology: Mol. function=RNA-directed DNA polymerase activity; Cellular component=intracellular; Biological process=RNA-dependent DNA replication
  Homolog annotation: Hit_ID=UPI00004C1731; Match level="QueryCoverage =94%, HitCoverage=52%, E-value=0.0, Identity=83%"; Hit description =UPI00004C1731 related cluster
  Pfam annotation: Domain name=RnaseH; Domain location=315-442; Score= -4.7; E_value=0.00016; Accession=PF00075.14; Description=RNase H
  Pfam annotation: Domain name=rve; Domain location=545-704; Score =101.6; E_value=2.4e-27; Accession=PF00665.16; Description=Integrase core domain
  Pfam module annotation: Pfam domain module=RnaseH::rve; Domain location=315-442::545-704
MPFGLRNAGATYQRCMNHVFGEHIGRTVEAYVDDIVVKTRKASDLLSDLETTFRCLKAKGVKLNPEKCVFGVPRGMLLGFIISERGIEANPEKITAITDMGPIKDLKGVQRVTGCLAALSRFIRFISRLGKRGLPLYRLLRKTECFTWTPEAEEALGNLKALLTNAPILVPPAAGEALLIYVAATTQVVSAAIVVERREEGHALPVQRPVYFISEVLSETKIRYPQIQKLLYAVILTRRKLRHYFESHPVIVVSSFPLGEIIQCREASGRIAKWAVEIMGDTISFAPRKAIKSQVLADFVAEWVDTQLPIAPIQPELWTMFFDGSLMKTGAGADLLFISPLGKHLRYVLRLHFPASNNVAEYEALVNRLRIAIELGVRRLDARGDSQLVIDQVMKNSHYRDPKMEAYCDEVRRLEDKFYGLKLNHIARRYNETADELAKIASGRTTVPPDVFSRDLHQPSIKTDDRPEAPSAQPEAPSAQPEAPSAPEGEALRVEEERSGVTPNQNWFLLADRGGDATRIVRTCQGCQFYARQTHLPAQALQTIPITWSFAVWGLDLVGPLQKALGGYTHLLVTIDKFSKWIEVRPLSSIRSEQAVAFFTNIIHRFGVLNSIITDNSTQFTGRKFLDFCEDHHIRVDWAAVAHPMTNGQVERANDMILQGLKSRIYNDLNKFGKRWIKELPSVVWSLRTTPSRAMGFTPFFLVYGVEAILPTDLEYGSSRTRAYDDQSNQANREDSLDQLEEARDMALLHSARYQQSLRRYHARGVWSRDLQVGDLVLRLRQDARGRHKLTPPWEGPFIIAKVLKPGTYKLANSQGEVYNNAWNIRQLRRFYP

SEQ ID NO: 47690 - protein, 83 aa, Zea mays
  Coding DNA Sequence Number=SeqID_5911
  Subcellular localization annotation: CTP_CleavageSite=56; ConfidenceScore=5.29e-01
MAERYGWDMGMAPRVGHGNGATGHGNRNGNATATSDATTSVPSPAPVPAEAVLCVTASAAVEMASSSASSRHQVTITLGRSGQ

SEQ ID NO: 47691 - protein, 112 aa, Zea mays
  Coding DNA Sequence Number=SeqID_5912
MEHAIYLPCRTDIALRYEQFKHIGKNQSRYDHHGEAVPMILDDAFLVWYHSVLEAHRLLINSYQDQERPFMVVDTQKENKHRDQRPTSTHMPRVGCVMPQPANKVQHFSTSA

SEQ ID NO: 47692 - protein, 234 aa, Zea mays
  Coding DNA Sequence Number=SeqID_5913
  Pfam annotation: Domain name=E3_binding; Domain location=1-30; Score =0.3; E_value=0.089; Accession=PF02817.7; Description=e3 binding domain
MAKHHMVDLAKVTGTGTYDRIMPIGIEAAVEIQAKSLPALGGVHGYYSLVEDKYEILCARSLIGDEFACGELQAEVHGDGGGTVGRPDGLQGWVMIKRGPLSAPAMPSAEPLSQVATGTKIFFSSLPRPPSYHYHKRQTPPGRANGGAGRAGCAYAFVLPVAGLVLRYVRKDFPVGLCRVTISQGQAEAAAPHQVDDTRAAGCVCIDSALPPRRTAGQSERAQMQPALRPRPAH

SEQ ID NO: 47693 - protein, 328 aa, Zea mays
  Coding DNA Sequence Number=SeqID_5914
  Pfam annotation: Domain name=AT_hook; Domain location=230-242; Score =7.7; E_value=1.1; Accession=PF02178.9; Description=AT hook motif
  Pfam annotation: Domain name=AT_hook; Domain location=267-279; Score =13.9; E_value=0.09; Accession=PF02178.9; Description=AT hook motif
  Pfam annotation: Domain name=AT_hook; Domain location=30-42; Score =12.1; E_value=0.19; Accession=PF02178.9; Description=AT hook motif
  Pfam module annotation: Pfam domain module=AT_hook::AT_hook::AT_hook; Domain location=230-242::267-279::30-42
EAEWNEAEAGIAAPGAGVAPPAPGGGEETKRKRGRPKGSLDTYKRRRRRRRTGDLVSAVPAASLGDMGHSCGCIPAPPLPPPCTVYTVRDGGVAITPQSMEDEAEGVEAESGNAGAASAARDGEETKRKRGSPEGSLNERNKDRTPKPKAKGRRRRRTDDQTLSVSAVSLGDLGLGVAAGTRSIRERRPAPNAFFDVGSDSDTEHDDDDDEEQTTIDQANHESAKTGDSVKKGGRPRKMEAGQLHTRTQISNGKSNGHTNGNPAGKKRGRGRPKKLTVEQAITRCQFSNGETNKNQILNLTTSDKIFLYGVINCSLYQTPVRHLEWEL

SEQ ID NO: 47694 - protein, 397 aa, Zea mays
  Coding DNA Sequence Number=SeqID_5915
  Gene Ontology: Mol. function=prenyltransferase activity; Cellular component=integral to membrane; Biological process=biosynthetic process
  Homolog annotation: Hit_ID=Q6ZAH2; Match level="QueryCoverage=68%, HitCoverage=68%, E-value=1e-124, Identity=74%"; Hit description =Putative PGT-2
  Pfam annotation: Domain name=UbiA; Domain location=131-390; Score =134.8; E_value=2.3e-37; Accession=PF01040.9; Description=UbiA prenyltransferase family
  Subcellular localization annotation: CTP_CleavageSite=37; ConfidenceScore=5.12e-01
MALLRAAVSELRRRGRGALTPLPALSSLLSSLSPRSPASTRPEPNNPHADRRHVIALRRCPPLPASAVLAPELLHARGLLPRHWSHASPLSTSSSSSRPADKAQLTWVDKWIPEAARPYAMLARLDKPIGTWLLAWPCMWSITIAAMPGDLPDLKMLALFGCGAVLLRGAGCTVNDLLDRDIDNKGVGFLGIQLLLGLGILLQLNNYSRILGASSLVLVFSYPLMKRFTFWPQAYLGLTFNWGALLGWAAIKESIDPAIILPLYTAGICWTLVYDTIYAHQDKEDDLKVGVKSTALRFGDLTKYWISGFGAACVGSLALSGYNADLGWPYYPFIAAAAAQLAWQVSTVDLSSRSDCNKNKCGVVQEWSGLCKLLDLSPSSNLGYLTSISINHGGGLM

SEQ ID NO: 47695 - protein, 868 aa, Zea mays
  Coding DNA Sequence Number=SeqID_5916
  Gene Ontology: Mol. function=metal ion binding; Cellular component =nucleus; Biological process=regulation of transcription, DNA -dependent
  Homolog annotation: Hit_ID=Q6K7P0; Match level="QueryCoverage=83%, HitCoverage=86%, E-value=1e-165, Identity=57%"; Hit description =Putative DNA-binding protein PD3, chloroplast
  Pfam annotation: Domain name=JmjC; Domain location=673-778; Score =40.7; E_value=5.1e-09; Accession=PF02373.13; Description=JmjC domain
MDISKTSHSVLEAEKRSGMPSQADARNILSTRCSALMLLVYIEPRHQSYSLPYLLLQVIDAINVQRIQLFNKHRCMHLTWKLAFSIQHLMYNEFHQVSNFFLLQSGAEAARSKQSRNRRISQNAKKRKRDEGKESMTKKLNKRSKMLTGENALMCHQCQRKDKPRVVRCQSCKKKRFCLPCIEQWYPNLPEDEFAVKCPYCRKNCNCKACLRMRGVEEPPKKEISKENEIRYAFHIVTMLLPWMRELRQEQLEEKEVEANIQGMELRKGEIPGGEEVEYVPPEPKGRSYSFGKIHLLKDADRSKNSSNGESYNGMPAVGNSNNGLLLWKAKSNGSIPCPPKEVGGCGSTLLDLKCLFPEKMFAELEYRADKVLRSGTLAKAMVEINIHRFFSGYTTGRTHARTHWPQMLKLKDWPPSSSFDKRLPRHGAEFISALPFREYTDPRYGPLNLAAKLPAGVLKPDLGPKSYIAYGFYKELGRGDSVTKLHCDMSDAVNILTHTAEVTCQTDIGLIEKIQKDMREQDLQELYGGLNSRSELKLSPAPTECRDESVDEGLKTSYSREGNCVNRDNYNGLDINALPPDDDGDIAKDKESSPGSEWQSELGQSSDHNNGVNTTDEMYNGAHYISHNQKSTGRKVGIKPQEEKSEKADCSGTCAYLKGSSEDNPEMPIVESSEEQSTGGALWDIFRRQDSDKLQDYLRKHCSEFRHIYCNPVKKVFHPIHDQSFYLTEEHKRKLKEEYGIEPWTFEQKLGEAVFIPAGCPHQVRNLKSCIKVALDFVSPENVGECVKLTEEFRRLPSFHKAKEDKLEIKKMAVHALNEAVNFLDPRSSEELKIGVGENICEDESVDEKELPPRRGVEVSGVDEKPK

SEQ ID NO: 47696 - protein, 127 aa, Zea mays
  Coding DNA Sequence Number=SeqID_5917
  Gene Ontology: Mol. function=RNA-directed DNA polymerase activity; Biological process=RNA-dependent DNA replication
  Homolog annotation: Hit_ID=Q7FS87; Match level="QueryCoverage=60%, HitCoverage=6%, E-value=7e-23, Identity=68%"; Hit description =Putative glycerol 3-phosphate permease
MDEGCTQPHSSDPKIKLNTMVLFISSLSLCEESPQVGASHPYKIDHNETTRLFFLKAILKSFAESTRLRVNYQKSNIYPIIVPADKMIILAKTFNCNIGSLPFTYLGLPMGMTKPNLSSFMPLIQKI

SEQ ID NO: 47697 - protein, 558 aa, Zea mays
  Coding DNA Sequence Number=SeqID_5918
  Gene Ontology: Mol. function=hydrolase activity, acting on ester bonds; Biological process=lipid metabolic process
  Homolog annotation: Hit_ID=Q6K6B3; Match level="QueryCoverage=52%, HitCoverage=91%, E-value=1e-129, Identity=68%"; Hit description =Putative family II lipase EXL4
  Pfam annotation: Domain name=Hydrolase; Domain location=399-558; Score=36.0; E_value=1.3e-07; Accession=PF00702.16; Description =haloacid dehalogenase-like hydrolase
  Pfam annotation: Domain name=Lipase_GDSL; Domain location=34-300; Score=125.5; E_value=1.5e-34; Accession=PF00657.12; Description=GDSL- like LipaseAcylhydrolase
  Pfam module annotation: Pfam domain module=Hydrolase::Lipase_GDSL; Domain location=399-558::34-300
MASASRLVSFAALCLCLGAALQAARGADAAARAFFVFGDSLVDNGNNNYLLTEARADSPPYGIDTPDHRATGRFSNGKNANIIHISKQLRYFEQYQRRLAALIGPEAASRVVRGALVLITLGGNDFVNNYYLVPYSARSREFSLPDYVTYLLSEYAQVLDRLYDLGARRVLVQGVGPIGCVPAELALHSLDGTCDAELQRAAEMYNPRLMALLEELNARHGGGDPVFVGVNMQRIHNDFIDDPKAYGFQTATDACCGQGRFNGMGLCTMVSSLCADRDTYVFWDAFHPTERANRLIVQQFMSGSTDYITPMNLSTVLAVDLQKQQLPEAIRYGRAHPAAQVTLSRHARMLPRLLNGPHRLLLGGPHASGAAPLHRRRVLAGRRAMSASASPASGPRRPLRGVVFDMDGTLTVPVIDFPAMYREVLGGDAAYAAARGSGGGSVDILHCIEDWAPDKQRHAYEVIARFEREGLDRLQIMPGASELCGFLDAKQIRRGLITRNVKDTVDLFHQRFGMTFTPALSREFRPYKPNPAPLLHICSAWNIPPHEVIMVGDSLKDD

SEQ ID NO: 47698 - protein, 658 aa, Zea mays
  Coding DNA Sequence Number=SeqID_5919
  Gene Ontology: Mol. function=protein serine/threonine kinase activity; Cellular component=membrane; Biological process=protein amino acid phosphorylation
  Homolog annotation: Hit_ID=Q6K6B8; Match level="QueryCoverage=89%, HitCoverage=97%, E-value=0.0, Identity=69%"; Hit description =Putative receptor protein kinase PERK1
  Pfam annotation: Domain name=APH; Domain location=269-446; Score= -5.0; E_value=0.013; Accession=PF01636.13; Description=Phosphotransfer ase enzyme family
  Pfam annotation: Domain name=Pkinase; Domain location=267-539; Score =164.1; E_value=3.5e-46; Accession=PF00069.15; Description=Protein kinase domain
  Pfam annotation: Domain name=Pkinase_Tyr; Domain location=267-539; Score=132.2; E_value=1.5e-36; Accession=PF07714.7; Description =Protein tyrosine kinase
  Pfam module annotation: Pfam domain module=APH::Pkinase::Pkinase_Tyr; Domain location=269-446::267-539::267-539
  Subcellular localization annotation: CTP_CleavageSite=36; ConfidenceScore=5.39e-01
RRSSRFASLPISSPIPGSGAATSFQIHRPGNAVAPRAEMGGVGAASLALLPLPLLLLLLVRAEASALHGTILPNPAPSPSSPPEARSFGPRISPSYPPRALSPGSPDIDVRSHSHKPPHHRESNQGPSPSSAEAPYLLFMSIAELEVEVAAGTFLKQSQVKIMAAVASIQDDQKTRVTIYLVPLREEFDTYTASLISDRFRDKKVQINSSIFGDYKVINVSYHGARSTLSTGMVSSASASAFSTVATCTTSVKTFSLGQLQKATDGFDSRRVLGQGGFGCVYHGTIEDGNEIAVKLLTREDRSGDREFIAEVEMLSRLHHRNLVKLIGICVDRSKRCLVYELIRNGSVESHLHGADKAKGKLNWDVRMKIALGAARGLAYLHEDSNPHVIHRDFKASNILLEEDFTPKVTDFGLAREASNATQPISTRVMGTFGYVAPEYAMTGHLLVKSDVYSYGVVLLELLSGRKPVSISESKDPENLVTWARPLLSHKEGLEKLIDPSLEGNFNFDNVAKVASIASMCVHADPSQRPFMGEAVQALKLIYSDPDEACDDSYSPRNSSDQDGGYDGDLVFGSGSWGFGASGSGCLDYRNSLPFVTMDYSSGRIEGPRDPRAALSAGSHAQPPVLQNRSGPLRVKKKLAASYRSRGSVSEHGHLPRH

SEQ ID NO: 47699 - protein, 404 aa, Zea mays
  Coding DNA Sequence Number=SeqID_5920
  Homolog annotation: Hit_ID=Q9FNC5; Match level="QueryCoverage=88%, HitCoverage=95%, E-value=2e-24, Identity=26%"; Hit description =Arabidopsis thaliana genomic DNA, chromosome 5, P1 clone:MRH10
MEEVLRLVRGFVDVLVLAGGRTSSGAAATWSADEIKKALRWALFFEEIFKDLLDSGQYEDSARELDAALLELTSSPEFPKGLAAVRSDLLSMARVLVMRHFLKPNTMSVENFCALLEAVAGMDIDGICASGAHNACQEYAESILNMNTSCFAQTMNACDGGLPTSSYDLRAESTGHSWIIVKEFQKTLDSASCGRLADRGLETFLNSVKRNILENGSNKPCVPAIPKTSQMIDEFLMWKQWRAKCLSYLLDQRTIRVLSGASLIFKAPKEQWMKVFEPLKSIEETCHSGLVETMVFGALAVTVFTHEKDILDYARQTLERKPSVLWLLPPVLTAAAIPPQSSLFQIYLAQIDKQIHEAAPADRKCSCRGDEIDRHVNCEITERIQCLYAFLIQQLSYNGSTRLH

SEQ ID NO: 47700 - protein, 111 aa, Zea mays
  Coding DNA Sequence Number=SeqID_5921
MAIILYWVYTVTFSPIVLYWVYTDGYQLILHPLERYRLHTLDEEEENFVSLCTVVCGILLHHLVHAIHVMVLFMLPRVMENDVIARYYGQGKGIVVKAIYDREATPYNFSV

SEQ ID NO: 47701 - protein, 270 aa, Zea mays
  Coding DNA Sequence Number=SeqID_5922
  Homolog annotation: Hit_ID=Q1SSZ2; Match level="QueryCoverage=26%, HitCoverage=15%, E-value=2e-10, Identity=47%"; Hit description=C2 calcium/lipid-binding region, CaLB
  Pfam annotation: Domain name=C2; Domain location=17-104; Score=43.2; E_value=9.1e-10; Accession=PF00168.20; Description=C2 domain
MPAPPGNVDGSSPSHLLEVTVISAQDLQRRRLGRRVRAYAVAWADARQKLRTGVDHAGGAAPTWNDRFLFRVDGAFLRSETAAVTVEVRGAGVLGGDTVLGVTRIVVSTFVRPAGGAQVAALQLRRPRSLRPQGIVNVAVALLDAARAPPLDGVPGSPDAVAVKDLVMRRPAAPPLRKVGEASEASDEPEMGVDDGPAQGDQEARNNPELVGQSGHLDPRGTAVEQRKLELTLAKWKAEMWPGLKEGRRSGRRRRRRAAFCFRGSGDWDR

SEQ ID NO: 47702 - protein, 282 aa, Zea mays
  Coding DNA Sequence Number=SeqID_5923
  Gene Ontology: Mol. function=nucleotidyltransferase activity; Cellular component=nucleus; Biological process=NAD biosynthetic process
  Homolog annotation: Hit_ID=Q4RVP1; Match level="QueryCoverage=79%, HitCoverage=94%, E-value=6e-46, Identity=43%"; Hit description =Chromosome 9 SCAF14991, whole genome shotgun sequence
  Pfam annotation: Domain name=CTP_transf_2; Domain location=29-213; Score=98.1; E_value=2.6e-26; Accession=PF01467.16; Description =Cytidylyltransferase
MEEVGGDMPLPKQKLSAAPYRDGGGVVLVATGSFNPPTYMHLRMFELAKDELELRGYSVLGGYMSPVNDAYKKKDLLPAAHRIRFCELASKSSSFVMVDPWEAMQNGYQRTLTVLSRIRNSLCKDGVADQGSLKVMLLCGSDLLESFTTPGVWILDQVRTICQDFGVVCIRREGKDVGKLIDNSDILQECRDNIISVDEIVPNQISSSRVRDCIRRSLSIKYLTSDEVIEYIREHKLFMERQWRRHSIAVIEVFGDFHYHAESSATYNMNSDNHINAKVILT

SEQ ID NO: 47703 - protein, 167 aa, Zea mays
  Coding DNA Sequence Number=SeqID_5924
  Pfam annotation: Domain name=Auxin_inducible; Domain location=6-95; Score=2.9; E_value=1.9e-05; Accession=PF02519.5; Description=Auxin responsive protein
MARGCTVPRLPLFGETKPPSGAGGHLLVKTPSRHDAERMVTKGCAMFWVGEEGEAPRRVAVPVARLGHPRMLELLGEAREEYGFAHQGAVVVLVRRRAVHAGDGGLGVGGEQARAPPPWTPSPPLFACLIFTSPGEFSSSVSGEDEGGRESSTGKHEQACGRWGRIS

SEQ ID NO: 47704 - protein, 86 aa, Zea mays
  Coding DNA Sequence Number=SeqID_5925
MAHGSDLEGWGVWLASTFLEVDHLGSLLYPILLVFLPDILGLLAYSKAKRPTPNKDVIRTNAPTIWLSRKKELVNVGGKGDILISS

SEQ ID NO: 47705 - protein, 112 aa, Zea mays
  Coding DNA Sequence Number=SeqID_5926
MGAQTISSYFITAGRRLGRPQASAELRQWRRFGQGDPALHAATCDAPPDHLRAPAEDPLVWRRPVRRSGRISTTQRPGGFRFNREEDPTGGPHPALSAQAWYETQSCGPHEQ

SEQ ID NO: 47706 - protein, 571 aa, Zea mays
  Coding DNA Sequence Number=SeqID_5927
  Gene Ontology: Mol. function=signal transducer activity; Cellular component=membrane; Biological process=response to light stimulus
  Homolog annotation: Hit_ID=Q5SMN3; Match level="QueryCoverage=69%, HitCoverage=62%, E-value=6e-59, Identity=35%"; Hit description=Non -phototropic hypocotyl 3-like
  Pfam annotation: Domain name=NPH3; Domain location=152-417; Score =245.4; E_value=1.2e-70; Accession=PF03000.5; Description=NPH3 family
  Subcellular localization annotation: CTP_CleavageSite=36; ConfidenceScore=5.08e-01
MKLMRLGTRPDSFFTSGPVRLCARAPTPPELPGLPGAAQRRSRPAPKFCYGVAITVGAHNVVPLRCAAARLGMTEAADRGNLAAKLDAFLASCLLRRWKDALAVLRSAAGRHAAECEELGVTSPVRRGRRDARRLGPPGGGDAAAAPSSSASPWWARDVSDLGVDLFWRVMVAVKAAGTVKGRAVGDALKTYARRWLPAVAKSGYLVLEQTDISTAEWNSRASCRKDGFFLKLLKAASVLGASPASKAELTRRVALQLEDASVSDLLIPSSCAGETLYDVDAVTAILEELALRQAAAAGVPEASPPHARGHRRSRSAESSEYEGARRSASAPASHGAMVRIGRLVDGFLMEVAKDPNLPLDKLIAIAEAVPDCARPEHDHLYRAVDTYLRVHPEIDKGSRKKLCRVLNCRKLSETASMHAARNELLPLRVVVQVLFFENARAAALSVRGANGRAAAGGVKALLAKTRREETDGEEKRLRGLAVAGAPGDDGNDWSVEGLKRAASRVSTLRMRLEEDADDEAFVHRARAGAGLVRSASARVRALCAIPAGKPRRMLSRLWPSSSSSAVTERR

SEQ ID NO: 47707 - protein, 96 aa, Zea mays
  Coding DNA Sequence Number=SeqID_5928
MARLQMQHGVNGGGSGGVGACEGEGEGNGVLGQMEPSWGSHAWRAVSEKINRRWGVGQIGCYTHDPIAPPFLPPSNVGRPPITFLSRAPVPSLPKP

SEQ ID NO: 47708 - protein, 70 aa, Zea mays
  Coding DNA Sequence Number=SeqID_5929
MARLQMQHGVNGGGSGGVGACEGEGEGNGVLGQMEPSWGVMREGDSEKINRSGRGADWWSGGPTRRTIGC

SEQ ID NO: 47709 - protein, 183 aa, Zea mays
  Coding DNA Sequence Number=SeqID_5930
MKPAEAKTRDPVADVEKQQPLLLPPSTAAKENAPSGDACGCEALPRASPTAARTLALVVLVAGAAFAAQLAAREEYVLLAVFASQLASFCLFTSLLALCALPEGAGRRRRARWAARAAGQVLQWSVAMAVPTSMACWVVQSAPPAVGAALLGLALAAVLACNAELVRALWPVRAGTSPHTDGL

SEQ ID NO: 47710 - protein, 524 aa, Zea mays
  Coding DNA Sequence Number=SeqID_5931
  Gene Ontology: Mol. function=transferase activity; Cellular component= mitochondrion; Biological process=metabolic process
  Homolog annotation: Hit_ID=Q1SQX3; Match level="QueryCoverage=77%, HitCoverage=76%, E-value=1e-116, Identity=36%"; Hit description=IMP dehydrogenase/GMP reductase
  Pfam annotation: Domain name=PPR; Domain location=148-182; Score =40.5; E_value=5.7e-09; Accession=PF01535.11; Description=PPR repeat
  Pfam annotation: Domain name=PPR; Domain location=184-218; Score =40.3; E_value=6.6e-09; Accession=PF01535.11; Description=PPR repeat
  Pfam annotation: Domain name=PPR; Domain location=220-254; Score =38.5; E_value=2.3e-08; Accession=PF01535.11; Description=PPR repeat
  Pfam annotation: Domain name=PPR; Domain location=255-289; Score =34.5; E_value=3.7e-07; Accession=PF01535.11; Description=PPR repeat
  Pfam annotation: Domain name=PPR; Domain location=290-324; Score =53.2; E_value=8.9e-13; Accession=PF01535.11; Description=PPR repeat
  Pfam annotation: Domain name=PPR; Domain location=325-359; Score =34.5; E_value=3.8e-07; Accession=PF01535.11; Description=PPR repeat
  Pfam annotation: Domain name=PPR; Domain location=360-394; Score =42.9; E_value=1.1e-09; Accession=PF01535.11; Description=PPR repeat
  Pfam annotation: Domain name=PPR; Domain location=395-429; Score =48.4; E_value=2.5e-11; Accession=PF01535.11; Description=PPR repeat
  Pfam annotation: Domain name=PPR; Domain location=430-464; Score =46.8; E_value=7.4e-11; Accession=PF01535.11; Description=PPR repeat
  Pfam annotation: Domain name=PPR; Domain location=465-499; Score =46.0; E_value=1.3e-10; Accession=PF01535.11; Description=PPR repeat
  Pfam module annotation: Pfam domain module=PPR::PPR::PPR::PPR::PPR::PP R::PPR::PPR::PPR::PPR; Domain location=148-182::184-218::220-254::255- 289::290-324::325-359::360-394::395-429::430-464::465-499
  Subcellular localization annotation: CTP_CleavageSite=60; ConfidenceScore=5.51e-01
MAPPTSPAAVAAAARASPTPAAALALFKSALSADRALCPLSVLPHLSASPSLPHLLLTASAAARPHATSLRLYAQLKSLSVPIPVASLHPLLSSLPSAPAFALFADIYRLRLPLCTTTFNIMLRHLCATGKPVRALELLRQMPRPNAVTYNTVIAGFCARGRVQAALEVMREMRERGGIAPDKYTYATLISGWCKIGRMEDAVKVFDEMLTKGEVAPSAVMYNALIGGYCDVGKLDVALQYREDMVQRGIAMTVATYNLLMHALFMDARASDAYAVLEEMQKNGFSPDVFTYNILINGYCKEGNEKKALEVFEEMSQKGVRATAVTYTSLIYVFSRKGQVQETDRLFNVAVKKGIRPDVVMYNALINSHCTGGDMERAYEIMAEMEKKRIPPDDMTYNTLMRGFCLLGRLDEARTLIDEMTKRGIQPDLVSYNTLISGYSMKGDIKDALRVRDEMMDKGFNPTLMTYNALIQGLCKIRQGDDAENLMKEMVAKGITPDDSTYISLIEGLTTEDERMAAADAAKA

SEQ ID NO: 47711 - protein, 276 aa, Zea mays
  Coding DNA Sequence Number=SeqID_5932
  Gene Ontology: Mol. function=protein serine/threonine kinase activity; Cellular component=cytoplasm; Biological process=protein amino acid phosphorylation
  Homolog annotation: Hit_ID=Q9SLZ6; Match level="QueryCoverage=67%, HitCoverage=37%, E-value=2e-53, Identity=61%"; Hit description=OsPK4
  Pfam annotation: Domain name=Pkinase; Domain location=48-252; Score =11.2; E_value=3.2e-09; Accession=PF00069.15; Description=Protein kinase domain
  Pfam annotation: Domain name=Pkinase_Tyr; Domain location=49-231; Score=-120.7; E_value=4.6e-05; Accession=PF07714.7; Description =Protein tyrosine kinase
  Pfam module annotation: Pfam domain module=Pkinase::Pkinase_Tyr; Domain location=48-252::49-231
MEAPDCPVCTGHVRCANGSKTANGRLQHRRKEIGHRTVSGDIQILFPGQRELSLAHGTFAKVYHARHADDTGETIAIKVLDKEKALRNGLVLHIKREIAILRRMRRPNIVRLFEVMATRSKIYFAMEFVRSGELFACVAKGRLKEDTARRYGAMIMEALLELNEPNGSDIAAIFGFIEVSDFGLSAVADKFHPDGLLHTFCGTPSYVAPKSVSFQIASRGLQQRARSSWRLGQLGACSTGRRPSWFLVLQPLRLAIETKHVKLVEAHESTPPPHKY

SEQ ID NO: 47712 - protein, 150 aa, Zea mays
  Coding DNA Sequence Number=SeqID_5933
MEDLELFNDADIGISENPGPVMSSPPPCSSSLPLVALGANNVNEENEKVQDKSRKRKPRKNTTKNWIPKELRTSTSQTSAPNEETTIVPQTAQTMDVETVVIDHGSHENVSADAALVRVETPPTSPARSVKWLVKKITARKNLKRASTRE

SEQ ID NO: 47713 - protein, 532 aa, Zea mays
  Coding DNA Sequence Number=SeqID_5934
  Gene Ontology: Mol. function=hydrolase activity, hydrolyzing O -glycosyl compounds; Cellular component=cellulose and pectin -containing cell wall; Biological process=polysaccharide catabolic process
  Homolog annotation: Hit_ID=Q6Z5P2; Match level="QueryCoverage=91%, HitCoverage=91%, E-value=0.0, Identity=77%"; Hit description =Endoglucanase 7 precursor
  Pfam annotation: Domain name=Glyco_hydro_9; Domain location=35-506; Score=809.7; E_value=1.7e-240; Accession=PF00759.9; Description =Glycosyl hydrolase family 9
MSSAASSPCHRLRRVALLLLVAAVLAGGTEGKAHDYGDALRKSLLYFEAQRSGRLPHSQRVAWRHHSGLTDGLEQGVDLVGGYYDAGDHVKFGLPMAFTVTMLSWSLIEYGGDVADAGELGHALEAVKWGTDYFIKAHTRPDELWAEVGDGDTDHYCWQRPEDMTTSRQAYKVDRDHPGSDVAGETAAAMAAASIVFRGSNPHYAHLLLHHAQQLFEFADKYRGTYDSSIAEVKSYYASVSGYKDELLWAALWLHRATGRDDYLDYVVDNADSFGGTGWAINEFSWDVKYAGVQILAARLLLRGEHAPRHRSTLERYRAKAERYVCACLGRNTEGGADANVERSPGGMLYVRQWNNMQYVTGAALLLSAYSDYLAAAEAGGAARAVSCAAAAEEVFALARAQADYVLGTNPRGASYLVGYGSRYPGRVHHRAASIVPYKHSREFIGCTQGFDHWFGRRGSNPNLLVGAIVGGPDRRDRFRDSRDNYMQTEACTYNTAPMVGVFAKLRRMAWLEREQGSTSVPVTVTSTAAEV

SEQ ID NO: 47714 - protein, 391 aa, Zea mays
  Coding DNA Sequence Number=SeqID_5935
  Homolog annotation: Hit_ID=Q2ACC1; Match level="QueryCoverage=19%, HitCoverage=7%, E-value=3e-27, Identity=81%"; Hit description =Histidine kinase
  Subcellular localization annotation: CTP_CleavageSite=55; ConfidenceScore=5.51e-01
MAIAWTWLTVTPNCSCSILALSSHMLTRRSSARSMLSRRMVQCITAEQATATSTHAAAASPLHLLFVIAAQYLLPPIPASAPTNLLPLLLLLPPPNAHHMLADTRRASRPPELEGAGIPIASSSSKRRGRVRDWKPGGGAGKSGLRAGRGRGAELLKRAFPFVASPLFGRNRSIHFHSASAQRRHEASRGRPSPTGRNPEPALLAAADIRDRRASIKTAIGRQTGRRQVRNGTGRAKEGRSGAADAALLCTPWTRTMGPPLRPERAVPESSGGASPYPRNRRHQLGPTGFSSLGIYPESDTSFSPCSPGFPRGRRKKEEGSESWLWARHDRNRSLSLDIASVPPHAVDPLHHNKSTGIGHWSPSGIGLPRFAVAESADGLLHHGGSAAPPG

SEQ ID NO: 47715 - protein, 52 aa, Zea mays
  Coding DNA Sequence Number=SeqID_5936
MQMLSYSTQMLSYSTLPSTTTSMCDVLLEVGLTWQGDASCRQALTWQKHARN

SEQ ID NO: 47716 - protein, 127 aa, Zea mays
  Coding DNA Sequence Number=SeqID_5937
MAATRLGGAVVDGAEGAQGAQISYEGVSASRAGAASAVVDGSEGGGTGAWRQLEQERGGPAGDDERGQMEREQGSPPVVVRKSGCGEETNEGSREGTGQGRGLTSLSDSEGGLVPYRGAGVGVRKLE

SEQ ID NO: 47717 - protein, 77 aa, Zea mays
  Coding DNA Sequence Number=SeqID_5938
MAKHGSRRRDRGRQTVEEDLVQTGDHSDEQYPSRWGTIRRTEADMSLDEGWLADPVALALISPPLALSTKTRSFLAL

SEQ ID NO: 47718 - protein, 120 aa, Zea mays
  Coding DNA Sequence Number=SeqID_5939
MAGWRGRRLLHRASCLLAAMGGRLGWERLEWDRDIGGGGGVREAAPASATSAEFLYMGTLASRAGERSSDTTSSDDEVSRSSPELRPLPPLARQCAPAPSRSPDGASPSFGECWGLVLKC

SEQ ID NO: 47719 - protein, 56 aa, Zea mays
  Coding DNA Sequence Number=SeqID_5940
  Subcellular localization annotation: CTP_CleavageSite=27; ConfidenceScore=5.05e-01
MSQHHQPCLRVGSHLCAPSTASRARISCMLTDPCSQSRRRQGDERGRRRRTDLLWD

SEQ ID NO: 47720 - protein, 424 aa, Zea mays
  Coding DNA Sequence Number=SeqID_5941
  Gene Ontology: Mol. function=ATP-dependent helicase activity; Cellular component=nucleus; Biological process=translation
  Homolog annotation: Hit_ID=Q2MJJ9; Match level="QueryCoverage=99%, HitCoverage=100%, E-value=0.0, Identity=95%"; Hit description =Putative RH2 protein
  Pfam annotation: Domain name=DEAD; Domain location=58-224; Score =208.4; E_value=1.6e-59; Accession=PF00270.19; Description=DEADDEAH box helicase
  Pfam annotation: Domain name=Helicase_C; Domain location=292-385; Score=91.5; E_value=2.5e-24; Accession=PF00271.21; Description =Helicase conserved C-terminal domain
  Pfam module annotation: Pfam domain module=DEAD::Helicase_C; Domain location=58-224::292-385
MAAPTTSRRGPGGARNMDDENLTFETSPGVEVVSSFDQMGIKDDLLRGIYGYGFEKPSAIQQRAVLPIINGRDVIAQAQSGTGKTSMISLTVCQIVDTAVREVQALILSPTRELASQTERVMLAIGDHLNVQVHACIGGKSIGEDIRRLENGVHVVSGTPGRVCDMIKRRTLRTRAIKLLVLDEADEMLSRGFKDQIYDVYRYLPPELQVVLISATLPHEILEMTSKFMTEPVRILVKRDELTLEGIKQFFVAVEKEEWKFDTLCDLYDTLTITQAVIFCNTKRKVDWLTEKMRSNNFTVSAMHGDMPQQERDAIMGEFRSGATRVLITTDVWARGLDVQQASIRTIFFVFVSSFALLVSLVINYDLPNNRELYIHRIGRSGRFGRKGVAINFVRKDDIRILRDIEQYYSTQIDEMPMNVADLI

SEQ ID NO: 47721 - protein, 51 aa, Zea mays
  Coding DNA Sequence Number=SeqID_5942
MAGTDLVGDERGARRDQGYSWRRIRNPEGISAISEIQKYVEKCRKMVIGVA

SEQ ID NO: 47722 - protein, 191 aa, Zea mays
  Coding DNA Sequence Number=SeqID_5943
  Subcellular localization annotation: CTP_CleavageSite=37; ConfidenceScore=5.02e-01
MSGAPEDSGFKLVTFGNFQRPLRYNSPDCPVCTGHVRCSKEGRPQELASLGFSFQPLRYNSPDCPVCTGLSGASAEQRLLQAPTATCSAFIARQCAQRSGTPMLAHRTLYSTCPVRHRTSRRAQKSELQRSISNGTDDVAGAPDCPVRHRTDSLPTTIFGGWEVVCSMAHRTVTVPLANVISAVGNRPLEF

SEQ ID NO: 47723 - protein, 100 aa, Zea mays
  Coding DNA Sequence Number=SeqID_5944
MSRDSLSSLGCLDPIFTTEIRTVGSGTDGCDGVHRVLWLGDWRCSFRGGEVAGGEADVVAGGLGSPVRAGMGEEGPANSLAGLRPREWDRRRENDEGEVL

SEQ ID NO: 47724 - protein, 207 aa, Zea mays
  Coding DNA Sequence Number=SeqID_5945
  Gene Ontology: Mol. function=metal ion binding; Cellular component =integral to membrane; Biological process=ubiquitin cycle
  Homolog annotation: Hit_ID=Q6K966; Match level="QueryCoverage=71%, HitCoverage=78%, E-value=5e-42, Identity=59%"; Hit description=RING zinc finger protein-like
  Pfam annotation: Domain name=zf-C3HC4; Domain location=124-165; Score= 26.8; E_value=7.5e-05; Accession=PF00097.15; Description=Zinc finger, C3HC4 type (RING finger)
MRTPASLLHSHSAIADTPSPAALLLPAHVEEQQAISVDSDTVVILSSLLCALICVAGLALVARCACRRGGGASVSVSATTSGGRSSAQAPSGLEKAAIEALPTVSVSSSLKQASRRDAADKEECAICLAAFVEGDQLRVLPRCAHGFHAACVDTWLAAHASCPSCRATIVSVVSPLCRRCGAACCDQQEETPMAAPEPAAAGRGLHA

SEQ ID NO: 47725 - protein, 362 aa, Zea mays
  Coding DNA Sequence Number=SeqID_5946
  Homolog annotation: Hit_ID=Q6K962; Match level="QueryCoverage=97%, HitCoverage=94%, E-value=2e-87, Identity=54%"; Hit description=PRLI -interacting factor A-like
MDPSQMMFPIWGAPPPAALKPPSDDHAAAPNAQAQPFLPPPNPNRGWKRKNPAAAAYQPPALGDLQVQNRAKARRWFKNSGGGNPNQSRKYFFPKNKNNKVAAPRNTTSFIIRAKRAGGIASLVSPCPVTPAVLPTPRLSPSREGLADMAQAQWGVDGYGSMKGLIRLRSSPQPANPNAAASDDDDEGNSSGSDVEEHVEVERRLDHDLSRFEMVYPGRGEDAGGYVLEDDDEYDQDAHVARLEEENLTLKERLFLMEQEKTDAHNAEKQQVAAGSEKAGGNDPEKQQGAAGSEKAGGNDVDGQDVVVGVSGKTGADSAEKQQGIVGTEKTGEHSIEMVDSLIEEKMDDDNGENEVRLAASQ

SEQ ID NO: 47726 - protein, 396 aa, Zea mays
  Coding DNA Sequence Number=SeqID_5947
  Gene Ontology: Mol. function=cation transporter activity; Cellular component=membrane; Biological process=cation transport
  Homolog annotation: Hit_ID=Q6K961; Match level="QueryCoverage=71%, HitCoverage=78%, E-value=2e-48, Identity=81%"; Hit description =Cation efflux family protein-like
  Pfam annotation: Domain name=Cation_efflux; Domain location=80-394; Score=-89.0; E_value=0.00036; Accession=PF01545.11; Description =Cation efflux family
  Subcellular localization annotation: CTP_CleavageSite=69; ConfidenceScore=5.62e-01
MDTPTAKAAWNANYGVVGSGDRRLAFSRQLSSNATTPRLARSDSSISMPAPLPLPPVYEGPKPSRKLLRLATASRPMRRLALLLALNVAYSATEFAIGLFTGRVGTSDWRFWLPLQMLQLFLLFLSFSLAVEALHAFMQDESEHKHYLIVSAVTNLLVNLLGVWFFRNYARVNIGTGSNLYPVASGANGDLYLFPCKGCKLNRIMIGSLQECRGYELPLGLFACVGRFNTECRLDTSFLVSFIGVKSIFFTIFTFPVLPIYHGDLWPSVYSFCATTRRIENAEVLCLGIVSVAVFMLVLPLFKATGNILLQIAPSNVPPSAFTKCSRQIAACEDVSEVWQGRFWELVPGQAVGSLSIRVKSGADDRAVLEYTHGLYQDLGIQDLTVQTDEFVGPVS

SEQ ID NO: 47727 - protein, 877 aa, Zea mays
  Coding DNA Sequence Number=SeqID_5948
  Gene Ontology: Mol. function=ubiquitin-protein ligase activity; Cellular component=ubiquitin ligase complex; Biological process =protein ubiquitination
  Homolog annotation: Hit_ID=Q10FT0; Match level="QueryCoverage=92%, HitCoverage=99%, E-value=0.0, Identity=67%"; Hit description=U-box domain containing protein, expressed
  Pfam annotation: Domain name=Arm; Domain location=182-222; Score =19.3; E_value=0.014; Accession=PF00514.13; Description=Armadillobeta- catenin-like repeat
  Pfam annotation: Domain name=Arm; Domain location=224-264; Score =10.7; E_value=0.57; Accession=PF00514.13; Description=Armadillobeta -catenin-like repeat
  Pfam annotation: Domain name=Arm; Domain location=350-390; Score=3.2; E_value=4.8; Accession=PF00514.13; Description=Armadillobeta-catenin -like repeat
  Pfam annotation: Domain name=Arm; Domain location=391-436; Score =15.3; E_value=0.15; Accession=PF00514.13; Description=Armadillobeta -catenin-like repeat
  Pfam annotation: Domain name=Arm; Domain location=491-531; Score=4.3; E_value=3.5; Accession=PF00514.13; Description=Armadillobeta-catenin -like repeat
  Pfam annotation: Domain name=Arm; Domain location=641-686; Score =10.4; E_value=0.61; Accession=PF00514.13; Description=Armadillobeta -catenin-like repeat
  Pfam annotation: Domain name=Arm; Domain location=733-773; Score =18.9; E_value=0.019; Accession=PF00514.13; Description=Armadillobeta- catenin-like repeat
  Pfam annotation: Domain name=Arm; Domain location=779-820; Score =12.0; E_value=0.39; Accession=PF00514.13; Description=Armadillobeta -catenin-like repeat
  Pfam annotation: Domain name=HEAT; Domain location=188-224; Score =17.4; E_value=0.051; Accession=PF02985.12; Description=HEAT repeat
  Pfam annotation: Domain name=HEAT; Domain location=230-266; Score =2.5; E_value=21; Accession=PF02985.12; Description=HEAT repeat
  Pfam annotation: Domain name=HEAT; Domain location=652-688; Score =5.4; E_value=9.4; Accession=PF02985.12; Description=HEAT repeat
  Pfam annotation: Domain name=HEAT; Domain location=744-775; Score =11.6; E_value=1.7; Accession=PF02985.12; Description=HEAT repeat
  Pfam annotation: Domain name=HEAT; Domain location=790-822; Score =0.7; E_value=35; Accession=PF02985.12; Description=HEAT repeat
  Pfam annotation: Domain name=HEAT; Domain location=828-864; Score =0.2; E_value=41; Accession=PF02985.12; Description=HEAT repeat
  Pfam annotation: Domain name=U-box; Domain location=74-150; Score =50.9; E_value=4.2e-12; Accession=PF04564.6; Description=U-box domain
  Pfam module annotation: Pfam domain module=Arm::Arm::Arm::Arm::Arm::Ar m::Arm::Arm::HEAT::HEAT::HEAT::HEAT::HEAT::HEAT::U-box; Domain location=182-222::224-264::350-390::391-436::491-531::641-686::73
  Pfam module annotation: Domain location=188-224::230-266::652 -688::744-775::790-822::828-864::74-150
MPTPASLPRRRQIGALERYLNIICIGTKRCNLNVNSDGAKALTIGIGSEWNKMEGFCGGDSELDEQSNQEPAFEAFMCPLTKQVMHDPVTIETGQTFEREAILKWFRECRDSGRKPTCPLTQAELRSTDITPSIALRNVIQEWRARNEDKELDKAMASLTATQEAQAQDDDDDTLRALLYVSRMKKTLVRRQGVIPTIADLLKSSSRRVRLKALQVLGVIVEEDDENKEELAKGDTIRTIIKFLSNENFQERELAVSLLYELSKFDPTCERIGAIYGAILLLVGMASSKSEHGVAVEKAENTLKNLEKYETNVKQMAENGRLQPLLTKLIQGPPQVQLAMAEFLGELALANDVKVLVAEQVGALLVTIMKTEGSLPAREATLKALREISSNESSARILLQAGILPPLVKDLFSLGAGHLPMRLKEVSAAILANLVASGASFRSIPLDHSGETLLSEEMVHSLLHLISNTGPAIECKLLNVLVGLTASPATVPDVVSAIRSSGATISLIQFVEAAHREIRVESLKLLRNVSPYMGAELADALGLGGSTGNLSSLLGVATVTEDRSGVTEEQAAAVALLGDLPERDWNLTRQLQELGAFRALATKLVELRRGTIRGNRHVAPFTEGAVKVLYRVTCALALLQQEETYVELAREVGLAPLFVELLQQMMSSGQEAVLLYSAMALENLSLQSSRLTDVPAPRRGSSLVCGCFGQGRSPPPPGAMGTCRVHGGFCSLRETFCLAEGGCKAVERLVACLEHADPRVVEAALAALSTLLGDGVANATEGVLVIGEAEGLRPVVEVLVENRTEALQRRAVWAVERILRVEDIALEVAADQTVASVLVEAYRNGDVRTRQTAERALRHLDRIPNFSSAFHQAKGRA

SEQ ID NO: 47728 - protein, 391 aa, Zea mays
  Coding DNA Sequence Number=SeqID_5949
  Gene Ontology: Mol. function=hydrolase activity, acting on ester bonds; Biological process=lipid metabolic process
  Homolog annotation: Hit_ID=Q6YU91; Match level="QueryCoverage=73%, HitCoverage=98%, E-value=3e-48, Identity=66%"; Hit description =Putative family II extracellular lipase 3
  Pfam annotation: Domain name=Lipase_GDSL; Domain location=152-381; Score=104.5; E_value=3.1e-28; Accession=PF00657.12; Description=GDSL- like LipaseAcylhydrolase
MEGWAIMQQAVRRRHGRWPLGVVLPPWLAPSSSSMRSEPSPATSPEAVATTHMPHATATAIYGAAPQQHQLCSAQPASHIYGGILLLFFFPNNISSCKLLCFFSSMGMRVLLVVVLISFAPLITTNAAAGVNATRSAGRQQKQKQKPLAPALIVFGDSIVDPGNNNDIHTIIKADFPPYGTDFQNHRATGRFCNGRIPTDFIASRLGIKELLPPYLTSEPLDKHDLVTGVSFASGGTGFDPLTPQLASVISLPDQLTMFHDYLGKRTMSGGLDRGCSQGHNEIAVAYNAGMVQQLAALRAKYPDTLLVFMDIYGFLYDMMMHPRSYGFTQSTRGCCGTGLLEVSVLCNGVTSAVCQDVGDYLFWDSYHPTEKAYKILADFVFDNYVKLILV

SEQ ID NO: 47729 - protein, 182 aa, Zea mays
  Coding DNA Sequence Number=SeqID_5950
  Gene Ontology: Mol. function=protein binding; Cellular component =nucleus; Biological process=multicellular organismal development
  Homolog annotation: Hit_ID=Q2R4Y1; Match level="QueryCoverage=99%, HitCoverage=100%, E-value=6e-58, Identity=64%"; Hit description=SKP1- like protein 1B, putative, expressed
  Pfam annotation: Domain name=Skp1; Domain location=86-182; Score =150.4; E_value=4.6e-42; Accession=PF01466.9; Description=Skp1 family, dimerisation domain
  Pfam annotation: Domain name=Skp1_POZ; Domain location=9-69; Score =108.3; E_value=2.3e-29; Accession=PF03931.5; Description=Skp1 family, tetramerisation domain
  Pfam module annotation: Pfam domain module=Skp1::Skp1_POZ; Domain location=86-182::9-69
MASEGENKRMITLRSSDLEEFEVEEAVAMESQTLRHMIEDDCADNGIPLPNVNSRILSKVIEYCNSHVHAAAKPADSAASEGGEDLKSWDAKFVKVDQATLFDLILVGFGLDQYILIDWLCVVVEAANYLNIKGLLDLTCQTVADMIKGKTPEEIRKTFSIKNDFTQEEEDEIRMENQWAFE

SEQ ID NO: 47730 - protein, 1808 aa, Zea mays
  Coding DNA Sequence Number=SeqID_5951
  Gene Ontology: Mol. function=ubiquitin-protein ligase activity; Cellular component=intracellular; Biological process=protein modification process
  Homolog annotation: Hit_ID=Q6YU89; Match level="QueryCoverage=97%, HitCoverage=97%, E-value=0.0, Identity=75%"; Hit description =Putative HECT ubiquitin-protein ligase 3
  Pfam annotation: Domain name=Arm; Domain location=116-163; Score=0.5; E_value=10; Accession=PF00514.13; Description=Armadillobeta-catenin -like repeat
  Pfam annotation: Domain name=Arm; Domain location=165-206; Score=4.2; E_value=3.7; Accession=PF00514.13; Description=Armadillobeta-catenin -like repeat
  Pfam annotation: Domain name=Arm; Domain location=263-301; Score =22.3; E_value=0.0018; Accession=PF00514.13; Description =Armadillobeta-catenin-like repeat
  Pfam annotation: Domain name=HEAT; Domain location=268-303; Score =22.1; E_value=0.002; Accession=PF02985.12; Description=HEAT repeat
  Pfam annotation: Domain name=HECT; Domain location=1423-1808; Score =380.1; E_value=3.4e-111; Accession=PF00632.15; Description=HECT -domain (ubiquitin-transferase)
  Pfam module annotation: Pfam domain module=Arm::Arm::Arm::HEAT::HECT; Domain location=116-163::165-206::263-301::268-303::1423-1808
MEPSPSSRRRSRAAAADKGKDPDPASSDHPSPPAPDDDADVTFPQPFTSASTALQGLLRRLGAGLDDLLPSSSSAPSSATSGHLKRILAGLQAHGDESRQLQSLMQLCEMLSIGTEDSLAAFPVDAFVPILVGMLGREDEPATAGASPDVMLLAARALSNLVDVLPSSCSAVVHYGAIQCFCARLLTIEYMDLAEQSLQALKKISLEHPTACLRAGALMAVLSYLDFFSTGVQVGSSDLLTTVLILCTVCIYLHLFPWGTKLPSDASEFVMEAVPLLTNLLNHHDSKVLEHASVCLTRIAEAFAYYPDKLDELCNHGLVAQAASLIAVGNSSGQTSLSTSTYTGLIRLLSICASGSLLAVKTLLLLGISGTLKDILSGSALISGTSVSPAVTRPADQMFEIVSLADDLLPHIPARIIKLPTYYHTYKGSSTKKSASIKQEGGGSTGNERSGRERLLREQPELLQQFGMDLLPTMTQVYGSSVNAPIRHKCLSIIGKLMYYSSAETIQSLLGTTNISSFLAGILAWKDPQVLIPALQIAEIMMEKLPETFSKLFVREGVVHAVESLICSESSNKMPSQVPPQDKDKDSAMPSRSRRQRRRAGAVAAENSSLDESNSSNLGVMCSTATASEAPNTSLRFTVSDHAKSFKDKYFPADTDSSDIGFTDDLLKLRALCAKLNTVSENVKTKAKGKSKAISTNFLDISIDVEEQLDKIISEMLSELSKVNGVSTFEFIRSGVVIALLDYLSCGTFGKEKVSEGNLSQLRQQALRRYKTFISVALSIDHGRDETPMALLVQKLQSALSSLERFPVVLSQSSRIGIGGSRLTSGLSALAQPFKLRLSRAQGEKSLRDYSSNIVLIDPFASLASVEEFLWPRVQRSEVASKPIIPSGNNSESGVPGTTAGASLTAAMAQSGRRPTTRSKSSAAGGLTSKKDSHDESTSTAKGKGKAIVKPNSDESKGPNTRNAAHQKSASEKDLEMKQAHGHSSSEDEELDTSPVEIDDALMIDDDDISDDDDDDDDDHEVLQEGSLPICSQDGVHDVKLGDADESNIGSATFSHAQPSSGSGARNTSSRGPDSTEFRSMGTFGSRGAMSFVAATMAGLASVGGRSVRGVRDRRGLSLGGSMNDHNKLIFTAGGKQLNKHLTVYQAIQRQLMLDEDDEERFNGSDIPNDGNRFWGDVFTITYQKADNQVEKGCQGTSTSLNIKSDSYRSISEAQGVSLLDSILQGELPCDLERTNSTYNILALLRILEGLNQLSPRLRVQGASDDFAEGKINTLDELYRTGAKVPSEVFVNSKLTPKLARQMQDVLALCSGSLPSWCYQMTKACPFLFPFETRRQYFYSTAFGLSRALNRLQQQQSDNHSSGGEREVRFGRLQRQKVRVSRNRILDSAAKVMEMFSSQRAVLEVEYFGEVGTGLGPTLEFYTLLSHELQCAQLGLWRATSSYDSGLHTDMKDVIRLDPEDGSSGKELNTDLPGDGMYLIQAPLGLFPRPWPPKVDTSEGSRFFKVLEYFRLIGQVIAKVLQDGRLLDLPLSTAFYKLILGQELDLFDIVSFDSEFGKTLQELQVLVERKQFLESTSGKNQLQVADLCFHGASIEDLCLDFTLPGYPDYVLKEGEGGTIVNIYNLEEYITLVVDATVKSGIKRQVEAFRSGFNQVFDMSSLHIFSPQELDYLICGRQEIWESESLVDNIKFDHGYTAKSPAIVNLLEILSEFTPEQQHAFCQFVTGAPRLPHGGLAALSPKLTIVRKHPSSAVNTSNSTGAVESADDDLPSVMTCANYLKLPPYSTKEIMRKKLLYAILEGRGSFDLS

SEQ ID NO: 47731 - protein, 711 aa, Zea mays
  Coding DNA Sequence Number=SeqID_5952
  Gene Ontology: Mol. function=RNA-directed DNA polymerase activity; Cellular component=intracellular; Biological process=RNA-dependent DNA replication
  Homolog annotation: Hit_ID=UPI00005A975E; Match level="QueryCoverage =99%, HitCoverage=39%, E-value=0.0, Identity=84%"; Hit description =PREDICTED: similar to Retrovirus-related Pol polyprotein from transposon 297
  Pfam annotation: Domain name=RVT_1; Domain location=56-225; Score =138.1; E_value=2.3e-38; Accession=PF00078.17; Description=Reverse transcriptase (RNA-dependent
  Pfam annotation: Domain name=RnaseH; Domain location=455-582; Score =8.7; E_value=9e-06; Accession=PF00075.14; Description=RNase H
  Pfam module annotation: Pfam domain module=RVT_1::RnaseH; Domain location=56-225::455-582
MLGIPRDVVEHSLDIRAGARPVKQPLRRFDEEKRRAIGEEIHKLMVAGFIKEVFHPEWLANPVLVRKKGGKWRMCVDYTGLNKACPKVPYPLPRIDQIVDSTAGCGTLSFLDAYSGYHQIRMKEFDQLATSFITPFGMYCYVTMSFGLRNAGATYQRCMNYVFGEHIGRTVEAYVDDIVVKTRKASDLLSDLEVTFRCLKAKDVKLNPEKCVFGVPRGMLLGFIVSERGIEANPEKIAAITSMGPIKDLKGVQRVMGCLAALSRFISRLGERGLPLYRLLRKAECFAWTPEAEEALGNLKALLTKAPILVPPTDGEALLVYVAATTQVVSAAIVVERQEEGHALPVQRPVYFVSEVLFETKIRYPQVQKLVHVVILTRRKLRHYFESHPVTVMSSFPLGEIIQCREASGRIAKWAVEIMGETISFAPRKAIKSQVLADFVAEWVDTQLSTAPIQPELWTMFFDGSLMKTGAGAGLLFISPLGKHLRYVLRLHFPASNNVAEYEALVNGLRIAIELGVRRLDARGDSQLVIDQVMKNSHCRDPKMEAYCDEVRRLEDKFYGLELNHITRRYNETADELTKIASGRTTVPPDVFSRDLHQPSVKIDDTPEPEAPSVQPEVPSAQPEAPSARPEAPSVQPEVPSAPEGEALHVEEEQSGATPDRNWQTPYLQYLRLGELPLDQAEARRVARRAKSFVLLGDEKELYHRCPSGIL

SEQ ID NO: 47732 - protein, 230 aa, Zea mays
  Coding DNA Sequence Number=SeqID_5953
  Subcellular localization annotation: CTP_CleavageSite=63; ConfidenceScore=5.02e-01
MAPRKLCDDGGSQLSYGSRRTAFLEKVGRAGTRTRQALSWGHSLPSPAWTLVTPYCKRTRPGRGMNTKAVGFPPLSRPSPATSLPPFALAHALDLSGLGHAAHSLVGLGTPRSRNADSHGPVSRGNRRSIRHDHRGVLFYSMKTLYTYDASRPHGERHPTPPHGQALERSRDGEDPGMSKGPILACVQALPYTPHSGGDPLLPREDVPPATMLTDDVPSQHLMRPVDKPC

SEQ ID NO: 47733 - protein, 39 aa, Zea mays
  Coding DNA Sequence Number=SeqID_5954
MDPAEIALSTANPALALSVCHCPGTLFVSRLPPRTWALA

SEQ ID NO: 47734 - protein, 187 aa, Zea mays
  Coding DNA Sequence Number=SeqID_5955
  Subcellular localization annotation: CTP_CleavageSite=57; ConfidenceScore=5.30e-01
MDPAEIALSTTNPALALSVYHCPGTLFVSRLPPRTWALACCNKSLDPRSLLGEKCARSAKFVGRCNRPGSMPLGRTPTRGINHCRGRRVGAVRGGEGAPAAGVLVDAVVAGLWVGQSRVIVELHEVWAHCQGVLKLRIPASRRGWLLNLGDFSPVAMELPCHMGGIAVTTIRDPRANSAYRFNDGGI

SEQ ID NO: 47735 - protein, 582 aa, Zea mays
  Coding DNA Sequence Number=SeqID_5956
  Homolog annotation: Hit_ID=Q6K7E2; Match level="QueryCoverage=74%, HitCoverage=89%, E-value=0.0, Identity=93%"; Hit description =Mitochondrial transcription termination factor-like
  Pfam annotation: Domain name=mTERF; Domain location=194-542; Score =409.9; E_value=3.7e-120; Accession=PF02536.5; Description=mTERF
MAAMVGTPAVMEQGSGEGGCEEIWTSGGVVEAAWGGRAQGGGVGMEVGDEDPRRTPPSGQTRATSSRPKDQPPPAEPHAAQSSLRLAAAAACAAPGAPRPSAMLALARALRSLGQAGARREGPLLAWLSSLRSAAFSSSSAPPEYDMPSVTWGVIQGRKERLVSRVLALDFLRSAGVSDPAGELEAVELPSSLEVLQERLDFLLRLGLSTDDLSNYPLLLACSLRKNVIPVLSYLEKLGVTRARLAAFVRAYPACLHASVAVDLAPMVKALRGLDVDRQDLPRVLERYPDVLGLKPDGTISTSVAYLVGIVGVAPRDIGPMVTHFPFFLGMRVGTTIKPFCDYITSLGLPMRILARILEKRPYILGYDLEETVKPNVEALLSFGIQKEALPLVIAQYPSILGLPLKAKLAAQQYFFTLKLQIDPDGFARVIEKLPQLVSLNQNVILKPVEFLRGRGISNEDVARMVVRCPQILLLRIELMKNSLYFFKSEMKRPMSELLEYPEYFTYSLESRIKPRYMRVTSRGIKCSLDWFLNCSDMRFEDRMQGDFIEGDAPGPSFTMGGKLQMPGSQLVSDDDEDTDDE

SEQ ID NO: 47736 - protein, 94 aa, Zea mays
  Coding DNA Sequence Number=SeqID_5957
  Subcellular localization annotation: CTP_CleavageSite=35; ConfidenceScore=5.03e-01
MVDYAECTVVNSAAQKSEQQSQRSPDYPVWHQTVRCSKTTRRPNGESPRERNDRRGMRRWATEDPEEPNALVWKKQLTLGPHLAVTQEEQRAAR

SEQ ID NO: 47737 - protein, 117 aa, Zea mays
  Coding DNA Sequence Number=SeqID_5958
MQEFPCRTAIAAKSSRGSPYTDHSPTALAPFGYQDDLQILKFPVTTALPQNTTPTARRPQILRAPTAGESPRERNDRRGMRRWATEDPEEPNALVWKKQLTLGPHLAVTQEEQRAAR

SEQ ID NO: 47738 - protein, 1332 aa, Zea mays
  Coding DNA Sequence Number=SeqID_5959
  Gene Ontology: Mol. function=protein binding; Cellular component =thylakoid; Biological process=DNA integration
  Homolog annotation: Hit_ID=Q6K7D3; Match level="QueryCoverage=89%, HitCoverage=90%, E-value=0.0, Identity=60%"; Hit description =Putative BRUSHY1
  Pfam annotation: Domain name=LRR_1; Domain location=1078-1101; Score =1.3; E_value=1.6e+02; Accession=PF00560.23; Description=Leucine Rich Repeat
  Pfam annotation: Domain name=LRR_1; Domain location=1105-1121; Score =5.2; E_value=31; Accession=PF00560.23; Description=Leucine Rich Repeat
  Pfam annotation: Domain name=LRR_1; Domain location=1134-1157; Score =3.5; E_value=64; Accession=PF00560.23; Description=Leucine Rich Repeat
  Pfam annotation: Domain name=LRR_1; Domain location=1162-1179; Score =0.5; E_value=2.3e+02; Accession=PF00560.23; Description=Leucine Rich Repeat
  Pfam annotation: Domain name=LRR_1; Domain location=1268-1290; Score =5.0; E_value=33; Accession=PF00560.23; Description=Leucine Rich Repeat
  Pfam annotation: Domain name=LRR_1; Domain location=911-931; Score =7.0; E_value=14; Accession=PF00560.23; Description=Leucine Rich Repeat
  Pfam annotation: Domain name=LRR_1; Domain location=937-959; Score =12.6; E_value=1.2; Accession=PF00560.23; Description=Leucine Rich Repeat
  Pfam annotation: Domain name=LRR_1; Domain location=993-1017; Score =0.4; E_value=2.4e+02; Accession=PF00560.23; Description=Leucine Rich Repeat
  Pfam annotation: Domain name=TPR_1; Domain location=174-207; Score =21.4; E_value=0.0033; Accession=PF00515.18; Description =Tetratricopeptide repeat
  Pfam annotation: Domain name=TPR_1; Domain location=217-250; Score =13.9; E_value=0.12; Accession=PF00515.18; Description=Tetratricopepti de repeat
  Pfam annotation: Domain name=TPR_1; Domain location=257-290; Score =31.7; E_value=2.5e-06; Accession=PF00515.18; Description =Tetratricopeptide repeat
  Pfam annotation: Domain name=TPR_1; Domain location=388-421; Score =9.0; E_value=0.46; Accession=PF00515.18; Description=Tetratricopeptid e repeat
  Pfam annotation: Domain name=TPR_1; Domain location=428-461; Score =11.3; E_value=0.24; Accession=PF00515.18; Description=Tetratricopepti de repeat
  Pfam annotation: Domain name=TPR_1; Domain location=77-110; Score =15.1; E_value=0.085; Accession=PF00515.18; Description =Tetratricopeptide repeat
  Pfam annotation: Domain name=TPR_2; Domain location=174-207; Score =18.7; E_value=0.021; Accession=PF07719.7; Description=Tetratricopepti de repeat
  Pfam annotation: Domain name=TPR_2; Domain location=217-250; Score =19.0; E_value=0.018; Accession=PF07719.7; Description=Tetratricopepti de repeat
  Pfam annotation: Domain name=TPR_2; Domain location=257-290; Score =26.5; E_value=9.4e-05; Accession=PF07719.7; Description =Tetratricopeptide repeat
  Pfam annotation: Domain name=TPR_2; Domain location=37-70; Score=4.9; E_value=9; Accession=PF07719.7; Description=Tetratricopeptide repeat
  Pfam annotation: Domain name=TPR_2; Domain location=388-421; Score =8.4; E_value=3.5; Accession=PF07719.7; Description=Tetratricopeptide repeat
  Pfam annotation: Domain name=TPR_2; Domain location=428-461; Score =15.5; E_value=0.2; Accession=PF07719.7; Description=Tetratricopeptide repeat
  Pfam annotation: Domain name=TPR_2; Domain location=77-110; Score =15.2; E_value=0.24; Accession=PF07719.7; Description=Tetratricopeptid e repeat
  Pfam module annotation: Pfam domain module=LRR_1::LRR_1::LRR_1::LRR _1::LRR_1::LRR_1::LRR_1::LRR_1::TPR_1::TPR_1::TPR_1::TPR_1::TPR _1::TPR_1::TPR_2::TPR_2::TPR_2::TPR_2::TPR_2::TPR_2::TPR_2;
  Pfam module annotation: Domain location=1105-1121::1134-1157::1162 -1179::1268-1290::911-931::937-959::993-1017::174-207::217-250::2 7
MARGGGGRSKKEDEEELRGAKRGYKEASAEGNREEEARWANVIGDIYKRRCEYVEALRWLRADYEVSVKHLPQRHLLPSCQSLGEVYLRLGRFSEALTYQKKHLQLAKESDDLVEQQRATTQLGRTYHEILLRSENDHSAIRNAKKYFKSSMKLARILKERSPSQKSDFLKELIDAYNNMGMLELELDNFEEAEKLLIQGLKICDDEEVDSYDDARTRLHHNLGNVYTELQNWKKARGHIEKDIEICRKIRHLQGEAKGFINLGELHYRVQKYDNAKLCYNKALEVARSLEDEDALIEQIHQNIETVTKAVEVFEQLKEDELKLKKLIRDTSNARGTSKERKLLLDQHAWLDSLIEKARMICAWQKHKEFSKGKKRVANELRDKEKLSDSLLSIGESYQKLRNFSKARKWYMKSWNIYRSIGNLEGQALAKVNIGNVLDSCGDWAGALQAYEEGYRIAVEADLPNVQLSALENMHYSHMVRFDNIEEAKKMQEKIDNLKQTLNQCEARDTVSDYCSETDTEGGCTSDNTLDAQNDHGQAANNYEEPDDDVTLASLVQRSGSSSKIKVPKIRNSSKKFDELCDVTEDIHNSSKKVDELGDMAEGTRAVLSRSRSDHSVGRKRVRVILSDDESDENHENVQFKKTSTSPADSMSVSADHGASSSRNQDTLQVNQTRDAPYPAEESICSFKSSSPIDHAFEGIGLGASSAGKGPTSKSAASFSKLSTPGSNSLNESQNAVGSQSKDADNPQTLIRHLLASYTVTPTMDILWNKMGCFLCSTSGPSESAAIWFTWMDVLVYMKISDEKRAKGLLPIIGELKFRGKVLEDAVSIYYDDQLASEQKCVDVVIDDWVPKQLMKLYVDFCMKSLEAPNKKLLTKLYNLEVSEDEIIVSDCGLQDMSIVPFLDALRSHKTIAVLDLSHNLLGSLFQICECAVLTDRLEVLNLSGNRLTDACSSYLFTILKKCKALYSLNVEQCSITSRTVQKMTDALHEESVLSHLSLGKNNPISSNTMLNLLSKLASLTRFSELSLTGIKLNKLMVDKLCLLAQSSCLSGLLLGGTSIGPVETTRLTEALSCTSQDFLRLELSNCGLTTPDFTQICTNLSRINILELNLGGNPINLEGCDAVQRMLVNPQCSIRSLSLDKCNLGLAGIVRVIQSLPENSQLEELRVSKNTNLALETTTKYDEDMQEVSTASEQKQCNDPETTNDIAPGNIDFANMQVPDSEDEADNDAHRARSGSRRSCASSSQKNSYSSCQMIEELAKALISAKQLMVLDLSCNGLSEEAVQSLYSAWASVPRGDGMARKHVNKEVVHFSVDGMRCCGLKPCCRRDLQM

SEQ ID NO: 47739 - protein, 228 aa, Zea mays
  Coding DNA Sequence Number=SeqID_5960
MSGICKYGEQPSPNVMGIGQRRTVTRVEVNRGSTAPPNLANGDGEFGHPRSTAAHGPVPRWRCWRSGGGALTWLTAKRRPQPRAVLGVRRSVAADPVARAARRRAGSSRPDRGTTLGAAVDQAMPSAHRHDGRPRARTLMRRHWRPCRRDDMDVPGTAAQSRCGLTGGESRGWKPSHGITGGEKTAQSRCPPSRAHCGPTCTVTHASVRRRRRSRETLSEQQYRVSFN

SEQ ID NO: 47740 - protein, 114 aa, Zea mays
  Coding DNA Sequence Number=SeqID_5961
  Gene Ontology: Mol. function=hydrolase activity, hydrolyzing O -glycosyl compounds; Cellular component=cell wall; Biological process= carbohydrate metabolic process
  Homolog annotation: Hit_ID=Q6YUP4; Match level="QueryCoverage=62%, HitCoverage=53%, E-value=5e-20, Identity=68%"; Hit description =Xyloglucan endo-1,4-beta-D-glucanase-like
  Pfam annotation: Domain name=Glyco_hydro_16; Domain location=37-114; Score=-63.6; E_value=0.0072; Accession=PF00722.11; Description =Glycosyl hydrolases family 16
MAVKARVSPTGLLAAATWAGLLSLVAASALDVPTVAFDERFSPLFGDGNLVRSPDDRSVRLLLDRRSGSGFVSSDYYLHGFFSASIKLPRGYTAGVVVAFYVSVPSQSMPQRYW

SEQ ID NO: 47741 - protein, 372 aa, Zea mays
  Coding DNA Sequence Number=SeqID_5962
  Gene Ontology: Mol. function=DNA binding; Biological process =regulation of transcription
  Homolog annotation: Hit_ID=Q6YUI1; Match level="QueryCoverage=92%, HitCoverage=96%, E-value=3e-59, Identity=42%"; Hit description=Myb family transcription factor-like
  Pfam annotation: Domain name=Myb_DNA-binding; Domain location=171 -222; Score=43.4; E_value=7.8e-10; Accession=PF00249.21; Description =Myb-like DNA-binding domain
  Subcellular localization annotation: CTP_CleavageSite=41; ConfidenceScore=5.13e-01
MELFPAHPDLQLHISPPPATKPTELGFWKRALDTTPTATTTAAAATTAPSLAFASSAPTAVGHHAAAGAHHNDHHHQVPTTSSHSHLVGLPFLHHTQPILLPEGRGGGLRRDLAAARPIRGIPVYNASQPLLHFLQSHTHCHDAIVGAAGPRLSPKAALRLAAKRGARAPRMRWTTSLHARFVHAVELLGGHERATPKSVLELMDVKDLTLAHVKSHLQMYRTIKTTDHKPANSASSYGQAAAAKPVIDIPDPDDDSLFDLITTSAGSDQSSSSAQHSNPDGGGGNEHGSSMCALWCSSSTSISRGGWFHDRPRDDDAATPGPGDDIKSFEDVQSHSLLDDVADLNSSPFQVVAGMFGSDKKPNLDFTLGRI

SEQ ID NO: 47742 - protein, 40 aa, Zea mays
  Coding DNA Sequence Number=SeqID_5963
MAEDRAKLRMPAAPSLPRDGICWDLGDKPDRVFLSFKSKF

SEQ ID NO: 47743 - protein, 205 aa, Zea mays
  Coding DNA Sequence Number=SeqID_5964
  Gene Ontology: Mol. function=transporter activity; Cellular component= membrane; Biological process=sodium ion transport
  Homolog annotation: Hit_ID=Q6ZFH7; Match level="QueryCoverage=50%, HitCoverage=20%, E-value=8e-18, Identity=44%"; Hit description =Putative sodium-dicarboxylate cotransporter
MWSTYVPEQCPITFTSLMSFRLPMTLFLFLVLYLESAPITWEGLTCSMTFTGKMVLAVFGVSHAFVIFLPIQDLIILWMNKSLMDDIHGWGVLFDDRVGDGTVTGKTGSHFESNTIPPPLSYCFQIGIQSYTFVGDSRAISKTLWSLFSDQDSVRLLAVEGCAALGKLLEPQDYVAHILPVIVNFYQQVICFLCGYIIGRHVFSC

SEQ ID NO: 47744 - protein, 102 aa, Zea mays
  Coding DNA Sequence Number=SeqID_5965
MESSRLTYPDRFYAVAAYAPHKDEAIAGSPSPSLLWDEPFPSSVTAKAAAAGGMGQLRLMCSFRGRIIPCLTVSTDKDHDNLVDEYDYIVVTSYDCGSSRTS

SEQ ID NO: 47745 - protein, 170 aa, Zea mays
  Coding DNA Sequence Number=SeqID_5966
MAQIRHNIKRTGGKGDPIPAVVSQINGQMVITFTELQYAHAHYTAAAAIVGPSPSAIRWPKPNRRQVHVVRNVANVIGATYPRKSDNDQCPRSRAATRRKVKDDEKLTSSWGLAPPDFSPSTTHESARVPEIDSLVQSNGAGERSARRIPWLEMDHGGGARYVQQKGERK

SEQ ID NO: 47746 - protein, 1101 aa, Zea mays
  Coding DNA Sequence Number=SeqID_5967
  Gene Ontology: Mol. function=protein kinase activity; Cellular component=cellular_component; Biological process=protein amino acid phosphorylation
  Homolog annotation: Hit_ID=Q6KAK1; Match level="QueryCoverage=97%, HitCoverage=97%, E-value=0.0, Identity=72%"; Hit description=Protein kinase-like
  Pfam annotation: Domain name=HEAT; Domain location=191-227; Score =22.4; E_value=0.0017; Accession=PF02985.12; Description=HEAT repeat
  Pfam annotation: Domain name=HEAT; Domain location=236-272; Score =4.9; E_value=11; Accession=PF02985.12; Description=HEAT repeat
  Pfam annotation: Domain name=HEAT; Domain location=356-392; Score =5.4; E_value=9.3; Accession=PF02985.12; Description=HEAT repeat
  Pfam annotation: Domain name=HEAT; Domain location=395-431; Score =18.2; E_value=0.029; Accession=PF02985.12; Description=HEAT repeat
  Pfam annotation: Domain name=HEAT; Domain location=435-471; Score =2.3; E_value=22; Accession=PF02985.12; Description=HEAT repeat
  Pfam annotation: Domain name=WD40; Domain location=704-742; Score =41.0; E_value=4.1e-09; Accession=PF00400.22; Description=WD domain, G-beta repeat
  Pfam annotation: Domain name=WD40; Domain location=752-790; Score =4.7; E_value=10; Accession=PF00400.22; Description=WD domain, G-beta repeat
  Pfam annotation: Domain name=WD40; Domain location=854-892; Score =5.9; E_value=7.4; Accession=PF00400.22; Description=WD domain, G -beta repeat
  Pfam module annotation: Pfam domain module=HEAT::HEAT::HEAT::HEAT::HEA T::WD40::WD40::WD40; Domain location=191-227::236-272::356-392::395 -431::435-471::704-742::752-790::854-892
MGNKIARTTQASATEYYLHDLPSTYNLVLLDVVSRGRFLKSVRCKHDEGLLLVKVYFKRTGEPIDLKEHERRLERIRKAFKGIDGSHVWPFQLVNPAGRQIGSGLMSQNNAVSHVKKISKTNLCSLVAAYDDQSDTYSFDIFQQIDTKVSCEGMVLLVSLLCSCIRSVKKPELRRASLILLKFSSTYIDDDRRLQLVLPYVIAMLSDPSAIVRCAALETLCDVLCLVQDFPISDTVIFPEYVLPMLSLLPDDTEESVRVCYASNIHKLALTAYRFLLRSRSIANIRPLDESLVAHRSQSADSPAKRQDIFFRQLAELRKSIYEIVQDLVMGQKQTPNTRRALLQDIGYLCYFFGHKQSNDFLLPILPAFLNDHDEQLRAVFFAQIVYVCYFIGARSVEEYLLPYLEQALSDGMEAILVNALDCLTMMCKSGYLRKRVIVGLLVKVLPLLRYTINWVKQSAVRFVAACSESLGSVDTYVYLSPQLRQFLHREPPSLDSETALLSCLKPPLPKSMFYVPLEDAQDIGNILLKSSGKKEQILHGGRYSGMAQSGSLGNLEDIRRLKGTNISSSVSLDVKDSFSFGKSLYSGFALHASAANSSFYDGLSKGIPSYSFCIDNRGLGETHMVPDSSVYKASIRLPWLEPNRPGMQTRDDHFSSKRRDLSINDSLKSNSSLQGDSISNSDTGGLPFSRSAVNLETGWKPRGILVAHLQEHRFSVNDIAVSNDNTFFVTASDDSSVKIWDTRKLEKDIAFRSRLTYSVGNSRALCTAMVHGTSQVIVGGSNGTLHLFSVDCARSVGSVVERYAGIVGVKRNDIKEGAILSVVNCSPDSFSPTVLFSTEHCGIHKWDTRTNSEFWYFKSSPEEGYISALVVGQCGNWFISGSSRGVLTLWDNRFLLPVNSWNYSIVSPIEKLCLLIPPPSSISSAGRPLVFVAAGCNEVSLWNAENGSCHQMFRTASTDNEAVMSKAPSRPVNKPIIKDIIRARGDLLTGGTDLKIRYWDQARPEQSFCIAGPSAKKVRSAKADILEKAAGNDECYDIRSSFGVQVVQEMYKQNTTVSGLTPKTQFAEAAADSAGSTGPSKAELHVVPGNFGGVGPDCDW

SEQ ID NO: 47747 - protein, 79 aa, Zea mays
  Coding DNA Sequence Number=SeqID_5968
MQYFQENLHNLSVVPNEEYDVLELKWNNGGEWMIGDFADDRTLRASIASFTAADGLQFPRDSGWCQPLTITVMHFEISV

SEQ ID NO: 47748 - protein, 198 aa, Zea mays
  Coding DNA Sequence Number=SeqID_5969
  Gene Ontology: Mol. function=nucleic acid binding; Cellular component= intracellular; Biological process=DNA integration
  Homolog annotation: Hit_ID=Q8H6I0; Match level="QueryCoverage=95%, HitCoverage=12%, E-value=7e-72, Identity=67%"; Hit description =Putative gag-pol polyprotein
MSGDHAKKDMVTGEKHATSHGKAPSGESYNKGKGKEKESPSHKSRRSGDKKKKMRKVVYYETDTSSPSTSSSDTPSVTSKRHERKKFSKIPLRYPRIPKHTPLLSVPLGKPPTFDGEDYARWSDLMRFHLTSLHKSIWDVVEFGVQVPSVGDEDYDEDEVAQIQHFNSQASTILLASLSRAEYNKVQGLKMLRRFGTR

SEQ ID NO: 47749 - protein, 84 aa, Zea mays
  Coding DNA Sequence Number=SeqID_5970
  Subcellular localization annotation: CTP_CleavageSite=48; ConfidenceScore=5.22e-01
MPGVLPALLARLSACQHALSACSALIPIASSTSPVVVVRRRVEYKATCDMVIVSPIAKSSCCITKFRFNDIGYARRIKSMFRIR

SEQ ID NO: 47750 - protein, 72 aa, Zea mays
  Coding DNA Sequence Number=SeqID_5971
MRYGVRRRGSPVLASFEGVAEGLGVPPGSLDEVRSSIGGMITWWSRISRWSSSAATDPPCPWSGYLGVLTTV

SEQ ID NO: 47751 - protein, 67 aa, Zea mays
  Coding DNA Sequence Number=SeqID_5972
MTARNGGTTVMVARPRHREIVALQSLFNFVIVSMIKQSHDPTQSCFQRSSQATVSKISDSELTDSPT

SEQ ID NO: 47752 - protein, 440 aa, Zea mays
  Coding DNA Sequence Number=SeqID_5973
  Gene Ontology: Mol. function=acyltransferase activity
  Homolog annotation: Hit_ID=Q6K714; Match level="QueryCoverage=97%, HitCoverage=99%, E-value=1e-142, Identity=60%"; Hit description =Putative anthocyanin acyltransferase
  Pfam annotation: Domain name=Transferase; Domain location=2-428; Score=20.3; E_value=6.2e-12; Accession=PF02458.6; Description =Transferase family
MAATKILDRLKVGASPPAPGGALPLTFFDVPWLFTGPVERVFFYPYAHTADHFAAHLLPSLVSSLSATLRAFYPLLGRVRPCPDGGGGYEFFCSDGGEAVELIVAESSDDFDELSAGGPRDVARLYALVTVFPARGVAVGVSIHHVACDDSSYTHFIRTWAAQCRVASGGADAVPPPPFLDRGVVADPEGLAGRTLDEMRQLAGNGPPPPPPPAAGPQPKLVIASFALTRDRIDALKRRVAAKVAADGGGTGRVHCSAFTVACALAWACLARVGGGERPRAHLLFSVECRRRLAPPIPQEYLGNCLRPCFVEVGTGELLGGDGVAAAAAAIGAAVAALDGGVLDGAGGWFHKILSLVPERPMSVGGSPRYGVYETDFGLGRPAKVELVSIDKTPGTVSLAEARDAGVEVGVVLQEAEMARFGSCFADALEVLCDSVTELN

SEQ ID NO: 47753 - protein, 79 aa, Zea mays
  Coding DNA Sequence Number=SeqID_5974
  Gene Ontology: Cellular component=endoplasmic reticulum; Biological process=ER to Golgi vesicle-mediated transport
  Homolog annotation: Hit_ID=Q9M2J9; Match level="QueryCoverage=71%, HitCoverage=46%, E-value=3e-16, Identity=71%"; Hit description=Bet1 -like SNARE 1-1
  Pfam annotation: Domain name=SNARE; Domain location=1-54; Score=20.9; E_value=0.0046; Accession=PF05739.9; Description=SNARE domain
MARLGSGRELSGDIHEEVETHNRMLDRMGSDMDTSRGFLSGTVGKFKTVFETKSTGLLLDQVESSTVKVLWGWACSRTF

SEQ ID NO: 47754 - protein, 437 aa, Zea mays
  Coding DNA Sequence Number=SeqID_5975
  Gene Ontology: Mol. function=nucleic acid binding; Cellular component= intracellular; Biological process=DNA integration
  Homolog annotation: Hit_ID=Q7XBC6; Match level="QueryCoverage=99%, HitCoverage=26%, E-value=1e-138, Identity=59%"; Hit description =Putative copia-type pol polyprotein
MGTGEKPITSHGKAPSGESYNKGKGKEKESPSHKSRRSGDKKKKMRKVVYYETDSSSPSTSGSDTPSVTSKRHERKKFKDEDYDEDEVAQIMHFNSQATTILLTSLSREEYNKVQGLKSAKEIWDVLKTAHEGDEVTKITKRETIEGELGRFRLRQGEEPQKMYNRLKTLVNQVCNLGSKKWDDHEVVKVILRSLVFLNPTQVQLIRGNPRYTLMTPEEVIGNFVSFELMIKGSKKTIELDGPSAPEAQPVAFKATEEKKDKSTSSRQPIDASKLDNEEMTLIIKSFRQILKHRRGKDYKPRSKKVCYNDRDNDKKGKRREKKRYYKKKGGDAHVCREWDSDESSTDSSSDEDAANIAITKGLLFPNVGHKCLMAKDGKKKKVKSKSSTKYESSSDDNASDEEDNLRTLFANLNMQQKGKLNELISAIHEKDDLLDS

SEQ ID NO: 47755 - protein, 95 aa, Zea mays
  Coding DNA Sequence Number=SeqID_5976
  Gene Ontology: Mol. function=protein serine/threonine kinase activity; Biological process=protein amino acid phosphorylation
  Homolog annotation: Hit_ID=Q7XIR5; Match level="QueryCoverage=68%, HitCoverage=18%, E-value=5e-21, Identity=71%"; Hit description =Serine/threonine-protein kinase bub1,checkpoint-associated-like protein
FAYCPFVLVIVTCNGCRLQFCGRKYQIKGSTGTGAFAKVYKATVDSDAEEMVALKIQNPSFTLEFYMYRQLDLRISDVERPSYLDLRISDVGYLF

SEQ ID NO: 47756 - protein, 136 aa, Zea mays
  Coding DNA Sequence Number=SeqID_5977
  Gene Ontology: Mol. function=isopentenyl-diphosphate delta-isomerase activity; Cellular component=cytosol; Biological process=isoprenoid biosynthetic process
  Homolog annotation: Hit_ID=Q6K683; Match level="QueryCoverage=98%, HitCoverage=20%, E-value=6e-56, Identity=75%"; Hit description =MutT/nudix protein-like
ELQEFHSALEEAKADIVGLWALNFLIKKGLLPKSLSQSMYVSFLAGCFRSIRFGLEEAHGSLEFVLWKVEDAVESLSREILTIQAKGDKPSAQSLLQSRATLTQPLRMALERIEHMQVPVDIAPVFSTANKLFADI

SEQ ID NO: 47757 - protein, 153 aa, Zea mays
  Coding DNA Sequence Number=SeqID_5978
  Homolog annotation: Hit_ID=Q9SK36; Match level="QueryCoverage=77%, HitCoverage=77%, E-value=6e-11, Identity=31%"; Hit description =Expressed protein
MAADPSRRRPEYHPAVNDVLLTLTNARGTLADVQRRLDLEFRAAYPDHANPAKLVARVKRLEEEAAALKEMCRDLLTQKQELIDQIRVSLMAQRGMTQRLLAASGLPPLSDADETVHNSLNEVIQDWTAQDWEPVRGDNGEFTAGFGHPYPFP

SEQ ID NO: 47758 - protein, 427 aa, Zea mays
  Coding DNA Sequence Number=SeqID_5979
  Gene Ontology: Mol. function=isopentenyl-diphosphate delta-isomerase activity; Cellular component=cytosol; Biological process=isoprenoid biosynthetic process
  Homolog annotation: Hit_ID=Q6K683; Match level="QueryCoverage=67%, HitCoverage=36%, E-value=1e-116, Identity=73%"; Hit description =MutT/nudix protein-like
MGQSPIQQQIYTSDLTPPAVATLAITDVETEPKLREHRGGEALGEDIRELGGGRDADIADNNTRRRSEGRSPHASCADAARVWWRGQPSQSVGVDDQLEGQRRSKENAVVQGAMEYTEIGRRLLRILRSCLDENKAFLSTADSAVHYSQSHQSSSGWKGIEYRAAFPLHKPPGANFYPPDMDKAEFELWKSKLTDKEQNDATGFFTVIKRHDSLSSSSLTQSDGSDQTKTKDDLFIVPYSKEYRPFLEKAAELLEKASACSDSPSLKNLLRTKANAFLSNDYYESDIAWMELDSNLDLTIGPYETYEDSLFSYKATFEAFVGIRDDTATSQVKLFGDQLQDLEKNLPMDNIFKSDSISAAPIRVINLLYNAGLHDALTGLLVQDVKGPQTIAFNLPNDERIVNERGTSMVMLKNISEAKCLYLKAYS

SEQ ID NO: 47759 - protein, 331 aa, Zea mays
  Coding DNA Sequence Number=SeqID_5980
  Gene Ontology: Mol. function=DNA binding; Cellular component =mitochondrion; Biological process=DNA integration
  Homolog annotation: Hit_ID=UPI00005A975E; Match level="QueryCoverage =87%, HitCoverage=18%, E-value=1e-153, Identity=93%"; Hit description= PREDICTED: similar to Retrovirus-related Pol polyprotein from transposon 297
  Pfam annotation: Domain name=rve; Domain location=51-202; Score=94.4; E_value=3.3e-25; Accession=PF00665.16; Description=Integrase core domain
  Subcellular localization annotation: CTP_CleavageSite=59; ConfidenceScore=5.12e-01
MQCLEPSSRMLSGKASTGRRRWLTPLELSAPTKDVNSMRSKPTCPLRLCSRYPSPSPSLCGAPGGYTHLLVAIDKFSKWIEVRPLNNIRSEQAVAFFTNIIHRFGVPNSIITDNGTQFTGRKFLDFCEDHHIRVDWAVVAHPMSNGQVECANGMILQGLKPRIYNNLNKFDKRWMKELPSVVWSLRTTPSRATGFTPFFLVYGAEAVLPTDLEYGSPRTRAYDDQSNQASREDSLDQLEEARDKALLHSARYQQSLRCYHARGVRPRDLQVGDLVLWLRQDARGRHKLTPPWEGPFVIAKVLKPGTYKLANSQGEVYGNAWNIQQLRRFYP

SEQ ID NO: 47760 - protein, 98 aa, Zea mays
  Coding DNA Sequence Number=SeqID_5981
MARIQWFSLIHESTSFADYCVSMEKDGGDTLSMKWLHDSSFGIDSKMRAFTVVYILQVCFPRIIVVLSISAAATNRIGYLLLKSVSCVALCQIWLSIR

SEQ ID NO: 47761 - protein, 160 aa, Zea mays
  Coding DNA Sequence Number=SeqID_5982
  Homolog annotation: Hit_ID=Q9LRE6; Match level="QueryCoverage=50%, HitCoverage=7%, E-value=2e-11, Identity=46%"; Hit description=DNA polymerase delta catalytic subunit
MEKLLAAWRLWTSLCVDVEPGLFARACVVAHGLQLDVAALNAVGWAGESPSWPAMFDRAAVAEVELATPHPAPSSRDSSLPQLPHPAIPVVQMHGAFHPSILAEDVFLDESILAEDEAALLMLQCDEALTSRLAQWKRTTIPTNLAARCSCAVGNYDLRA

SEQ ID NO: 47762 - protein, 313 aa, Zea mays
  Coding DNA Sequence Number=SeqID_5983
MAFMLAALLCEAISVRFVSTVLGLQWHRSTAPLPDTGQWMLLALSGKLPRTVVDLLKARIITLHHYLMMFIMLAFSALFDCIRGPGLGIGSRYMFTMAVGRLLRTATFLATILPSARPWCAEARYQIPDHPHPWAQKYYAPYASDPDMISRVMEEDMPYATLQDYPDEYRPDWGLMSFLVDILRPSTGEGPSWYHLLRKSSGGCNDLMYSGHMFVAVLTAMAWAEAYGGWSSVVIWFLVIHSAQREVRERHHYSVDCVVAIYIGILLWRMTAFLWSTMESNRSRRLSKLDEVQKRLFRAAKGFRRLGDKEPAK

SEQ ID NO: 47763 - protein, 634 aa, Zea mays
  Coding DNA Sequence Number=SeqID_5984
  Gene Ontology: Mol. function=RNA-directed DNA polymerase activity; Cellular component=nucleus; Biological process=RNA-dependent DNA replication
  Homolog annotation: Hit_ID=Q8S472; Match level="QueryCoverage=98%, HitCoverage=58%, E-value=0.0, Identity=78%"; Hit description =Putative gypsy-type retrotransposon RIRE2
  Pfam annotation: Domain name=Retrotrans_gag; Domain location=193-272; Score=56.9; E_value=6.4e-14; Accession=PF03732.7; Description =Retrotransposon gag protein
MRPPPASSGVGQNLAAAAMLLRAMPELSTTEGRRIQGELKNLLEGAAVRRAESSASRSRGTPRNITPRLPDSCEKPRSTPGARATQRLRPRVALAASTVTVTVGPTSTRGCAEATTPGVGGATTAGKIGVPRPNHPVRRPSAGPYDGRRSRPGSNPRLLSQGTRGRQDRNCGSRTTDWPANWVETDDENLIIRNLPLFLSDTARAWLEHLPPGQISNWDDLVQAFAGNFQGTCRQQPGESLRDYIQRFSKQRTELPNITDSDVIGAFLAGTTCHDLVSKLGRKTPTRARELMDIATKFASGQEAVEAIFRKDKQPQGRPPEDAPEASTQRGAKKKGKKKSQAKRDAADADLVAAAEYKNPRKPPGGANLFDKMLKEPCPSHQGPVKHTLEECVMLRRHFHRAGPPAEGGRARDDDKKEDHQAGEFPEVRDCFMIYGGQAANASARHRKQERREVCSVKVAAPIYLDWSDKPITFDQADHPDHVPSPGKYPLVVDPVIGDVRLTKVLMDGGSNLNIIYTETLGLLRVDLSSVRAGAASFHGIIPGKRVQPLGQLDLPVCFGAPSNFRRETLTFEVVGFRGTYHAVLGRPCYAKFMAVPNYTYLKLKMPGPNGVITVGPTYRHALECDCWGLVLKC

SEQ ID NO: 47764 - protein, 451 aa, Zea mays
  Coding DNA Sequence Number=SeqID_5985
  Gene Ontology: Mol. function=DNA binding; Cellular component=nucleus; Biological process=regulation of transcription
  Homolog annotation: Hit_ID=UPI00000529F6; Match level="QueryCoverage =99%, HitCoverage=36%, E-value=1e-114, Identity=49%"; Hit description= transcription factor
  Pfam annotation: Domain name=JmjC; Domain location=385-451; Score =48.1; E_value=3e-11; Accession=PF02373.13; Description=JmjC domain
  Pfam annotation: Domain name=JmjN; Domain location=158-202; Score =96.4; E_value=8.6e-26; Accession=PF02375.7; Description=jmjN domain
  Pfam module annotation: Pfam domain module=JmjC::JmjN; Domain location=385-451::158-202
MMGTECIMATLGGDPEPSIPPGFGPFVALALQGIQNNAKSADAHSSSAQAAHCMEKDVEVLEHGSAHGWSDTPASTSGTHSCRRSLRNRPPIDYSQFDLISDEESDVESAEKGVGLVRRRRQLPKGVLRGCAQCADCQKVVARWNPSGARRPVLEEAPVFYPSEEEFKDTLKYIESIRSTAEPYGICRIVPPPSWKPPCLLKEKNIWECSKFCTRVQKVDKLQNRKSSKKGRRGGMMKKRRKLLELEDNNNINHNQTGVQQNQERFGFEPGPEFTLQTFKKYADDFREQYFKKEVPADSPPSVEDIEGEYWRIVEKPTEEIEVVYGADLETGTFGSGFPKSSPEVKSDVEHKYLESGWNLNNLPRLQGSVLSFEGGDISGVLVPWLYVGMCFSSFCWHVEDHHLYSLNYMHWGAPKMWYGVPGKDAVNLEAAMRKHLPDLFEEQPDLLHNL

SEQ ID NO: 47765 - protein, 705 aa, Zea mays
  Coding DNA Sequence Number=SeqID_5986
  Gene Ontology: Mol. function=DNA binding; Cellular component=nucleus; Biological process=regulation of transcription
  Homolog annotation: Hit_ID=UPI00000529F6; Match level="QueryCoverage =72%, HitCoverage=47%, E-value=1e-120, Identity=44%"; Hit description= transcription factor
  Pfam annotation: Domain name=JmjC; Domain location=339-443; Score =35.1; E_value=2.4e-07; Accession=PF02373.13; Description=JmjC domain
  Pfam annotation: Domain name=JmjN; Domain location=164-208; Score =96.4; E_value=8.6e-26; Accession=PF02375.7; Description=jmjN domain
  Pfam module annotation: Pfam domain module=JmjC::JmjN; Domain location=339-443::164-208
LSSDAAMMGTECIMATLGGDPEPSIPPGFGPFVALALQGIQNNAKSADAHSSSAQAAHCMEKDVEVLEHGSAHGWSDTPASTSGTHSCRRSLRNRPPIDYSQFDLISDEESDVESAEKGVGLVRRRRQLPKGVLRGCAQCADCQKVVARWNPSGARRPVLEEAPVFYPSEEEFKDTLKYIESIRSTAEPYGICRIVPPPSWKPPCLLKEKNIWECSKFCTRVQKVDKLQNRKSSKKGRRGGMMKKRRKLLELEDNNNINHNQTGVQQNQERFGFEPGPEFTLQTFKKYADDFREQYFKKEVSADSPPSVEDIEGEYWRIVEKPTEEIEVVYGADLETGTFGSGFPKSSPEVKSDVEHKYLESGWNLNNLPRLQGSVLSFEGGDISGKDAVNLEAAMRKHLPDLFEEQPDLLHNLHEGEFVLTFPRAYHAGFNCGFNCAEAVNVAPIDWLPIGQDAVELYRKQARKITVSHDKLLLGAAREAIRAHWDILFLKKNTADNLRWKSMCGLDSTICKSLKPLIQRAQPLIHHCQTPSRPAAQTSELPAAVARAQELPAAIARAQEPPELDVVGRPPPPSRYVAGPLLPPPSAATPKAAAAASYCLSRTAAAVVRAGRRVSSLEFCLFLLPLPKVPTRIQGCTSRPPATASPQALVVCLVNGEWAILCWFPVKCYIFNAVMEMELDVAVVKRDDLGNAHGLNLDEFDDGY

SEQ ID NO: 47766 - protein, 67 aa, Zea mays
  Coding DNA Sequence Number=SeqID_5987
MHDGERPNTNCDDDFATVDDDYDYPEGDGCIGGDDDGSIHQRDEHSNDLDGACMTIQADLHILCLRI

SEQ ID NO: 47767 - protein, 304 aa, Zea mays
  Coding DNA Sequence Number=SeqID_5988
  Gene Ontology: Mol. function=DNA binding; Cellular component=nucleus
  Homolog annotation: Hit_ID=UPI00000529F6; Match level="QueryCoverage =45%, HitCoverage=11%, E-value=6e-44, Identity=62%"; Hit description =transcription factor
  Pfam annotation: Domain name=FYRC; Domain location=226-303; Score =42.1; E_value=1.9e-09; Accession=PF05965.4; Description=FY rich C -terminus
  Pfam annotation: Domain name=FYRN; Domain location=171-223; Score =60.9; E_value=4.2e-15; Accession=PF05964.4; Description=FY-rich N -terminus
  Pfam module annotation: Pfam domain module=FYRC::FYRN; Domain location=226-303::171-223
MVEQPPERGPNRDIKNNTKKLTASNTNATQFYSYKDQMHVTPETRASVMTEKDSSQASAASSQPFAGTVLRAQSVSQEASPSVFTSKPLIDSSLVKNTYVGLSSGGAHIGHPNFGNQQPSDECLKRKSESLSGSEARGHSAALVQPALGNHNGSGGAHKGLRMANVVHRFKSLVESLEIGVVLSGRLWSSSQAIFPKGFRSRVKYFSIVDPTQMAYYISEILDAGPQGPLFMVTLENCPGELFINVSPAKCWSMVRERLNMEIRRQLSTGRANLPALQPPGSVDGFEMFGLLSPAIVQVRKVFT

SEQ ID NO: 47768 - protein, 130 aa, Zea mays
  Coding DNA Sequence Number=SeqID_5989
MRCALCAVPRQMRATVRGRLSTPLTWRHVALPLGLFASRADWAGYCEERKGLVWAGYSRPSGPSIYVTDTSRFPSSRGRFCSVPPLLYSSTLPSRGGVDGMELGEPGARGCRGPVRLLLLRCSAFCVEDE

SEQ ID NO: 47769 - protein, 885 aa, Zea mays
  Coding DNA Sequence Number=SeqID_5990
  Gene Ontology: Mol. function=DNA binding; Cellular component=nucleus; Biological process=regulation of transcription
  Homolog annotation: Hit_ID=UPI00000529F6; Match level="QueryCoverage =59%, HitCoverage=46%, E-value=0.0, Identity=61%"; Hit description =transcription factor
  Pfam annotation: Domain name=JmjC; Domain location=220-336; Score =230.9; E_value=2.9e-66; Accession=PF02373.13; Description=JmjC domain
  Pfam annotation: Domain name=JmjN; Domain location=3-37; Score=46.5; E_value=9.3e-11; Accession=PF02375.7; Description=jmjN domain
  Pfam annotation: Domain name=zf-C5HC2; Domain location=442-495; Score= 73.4; E_value=7.2e-19; Accession=PF02928.6; Description=C5HC2 zinc finger
  Pfam module annotation: Pfam domain module=JmjC::JmjN::zf-C5HC2; Domain location=220-336::3-37::442-495
NSRTPLKYIESIRSTAEPYGICRIVPPPSWKPPCLLKEKNIWECSKFCTRVQKVDKLQNRKSSKKGRRGGMMKKRRKLLELEDNNNINHNQTGVQQNQERFGFEPGPEFTLQTFKKYADDFREQYFKKEVPADSPPSVEDIEGEYWRIVEKPTEEIEVVYGADLETGTFGSGFPKSSPEVKSDVEHKYLESGWNLNNLPRLQGSVLSFEGGDISGVLVPWLYVGMCFSSFCWHVEDHHLYSLNYMHWGAPKMWYGVPGKDAVNLEAAMRKHLPDLFEEQPDLLHNLVTQFSTSLLKSEGVPVYRCVQHEGEFVLTFPRAYHAGFNCGFNCAEAVNVAPIDWLPIGQDAVELYRKQARKITVSHDKLLLGAAREAIRAHWDILFLKRNTADNLRWKSMCGLDSTICKSLKARIDLELAQRQNICSPSQSRKMDAEFDSTDRECALCYYDLHLSASGCPCCPGKYTCLVHAKQLCSCDWDKRFFLFRYDINELNMLADALGGKLSAIHRWGVSHLGLSLRSCVKREKDQDSKTPRRVTDGPRRSYMSQASTVSLAPSLVCNEQNNNGNKMLDKASLETDTCPFTEQIKSGTISLQEAHMKTEVSCTLNSSVIPEGHKSSLSLPVPSGHSLSSNFATRSLSTAGESVKNTYDLVVFKGSRESSRAGDCISSPGVHHNIPPIMIDQGSNMNPSMESSNNSHRLTASNTNATQFYSYKDQMHVTPETRASVMTEKDSSQASAASSQPFAGTVLRAQSVSQEASPSVFTSKPLIDSSLVKNTYVGLSSGGAHIGHPNFGNQQPSDECLKRKSESLSGSEARGHSAALVQPALGNHNGSGGAHNGLRMANVVHRFKSLVESLEIGVVLSGRLWSSSQAIFPKGQSRVNTSAS

SEQ ID NO: 47770 - protein, 129 aa, Zea mays
  Coding DNA Sequence Number=SeqID_5991
  Gene Ontology: Mol. function=protein serine/threonine kinase activity; Cellular component=integral to membrane; Biological process=protein amino acid phosphorylation
  Homolog annotation: Hit_ID=Q9LHP4; Match level="QueryCoverage=90%, HitCoverage=26%, E-value=9e-28, Identity=68%"; Hit description =Receptor protein kinase-like protein
MGFGGKSGGELSWPWQFTPFQKLSFSVDQVVRSLVDANIIGKGCYGVVVLEVLTGKQPIDPTIPDGLHVVDWVRRCRDRAGVLDPALRRRSSSEVEEMLQVMGVVLLCVSAAPDDRRTMKDVAAMLKEI

SEQ ID NO: 47771 - protein, 82 aa, Zea mays
  Coding DNA Sequence Number=SeqID_5992
  Subcellular localization annotation: CTP_CleavageSite=51; ConfidenceScore=5.76e-01
MAAPPATAPATARCLSVAKSCWAAERSSSSFVLSAPATGLRQSGSRVLSIRAKVATGLQRACIADDGGTQVGEVVFNTSLTG

SEQ ID NO: 47772 - protein, 256 aa, Zea mays
  Coding DNA Sequence Number=SeqID_5993
  Gene Ontology: Mol. function=carbamoyl-phosphate synthase activity; Cellular component=chloroplast; Biological process=pyrimidine nucleotide biosynthetic process
  Homolog annotation: Hit_ID=Q6YV24; Match level="QueryCoverage=85%, HitCoverage=52%, E-value=1e-119, Identity=83%"; Hit description =Putative carbamoyl-phosphate synthetase small subunit
  Pfam annotation: Domain name=GATase; Domain location=73-250; Score =235.5; E_value=1.1e-67; Accession=PF00117.18; Description=Glutamine amidotransferase class-I
MVGKPLSKGFNSLVILGAWSIWKHRNRIIHVDIYTGVDLISGVTCDAPYEWSDKTDSEWEFKRDPSSETFHVVAYDFGIKHNILRRLTSYGCKITVVPANWPASEVLNLKPDGVLFSNGPGDPAAVPYAVKTVQEIIGKVPVFGICMGHQLIGQALGGKTFKMKFGHHGGNHPVCDLRSGRVDISAQNHNYAVDPESLPEGAKVTHVNLNDNSCAGLQYSKMKLMSLQYHPESSPGPHDSDTAFGEFIELMKSNRL

SEQ ID NO: 47773 - protein, 84 aa, Zea mays
  Coding DNA Sequence Number=SeqID_5994
  Gene Ontology: Biological process=response to stress
  Homolog annotation: Hit_ID=Q8S3R7; Match level="QueryCoverage=91%, HitCoverage=44%, E-value=1e-35, Identity=89%"; Hit description =Putative ethylene-responsive protein
MDSIYASPEDFHQMKQRDKIRGLHLLEYFVNQCHQLGIKCEAWIRHGDPKEVICSEVKRVQPDLLVVGSRGLGPFQRINLSALM

SEQ ID NO: 47774 - protein, 61 aa, Zea mays
  Coding DNA Sequence Number=SeqID_5995
MASVLDAVLELMKTPTPASAEDSATPVKLIGESLPEKPTLPAPEAPSESDMEYIVRHASGK

SEQ ID NO: 47775 - protein, 55 aa, Zea mays
  Coding DNA Sequence Number=SeqID_5996
MGVVWPLIINQEARTPDPTYVSWPYITFYDFGGRPFLGEESGDDIFEEDRNGLFK

SEQ ID NO: 47776 - protein, 139 aa, Zea mays
  Coding DNA Sequence Number=SeqID_5997
  Subcellular localization annotation: CTP_CleavageSite=37; ConfidenceScore=5.02e-01
MSGAPEDSGFKLVTFGNFQRPLRYNSPDCPVCTGHVRCSKERRPQELASLGFSFQPLRYNSPDYPVCTGLSGASAEQRLLQAPTATCSAFIARQRAQRAGTPMLAHRTLYSCTNTPWTSQVLFASDANIKGELCYNLTL

SEQ ID NO: 47777 - protein, 168 aa, Zea mays
  Coding DNA Sequence Number=SeqID_5998
  Gene Ontology: Mol. function=kinase activity; Cellular component =ornithine carbamoyltransferase complex; Biological process=amino acid metabolic process
  Homolog annotation: Hit_ID=Q6QP54; Match level="QueryCoverage=60%, HitCoverage=36%, E-value=2e-23, Identity=58%"; Hit description =Putative kinase
MAPPVDVAGPRPRLGDVEAPSRPRSSLSSVVVVESEPLGRARRRLSAETRAESEPWGRAKRSSSSSGAEPKYEPWVGRSGVRRLPGLSPSSSLGSGGAEFAVFRGLARVRALGRAERSFLWRMRPGLTACQPHSVKWHRSRSGADGAVFLSGRSVERRSDGGHFVSVD

SEQ ID NO: 47778 - protein, 59 aa, Zea mays
  Coding DNA Sequence Number=SeqID_5999
MEFVHHSSNVYQEPKVHHYLLSFGFALLSFVDLLFSFVNLLFSFVILNIFKYGKIGDIY

SEQ ID NO: 47779 - protein, 214 aa, Zea mays
  Coding DNA Sequence Number=SeqID_6000
  Gene Ontology: Mol. function=nucleic acid binding; Cellular component= intracellular; Biological process=DNA integration
  Homolog annotation: Hit_ID=Q8H6I0; Match level="QueryCoverage=98%, HitCoverage=13%, E-value=2e-73, Identity=62%"; Hit description =Putative gag-pol polyprotein
MVTSDKPATSHGKAPSGESDNKKREESPPRVKSHRSGDKKKKMKKVVYYETDSSSPSTSGSYTPSVTSKRHERKKFSQIPLRYPRISKHTPLLSVPLGKPPVFDGEDYCMWSDKMRHHLTSLHASIWDIVEFGEQEPSVGDEGYDSDEVAQIWHFNSHATTILIASLSREEYNKVQGLKSAKEIWDVLKTAHEGDEVTKITKRETIKGELGVTP

SEQ ID NO: 47780 - protein, 109 aa, Zea mays
  Coding DNA Sequence Number=SeqID_6001
MARTLKELLLLFCIQKIFSSKEEKGRALKLNNEHGLAQRSINSPEELFCEQYRHLCEHGSKFSLSFSNPYSGQIIASLGWAQDGEWRLWGGHRKETPASSKQLIDEQPY

SEQ ID NO: 47781 - protein, 588 aa, Zea mays
  Coding DNA Sequence Number=SeqID_6002
  Gene Ontology: Mol. function=hydroxymethylglutaryl-CoA reductase (NADPH) activity; Cellular component=endoplasmic reticulum; Biological process=isoprenoid biosynthetic process
  Homolog annotation: Hit_ID=P48019; Match level="QueryCoverage=94%, HitCoverage=99%, E-value=1e-169, Identity=60%"; Hit description=3 -hydroxy-3-methylglutaryl-coenzyme A reductase 1
  Pfam annotation: Domain name=HMG-CoA_red; Domain location=136-577; Score=958.5; E_value=2.6e-285; Accession=PF00368.9; Description =Hydroxymethylglutaryl-coenzyme A reductase
MDVRRLGGRIAAALRALAAGGSLPIPAWITNGLAMISLVLSSCDLLRLCSDRDRRLRFPLGGREFVTVVCQLASIVYLFSPCGTGIPSANPETPACRDQGGSADQTRAAAADAPEALHGGAEGEDEEIVAAVVSGALPSHHLESRLGDCRRAARLRREALRRMTGRGVEGLPLDGMDYQAILGQCCEMPVGYVQMPVGVAGPLLLDGKQYHVPMATTEGCLVASVNRGCRAIAASGGAFSVLLRDAMSRAPVVKLPSIKRAAELKAFVETHTNFETLAAVFNRSSRFGKLQGIHCALAGRNLYMRFTCSTGDAMGMNMVSKGVEDVLGYLQNDFPDMDLISLSGLDVILSDNCLITKYQTTKHNALFGAAPAPKKLVEQVIRCSRRKVGGASNYCSDKKAAAVNWIEGRGKSVVCEARVKGGVVQSVLKTTVQKLVELNIVKNLAGSAVAGALGGFNAHASNIVTALFIATGQDPAQNVESSQCITMMEAVNDGGDLHISVTMPSIEVGTVGGGTCLASQAACLNLLGVRGPNRDSPGANARILATIVAGSVLAGELSLLAALAAGQLVKSHMKYNRSSKDVPGASAS

SEQ ID NO: 47782 - protein, 48 aa, Zea mays
  Coding DNA Sequence Number=SeqID_6003
MKVKKLIKEKNEGAGISEYIDINKELQEIWRMSDFKYTLVSLTLFKCL

SEQ ID NO: 47783 - protein, 140 aa, Zea mays
  Coding DNA Sequence Number=SeqID_6004
  Subcellular localization annotation: CTP_CleavageSite=58; ConfidenceScore=5.52e-01
MDSQAPTNSDGDQGRWVGPAPGPRGKVSGPSASSTGVGVRPVLFWCPCPARETSRRIFGAAGMGRGPATRRGGPRGHVTVPGDLPSRARSLSRPVASSDRCLFSSVVSAMNPFGRRIRTNCTCSGVWCGKTGCACDGQVL

SEQ ID NO: 47784 - protein, 434 aa, Zea mays
  Coding DNA Sequence Number=SeqID_6005
  Gene Ontology: Mol. function=DNA binding
  Homolog annotation: Hit_ID=Q6ZFU2; Match level="QueryCoverage=70%, HitCoverage=95%, E-value=1e-58, Identity=48%"; Hit description=DNA -binding protein-like
  Pfam annotation: Domain name=DUF296; Domain location=229-349; Score =184.3; E_value=2.9e-52; Accession=PF03479.5; Description=Domain of unknown function (DUF296)
MGRGGWTGGSMAGRKTSRELPPKTPAPSNPICEAADGVAKGRTKLPQHSVVVEEIRSRQRSLAVQRCCRWWRPATWSCRGKQAGVAAIGAVDWSAPDPPETVKLAAGKWWERPDDTGMPGMDPGGGGSSRYFHQLLRPQQQQPSPLSPNSHVKMEHHRMSPDKSPVVGEADAGGSGAGGDQPSSSAMVPVEGGGSGTGTPTRRPRGRPAGSKNKPKPPIIVTRDSPNALHSHVLEVAAGADVVDCVAEFARRRGRGVCVLSGGGAVANVALRQPGASPPGSMVATLRGRLEILSLTGTVLPPPAPPGASGLTVFLSGGQGQVVGGSVVGPLVAAGPVVLMAASFANAVYERLPLEGEEEEDETAAGAAGAEPQDQVAQSSAGPPGQQPTASQSSGVTGGDAGMSLYNLAGNVGAYQLPGDSLGGWSGGGVRPPF

SEQ ID NO: 47785 - protein, 62 aa, Zea mays
  Coding DNA Sequence Number=SeqID_6006
MATNGDEDERGGLGERVLDPNARGSLQRGLERQRKWSSWMEHAVTDECLFEWTAPARTLAAP

SEQ ID NO: 47786 - protein, 96 aa, Zea mays
  Coding DNA Sequence Number=SeqID_6007
  Subcellular localization annotation: CTP_CleavageSite=19; ConfidenceScore=5.48e-01
MAAQPPRPTDLATRVALASAATPAAPIMPSPTSSLLSCAPLRAPIKLCIAAVAILLRACRFPQQGVRAAPTRASPGRTFPNCAAARCSFVTMSCAF

SEQ ID NO: 47787 - protein, 56 aa, Zea mays
  Coding DNA Sequence Number=SeqID_6008
MATAAMQSFIGARNGAHDRSDEVGLGSVGNQQRVWRRSPMRRAWPEKEKKSKEKRG

SEQ ID NO: 47788 - protein, 472 aa, Zea mays
  Coding DNA Sequence Number=SeqID_6009
  Homolog annotation: Hit_ID=Q9AXE9; Match level="QueryCoverage=36%, HitCoverage=56%, E-value=6e-11, Identity=34%"; Hit description=Zinc finger transcription factor ZF1
  Pfam annotation: Domain name=zf-C2H2; Domain location=310-332; Score =24.7; E_value=0.00033; Accession=PF00096.16; Description=Zinc finger, C2H2 type
  Pfam annotation: Domain name=zf-C2H2; Domain location=407-429; Score =21.2; E_value=0.0037; Accession=PF00096.16; Description=Zinc finger, C2H2 type
  Pfam annotation: Domain name=zf-C2H2; Domain location=57-79; Score =13.0; E_value=0.4; Accession=PF00096.16; Description=Zinc finger, C2H2 type
  Pfam module annotation: Pfam domain module=zf-C2H2::zf-C2H2::zf-C2H2; Domain location=310-332::407-429::57-79
MNSRALQLQLQAAAAAAPVHAGEDGEPEATPKAPLLKIQGQGSGLARSMGTTTGNATKCPECPKWFPSLKAMCGHLRQHPDRDYRGATRPTPATISAAAAVSVAVAGDNEPTNKVPRKESVVVAINMVAAAATAVQKQPWEEAETQWPAKAKRGRTHVAPMQASSISEEEEAAMEEEAAMILLEMSRTSSETQRQQQPVEPVRSPYAVSGHQIQTTSVVEELMQQQTPENALELSAESQTSVAKHVTDLVEAVLIMVPANKAIFPSLNSGAGDKKPKKRWVRNPVHTAASTTSPPPPEGAVRTPPAGKMHTCPTCPKSFSTHQALGGHMASHVKNKTTSARHDDHAAAHAVIKPDVLAHSDQSAGNGDVDIIPASSGAGKGGALQERQDAQPPPARAPTPPQTSAPHKCDECTKSFSSGQALGGHKRKHWSLEKQQARAALFAPVIEPEPELRDFDLNELPKEEQDEDNNQP

SEQ ID NO: 47789 - protein, 454 aa, Zea mays
  Coding DNA Sequence Number=SeqID_6010
  Gene Ontology: Cellular component=integral to membrane; Biological process=peroxisome organization and biogenesis
  Homolog annotation: Hit_ID=Q9FF99; Match level="QueryCoverage=96%, HitCoverage=95%, E-value=1e-147, Identity=56%"; Hit description =Amino acid transporter
  Pfam annotation: Domain name=Aa_trans; Domain location=22-450; Score =395.7; E_value=6.7e-116; Accession=PF01490.8; Description =Transmembrane amino acid transporter protein
MAVHHALEVLDGRCDDDGHPRRTGTAWTCAAHIITAVIGSGVLSLAWSVAQLGWVVGPACMFCFALVTYVSAALLADCYRRGDPGNGPRNRSYMDAVRVYLGKKHTWACGSLQYVSMYGCGVAYTITTATSIRAILKANCYHEHGHGAHCEYGGSYYMLIFGGAQLLLSFIPEFHDMAWLSIVAAVMSFSYSFIGIGLGLATTIANGTIKGSITGVRMRTPMQKVWRVSQAVGDIAFSYPYSLILLEIQDTLKSPPAENKTMKRASIGSILVTTFFYLCCGCFGYAAFGSDSPGNLLTGFGFYEPYWLIDFANACIILHLLGGYQPIFQFADRFFAERFPDSGFVNDFHTVRVACLPACRVNLLRVCFRALYVASTTAVAVAFPYFNEVLALLGALNFWPLAIYFPVEMYFVQRNVPRWSTRWVVLQTFSVVCLLVSTFALVGSIEGLITQKLG

SEQ ID NO: 47790 - protein, 505 aa, Zea mays
  Coding DNA Sequence Number=SeqID_6011
  Gene Ontology: Mol. function=nucleic acid binding; Cellular component= intracellular
  Homolog annotation: Hit_ID=Q8GZC4; Match level="QueryCoverage=32%, HitCoverage=57%, E-value=2e-11, Identity=29%"; Hit description=Zinc finger protein
  Pfam annotation: Domain name=zf-C2H2; Domain location=347-369; Score =19.4; E_value=0.013; Accession=PF00096.16; Description=Zinc finger, C2H2 type
  Pfam annotation: Domain name=zf-C2H2; Domain location=442-464; Score =19.5; E_value=0.012; Accession=PF00096.16; Description=Zinc finger, C2H2 type
  Pfam annotation: Domain name=zf-C2H2; Domain location=66-88; Score =15.8; E_value=0.16; Accession=PF00096.16; Description=Zinc finger, C2H2 type
  Pfam module annotation: Pfam domain module=zf-C2H2::zf-C2H2::zf-C2H2; Domain location=347-369::442-464::66-88
MNSQLQLQAYEAAGAVRVHPAEDGQTEATPQAPLRKIQGQGTADDLPRRQGSGLAPSMGTTGNTYAKCPECHKWFTSLKAMFGHLRKHPDRGYKGATRPTPATISAAAAVAGDNEPTKKVPRKESVFLALNMADEEKKPWEEAGTKWPAKAKRRRTPVAPMQATSCSEEEQEEAATGMEEEEEEEEEKEAAMILLEMSRTSSETQQQQPAQEPVHAPDAVSGHQIQTSDVEELMLQHQPAGQQIPEAAQIVQLENALELISAESQTPAAKQVTELVITTETVLTIMVPANKAIFPSLGSGAGDKKAKKRRVNSEQTVASMSPPPPPECTVRTPPARRIPSPASGKKHTCLTCSKSFSTHQSLGGHMASHVKNKTTSARHDDLAAAQAMDKRNILAHRDQSASNGDVIIPASAGAGKGALHERQDAQPPPARAPTPQTSALQHKCDECSQTFSSGQALGGHKRKHWFLEKQQARAALPAPVLEPESRDFDLNELPKEGQDEDNNQP

SEQ ID NO: 47791 - protein, 267 aa, Zea mays
  Coding DNA Sequence Number=SeqID_6012
  Homolog annotation: Hit_ID=Q6QP51; Match level="QueryCoverage=62%, HitCoverage=89%, E-value=1e-18, Identity=41%"; Hit description =Putative growth-regulating factor 1
MQVACNRTAVAHPFGFDASSMEAQAHTSCPCPLLKQRESPLPRHEDDAPVFHSSNDSSTHNGRTANRTGKGDISKGILLREGSGPRALLLIRGSKAGPSEGGSKAGPSEGFDSHPRARRARDDSRYVCYMAEARATLPRRIQCGDCLTPYPDNACLSRQGRRSSASPNLRPRPQNEVSASGLDLNLGLGRRSPPCPTLGLGLNLGLGRRSLPRPTLGLGLNLGLGRRSPPRPTLGLGLNLGLRRSLHLARPWARTDCATRDTSLPYP

SEQ ID NO: 47792 - protein, 109 aa, Zea mays
  Coding DNA Sequence Number=SeqID_6013
MVDDALSRRVHLMAMTSPGCYNPYPYLKEFGKTSLWTSLRNCPSLKFKVLYGYDPPFAVAPMISVDTCVDVSVLLAERAGFTNMLKERLAEARNRMKLQADKLRSERQF

SEQ ID NO: 47793 - protein, 130 aa, Zea mays
  Coding DNA Sequence Number=SeqID_6014
  Subcellular localization annotation: CTP_CleavageSite=77; ConfidenceScore=5.46e-01
MAARRGARPGLAPPGALPSPHPGGARAPGVARPRTASGSPGPGRPFPPPHHGLGRPAMARRPVAPAWRPPRRGPLPGAAALVQPRPPESSPHPRLAAMAARSRPPWCAPPLRSAAPARRGFGSRDRGAPA

SEQ ID NO: 47794 - protein, 68 aa, Zea mays
  Coding DNA Sequence Number=SeqID_6015
MVGLAGRRITGVLDLLSRGCIVIVIVMHGACGVSSAQAQQGCRGGFQGPCWAAPAEIPSAPPTAGSDK

SEQ ID NO: 47795 - protein, 342 aa, Zea mays
  Coding DNA Sequence Number=SeqID_6016
  Gene Ontology: Mol. function=transcription regulator activity; Cellular component=nucleus; Biological process=regulation of transcription
  Homolog annotation: Hit_ID=Q6Z2G7; Match level="QueryCoverage=97%, HitCoverage=92%, E-value=6e-71, Identity=49%"; Hit description =Putative bHLH transcription factor
  Pfam annotation: Domain name=HLH; Domain location=150-200; Score =32.3; E_value=1.7e-06; Accession=PF00010.16; Description=Helix-loop -helix DNA-binding domain
MARCRGTAESLCQGRLDLDDDKFGAMCTTAFGCLQEWPDLGAMCGANLGVPAMAGNGNESSCSGSGGSRKRKPDAYDGLDATGGANDMSKRPRGKRLSGISEIVAPGKGKQERPKAGTKKKAEAASAAAAAAAAGHKTDYIHVRARRGQATDSHSLAERVRRERISERMRYLQELVPGCSKVTGKAGMLDEIINYVQSLQKQVEFLSMKIAASNPVVSFDIVEDLFGRQLKQSRRSPAAALPAMALPAGQLEPSCLQMSHMPQMHPSAAANSTGFGLDMVVNNPYAPAGASCPVSAAASVSVAAGPSTTEPCLNVNGTAAWDIGSRNLFSGFVAQFQSVESE

SEQ ID NO: 47796 - protein, 141 aa, Zea mays
  Coding DNA Sequence Number=SeqID_6017
MGKNNKRKREPTPPSEDFGDSEYSEEEFSSEFEGSPAPVSPPASSDDSDDSQRIAAEVWTYIRAVERSGLEGSDESEYSSDEEDSPEEDVEGDDDDDGGDGSDDGDGGSRGGNGGSRGDDSGSSRGSNGGGSSKGSNRASG

SEQ ID NO: 47797 - protein, 117 aa, Zea mays
  Coding DNA Sequence Number=SeqID_6018
  Homolog annotation: Hit_ID=Q651K5; Match level="QueryCoverage=51%, HitCoverage=8%, E-value=1e-12, Identity=63%"; Hit description =AlphaSNBP(B)-like
MYQTVQQQLMCNPKVLPLEEAMRSFGTQGWKKDGVQIPASDKVYEYILFRGTDIKYLQVKSLPPQPPPPQAASLHNDPTIIQFYQTSAPRQFNMGFRGQPSRVTFLSTNQGILCGAL

SEQ ID NO: 47798 - protein, 215 aa, Zea mays
  Coding DNA Sequence Number=SeqID_6019
MNIEPLRQASISLYAGHITTGIRDFAECWLLCRVPFVGHSAKKALPSAVLGNVRHSAKRALPSAEHSAKNGTRQRKQINGSPVLPSPSFSPLLSLLRLHRVARSPPPPPRASPLAAPPPRRAAACPALSAPALSKPARSPRRRDARSLAAASPPRRRCPPARRCPPLSARSPLSPRARSPLSAAVRPLAAPPLSKPSARSPLSAPSSSPPPSSPP

SEQ ID NO: 47799 - protein, 154 aa, Zea mays
  Coding DNA Sequence Number=SeqID_6020
MVYCRRVHLPVGITVLENNRLKNSYIISKGWEVSGVTKNPGIAFSTLRKSNRLLCVRLSDMVQGEGNDDNDSATAHPTMSLLASSIITRLHYAARVHGARNATVQLQGHRFAGLFGLPPSVPIANCAEFVHSQVASLVSDLASAIKDVNATTTR

SEQ ID NO: 47800 - protein, 129 aa, Zea mays
  Coding DNA Sequence Number=SeqID_6021
MTVDNYLLDMGMVEFGIREYGYRYNKVSTDNFFAGMDIQYPYPLPNGYLTLLNAKIVVGGRVTGIHRIADTRWVRMDSVVLSWLNDTITVEIQDIVRDQVDTARKAWGSGAPPRCSVPPVRLGASLVGE

SEQ ID NO: 47801 - protein, 172 aa, Zea mays
  Coding DNA Sequence Number=SeqID_6022
MRSKPAGDAAEGEEWEFISGKRHRYAGQGGRGAQWNDGRISLSLKRRRLPPAVYSRAAPTPPRERHPGDKAPRGHDEQVNAPEIRMGTRKMVTGGLAAERESLWRVVEVRSFTSRPAPRRRARRTRMATRRLPVDSPFTAGGSFNSTTSSSWLLPSVISGIGEEKRTALWAR

SEQ ID NO: 47802 - protein, 56 aa, Zea mays
  Coding DNA Sequence Number=SeqID_6023
MRSKPAGDAAEGEEWESISGKRHRTPPSSEKDENGNPKTPCRLSLHSRRLLQLHDV

SEQ ID NO: 47803 - protein, 563 aa, Zea mays
  Coding DNA Sequence Number=SeqID_6024
  Gene Ontology: Mol. function=protein binding; Biological process=red or far red light signaling pathway
  Homolog annotation: Hit_ID=Q6YUW3; Match level="QueryCoverage=72%, HitCoverage=97%, E-value=0.0, Identity=81%"; Hit description=Kelch repeat-containing F-box-like
  Pfam annotation: Domain name=F-box; Domain location=216-263; Score =21.2; E_value=0.0038; Accession=PF00646.23; Description=F-box domain
  Pfam annotation: Domain name=Kelch_1; Domain location=303-345; Score =5.7; E_value=0.87; Accession=PF01344.15; Description=Kelch motif
  Pfam annotation: Domain name=Kelch_1; Domain location=347-393; Score =50.9; E_value=4.1e-12; Accession=PF01344.15; Description=Kelch motif
  Pfam annotation: Domain name=Kelch_1; Domain location=395-441; Score =41.6; E_value=2.7e-09; Accession=PF01344.15; Description=Kelch motif
  Pfam annotation: Domain name=Kelch_2; Domain location=347-393; Score =25.5; E_value=0.00019; Accession=PF07646.5; Description=Kelch motif
  Pfam annotation: Domain name=Kelch_2; Domain location=395-441; Score =13.2; E_value=0.7; Accession=PF07646.5; Description=Kelch motif
  Pfam module annotation: Pfam domain module=F-box::Kelch_1::Kelch _1::Kelch_1::Kelch_2::Kelch_2; Domain location=216-263::303-345::347 -393::395-441::347-393::395-441
MNEKDSCLEYVLHQIRDYSCSPAIGPHCPDPAGVPARAPLPGPAAGEGSGRSVDVTPPAGALSLRRPALFDRPRLAVREWRRVGGTRRRRCGNKARAARLVAVRTEHDLSLERGCILVYRFSFYRSTVADSDGMLEDQSCLISRSLPGSCEQESRLAYMTYHLLEITRSKRPPGTLSIEHDVVAALTKRTKSSEHQNSEALDCQGSNGQGDSDSSTLISSIGRDNSINCLARCSRSDYGSIASLNRSFRSLVRSGELYKERRQQGISEHWVYFSCNVQEWEAYDPYRSRWMTLPRMPRNECFMHSDKESLAVGTELLVFGKEILSHIILSYSILTHSWSRGVEMNAPRCLFGSASFGEKAIIAGGMDADGRVLRSVELYNSETKRWTTLPSMNKARRKCSGVFMDGKFYVIGGMASNTEVLTCGEEYDLDRGTWRVIENMSEGLNGASGAPPLVAVVENELYAAQYAGKLVRKYNKRDNSWTTLGELPERPEAVDGWGIAFRGCGERLLVIGGPRVLGGGMIELHSWIPSEGPLQWNMIGSKPSDFTQGSSNRASRFRVLVNS

SEQ ID NO: 47804 - protein, 377 aa, Zea mays
  Coding DNA Sequence Number=SeqID_6025
  Gene Ontology: Mol. function=nucleoside-triphosphatase activity; Biological process=cell division
  Homolog annotation: Hit_ID=Q6YUV9; Match level="QueryCoverage=40%, HitCoverage=32%, E-value=8e-69, Identity=86%"; Hit description =Transitional endoplasmic reticulum ATPase-like
  Pfam annotation: Domain name=AAA; Domain location=7-369; Score=124.1; E_value=3.8e-34; Accession=PF00004.19; Description=ATPase family associated with various cellular activities (AAA)
MTMPNDGGSGSGKSMGARAVTASEHGTRGNVTYVTKDKAHGARSKATKGQLAKAGPVEAGIVSGGRGSTTSVLLVQVGDERTGRLGVVAGVRLGLLGGRSGGYANDEGGGEPSQEDTRVHVGTAWGGGYGQGHGGHRKQNNGELDKGGGGGGVGHSPDDQGRGDRHWRRRGGVRWAGAGVERHSPWDEHEVWLLPGKRPSRGRASAGRPGVAAGYEEGENREKTCSEKLTKALFSFATRLAPVIIFVDEVDSLLGARGGAFEHEATRRMRNEFMAAWDGLRSKENQRILILGATNRPFDLDDAVIRRLPRRIYVDLPDAQNRMKILKILLAKEKLESDFKFDELANATEGYSGSDLKNLCVAAAYRPVHELLEEEKK

SEQ ID NO: 47805 - protein, 64 aa, Zea mays
  Coding DNA Sequence Number=SeqID_6026
MVVSSMVVASLKDWSEGKVQDEMCWLDQEFYRSIEGTYAELVAGAPYRLPIHDEQQLNSVRQYK

SEQ ID NO: 47806 - protein, 242 aa, Zea mays
  Coding DNA Sequence Number=SeqID_6027
  Homolog annotation: Hit_ID=Q9T0G5; Match level="QueryCoverage=23%, HitCoverage=7%, E-value=8e-11, Identity=52%"; Hit description =Putative DNA-directed RNA polymerase
  Pfam annotation: Domain name=KH_1; Domain location=185-240; Score =32.0; E_value=2.1e-06; Accession=PF00013.19; Description=KH domain
  Pfam annotation: Domain name=Spt4; Domain location=84-148; Score= -37.9; E_value=0.015; Accession=PF06093.4; Description=Transcription initiation protein Spt4
  Pfam module annotation: Pfam domain module=KH_1::Spt4; Domain location=185-240::84-148
MTTAERTIAPHRLPTTHLAYARQVFDRVSLSTLDAPHVPLQQWDLHLGMAARDSVIHPAQEEVIESIIDGMWNVVEVVAVVADACVRCLFRQNGYENYPFLEMDREHDNIVNCTTPNFTSSNCRGDELMKEMNIMKSVLVKLVEYEYLRRMVLASVSGHGASIPQLSSQSSAPQYSSYGGYQGTSKKIEIPNGRVGVIIGKVGETIRYIQLQSGAKIQVTRDHEAKPGALTMQVELSGNLSC

SEQ ID NO: 47807 - protein, 207 aa, Zea mays
  Coding DNA Sequence Number=SeqID_6028
TEIVGVDVNDNDSAEVLMLAPLLMIHQNGAEFDWALSRMNGAHIAAASPEAGGSSSSASSSGVSASGRSWLLKGDLALPLGMSFAAVLAQVVNRCAGSEGGLRPDVLSKAVGPMGPHPPDTDHVTDCPHPRACPLASRLDASASPSSPVHLLQSAKLTGAKSRSPGSQLARGLLWGDTPVTAQSQRRLDRRSARQQVAIRAEEICPG

SEQ ID NO: 47808 - protein, 827 aa, Zea mays
  Coding DNA Sequence Number=SeqID_6029
  Homolog annotation: Hit_ID=Q6ZH58; Match level="QueryCoverage=51%, HitCoverage=81%, E-value=0.0, Identity=81%"; Hit description =Pentatricopeptide (PPR) repeat-containing protein-like
  Pfam annotation: Domain name=PPR; Domain location=496-530; Score =41.5; E_value=2.9e-09; Accession=PF01535.11; Description=PPR repeat
  Pfam annotation: Domain name=PPR; Domain location=531-565; Score=2.9; E_value=3.4; Accession=PF01535.11; Description=PPR repeat
  Pfam annotation: Domain name=PPR; Domain location=597-631; Score =52.5; E_value=1.4e-12; Accession=PF01535.11; Description=PPR repeat
  Pfam annotation: Domain name=PPR; Domain location=632-666; Score=6.7; E_value=1.2; Accession=PF01535.11; Description=PPR repeat
  Pfam annotation: Domain name=PPR; Domain location=668-702; Score =11.4; E_value=0.33; Accession=PF01535.11; Description=PPR repeat
  Pfam annotation: Domain name=PPR; Domain location=734-768; Score=7.8; E_value=0.89; Accession=PF01535.11; Description=PPR repeat
  Pfam module annotation: Pfam domain module=PPR::PPR::PPR::PPR::PPR::PP R; Domain location=496-530::531-565::597-631::632-666::668-702::734 -768
MDVLTPILDADIYGDRFHSFMSNFEKAFGSTLRTIHLINETPVFEQDVEQCSYKDDDSVPQIKLGGADSLPEIKVGGADSQSQIHDVQTDMPSSSMNSQIVLHTGINDQLVHLTCSRSNPEIGQHILSVFERSLNEQARSNELKELEIGLTMRKLQLSRSQLALSSESQMLEKIKVHMGFQKASFKEKKFKTEMEDTKHAELFRKLIDMLLTAVVLMSVCFGYGTYIYSYQRITAATSACAAISRRSAMTGPNMPVTFNVMILGVLCGYFGSCCVDTLGGDGNDQGWSFAILGPPIHILHFGVTYSAMLGWLQFFSSVGIHSTLKVLLAYSPSDAYILSKCKFVEAREDEDVMEARSLEAAGTRTDRTEGDRRRSERITSLCAMVSSPAAPAPNDVTLLTVLSACADSPSSPLASPLALTLHARALKLFPSHLLLSTCLARFYLASRLPHLALQLFDSMPVRSVVTYNTMISGLMRNGLVDAAFEVFDGMPGPDKVSWTALIDGFVKNGRHDEAIDCFRAMLLDGVETDYITLVAVVSACAEVGALGLGMWVHRLVLRQRLERNVRVANSLIDMYARCGQVNLAAQVFRSIRKRTVVSWNSMIVGFAANGRCTDAIELFEEMRRQGFKPDAVTLTGVLTACSHAGLTEHGLRYYDLMTTEYGVAARMEHYGCVVDLLGRAGRLDEAMHVVETMPMRPNEVVLGALLAGCRTHGNLDMAEQMMQHLFELDPQGDANYVLLSNIYAAVGKWDGAGKVRSLMKARGVKKRPGHSTVEIDGDVHEFVSGDQSHPLAGEIGQMLGLLWHEMTRLQSGFSVLPLPMDLGMVME

SEQ ID NO: 47809 - protein, 471 aa, Zea mays
  Coding DNA Sequence Number=SeqID_6030
  Subcellular localization annotation: CTP_CleavageSite=42; ConfidenceScore=5.04e-01
MGHHIVIATSTHGDNAINDATALTSKAPTYPQFAAFVLRRPVASPLWWNPETEANRRDQRPVGSSSNELPGRPLAPFRRSRRDAIRRDKNTRARRRPGRRIRSRYSPKQRPQPRRVKSARARRLQVAAPLRSCTPRRQTQTISSLLVKPHSQSADAFRLAPVPLPPSALLCPAPHARATARRSPSHPMEAPQRPRPRQRPQLARINAMKHSSYPAEDEGDDDLAPVDLGSEFASQTSFRIRRGGAEVADLFRKLGLKGPEDFTIPPAIYAAGMAHIPNPSRSRRQSLQAPLLPAAGADGMAPAPQGPPDVSARDAALAARLDAAVQGEEQAVLAAKVVQPEPEVAQVSARSYKGSGTESSNRAVQLETGESSRRVIAAAVKEGTAHGVKGKGDVVKVDQLRVERTKAVVVEAPRETTAAVVQAVAESPSQSTEYLISPSPNRRFKRTITSWTKGHHLGSGSFGSVYEAISE

SEQ ID NO: 47810 - protein, 59 aa, Zea mays
  Coding DNA Sequence Number=SeqID_6031
  Gene Ontology: Mol. function=protein kinase activity; Biological process=protein amino acid phosphorylation
  Homolog annotation: Hit_ID=Q10NR1; Match level="QueryCoverage=80%, HitCoverage=8%, E-value=2e-14, Identity=73%"; Hit description =Mitogen-activated protein kinase 1, putative, expressed
MEKMSILSQAKSSKGTVYWMAPEVAKAKPHGPPADIWSLGCTVLEMLTGEVPYPDMEWI

SEQ ID NO: 47811 - protein, 135 aa, Zea mays
  Coding DNA Sequence Number=SeqID_6032
MWWWWRWGLDFLVLLVHMVLLVGMVMFVVELMLVILSGVVGVGDNSLVVSRLISGHPIFGGLGFRAIPGGMCRVFAMEKIVKPSLLRDSAIASASSVAVAALLRGVLMATSSVSSLLLIGDGVHLGLVTVWPTKV

SEQ ID NO: 47812 - protein, 247 aa, Zea mays
  Coding DNA Sequence Number=SeqID_6033
  Subcellular localization annotation: CTP_CleavageSite=33; ConfidenceScore=5.01e-01
MNTVLFMLDCNHSLASSPSSNLKRSLKARRDASAVLEGGSAREQRDLIDLAPELLDGARTTTPPPDDGAEAAATEAMASVAESGKERFGLRSLLRKGAARSRRELGLGFGERPRDLEREVRFLEHGVEARGSSRGGADFVHGVRGRPLGGHRRCGGEGSAGGRFKFRCVSRNRGADGEPRQKGKASPVGSGAGCSTPELILRRGDACGGDATIRVADEGGSARVWASNSYLYLLAKGLNIVYQFRKA

SEQ ID NO: 47813 - protein, 45 aa, Zea mays
  Coding DNA Sequence Number=SeqID_6034
MSVIKDDMVYVVDIAPDILEADNSSYHRRTSSAITVSLFAPTLRV

SEQ ID NO: 47814 - protein, 73 aa, Zea mays
  Coding DNA Sequence Number=SeqID_6035
MEEQISTGVATFFTTTPSEHAQPTECATSSTATAPSPGHVNGVCCHARWTSAGAAAQVVAAAALARQDGNGDK

SEQ ID NO: 47815 - protein, 806 aa, Zea mays
  Coding DNA Sequence Number=SeqID_6036
  Gene Ontology: Mol. function=zinc ion binding
  Homolog annotation: Hit_ID=Q6ZI16; Match level="QueryCoverage=97%, HitCoverage=98%, E-value=0.0, Identity=46%"; Hit description =Bactericidal permeability-increasing protein-like
  Pfam annotation: Domain name=C1_3; Domain location=359-389; Score =17.7; E_value=0.0042; Accession=PF07649.3; Description=C1-like domain
  Pfam annotation: Domain name=PHD; Domain location=360-410; Score =23.1; E_value=0.00028; Accession=PF00628.19; Description=PHD-finger
  Pfam module annotation: Pfam domain module=C1_3::PHD; Domain location= 359-389::360-410
  Subcellular localization annotation: CTP_CleavageSite=41; ConfidenceScore=5.03e-01
MGDAATAAAAAAASPACAARKRRRGDDSAGLRRVAEIVMVLAAAGEVRGGRQPTAAERALAAEARETLATAVAERAVRPKDLFPGEAVRAVVEDLGLNRSKDPAAMGFRPPKASIADRLMLTKRKVLPTLSFAPIPAQFTSHCGGFEILNWGDKCDMEEVKEAPVVSAPQTVVSSGTSEFHGLNGATKFGVGVPRNPPVPSLAATGPLTSTSPVTLKPPGSSPVKPVANSSVVPLVNTGPSNLKLDKNVSGPLNLAFSGATVVHSNKSTLDTSARPDVNAVQSSNQTVKNHDTKPVAVQAATGNPVMGHRATPGVAFAPPKPTFINHNEIAKNVLQFLHQPANHPSWTPPSTEYMHSRLCCQICKVDIIGTDNLLVCDACERGVHLKCLHQYGNKGVPKAEWHCSACLTQSKGKPLPPKYGKVTRTVVASKTAPPGGGAQLSLQESAENMAAKENHQKLAANGNLMKPFSIHGGSTVPDSNVLALSAVMAGSQSQLVSTLRPSIVVKAETPSNGKEGTGQPCNTAIQPNVRSSSLNNRLRSDSCLNPADSANEIMHGKHAAEISGVEAKVKSEANSEVVVSTDEELVHSSGTSIETERAKVVAIEENRAQSTFETDKMKVGETTINTGTTDQCINTEEKLPSLATSEAHTITDVKMTSNTGIPVQQHNIATIEEKTQIDAVSDPHPHAIQDIQDMEMGTNNGPPIDQTSSLVEENPPGQSSSIADACVTANTGIPTDQTQHPNESTENAVKKSPNRELYKEKPGCNITSDITQKVTSNGIMCPEDKTLCVHEDKAVGCDTEAKEEN

SEQ ID NO: 47816 - protein, 492 aa, Zea mays
  Coding DNA Sequence Number=SeqID_6037
  Homolog annotation: Hit_ID=Q2R5G9; Match level="QueryCoverage=25%, HitCoverage=40%, E-value=1e-10, Identity=30%"; Hit description =Uncharacterized plant-specific domain TIGR01615 family protein, expressed
  Pfam annotation: Domain name=DUF506; Domain location=49-254; Score =113.3; E_value=6.9e-31; Accession=PF04720.3; Description=Protein of unknown function (DUF506)
MEFFPGAYKKATAALDEAARARLRGPFISDTVAPSPAPSGGAADADDDLMDSVDEFYNGYGEHGTDGGAVAKDAVASRATEWKEALRLTLADAAADAAAVRIRAEAERIVRDAGPAAVGGGGGIRKHLVERLRARGYDARLCRSSWGRTSSIAAPGTYEYVDVTVGSPPPLPSARYIVEVNVAAEFEVARPSAEYQDLLSSLPPVLVSSPPALKELAAAMCAAAAESIRGAGMHVPPWRRASYVQAKWSARFERTEAAAPVAAATGPRAEGGPRAAARARRPGVGKNCGMEMGRRQGVMGREALGNDGPSRDVVGPSPGLGEAEAPPRSRSSLSSEVEVESEPLGRARRRPSAEAEVESEPWVGRGGVRRLPRPSPSPSPRSGEAEFVVFRGRARVRALGRARRSSSSSAAEPESEPSVGRGGVRRLLGPSPSPSPGSGEAEFLMASEAGLGRCQPHSVEWHNSRSGAGGAVLLSGRSVERRSDCSHFGSVD

SEQ ID NO: 47817 - protein, 99 aa, Zea mays
  Coding DNA Sequence Number=SeqID_6038
MAWSVRARGRARRRLLLRPRLGSSEDAIPPEVEVEAGPWGRARRSPSSEVEVEAEPWGRARQRLSFEAEAGAEPWGRVRWRLLLRPRPRVGRGGASCGA

SEQ ID NO: 47818 - protein, 321 aa, Zea mays
  Coding DNA Sequence Number=SeqID_6039
  Subcellular localization annotation: CTP_CleavageSite=50; ConfidenceScore=5.14e-01
MYPRKAGPLAKNCDKASKRVPALPLRLGGYCRENSAACPAPTVVPPSRVRLTAAESNLRRHRKLRLARPWASASGEVSASPDPRARPPPRPRKIVSASPDPRARPRPRPRKMDSASPDPRAPTSTLGGIASSPDPSLSLRRSLRLARPRARTDHATGGIIITLPLASSGYGEQDRRPIWLAPGPPGSKRRQVTYRQFGEAHRLTASLSLCDLCCRKGHSVTGLGLACSGAVPRFRTDKARRAAPPRPVPSDSVPFGCWLDSCSTAIQPILQHSSRTEDAAAGLQPWQHRPRVQPGVPAHALAAPSPSPKIPDRQACTRHAV

SEQ ID NO: 47819 - protein, 452 aa, Zea mays
  Coding DNA Sequence Number=SeqID_6040
  Gene Ontology: Mol. function=transporter activity; Cellular component= mitochondrial inner membrane; Biological process=transport
  Homolog annotation: Hit_ID=P04709; Match level="QueryCoverage=85%, HitCoverage=100%, E-value=0.0, Identity=92%"; Hit description=ADP ,ATP carrier protein 1, mitochondrial precursor
  Pfam annotation: Domain name=Mito_carr; Domain location=151-248; Score=132.8; E_value=9.5e-37; Accession=PF00153.17; Description =Mitochondrial carrier protein
  Pfam annotation: Domain name=Mito_carr; Domain location=256-352; Score=103.2; E_value=7.9e-28; Accession=PF00153.17; Description =Mitochondrial carrier protein
  Pfam annotation: Domain name=Mito_carr; Domain location=356-446; Score=89.9; E_value=7.8e-24; Accession=PF00153.17; Description =Mitochondrial carrier protein
  Pfam module annotation: Pfam domain module=Mito_carr::Mito_carr::Mito_ carr; Domain location=151-248::256-352::356-446
  Subcellular localization annotation: CTP_CleavageSite=66; ConfidenceScore=5.10e-01
MDPLCHTEGIALSFSKFGVEAAAQTASPSPPPVPKARAWIVCGSLGLWSSFRSVIPASANSFEVVMADQANQPTVLHKLGGQFHLSSSFSEGVRARNICPSFSPYERRFATRNYMTQSLWGPSMSVSGGINVPVMPTPLFANAPAEKGGKNFMIDFMMGGVSAAVSKTAAAPIERVKLLIQNQDEMIKSGRLSEPYKGIADCFKRTIKDEGFSSLWRGNTANVIRYFPTQALNFAFKDYFKRLFNFKKDRDGYWKWFAGNLASGGAAGASSLFFVYSLDYARTRLANDAKAAKGGGDRQFNGLVDVYRKTLKSDGIAGLYRGFNISCVGIIVYRGLYFGLYDSIKPVVLTGSLQDNFFASFALGWLITNGAGLASYPIDTVRRRMMMTSGEAVKYKSSLDAFQQILKKEGPKSLFKGAGANILRAIAGAGVLSGYDQLQILFFGKKYGSGGA

SEQ ID NO: 47820 - protein, 158 aa, Zea mays
  Coding DNA Sequence Number=SeqID_6041
MTGAGGGEDKETLILPPRAPSDVVETRQRDGHDPTRRDSIQPLQATGCTTVVAFVRSFRLSALADCKLDASPFTVKYPCSGDCMTNCIGPKTSSNLRYGVLQWIPYSSTWTTTSSSRAMPDLDGGAGGHVLEPVEDDSAPPGQIHAPPRRIRVASPDS

SEQ ID NO: 47821 - protein, 44 aa, Zea mays
  Coding DNA Sequence Number=SeqID_6042
MTCARTWKYPVECVDPRCYGKVLVAAAGRAIPSQPLTEYRMAND

SEQ ID NO: 47822 - protein, 266 aa, Zea mays
  Coding DNA Sequence Number=SeqID_6043
MSGAHRTVRCPLPTVGSATCLAQIARPTVGLADRWLTGQSGAHQTVRLPPSGFDFGGKQQSGEENLNVEENINVGCMQHLEHPIHDPTYEDYLARKRFSSCAEMFPTNSEFIPIPKMWAAFFMGLLLRPDSFEWAKKFLLSRALSSFVEPNMETVPIKIPSKCLLPPSQELHKESQSPSPADVVNRKKRSILVDTEVRRSARLREKARGFKSCSGIRKNCLCCARPSPPSIFHKIIKKLGAKFCKVDPSKLCPDALNSSRSSSSAI

SEQ ID NO: 47823 - protein, 217 aa, Zea mays
  Coding DNA Sequence Number=SeqID_6044
MEREAAEAMEREAAEAMEREAAEAMSLGKFEDVSWEFPPRLWFKSARLLPTGGSIDKWLSAFHGTCTVYKTLFLLAAMGDPVAIKPSSAEQLIPLLFFLMASWRNKLITRKSWYALSPVLNPLLMKIGALFLFSRYQSMSLKMKTPCPLTPTMVISFRWNSLGWASLCQIFNLISTSLPLVKLKKKPTMKTTLMMVGIPSRFNRPNKRNPLLQCEST

SEQ ID NO: 47824 - protein, 145 aa, Zea mays
  Coding DNA Sequence Number=SeqID_6045
MTGPTTKEKMAYVSTTRTLLCQTNRLPTTTNSHGGGGTDNKRGDGVCGYYGGHDDGDSPVRAISRAAGDDTGEARTMRVVAVSNTKLVPIIQGVYSVGHHFFGKNYVWCLVREEEMVREQECEHNKRHHYRDSDVFMNSYVRMWK

SEQ ID NO: 47825 - protein, 734 aa, Zea mays
  Coding DNA Sequence Number=SeqID_6046
  Gene Ontology: Mol. function=hydrolase activity, acting on glycosyl bonds; Cellular component=membrane; Biological process=metabolic process
  Homolog annotation: Hit_ID=Q69T31; Match level="QueryCoverage=76%, HitCoverage=98%, E-value=0.0, Identity=80%"; Hit description =Putative alkaline/neutral invertase
  Pfam annotation: Domain name=GDE_C; Domain location=148-534; Score= -216.4; E_value=0.0035; Accession=PF06202.4; Description=Amylo-alpha -1,6-glucosidase
  Pfam annotation: Domain name=Invertase_neut; Domain location=94-561; Score=1143.1; E_value=0; Accession=PF04853.3; Description=Plant neutral invertase
  Pfam module annotation: Pfam domain module=GDE_C::Invertase_neut; Domain location=148-534::94-561
MEAAPMRKASSQASLADPDDFDLTRLLNHKPRINVDRQRSFDDRSLGEISLAGAGTASRGGWGYGGGGMESYESMYSPGGGLRSYCGTPASSTRLSFEPHPLIGEAWDALRRSMVSFRGQPLGTIAAVDHSSGEVLNYDQVFVRDFVPSALAFLMNGEPEIVRNFLLKTLLLQGWEKRIDRFKLGEGAMPASFKVLKDPKRGVDKLVADFGESAIGRVAPVDSGFWWIIILRAYTKSTGDMTLAETPMCQKGIRLIMNQCLAEGFDTFPTLLCADGCCMIDRRMGVYGYPIEIQALFFMALRCALLMLKPDAEGKEIMERIVTRLTALSYHMRSYFWLDFQQLNDIYRFKTEEYSHTAVNKFNVNPESIPDWLFDFMPTRGGYFVGNVSPARMDFRWFALGNCVAILASLATPDQAAAIMDLIEERWEDLVGEMPVKICYPAIEGHEWQIVTGCDPKNTRWSYHNGGSWPVLLWLLTAACIKTGRLKIARRAIDLAEARLARDGWPEYYDGKLGRYIGKQARKLQTWSIAGYLVAKMMVEDPSHLGMISLEEEKPTKPVLRRSASWTGHFATPLTGLTEGQRRLRRSDCCATRQSEADKQPGPASGTIGNSAPPDPGLGLGLNPGRRRTPLRPTQGSDSGSAPEDDELRFARPQGSDSALASADGLRLARPRGSDPTSASEDRLDLDLGGASTSPNLGHGPTTSTGGAIIALPQADSGYEEQDRRPIWLAPPDK

SEQ ID NO: 47826 - protein, 65 aa, Zea mays
  Coding DNA Sequence Number=SeqID_6047
MAAPAPRGALATGAQAPSRLQDRTARTAGHVGFIIAESSDVEVGHVVGGMASFNFTVKKKNRALC

SEQ ID NO: 47827 - protein, 102 aa, Zea mays
  Coding DNA Sequence Number=SeqID_6048
  Homolog annotation: Hit_ID=Q2QYN0; Match level="QueryCoverage=38%, HitCoverage=4%, E-value=1e-09, Identity=80%"; Hit description =Expressed protein
MLPWLVVPLIVIWATTQLLLSAAYRFEVTSPCLACVSVLLESHLEGGETTDQAKDGGKKSFEVPSAREKVKETRNPKPRVKKKTCKVKVDRVKSYGASRITT

SEQ ID NO: 47828 - protein, 650 aa, Zea mays
  Coding DNA Sequence Number=SeqID_6049
  Gene Ontology: Mol. function=protein serine/threonine kinase activity; Cellular component=ubiquitin ligase complex; Biological process=protein amino acid phosphorylation
  Homolog annotation: Hit_ID=Q8W1D3; Match level="QueryCoverage=98%, HitCoverage=81%, E-value=0.0, Identity=58%"; Hit description=Serine threonine kinase
  Pfam annotation: Domain name=Pkinase; Domain location=456-644; Score=- 39.2; E_value=3.2e-06; Accession=PF00069.15; Description=Protein kinase domain
  Pfam annotation: Domain name=Pkinase_Tyr; Domain location=456-643; Score=-49.4; E_value=1.9e-09; Accession=PF07714.7; Description =Protein tyrosine kinase
  Pfam annotation: Domain name=Usp; Domain location=17-171; Score=30.2; E_value=7.1e-06; Accession=PF00582.16; Description=Universal stress protein family
  Pfam module annotation: Pfam domain module=Pkinase::Pkinase_Tyr::Usp; Domain location=456-644::456-643::17-171
MGRYSDGKDSGETGGGSYPLVAVCIDKDKNSQNALKYATETLAHRGQTIVLVHVNTKGTSGEHHPSSPCRGEHRPCGVADAAGYKQPTDPQMKDLFLPFRCFCTRKDIHCKDVVLDDHDVAKSVVEFAAHGAVEKLVVGASARGGFVRFKAEICNTISKSAPDFCTVYVVSKGGKVTSVRQAVRQAPAVSPLRTMIHGPKPEPEPVHAQKWTPPPPPPAVQDNHIMSPFARTTGHSAGSARKAFPDFSLPESSDISFIGSAPRRSTERYPPRLSSGSDGVDQQQQHSFEASRTPSRWGDSFGNDSTSHSQTSTSSWCSQPPDEMEAEMKRLRLELKQTMDMYSTACKEALSAKQKALELQRWKMDEEQRSQETRLTEESAMALIEQEKAKARAAIEAAEASQRLADLEAQKRISAEMKALKEAEERLRSMAAGARESAVRYRRYTIEEIEIGTDRFNEARKVGEGGYGPVYKGHLDHTPVAIKVLRPDAAQGRSQFQQEVEVLSCIRHPNMVLLLGACPEYGCLVYEYMANGSLDDCLFHRGGGGPVLPWQHRFRIAAEIATGLLFLHQAKPEPLVHRDLKPGQHPPGPQLREQDQRRRAGAPGAGVGGGQRDAVPHDVGGGHLCYIDPEYQQTGMLGVKSDVIVVSSDG

SEQ ID NO: 47829 - protein, 74 aa, Zea mays
  Coding DNA Sequence Number=SeqID_6050
MEPERMPTEASPRPKITERRAACPPSHCHPSPPIDLEFSRPHPTRSRTASTQTGADEPQRPMAAAFLALEARVT

SEQ ID NO: 47830 - protein, 892 aa, Zea mays
  Coding DNA Sequence Number=SeqID_6051
  Gene Ontology: Mol. function=protein-tyrosine kinase activity; Biological process=protein amino acid phosphorylation
  Homolog annotation: Hit_ID=Q6K9J0; Match level="QueryCoverage=70%, HitCoverage=87%, E-value=0.0, Identity=64%"; Hit description=Protein kinase-like
  Pfam annotation: Domain name=PB1; Domain location=34-122; Score=72.7; E_value=1.2e-18; Accession=PF00564.15; Description=PB1 domain
MAPSAAAPGISEAEGAPRMAKFLCSFGGSILPRPLDGCLRYVGGETRIVILPRDISYADLAARMRDLYKDADTIKYQQPDEDLDALVSVVNHDDVVNMMEEYDKVTATGEAFTRLRIFLFSQQLDDNAASVAVHYNVDERETERRYVDALNSLGDVRSPSSPVSVEQLFGIGGNDSGIPDFAGLRHLNVPRPSHGQRYGEMDSPWSPAYVSPSQYRVHDPRDFPISPSSARFQVGAEDFDDRIPDDFVRQSPKYHYYEAQSPSHMDNLVWLPPGAVIQQNAGFPGDLSKHNKFLDGNSGCDHCGSLFHKGQGSVTDPIYMNPRWTRPVQQHFDQPSMINDYPGHHANSCPDYCRPGEHYAGGQDVRLENGVYVKEQNGGHTPMLYNESRPHDRVWYAHTNQSHQRYEDPRLHYPTNDRVIEPYIVDASSVNSAFAPNKVYEMHSASLGHSSSSHESPHYFHGSSELINDAYHNQQVGGSGSYVQPAGSEESPGQHYNHFSAYGADSFYQMQQNLPPIQSLRRRANSPVHTASPYDSPHLPIPNGSINMNSVRNTGDASPRIAGLIGYDRMPNPFTPPNGSILYRVGGHDVPAAMENTSAFGPRSNPTAAQYVQPFIAPESIQHQPGVPLREVYPERAYPEPMPSSYADGKVAVSALPLTDQLFRLDINTMKKLEGQDDGNSTRNVNETTLLHAVDEPSTLPHHVGSVHEVDPKQEKLTEKESRQKQHEAGATALQECEDISEDMLNFLPELIASVKKVTLEDAAETQIAQSDANAAVSPVPDDDDNGKKLDEATAGNTNANQDLDLQGSLDRQKSFKIESTTAEAEALSKGLQITDFWKEALILSSLHHPNVVAFYGVVRDGPDGSLATVTEFMVNGSLKQFLRKKDRHYIF

SEQ ID NO: 47831 - protein, 154 aa, Zea mays
  Coding DNA Sequence Number=SeqID_6052
MALRYNSPDCLVCQAEQRLSAPTVVCKSEQCADKDSAACVAPTAVPLDRVRLTAAKSGFGCHRKLRLARPQGSAPVSASDDELRLGRPQGSAPVSASDDELRLARPRARTQPLLRKTTNSASPDPRARTQHRLWKTTNSASPDPRLGLGLGSGR

SEQ ID NO: 47832 - protein, 361 aa, Zea mays
  Coding DNA Sequence Number=SeqID_6053
  Homolog annotation: Hit_ID=Q6QP51; Match level="QueryCoverage=17%, HitCoverage=29%, E-value=1e-11, Identity=60%"; Hit description =Putative growth-regulating factor 1
MQAACNRTKGAHPFDFDASSVEAQAHTSCNPAHRDRERGYPERDPPPRRKRALSPLLIRGSKASPSEGFNSRLRALGLRAHYWSEVRRPAPWKGSTAALGHSGSAPTTDQGFVGWPPKGSTAASDAERGMTLADPGGFTSRPRAPSSNGYTFGSPEAQSSLRSNLGQIASPTDRIAEAFNARMEAPPRPTLGLGPRLGLGRRTPPRPTPGLGPRLGLGRRTPPRPTQGSDSASAPEDDELRLARPRARTRPRLRKTTNSASPDPRARTQPRLRKTTNSASPDLGLGLGLDSGRRRTPPRPTPGLGLSLGLRRWSPPRPTRGSDSTSTSEDRLDLDIGGATASPDPGLGPTTSQGRPSLPYP

SEQ ID NO: 47833 - protein, 689 aa, Zea mays
  Coding DNA Sequence Number=SeqID_6054
  Gene Ontology: Mol. function=ionotropic glutamate receptor activity; Cellular component=membrane; Biological process=ion transport
  Homolog annotation: Hit_ID=Q6K4P7; Match level="QueryCoverage=91%, HitCoverage=65%, E-value=1e-173, Identity=54%"; Hit description =Putative glutamate receptor subunit kainate subtype
  Pfam annotation: Domain name=ANF_receptor; Domain location=69-422; Score=199.1; E_value=1.1e-56; Accession=PF01094.18; Description =Receptor family ligand binding region
  Subcellular localization annotation: CTP_CleavageSite=26; ConfidenceScore=5.04e-01
MGRRLLRHHSPSSSSSSLRRRGGLVLAAALLAWCWCQASLPVGAAQAQAQPAPVRVGVILNLTSAVGQRRKVGIEMAVGDYYAARPAASRTRVVLSFRDSAGDVVGAASAAVDLIKNEQVQAIIGPQTSAEAEFVAYLGNRTHVPVLSSSATSPVLSPSQTPFFVRTAANDSYQAAPVAAALAALGWHAAAVVYEDSPYGSGILPALAGALQGVGARIAGRAAVPSGADDDRVDAVLYGLKAMPTRVFVVHMSALPAARLFRRARRAGMMTEDYAWVATDGVGGVVDALGPDDIGAMDGVVSLRPFVRVTERVSNFSARFRARLRREHPSADIYPHDPTVVMLWSYDTAWAIAAAAGVSSPTFQTSQQSAGVTDLDRLRVSATGAALLKAVRETTFRGLAGNFTLVDGQLQPPAYEFVNIVGKSSRAVGFWTPEAGITQTLGAEAAKKGLKKILWPGDSTSVPRGWVVSPNGRKLRVAVPVKHGFKEFVDVAGESTTGGHANVTGYCIEVFDAVMSKMPYPVSYEYVPFPYSSSSYDSLVSLVPRQIADIVVGDVTITASRMGSADFSMPFTDSGWSMVVAVRTETSTSMWIFLRPLTTSLWLASLAFFCFTGFVQFGLIFYFAFSTLVFSHKEKLESNLSRFVVIIWVFVVLILTSSYTASLTSMLTVQKLQPAVTDVRELQRTGAYI

SEQ ID NO: 47834 - protein, 186 aa, Zea mays
  Coding DNA Sequence Number=SeqID_6055
  Gene Ontology: Mol. function=electron carrier activity; Cellular component=extracellular region; Biological process=electron transport
  Homolog annotation: Hit_ID=Q6K4Q3; Match level="QueryCoverage=78%, HitCoverage=81%, E-value=3e-42, Identity=57%"; Hit description =Putative Pathogenesis-related protein PRB1-3
  Pfam annotation: Domain name=SCP; Domain location=53-174; Score=67.9; E_value=3.4e-17; Accession=PF00188.16; Description=SCP-like extracellular protein
MEYCCTSRSRRLSYCLLLLVLVCAAVLPVPPAADAAGVPRRLLQTSTCTGQDFDVPHAHLRARDNVRPLKYTEALSARAAQWAQRFKGDCAAAGPAPGVNVFLGAAGAAAAWLPSDAVAAWAEEEQHYDYGSNSCSAGHNACGRYTQMMWRDTREFGCAVVLCDSGDTLMACHYEPKGNVAGQRPF

SEQ ID NO: 47835 - protein, 373 aa, Zea mays
  Coding DNA Sequence Number=SeqID_6056
  Gene Ontology: Mol. function=DNA binding; Cellular component=nucleus; Biological process=regulation of transcription, DNA-dependent
  Homolog annotation: Hit_ID=Q6K9I8; Match level="QueryCoverage=90%, HitCoverage=57%, E-value=3e-86, Identity=54%"; Hit description=R2R3 -MYB transcription factor-like
  Pfam annotation: Domain name=Myb_DNA-binding; Domain location=14-62; Score=50.3; E_value=6.3e-12; Accession=PF00249.21; Description=Myb -like DNA-binding domain
  Pfam annotation: Domain name=Myb_DNA-binding; Domain location=68-113; Score=41.1; E_value=3.9e-09; Accession=PF00249.21; Description=Myb -like DNA-binding domain
  Pfam module annotation: Pfam domain module=Myb_DNA-binding::Myb_DNA -binding; Domain location=14-62::68-113
MGRAPCCDKASVKKGPWSPDEDAKLKAYIEEHGTGGNWIALPHKIGLKRCGKSCRLRWLNYLRPNIKHGDFTEEEEHIICSLYISIGSRWSIIAAQLPGRTDNDIKNYWNTKLKKKLLGKRAPSRRARTNQDPCYLAAGAASSSSSSSAATATQALSASALERIQLHMRLQGIYGALACSGGNDDSNAAFGSAAAAPPQWPKLEALSQANRLLPGSLPADAMATTVSVQPHPQHLVEVDHHQSLAAAALEGEQQLSSAGEGGFFERPKVDFYSPSAEVAAAAAASVEMNSVAPMVVGGYAGAAGFGPQHHHDELYDFLYSKYGSVGGLAHDGGHVPNVARAAELCGALRKRMKIEEAAKDQPTTFCTWQAKDA

SEQ ID NO: 47836 - protein, 285 aa, Zea mays
  Coding DNA Sequence Number=SeqID_6057
MERNRDLKEEEDVEEPLLRPRAPPLSDSGRDHAGLRGHHSCSGARLPDPDPDDDDEARKAPRRSRPAMLCGPQCFAWSWLATVSKVKARAAAGEGGDRPDLATDLSQFARQRRRQRPRGGGGGDPFFPEDSEAASGAAAPPQLYGDVKRTAASSHYSSRGLHMWMWPWLAGLGLLNLALPTMAKSFSWNNSIPLLALEASVQQAGQQPSWQHDLFYLSPASCDNLHLVTCAPASECTTTFLRSEIYDMELFPFLIDDGQQHVAAVGAIVAAVEGCGTRLEAERGG

SEQ ID NO: 47837 - protein, 609 aa, Zea mays
  Coding DNA Sequence Number=SeqID_6058
  Gene Ontology: Mol. function=protein serine/threonine kinase activity; Cellular component=membrane; Biological process=protein amino acid phosphorylation
  Homolog annotation: Hit_ID=Q6K703; Match level="QueryCoverage=76%, HitCoverage=94%, E-value=1e-140, Identity=58%"; Hit description =Receptor protein kinase-like
  Pfam annotation: Domain name=APH; Domain location=265-476; Score= -12.1; E_value=0.042; Accession=PF01636.13; Description =Phosphotransferase enzyme family
  Pfam annotation: Domain name=Pkinase; Domain location=263-571; Score =108.9; E_value=1.5e-29; Accession=PF00069.15; Description=Protein kinase domain
  Pfam annotation: Domain name=Pkinase_Tyr; Domain location=263-569; Score=108.0; E_value=2.7e-29; Accession=PF07714.7; Description =Protein tyrosine kinase
  Pfam module annotation: Pfam domain module=APH::Pkinase::Pkinase_Tyr; Domain location=265-476::263-571::263-569
MEEALATWEDDKALHANDYGSHGGNVLLPVVDEEGEELHVVDFRAEEGGGAFACRVEEAPRPRWLLQSPRGRRGRHRLLLAVSVSVSVSRTGTAALAGGRARRDTGSRLPANHCGPQSMAGRDRRGAFLASSSSSGSGSGRRAPEHEWWPRSPAWSRPLSDSGGARGRKSGSSTSSSSFRSLFRSIGVWFSSLSTASPSPASSSMKQKSRDAGAKKPPLPGYAGTKTSARGLYSGGGGGRQHRPSFQNSVFSIEEILSATNNFSPALKIGQGGFGAVYKGVLPDGTVVAVKRAKLRMQNPHVDVEFRSEIKIMARIEHQSLVRFYGYMECGEERIVVVEYVPNGTLREHLDSKRPPAIAAALLPTPSAISHLARTNSNQAGCNGRFLDFGTRLDIAIDVAHAVTYLHMYSDHPIIHRDIKSSNILLTDSMRAKVADFGFARLGAGLGAGGEATHVTTQVKGTAGYLDPEYLKTCQLTDRSDVYSFGVLLVELASARRPIETKREMKERLTARWAMGRFIGGASADVLDPHLARTPAADRALEAVLELAFRCMGPVRQDRPAMSDCCRALWAIRKTYRDMLAADATPQFSDRRATTSSSSADSSGDLWRI

SEQ ID NO: 47838 - protein, 84 aa, Zea mays
  Coding DNA Sequence Number=SeqID_6059
  Pfam annotation: Domain name=Fe-S_biosyn; Domain location=19-74; Score=-10.2; E_value=0.01; Accession=PF01521.11; Description=Iron -sulphur cluster biosynthesis
MSSSVLRAAADRAIRRHALTLTDAAASRIRQLLSLRQRPFLRLGVKARGFNGLSYTLNYAAGRLLPDRLGAIAPLRAGGHWLCP

SEQ ID NO: 47839 - protein, 142 aa, Zea mays
  Coding DNA Sequence Number=SeqID_6060
MDEPSVQHQQQELVRLLKGGMSESVPLASLLRPAIRSRVLQHRVRRRGVAGRQSKSVPLASLLRPAIRSVSTTRNRNDCISYTRDRARRRKLRSRLGSDVRIPNEVQPLKTFIPFQFAELVRQLSRRIAATEEKTEARLISL

SEQ ID NO: 47840 - protein, 80 aa, Zea mays
  Coding DNA Sequence Number=SeqID_6061
MERESFVNDFAKPGILPNAKTMGERVPSRCPIVDGPDGHHFNNCNRDRGVGRVFTQTHSPVKGGGIRGGPRRTCRYSVST

SEQ ID NO: 47841 - protein, 539 aa, Zea mays
  Coding DNA Sequence Number=SeqID_6062
  Gene Ontology: Mol. function=drug transporter activity; Cellular component=membrane; Biological process=amino acid metabolic process
  Homolog annotation: Hit_ID=Q6K702; Match level="QueryCoverage=88%, HitCoverage=86%, E-value=1e-178, Identity=65%"; Hit description=MATE efflux protein-like
  Pfam annotation: Domain name=MFS_1; Domain location=89-476; Score= -44.3; E_value=0.034; Accession=PF07690.6; Description=Major Facilitator Superfamily
  Pfam annotation: Domain name=MatE; Domain location=307-470; Score =114.3; E_value=3.4e-31; Accession=PF01554.9; Description=MatE
  Pfam annotation: Domain name=MatE; Domain location=88-248; Score =126.5; E_value=7.5e-35; Accession=PF01554.9; Description=MatE
  Pfam module annotation: Pfam domain module=MFS_1::MatE::MatE; Domain location=89-476::307-470::88-248
MSYTERLLYTSSPRHPGIFAPGTPTATPDMVAADECDGDEAGALVAAACTGTGTDTGSTQDAPAVRSPRAAWALFVEESRRLWAIGAPIALNIICLYGTNSTTQIFAGHIGNLELSAVAVGLSVVSNFSFGFLLGMGSALETLCGQAFGAGQVSMLGVYMQRSWIILAASAALLTPLYVYAAPLLRLLGQDPAMAAAAGDFTIAIIPQMFALALNFPAQKFLQAQSKVGVLAWIGVAALLAHVALLALFVTALGWGVAGAALAYDLSSWLTSLAQLAYVVGWCRDGWTGLSRAAFTDLWAFVRLSLASAVMLCLEMWYMMLLVVLTGHLDDAEIAVDSIAICMNINGWEGMLFIGLSAAISVRVSNELGSGRPRATKYAVAVVLAQSLALGLLAMALVLATRGQFPAIFTGDRQLQKAVSSIAYLLAVTMVLNSIQPVISGVAVGGGWQAVVAYINLGCYYAFGLPLGFIFGYLFRFGVKGIWAGMLCGTALQTAILSYIVWTTDWEAEASLALERVRIWGGHHEKLPTSDSEQEVAVV

SEQ ID NO: 47842 - protein, 857 aa, Zea mays
  Coding DNA Sequence Number=SeqID_6063
  Gene Ontology: Mol. function=GTPase activator activity; Cellular component=intracellular; Biological process=regulation of small GTPase mediated signal transduction
  Homolog annotation: Hit_ID=Q2HUD0; Match level="QueryCoverage=89%, HitCoverage=68%, E-value=0.0, Identity=54%"; Hit description=WD40 -like
  Pfam annotation: Domain name=RIC1; Domain location=674-841; Score= -24.9; E_value=5.7e-11; Accession=PF07064.4; Description=RIC1
MYLAYGWPQSIPLDPDDSDRVVLLRVLGRLLLAVCPASLHLWSAAQHRVRLARSDRSPESLATHGHNAHAAWSPDARTVAVLVSPLPLPEHFARSLRPRARQTHHAVYACCVQTSSFYLYVYKVQHSGKQLIVGGKQVPGLCLASISLIITEKVPLANGVAITSNFVCDSKSMLLGLSNGHVQVVSWNAEFSDSFKLGCYVCSSEKPTAAVDALVFDPPSLRESSNARPAPCCTGNSSIVHVELSVKLRLLVALYSGCRIALCTIGKKGLRQPGSTRVERWLDTDDAMCTSVASEQQILAVGCSRGVVELYDLAENTRHIRTISLYDWGYSVEDTGPVACISWTPDNCALAVGWKFRGLTVWSVSGCRLMCTIRQTGSNSASSPMVKPSALKFEPLMGGTSHIQWDDNGYKLFAVEESLSERVLAFSFAKCCPNRGLSGTTYSHQISYISQNWPVLHVVASNDGMYLAVAGSHGLVLYDLRNKRWRFFGDVTQEQKIQCKGLLWMRKIVIVCNYVESSNTYELLFFPRYHLDYSSLLYRKQLLGRPIVMDVFQDYILVTYSPFDVHIYHVVVSGELSPASNPVLKLSTLRELSIMSPKSPPVSMRFIPEQNDKGALTEDTHGFSDLLSQQPSRCLILRTNGELSVLDMDDGHEHTLTNSIELFWVTCSQFEEKGSLIKEVSWLDYGHRGMQVWYPSHGADRFKQEDFLQLDPELEFDREVYPLGLLPNVGVVVGVSQRMSFSTAEFPCFEPSPQAQTILHCLLRHLLQVSRCLLRHDSRVSDICDSVGADHLVRPWLGWRHRLGAGVCRGVLVGCWLLGDMWGGVLGGDNWDGTFVGEGSKGSGGVGGRYVSVGGEC

SEQ ID NO: 47843 - protein, 103 aa, Zea mays
  Coding DNA Sequence Number=SeqID_6064
  Subcellular localization annotation: CTP_CleavageSite=30; ConfidenceScore=5.53e-01
MAAAAEVAGGSPGARRPAGFPVWRWNRSSVCSGTSNASVFVHCGCRVKGKCAFGPFLSILVIKCQHKCLNVNLCPWMNKVQIISKVTIRPSQAADWGLPPTHT

SEQ ID NO: 47844 - protein, 219 aa, Zea mays
  Coding DNA Sequence Number=SeqID_6065
  Homolog annotation: Hit_ID=Q6ZFH7; Match level="QueryCoverage=18%, HitCoverage=7%, E-value=2e-09, Identity=75%"; Hit description =Putative sodium-dicarboxylate cotransporter
MVEGLLVGAESTIDLPSEKVELLKEAFDDLVASFASFVVESPAGVCRARRTSSVVASASVASPTGRRTGVEKDAGRSGEESIERKSILAFFLSKIKAKKGGSLDLSDNGGRELGLQEEVIGSIIAGTWNVVEVMADVCMRCLVLSVLDSGISAFGGWMWSTYVPEQCPRVNIILVGMWSTYVPEQCPITFSSLMSFRLPMTLFLFLVLYLESAQITWKG

SEQ ID NO: 47845 - protein, 213 aa, Zea mays
  Coding DNA Sequence Number=SeqID_6066
  Gene Ontology: Cellular component=integral to membrane; Biological process=phosphoenolpyruvate-dependent sugar phosphotransferase system
  Homolog annotation: Hit_ID=Q3Y4F2; Match level="QueryCoverage=66%, HitCoverage=24%, E-value=3e-19, Identity=33%"; Hit description =Anaphase promoting complex subunit 4
MAFTISNYRFQNFFAWVLKSVRILLNEPTDQVPAANSELVVIFLKFLLDKDPIKQLLEADERIECDILKEAFLMPFTAISSQIQCQGLLPLYPVTSSATLSSSCSPTSISFYKDEDSSHEESSYSLTDYVCLKIPDGSLNKVNCIGVIKGSGFLLHIPDGYECVDLSLYKPWKILDGDAANRELFLYATLRNIPCKYLQFAKTGGNNSYFPYV

SEQ ID NO: 47846 - protein, 78 aa, Zea mays
  Coding DNA Sequence Number=SeqID_6067
MEINQINMKQFKLVQYPGEFVVTFPRAYHIGFSHGDNSSAQESAEQGGAELYEEVNNRGLCAIAQAESSVIRFSVDSP

SEQ ID NO: 47847 - protein, 113 aa, Zea mays
  Coding DNA Sequence Number=SeqID_6068
MEGGRESEVRRGAHEKTLELVLEVLQRGADGVQAPVLLSQGRQGDDLVSAARAETQTPALDVHEAGGGCGGGGAAADSAQEVGAGEGVDGIADLVVEVPDGLQQHDLLFLFTV

SEQ ID NO: 47848 - protein, 161 aa, Zea mays
  Coding DNA Sequence Number=SeqID_6069
MVGNGGGSYRRRSGRWRQWAAWGASSGRQWAGGRSSGDLGAAVGGRRRPSSGELERAASSGDVGRGSRRRAGAGTWQAAAIVDTGGGVGLKYKKFGPIGFAPPTYLSDVYATAMPARARFDREDPRKCMRVRHRPASRRATTATDAKKKGEPASKTTPCKH

SEQ ID NO: 47849 - protein, 404 aa, Zea mays
  Coding DNA Sequence Number=SeqID_6070
  Homolog annotation: Hit_ID=Q6YZ50; Match level="QueryCoverage=43%, HitCoverage=57%, E-value=3e-35, Identity=49%"; Hit description =Putative zinc finger protein
MGTATAVRARAAGRRGAHVLAHYSVLTSRGADRSGGRWSGRQIGREPWAYETYGRRGAGMYMYCSEGGIYEAVTMHAWASLSPFPCVLLRPGMGRRGTDLGGEYWRRSSEVGTEHVQKDGPCTCFCTGHRGCRSSGPAPPPAPAQPRDATIRLFGCDFSNDDQQQRQAKQQQQHRQDAGAAADSPDAANGSSITSESNNGANKSGGADRKFECHYCCRNFPTSQALGGHQNAHKRERQHAKRAHLQASLAMHRYVPGHMYGLFNYHQQQQHHLGGGGGGRFDYPAPLQLPPPPPARYPMWTSAGPAGPYGGGPGSMSQPINGSPVPPGLWRVPPPAATTTTTTAMENFGVPGRRHGAGGGTAAVLAAGPAGAEAAACKDDAMGLLSPSPSLSSCSSTSPEKKKL

SEQ ID NO: 47850 - protein, 91 aa, Zea mays
  Coding DNA Sequence Number=SeqID_6071
MALDPAVASAVWGEGVGSGAACVCALDAGLPAWALGAGPTRALGAAHWWCSALLPWPAAAHWRLSARRLAALGTTPGRPDEPTMEPRREPP

SEQ ID NO: 47851 - protein, 56 aa, Zea mays
  Coding DNA Sequence Number=SeqID_6072
  Gene Ontology: Cellular component=chloroplast; Biological process =cell redox homeostasis
  Homolog annotation: Hit_ID=Q6Z7L3; Match level="QueryCoverage=94%, HitCoverage=28%, E-value=1e-20, Identity=85%"; Hit description =Putative hioredoxin 5
MAVRFYFIDVNKVPQGVVKRGNVTLWKDGEWKAEVIGGHKACLVMDEVREMIENNK

SEQ ID NO: 47852 - protein, 114 aa, Zea mays
  Coding DNA Sequence Number=SeqID_6073
  Subcellular localization annotation: CTP_CleavageSite=56; ConfidenceScore=5.12e-01
MDGSDLGLYDTASHGDAPASAPEDGRRACGRGAGFVHACPGSRVVTWTAPTGSSTNGAATGSATERHGPRTAGACGRRFAVSQLFEVSDSFHHPYLGYVDLVSMDTLSAFLDGC

SEQ ID NO: 47853 - protein, 82 aa, Zea mays
  Coding DNA Sequence Number=SeqID_6074
  Gene Ontology: Mol. function=polyribonucleotide nucleotidyltransferase activity; Cellular component=membrane fraction; Biological process =mRNA catabolic process
  Homolog annotation: Hit_ID=Q69LE7; Match level="QueryCoverage=95%, HitCoverage=8%, E-value=4e-35, Identity=92%"; Hit description =Putative polynucleotide phosphorylase
  Pfam annotation: Domain name=RNase_PH_C; Domain location=20-82; Score= 32.9; E_value=1.1e-06; Accession=PF03725.5; Description=3' exoribonuclease family, domain 2
MASVCGGCLALQDAGVPIKFPVAGIAMGLVLDTQEFGGDGSPLILSDITGAEDASGDMDLKIAGNESGISAFQMDTKVVMTI

SEQ ID NO: 47854 - protein, 43 aa, Zea mays
  Coding DNA Sequence Number=SeqID_6075
  Homolog annotation: Hit_ID=Q69LE7; Match level="QueryCoverage=83%, HitCoverage=4%, E-value=4e-10, Identity=86%"; Hit description =Putative polynucleotide phosphorylase
DSSLILSDITGAEDASGDTDLKIAGNESGISAFQMDTKVVMTI

SEQ ID NO: 47855 - protein, 230 aa, Zea mays
  Coding DNA Sequence Number=SeqID_6076
ALRPLHVRRVATNTAREQSSASHPPWPQTLLVSNPARRIRLNAAYRDMDGSDLGLYDTASHGDAPASAPEDGRRACGRGAGFVHACPGSRVVTWTAPTGSSTNGAATGSATERHGPRTAGACGRRFAVSQVSAPPRLLQKRTHRGYSSLDTVDLRFSKIAVSEAIAPLLTVLVSFTIAPIPQLSATYMEPLRWCIPLSVGLGRHAQVLRLSSRSLLQLFETYLEYVVSLP

SEQ ID NO: 47856 - protein, 83 aa, Zea mays
  Coding DNA Sequence Number=SeqID_6077
  Gene Ontology: Mol. function=protein dimerization activity; Cellular component=nucleus; Biological process=regulation of transcription, DNA-dependent
MTMASRVRAQSTALGLTVAKVETQLGELLRTMNLYDFLRTMLPDAGPPPAAKTVDEVCRDIQSTSGGARQPSTGEMMLKDFLS

SEQ ID NO: 47857 - protein, 225 aa, Zea mays
  Coding DNA Sequence Number=SeqID_6078
  Gene Ontology: Mol. function=nucleic acid binding; Cellular component= nucleus; Biological process=regulation of transcription, DNA-dependent
  Homolog annotation: Hit_ID=P93802; Match level="QueryCoverage=80%, HitCoverage=26%, E-value=1e-68, Identity=60%"; Hit description=MURAZC
MKEFQIAMRQYAIKHEFELGIDVTSTTRYVGYCKCGDCQWRIYAREEKKGLPTIVVVVLHDSHTCTSSGRKKTTTPSCGWFGRGRRRHYNSCLAVGMRVSSYYSLGGSREAVLAKASDSIVEIDVVLEDGKYYFNHFFCALGPCISGFRDGCTPYLSVDATALNGRWNGQLASSTGVDGHNWMSGFDPSVKCDYITNNMVEEKKDRGKTPGFDLAICYGYIESSD

SEQ ID NO: 47858 - protein, 46 aa, Zea mays
  Coding DNA Sequence Number=SeqID_6079
MGGRLGAECCLGGWGVVELCRRDDRCMWKCFHASCNACRAESVGWG

SEQ ID NO: 47859 - protein, 383 aa, Zea mays
  Coding DNA Sequence Number=SeqID_6080
  Gene Ontology: Mol. function=heat shock protein binding; Cellular component=chloroplast thylakoid membrane; Biological process =response to heat
  Homolog annotation: Hit_ID=Q6K850; Match level="QueryCoverage=99%, HitCoverage=64%, E-value=4e-98, Identity=73%"; Hit description =Putative heat shock protein dnaJ
  Pfam annotation: Domain name=DnaJ; Domain location=73-208; Score =52.6; E_value=1.3e-12; Accession=PF00226.21; Description=DnaJ domain
  Pfam annotation: Domain name=DnaJ_CXXCXGXG; Domain location=272-356; Score=96.8; E_value=6.3e-26; Accession=PF00684.9; Description=DnaJ central domain (4 repeats)
  Pfam annotation: Domain name=PADR1; Domain location=321-356; Score= -15.7; E_value=0.1; Accession=PF08063.2; Description=PADR1 (NUC008) domain
  Pfam module annotation: Pfam domain module=DnaJ::DnaJ_CXXCXGXG::PADR1; Domain location=73-208::272-356::321-356
  Subcellular localization annotation: CTP_CleavageSite=52; ConfidenceScore=5.68e-01
MALTSFPFAPSNTSLSYSSRASTAAAFAPRGVHFAAPGRSGGGQPLACAAPRCRGRAPRRRRGGGLLVWAAADYYATLGVPRAASNKDIKAAYRKLARQVLDACLTSNPTIPRLTARQPCIVGLIGWPAVRSRVRASLASRIRRIRAYRWMQKNSSKMNYFASTRAAHVWHIQYHPDVNKEPGATEKFKEISAAYEVLSDEKKRTLYDQYGEAGVKSATNPFDLFETFFGGSMGGFSGMDQSTFRTSRQNTVLQGEDIRYDVVLGFTEAIFGTEKYIILSHLETCDTCGGSGSKAGSKMRICSTCGGRGQVMRTEQTPFGLFSQVSICPTCAGEGEVISEYCRKCSGEGRIRVRKEIKVKIPPGVSKGSTLRVRGEGDAGSKG

SEQ ID NO: 47860 - protein, 293 aa, Zea mays
  Coding DNA Sequence Number=SeqID_6081
  Homolog annotation: Hit_ID=Q18DN4; Match level="QueryCoverage=51%, HitCoverage=1%, E-value=8e-09, Identity=29%"; Hit description =Halomucin precursor
MGVPDVCARCARNKCTAGSRWRRRETLLRWHTGQSGVRRLAPEGFTVASDTERGMTREGQRRLRHSDCSATRQSESDRQSGLAKGATTNSAPPDPRARTRAKTRKTANSAPPDPRARTRAKTRKTANSAPPDPRARTRAKTWKTANSAPPDPRARTRAKTRKTANSAPPDPRARTRAKTRKTANSAPPDPRTRTWAKTRKTANSAPPDPRARTRAKTRKTANSAPPDPRARTRASTRKTTKLRFARPQGSDSALASAERLPPRPTPWLGLGHGNKRQTQPWLRRNPHVALPRA

SEQ ID NO: 47861 - protein, 483 aa, Zea mays
  Coding DNA Sequence Number=SeqID_6082
  Gene Ontology: Mol. function=binding; Cellular component=clathrin coat of trans-Golgi network vesicle; Biological process =intracellular protein transport
  Homolog annotation: Hit_ID=Q948F4; Match level="QueryCoverage=95%, HitCoverage=66%, E-value=1e-168, Identity=69%"; Hit description =Putative gamma-adaptin 1
  Pfam annotation: Domain name=Adaptin_N; Domain location=42-478; Score= 109.6; E_value=9.2e-30; Accession=PF01602.10; Description=Adaptin N terminal region
  Pfam annotation: Domain name=Alpha_adaptinC2; Domain location=299 -477; Score=9.9; E_value=0.00037; Accession=PF02883.10; Description =Adaptin C-terminal domain
  Pfam module annotation: Pfam domain module=Adaptin_N::Alpha _adaptinC2; Domain location=42-478::299-477
MDTVEKIVEDFASDIAVSPFSSGTSLREMIRAIRACKTAAEERAVVRRECAAIRTAISENEPELRHRNMAKLMFIHMLGYPTHFAQMECLKLIAAAGFPEKRVGYLGLMLLLDERQEVLMLVTNSLKQDLNHTNQFIVGLALCALGNICSAEMARDLSPEVERLMRSREVNTKKKAALCSIRIVRKVPDLAENFMGLAASLLKEKHHGVLISAIQLCTELCKASKDSLEYLRKNCIEGLARILRDVSNRSYAPEYDVSGIVDPFLHIRVLKLLRILGQGDADCSEYMNDILAQVATKTESNKNAGNAILYECVQTIMGIEATSGVTSTASTDILMDLLSIGSSPSQNGTPVTDFRHPGQAESKPVPGVPEAVDLLGSLSPAESKPTPVVPKDMDLLDGLSSNTSISECNLEDHAAVPKFIQLRLDPASGNTVPANGSGSVTQGLNITNNQQGQQRCDLQIHRDVFDTTLKDGLSKLSSAPQSL

SEQ ID NO: 47862 - protein, 218 aa, Zea mays
  Coding DNA Sequence Number=SeqID_6083
MTLCPYVKVKGPHRLKMSLLWKSNIDVRLLSAAFGPSLSPIGRGLGLGYAPLRSRGGGIREEPLSHQRRTSSAWRSRRGLVAAPPPLQGGRQTLNEERGHIRTIAPARRREAAEEKVRRSRTTVQAKTGDGLHLLRTAAVGARQVVEEEVHRSRADVAAEDEEGIGEVEGITSERTGDGASRVRETMVGVLEGESLRSYRVDESDSILGAAIGSEPKR

SEQ ID NO: 47863 - protein, 314 aa, Zea mays
  Coding DNA Sequence Number=SeqID_6084
  Homolog annotation: Hit_ID=Q6K852; Match level="QueryCoverage=16%, HitCoverage=19%, E-value=7e-17, Identity=80%"; Hit description =Putative methyltransferase
  Pfam annotation: Domain name=Ribosomal_S30; Domain location=255-313; Score=77.9; E_value=3.1e-20; Accession=PF04758.5; Description =Ribosomal protein S30
MAVDAALRLLWQPVRRCPSGGVCAEARAVETAEATCFDLGSWPFDVLDGILGENLGDGDIRGRHFPLLRASHCYVFQFVLTSKLPSVHAFASRRLVGQITGGGYWIKIADEESELPRVPLGLCTVNVSPLSPEPNPEESKLTYVEEQLGDAIVGESEQLQRPLGNPRLKEGSGVLAGLRLVVEHIRRRLELRPRHLHSPPSCRSPRFLASQAQTLLVPLANESKPVWAEFRFLRRLLSSIATAAAAADADVQPANSCRTLRLVYLFVAQTPKVAKQDKKKKPRGRAYKRMQYNRRFVTAVVGFGKKRGPNSSEK

SEQ ID NO: 47864 - protein, 252 aa, Zea mays
  Coding DNA Sequence Number=SeqID_6085
  Homolog annotation: Hit_ID=Q87W07; Match level="QueryCoverage=61%, HitCoverage=32%, E-value=3e-08, Identity=31%"; Hit description=Type III effector HopI1
MSRRLITSVHMELFNPSPSTNRSVGGGVGRGGEDGFPRREMGGHVLKIRERWVMGEVFGKRTRDEGVRLTAAKSGLGRHRKLRLARPQGSDSASAPEDDELRLARPQGSDSASAPEDDELRLARPQGSDSASAPEDDELRLARPQGSDPASAPEDDELRLARPQGSDSASAPEDDELRLARPQGSDSASAPEDDDRPWPQPTVSASPDPGARTRPRPRKTDSTSTLEEPPSRPTQGSDRPRRRRGHHCPTPS

SEQ ID NO: 47865 - protein, 476 aa, Zea mays
  Coding DNA Sequence Number=SeqID_6086
  Gene Ontology: Mol. function=D-alanyl-D-alanine endopeptidase activity; Cellular component=integral to membrane; Biological process=cytochrome complex assembly
  Homolog annotation: Hit_ID=Q5Z413; Match level="QueryCoverage=96%, HitCoverage=91%, E-value=0.0, Identity=68%"; Hit description =Putative growth-on protein GRO10
  Pfam annotation: Domain name=PA; Domain location=34-135; Score=52.7; E_value=1.2e-12; Accession=PF02225.12; Description=PA domain
  Pfam annotation: Domain name=Peptidase_A22B; Domain location=202-453; Score=326.4; E_value=4.9e-95; Accession=PF04258.4; Description=Signal peptide peptidase
  Pfam module annotation: Pfam domain module=PA::Peptidase_A22B; Domain location=34-135::202-453
MANWWVLPSAVKVQTWINKKDKDEFVGVGARFGPKIESKEKHANWTNLLLADPSDCCTPPREKVAGDILLVERGNCKFTTKAKVAESAGASAIIIINDKHELYKMVCETNETNLDIGIHAVLLPKDAGSSLQRSLSSGEVLVELYSPDRPLVDTAEVFLWLMAVGTILCASYWSAWSAREADIEQEKLLKDGREVAPNFEPGGSSGMVDINMVSAILFVVIASCFLITLYKLMSHWFVELLVVIFCIGGVESSHKLTKELLVSFGMTKCAGSANMLGGLTVNVKGITLIVTVIQIVRIPNLKVGSALLGCAFLYDIFWVFISKMLFHESVMIVVARGDKTDEDGVPMLLKIPRMFDPWGGYSIIGFGDILLPGLLVAFALRYDWAAKKTLQSGYFLWSMVAYGSGLLITYVALNLMDGHGQPALLYIVPFTIGTFLALGMKRGELRNLWTKGQPERVCTHMHPSPKDSPVAVSSLS

SEQ ID NO: 47866 - protein, 141 aa, Zea mays
  Coding DNA Sequence Number=SeqID_6087
  Homolog annotation: Hit_ID=Q5Z413; Match level="QueryCoverage=22%, HitCoverage=5%, E-value=2e-07, Identity=75%"; Hit description =Putative growth-on protein GRO10
MARRALELAAVLLALAALAAVAAGGDIVHQDDEAPKIPGCSNDFVLGLNSSWTRGVCNLASDGRTVALFFWVWIGLGVQPRHLLGREEGRLGRPYGLAYSIVGYGVSRASLDMLLITRSMPVAFMRLIRYDDHDGTYDFQV

SEQ ID NO: 47867 - protein, 225 aa, Zea mays
  Coding DNA Sequence Number=SeqID_6088
  Gene Ontology: Mol. function=protein phosphatase type 2C activity; Cellular component=protein serine/threonine phosphatase complex; Biological process=protein amino acid dephosphorylation
  Homolog annotation: Hit_ID=Q9FQY2; Match level="QueryCoverage=59%, HitCoverage=36%, E-value=1e-45, Identity=70%"; Hit description =Protein phosphatase type-2C
  Subcellular localization annotation: CTP_CleavageSite=65; ConfidenceScore=5.73e-01
MAVAPSAPSFFPSSPSKISSTWSPCNTLWEQGHQCRRPSSRRSCGLRSTCPTCSATLTWLSEVSRIEEVEEPIKPVLTFASPSERREVLKSEAHAAGDLGAVVHRAYFRMDEMMRGQRGWRELQALGDKINQFSGIIEGLIWSPKASDSNDKHDDWAFEELLKSGFQFAELECLVMLETLIRNKQLIVANAGDSRCVISRNGQVLQMHGLRSGLYRQTVKISSKG

SEQ ID NO: 47868 - protein, 493 aa, Zea mays
  Coding DNA Sequence Number=SeqID_6089
  Gene Ontology: Mol. function=metal ion transporter activity; Cellular component=membrane; Biological process=metal ion transport
  Homolog annotation: Hit_ID=Q10F20; Match level="QueryCoverage=88%, HitCoverage=92%, E-value=1e-146, Identity=66%"; Hit description =Magnesium transporter CorA-like family protein, putative, expressed
  Pfam annotation: Domain name=CorA; Domain location=124-493; Score =283.9; E_value=3.1e-82; Accession=PF01544.9; Description=CorA-like Mg2+ transporter protein
  Subcellular localization annotation: CTP_CleavageSite=60; ConfidenceScore=5.60e-01
MASVPLSSPSQAGLLGPPFPLLPPPFGACLRYRLPRLPTGLSSSVRKGGLLPLPLLVPPRAAGGKDGRAVTKEELEEEEEEFEVTKEGEEVNQETGGGSGATKEAAARGSGRFAADYVSLGVREPVYEVIEVRSNGRMSTKKISRRQLLKSSGLRLRDTRSVDPSLWLMNSMPSLLVREQAILLNLGSLRAIAMYARVLIFNYNSPGGKAFLGLLLSRLNPRNINGGPAMPFQLEVVEAALLSRIQRLEQRLMKIEPHVESRLVQTALKLDISYDLLGVTPGEADMAVVEDDVLEVATLLEVLPNRLTADVLEQLRLSKQALVELGSRAGDLKQMLIDLLDDPHEIRRICIMGRNCTLDRLSDIVECTVPLEKQIAEEEEEEIEMLLENYLQRCESCHGQAERLLNSAREMEDSISVNLSSRRLEVSRVELLLQVGTFCVAIGALIAGIFGMNLKSYLETNAWAFWVTTGGIVVGAVAGFFVVYSYLRARKIL

SEQ ID NO: 47869 - protein, 86 aa, Zea mays
  Coding DNA Sequence Number=SeqID_6090
  Subcellular localization annotation: CTP_CleavageSite=42; ConfidenceScore=5.77e-01
MASSSVLAVSSIPLPSPGAYKRTRPSPSSPHSSGHLHCLPPRAYRASAAVLPSSLRAPLFPPIVAGNRTGGITAAGTHHRAADRPP

SEQ ID NO: 47870 - protein, 194 aa, Zea mays
  Coding DNA Sequence Number=SeqID_6091
  Homolog annotation: Hit_ID=Q6AVV6; Match level="QueryCoverage=47%, HitCoverage=14%, E-value=1e-32, Identity=78%"; Hit description =Nitrate transporter, putative
MDVDKLENGGGEESPRPAVKYHGWKAMPFIIGNETFEKLGTLGTSANLLVYLTQVFHMRSVDAATLLNGLNGTTSLAPIIGAFLSDAYLGRYLALAIASVASLIVSAAIHLQSTPLARYLLNLRDTGVGSELARPPAAGRNQFGGRWNGIRHAVAAGPFNDCETWIPSSRTAVSCTVNGPCLVSISFNFCPSKY

SEQ ID NO: 47871 - protein, 172 aa, Zea mays
  Coding DNA Sequence Number=SeqID_6092
  Gene Ontology: Mol. function=RNA-directed DNA polymerase activity; Cellular component=chromatin; Biological process=one-carbon compound metabolic process
MTQPRFYKLEFPTYDGTTDPLPLDKSVRAVVPWSADADLGLNVTGLLPPLSRTKTTPTASTLYCATPTISQRHRRQSCSSVAFQIDVELREPRDLQTAMYLARAFETRANAGITNPQRQAFPTPRPDAVPLSASDPRGTSECAGTNTSSRRRRSGRCCDHPNCNKNGPGPFG

SEQ ID NO: 47872 - protein, 138 aa, Zea mays
  Coding DNA Sequence Number=SeqID_6093
MPWTYDGIGNGDGGMGRRWIGTGLLVVWVGPRSWGTDAGGKAGGSCWMCCCVGLLDGRKVLDRKVVMAAMDRVRSVTSCATESRVMGGVGKGNGGQWMWWVVGGIDVAGGVEVMGGGPDIADTRLIGFLILPGMSRRE

SEQ ID NO: 47873 - protein, 118 aa, Zea mays
  Coding DNA Sequence Number=SeqID_6094
  Homolog annotation: Hit_ID=Q10F03; Match level="QueryCoverage=45%, HitCoverage=10%, E-value=8e-21, Identity=85%"; Hit description =Isoamylase N-terminal domain containing protein, expressed
MKLSPQSFGWCRQEVSIMNWGNGCSLVQVWLWLFGQQGRKPSSGVWLGPKLCLSFRVLCLASAGRKLERSENGMFSLNLRLYPGRYEIKFIVDGVWKNDPLRPTVHNNGHENNLLLVT

SEQ ID NO: 47874 - protein, 136 aa, Zea mays
  Coding DNA Sequence Number=SeqID_6095
  Subcellular localization annotation: CTP_CleavageSite=27; ConfidenceScore=5.25e-01
MATFTAVQFRPPSPVIGPIKAMNTPHSCSLIRPWDSSNRRHPICTAVLLLAIAPSFSLSITTTAHGYRHGWGVHGSTIYEHRSRDRAKRVHCEILEVVACSYRMRSPTDAPAVIHSRPSQENDDCQVGSTVQWHRA

SEQ ID NO: 47875 - protein, 162 aa, Zea mays
  Coding DNA Sequence Number=SeqID_6096
  Subcellular localization annotation: CTP_CleavageSite=65; ConfidenceScore=5.28e-01
MEDGAATAELIRAAASSAPYRHSAFLSALWSPSSQFPSPATTISDSVSTDRDFSSRELKPPHPLRTSTVVQPSLGGLADSTGCMDRAQDYWTRESWVPWMELLTGSGSPAAAPHHTMVGVVIAKSLAWLCSFAGVFHRCGTGRRRLSPAMFRKMVVPPLDDS

SEQ ID NO: 47876 - protein, 362 aa, Zea mays
  Coding DNA Sequence Number=SeqID_6097
  Homolog annotation: Hit_ID=Q2R1N0; Match level="QueryCoverage=27%, HitCoverage=20%, E-value=6e-25, Identity=58%"; Hit description=UDP -glucoronosyl and UDP-glucosyl transferase family protein, expressed
ECTRSLSMLAGLLVELRDTTRLVAFVTDQFGITFFTAAHDASVTARCLFMPMNLHALSLVLHLPEQASFMPGEFRDLAEPVRLPGCVPIPGPNIVLPFQSLWTRTGSGLPSTPSVAVETRAERARRRWSSGRGMRAGAKGRGRPGRRGARASAPTVFRASRRRGGGMDLCGAVAECGRRRGWLWTRRSDDGGGGMDLCGCGGSGTRLGERGTRAAMDWRNLWARVAQGKGERGAGEADVVGGAGQGCHAVPRFVGNLADLASRKERGAGRAGSHGWKLALLPRLGERGTRAAGAGDWFVGSRRAERQNAMQRQNRADVLLLSVNDGVTVLAPLIRLIRRNEGTVQEESRLTDWLTLLLIDIC

SEQ ID NO: 47877 - protein, 125 aa, Zea mays
  Coding DNA Sequence Number=SeqID_6098
MQPPERLEHCTLAAPAQVGEEEKSKLIIVFIDDKAGSRQQVDDHRSHVLGHDNEALVQLGIRSERSAPFRATNPNPNPNLTCKQTRPQGRSTDQSQASQGKSGTARSCHRRLEYNARNVFVRMDM

SEQ ID NO: 47878 - protein, 431 aa, Zea mays
  Coding DNA Sequence Number=SeqID_6099
  Gene Ontology: Mol. function=NAD+ ADP-ribosyltransferase activity; Cellular component=nucleus; Biological process=protein amino acid ADP-ribosylation
  Homolog annotation: Hit_ID=Q10PL7; Match level="QueryCoverage=98%, HitCoverage=98%, E-value=1e-124, Identity=56%"; Hit description=Poly polymerase catalytic domain containing protein, expressed
  Pfam annotation: Domain name=PARP; Domain location=162-346; Score= -53.6; E_value=0.00058; Accession=PF00644.10; Description=Poly(ADP -ribose) polymerase catalytic domain
MDLSSDDVKAANMRPAVAAADGTSTLLRGWREFMRSGAPARFLCYEDGKWIGITGEAVPQLRQAFQERRAMADASYGGKAYLFDFLRMIRIDEVTGEETGLAWIDDRGDCFFPAPDCGGRKRKRDDEPAEDEAESSSGVDVRSGERHGVDAKKMKAWENAAVRLEENDMYYQVVSKLFLSYGMAQRGAAITEVRKIAPGARTVAFREQGQRLAYARCTATGTAKFAWYGASEDDVAAVVERGFVRNNAPRLGARKHGDGVHLSPAQCPYTSAMLAKADGSDEAHIVLCRVLMGRPEAVPAGSSQFCPSSRSYDSAVDKLENPQWYVVWNMDMNTRILPEYVVSFKCSKLQQMRESSEATSKLKKPAPVARDMFPTLLAEIQQIVPDKCDLLQESYKNFKMGQIKKDQFIQFLRNYVGDEVLKTVAKKLRRC

SEQ ID NO: 47879 - protein, 110 aa, Zea mays
  Coding DNA Sequence Number=SeqID_6100
MPPRSHDHKARSSGVAPVAPPAIDPTLAFILQSLTQQQAHLAAEQARHAAIQQQMSKRMISMFQTIQDRQDTLQQQLLADRIEHRAFMTHILQHTGVQLPLVRSAPPPAL

SEQ ID NO: 47880 - protein, 46 aa, Zea mays
  Coding DNA Sequence Number=SeqID_6101
MATLLLSSTIERPLAFVHLTAAPVSVAPCSFHSYSTALVVVHPSAL

SEQ ID NO: 47881 - protein, 162 aa, Zea mays
  Coding DNA Sequence Number=SeqID_6102
MAVMGSTSEKIGTRWPGGCGPAVPGGEPAILVAAVAECGRRLITGGRWHAVPRWPAGRQTVFHPIPFRMSFDHLGYPSLVSTYTSTYTNLPGHHLRSALDLLASSPTSEHVGSEGEVDLDPGLDFSGFCDPGVTQHFLSACDYYLFDDSNDYNSDDEGYNPT

SEQ ID NO: 47882 - protein, 621 aa, Zea mays
  Coding DNA Sequence Number=SeqID_6103
  Gene Ontology: Mol. function=methyltransferase activity; Cellular component=cellulose and pectin-containing cell wall; Biological process=metabolic process
  Homolog annotation: Hit_ID=Q94II3; Match level="QueryCoverage=83%, HitCoverage=86%, E-value=0.0, Identity=74%"; Hit description=ERD3 protein
  Pfam annotation: Domain name=DUF248; Domain location=109-614; Score =1042.6; E_value=0; Accession=PF03141.7; Description=Putative methyltransferase
  Pfam annotation: Domain name=Methyltransf_11; Domain location=238 -322; Score=29.9; E_value=8.9e-06; Accession=PF08241.2; Description =Methyltransferase domain
  Pfam module annotation: Pfam domain module=DUF248::Methyltransf_11; Domain location=109-614::238-322
METHTAARSGVPSRKQPLVQCENARSIWTDASSASQSRTLRLPLAYRGDKGTSARDGACWTPSSRRRRLSSPSAPPRRPAVPPTTARARPALASTAAVAFPECPADYQDYTPCTDPKRWRRYGNYRLSFMERHCPPPPDRQQCLVPPPKGYKPPIRWPKSKDQCWYRNVPYDWINSQKSNQHWLVKEGDRFRFPGGGTMFPNGVGAYVDLMQGLVPGMRDGTVRTALDTGCGVASWGGDLLGRGILTVSLAPRDNHEAQVQFALERGIPAILGIISTQRLPFPSAAFDMAHCSRCLIPWTEFGGLYLLEIHRVLRPGGFWVLSGPPVNYENRWHGWNTTAQAQKADLDRLKKMLASMCFKLYSMKGDIAVWQKSADACYDKLTPVTTPAKCDDSVDPDAAWYVPMRSCVTAPSPKYRKLGLNATPKWPQRLSVAPERISVVPGSSAAAFKQDDARWKLRVKHYKTLLPALGSDKIRNVMDMNTVYGGFAGSLIKDPVWVMNVVSSYGPNSLGVVYDRGLIGVNHDWCEAFSTYPRTYDLLHLDGLFTAESHRCEMKYVLLEMDRILRPTGYAIIRESTYFLDSVAPIAKGMRWSCEKHSSENKADKDKILVCQKKLWAGKQ

SEQ ID NO: 47883 - protein, 173 aa, Zea mays
  Coding DNA Sequence Number=SeqID_6104
MARARGRSAAGCESAAACNYGEELQGLGSILTFGTPHTQSTHTVERPRPNPDHRTPVQERGNNGGRWPSLSGLFARSREGGGWLRGVLGFRVKRPRLYAQPRRGGGYATGEIGPVVGASWIRGGDGMTAIPIRTAVEDVQMDGIRCSVERRVHVVGAGEAESIRSCGFAAEDC

SEQ ID NO: 47884 - protein, 166 aa, Zea mays
  Coding DNA Sequence Number=SeqID_6105
MAAQTIVLSSRRRSRKHSRGSNPDHWEATCLVHRPKDELRGAEAYSEHYAISERDTFEATMVDDGLNLRYYPHRSIGSTESTIVSPVGDGNPRLSSTFNLVAMLNIELDHALDELSMAHMEIAKLHAKRAERRHQEGGSLAHAGTQHTYGSPPCGHHAYGAPTTRP

SEQ ID NO: 47885 - protein, 44 aa, Zea mays
  Coding DNA Sequence Number=SeqID_6106
MGVANAGLVYFNGRLLAMYEDDLRTVGRYDFDSGTKDQQHVGVR

SEQ ID NO: 47886 - protein, 729 aa, Zea mays
  Coding DNA Sequence Number=SeqID_6107
  Gene Ontology: Mol. function=ATP-dependent helicase activity; Cellular component=membrane; Biological process=response to exogenous dsRNA
  Homolog annotation: Hit_ID=Q6Z5P0; Match level="QueryCoverage=83%, HitCoverage=52%, E-value=0.0, Identity=87%"; Hit description =Putative helicase
  Pfam annotation: Domain name=DEAD; Domain location=167-326; Score =122.5; E_value=1.2e-33; Accession=PF00270.19; Description=DEADDEAH box helicase
  Pfam annotation: Domain name=Helicase_C; Domain location=488-569; Score=21.3; E_value=0.00016; Accession=PF00271.21; Description =Helicase conserved C-terminal domain
  Pfam annotation: Domain name=ResIII; Domain location=163-322; Score= -14.8; E_value=0.0008; Accession=PF04851.6; Description=Type III restriction enzyme, res subunit
  Pfam module annotation: Pfam domain module=DEAD::Helicase_C::ResIII; Domain location=167-326::488-569::163-322
  Subcellular localization annotation: CTP_CleavageSite=50; ConfidenceScore=5.38e-01
MHCIAPRLLLLPLPTVSRHALSPTQTPPLPPLLPSRACKFHLASARSPSRAAASVSGDDEDEEVDVDDDEDDETTIRNVDDEYDDDFEDGDEGDEGDEEAVDEESGGEYEEEAGEDEDKREDTAARRRDSEEYKSRRVAKLVAEVREFGEDVIDYNELAGIYDFPIDKFQRLAIQAFLRGSSVVVSAPTSSGKTLIAEAAAVATVARGRRLFYTTPLKALSNQKFRDFRNTFGDHNVGLLTGDSAINKDAQILIMTTEILRNMLYQSVGMTASEGRLFQVDVIVLDEVHYLSDISRGTVWEETVIYCPKEVQLICLSATVANPDELAGWISQIHGKTELVTSNKRPVPLTWHFSKKYSLQPLLDGKGKKMNRKLRMSNSQNLASPKSEFYYVKGKRRFRTNKIEQGNSRPLDISKQVPLIRDTLSQLWENGMLPAIWFIFSRRGCDAAVEYLEDCRLLHDCEASEVELELRRFKMQYPDAIRESAVKGLMRGVAAHHAGCLPLWKSFIEELFQRGLVKVVFATETLAAGINMPARTAVISSLSKRIDAGRQLLTPNELFQMAGRAGRRGIDTVGHAVLVQTPYEGPEECCDIIFAGLEPLVSQFTASYGMVLNLLAGSKVTHKQKESDDVKDKHSGRTLEEARKLVEQSFGNYVGSNVMVAAKEETERIRQEIQYLSSEITDESIDRKCREELSEEDYAEISLLQKRLKVYSTPLFFRKRSRSEMRTNL

SEQ ID NO: 47887 - protein, 612 aa, Zea mays
  Coding DNA Sequence Number=SeqID_6108
  Gene Ontology: Mol. function=peptidase activity
  Homolog annotation: Hit_ID=Q6Z5N1; Match level="QueryCoverage=98%, HitCoverage=97%, E-value=1e-164, Identity=52%"; Hit description =Putative potyviral helper component protease-interacting protein 2
  Pfam annotation: Domain name=HEAT; Domain location=207-239; Score =13.8; E_value=0.65; Accession=PF02985.12; Description=HEAT repeat
  Pfam annotation: Domain name=HEAT; Domain location=85-121; Score=8.5; E_value=3.9; Accession=PF02985.12; Description=HEAT repeat
  Pfam module annotation: Pfam domain module=HEAT::HEAT; Domain location=207-239::85-121
MGATTRREPLKQRVNRCLLKLSDRDTEAMAAAELEAIARALEPDELPTFVSAVSDARPTDKTPLRRHALRALALVAASHPRDVVAPLIPRILAAALRRVRDQDSSVRAALVDTARAAAAASASASTALRPLTDALLHEQDQCAQLAAALATAAAVEASAVTDDLASYLHKLQPRLLKLLRSNAFKAKPALITLIGASATVGGDAEVTASIPCLRDAVASDDWAARKAAAEALAALALEHTDLLTTYKSSCVTFFEARRFDKVKIVRESINRMIEAWKEIPGAEEDECSSAPPSASQSQRRYSLTGSASDGRYPAASLGSNSVPSATRRSRLPVSRSSPPDVSPSVTKTYSPSSIRNKKLSPPSYRKARQANNCNYKVEIAVAPDATPIKVVTEEKLLEGGNVRGRLEARRALFQGSQDRSAKLAGYKAGSRVVPYEGGGNLEEISEVEGRSERYAVQKDESLSEIRTQLLQIENQQSSLLDLLQKFMGKSENGMRSLETRVHGLEMALDEISRDLAFSSGRMSSREPDAKTCCIPSPKFWRRHNGGRSSSRFSVSDAANSSDGSRTSYKWERQRFGLQGGFVTNPLAEPNISSAGKTMVTHEGRKKDKTLQK

SEQ ID NO: 47888 - protein, 97 aa, Zea mays
  Coding DNA Sequence Number=SeqID_6109
MPELRSTGASISNPPHTPVINKEQGETNTISHIPTVESVGASGPTVNGGSAGGASLRRAIRRVKVTPTPDCQPAQDPRSLVNVLDPSLVPEPHQSME

SEQ ID NO: 47889 - protein, 523 aa, Zea mays
  Coding DNA Sequence Number=SeqID_6110
  Gene Ontology: Mol. function=actin binding; Cellular component =intercellular junction; Biological process=actin cytoskeleton organization and biogenesis
  Homolog annotation: Hit_ID=UPI0000162EB3; Match level="QueryCoverage =78%, HitCoverage=49%, E-value=4e-77, Identity=42%"; Hit description =actin binding
  Pfam annotation: Domain name=FH2; Domain location=22-431; Score =342.3; E_value=8.1e-100; Accession=PF02181.13; Description=Formin Homology 2 Domain
MQINQTLRFVTWTNFISSVREKSRRFTRVGMKKRIPQNLQRQSLDEGIIEALFGTAAANRKPKPSDKESGESSASLGRSNTPEQIFLLEPRKSHNISIILKSLTVGRDEIIDALRDGQTELGTDVLEKLSRLHISKEEESTILRFSGDPDRLAPTEAFLLRLLLDVPNPIARVNALLFKVNYGAEVAQLKHSLRTLELASQELRTKGLFFKLLEAVLKAGNRMNAGTARGNAQAFNLTALRKLSDVKSTDGSTTLLHFVVEEVVRSEGKRLAINRNYSIRRSGSLARSGHEGGSSAAGFASQGPSREERQSEYMNLGLPIVGGLSTEFANVKRAALVDYDAVVSECAILDGRLNEIKRLLETCSDDGFARGLRGFVRAAEQELKALRGEQERVLELVQKTTEYYHAGATKERNAHPLQLFIVVRDFLGMVDQACVDIKRKVQQKKPAPSSSQPNTAAAPTVAAVAAAAATTAATASATDGQTAPAQKPPEADSKRKRVMPRFPNLPAHFMKDSADSDSSSDEE

SEQ ID NO: 47890 - protein, 139 aa, Zea mays
  Coding DNA Sequence Number=SeqID_6111
  Gene Ontology: Mol. function=ATP-dependent helicase activity
  Homolog annotation: Hit_ID=Q6Z5P0; Match level="QueryCoverage=81%, HitCoverage=9%, E-value=4e-57, Identity=94%"; Hit description =Putative helicase
  Pfam annotation: Domain name=DSHCT; Domain location=2-137; Score= -44.8; E_value=5e-06; Accession=PF08148.2; Description=DSHCT (NUC185) domain
MCRGTNPLIGVEWFSQPIYVVTGHCYVYEPSSVVTGVISYLEEQRNSLIDLQERHSVKIPCEIDAQFAGMVEAWASGLTWREIMMDSAMDDGDLARLLRRSIDLLAQIPKLPDIDPVLQKNAQIACSVMDRVPISELAG

SEQ ID NO: 47891 - protein, 313 aa, Zea mays
  Coding DNA Sequence Number=SeqID_6112
  Gene Ontology: Mol. function=polygalacturonase activity; Cellular component=cellulose and pectin-containing cell wall; Biological process=carbohydrate metabolic process
  Homolog annotation: Hit_ID=Q6K829; Match level="QueryCoverage=71%, HitCoverage=81%, E-value=1e-113, Identity=88%"; Hit description =Putative polygalacturonase
  Pfam annotation: Domain name=Glyco_hydro_28; Domain location=1-285; Score=-72.1; E_value=1.4e-05; Accession=PF00295.8; Description =Glycosyl hydrolases family 28
MPTFQIDEKYWPLMPALPSYGYGRERKGPRFGSLIHGQNLRDVVITAFEYIIHVLNALALYQTLEVPVDIHPFFYNILSILTLALVTDSCQDVLIENCYISVGDDAIAIKSGWDQYGIAYGRPSSDILIRNVTARSLVSAGISIGSEMSGGVANVTVENVRIWESRRGVRIKTATGRGGYIRNISYRNITFDNVRAGIVIKVDYNEHADDGYDRTAFPDITSISFKGIHGQGVRVPVRAHGSDVIPIKDISFQDMSVGISYKKKHIFQCSYLEGRVIRPVFPKPCENLDVYDEQGQLVKRAVALNSTELDYDI

SEQ ID NO: 47892 - protein, 119 aa, Zea mays
  Coding DNA Sequence Number=SeqID_6113
MAAARAALLAALVVSASTPHPNQAHGTREAGTGLVEVEWNPTCFLAHDLATASQFLIIRFCRHSIILSTMPSPRAARRFWPTACECKYERKTSAQSMWYTASTSGPRSDNAYCDGYGGY

SEQ ID NO: 47893 - protein, 64 aa, Zea mays
  Coding DNA Sequence Number=SeqID_6114
  Homolog annotation: Hit_ID=Q10N00; Match level="QueryCoverage=52%, HitCoverage=6%, E-value=1e-07, Identity=76%"; Hit description =Hydrolase, alpha/beta fold family protein, expressed
MMRRMSTVEGAPEEEESEDFMKPVRRKRLKDFLNSSSLCSIRLKESGWDFWAQSLYGRKLGAHM

SEQ ID NO: 47894 - protein, 239 aa, Zea mays
  Coding DNA Sequence Number=SeqID_6115
MEKTRAGRVARDHGAQGQHRPSANSGGQQQSRARHGENRERRAQRARRGGIWTGTRARGRGRATRPTNSMAKTSRKGALQGHTTAGPRPSRPRPWGRAMVERSMSLSEIRAGKERRPDLAEEAENYAWPQGRDTGEEPRHAGTLGRTRQADRATSRRRSEQGGARSHGGTLGAARKLQGAGRAHGWREMGEGERSGAAGAAMPRQGRSSMPELEKEAAVRTPASRERKKLRPGVLSREN

SEQ ID NO: 47895 - protein, 177 aa, Zea mays
  Coding DNA Sequence Number=SeqID_6116
MELVGGSCVGPSYRVRGLTGTSSCRSVNAAEGGVHVYRLTRSSSDKHSDLGLNPTMLETSVRLNGARRSAVNVASEALDGLRSINLGEIGEHLEEEFKVEVEEVSAPTSETAPTEVVSEGPPEDMLSMLIDKEQNVLMYESYFYKEKETGVMKVSKALMTSSFQKGTSVRYQVFRNS

SEQ ID NO: 47896 - protein, 162 aa, Zea mays
  Coding DNA Sequence Number=SeqID_6117
MGTRHGRAERELERNLSRERAPTGLGRGSREPGAAIGEGYRQGTAARRDARPDAARRERDEPKEARAGRSAQPWRNLGRGKEAPGSREGARLKRDGRRREEQRAWSNDATTGKELDAGAGEGGRSPNTGEQGEEQAPAKRAVAGELERASVELEPCAGEAGC

SEQ ID NO: 47897 - protein, 89 aa, Zea mays
  Coding DNA Sequence Number=SeqID_6118
MENHSGKQCYHKGGIGCPWVIIRKASGGLPYRKGTRAVGEWTQQLDTGNLRTRQLTVHSRKPLGSHTKTTKLTSGNKSYTAILPKFAKI

SEQ ID NO: 47898 - protein, 104 aa, Zea mays
  Coding DNA Sequence Number=SeqID_6119
MDDVRASRGTERGEREIEGHATKDPGVRDRPTLPRVRLSGGRKQWLDPTAGGGRGEDALRTRGTSREMEKVGPTTRHPWPSRVTRPARMSDAEGKALGMAERRP

SEQ ID NO: 47899 - protein, 56 aa, Zea mays
  Coding DNA Sequence Number=SeqID_6120
MAQCHTLWGKVESELVGVIAVGTSFPVRLVRFHPTVNIPLIPLLSHPDFGGTNTQA

SEQ ID NO: 47900 - protein, 72 aa, Zea mays
  Coding DNA Sequence Number=SeqID_6121
MRGRARACSGAGRKRRTRGGFWETGFRRGLGFFSPLIQGILSAKVCSSHGNTWGVTAHAEKYSKSVLLRMIG

SEQ ID NO: 47901 - protein, 80 aa, Zea mays
  Coding DNA Sequence Number=SeqID_6122
MAGRGPRWAWLRVCQGPPGPPCGSAPAYTNLYYLLSGQVKDTRDYIQKRGRPSIDGSHMSEAWERINRGKPFPVNVERLL

SEQ ID NO: 47902 - protein, 207 aa, Zea mays
  Coding DNA Sequence Number=SeqID_6123
  Gene Ontology: Mol. function=structural constituent of ribosome; Cellular component=ribonucleoprotein complex; Biological process =translation
  Homolog annotation: Hit_ID=Q5R1X9; Match level="QueryCoverage=67%, HitCoverage=82%, E-value=2e-48, Identity=73%"; Hit description =Ribosomal L14 protein
  Pfam annotation: Domain name=Ribosomal_L14; Domain location=89-207; Score=134.6; E_value=2.7e-37; Accession=PF00238.10; Description =Ribosomal protein L14pL23e
MGSFLMRKLEQLDVAHNLLTGAVPPGICDLLRLKNFTLATNFFTCEPPSCARVVPRDGDRSNCLPNRSSQRTSQLAQSFYLSMQIRTFIQMRTNLKVVDNSGAKRVMSIQSLRGKKGARLGDMIIGSVKEAQPCGKVKKGDVVYGVVVRAAMRKGRSDGSEVQFDNNAVVLVNKKGELIGTRVFVPVPHELRKKKHLKIVALAEHIV

SEQ ID NO: 47903 - protein, 392 aa, Zea mays
  Coding DNA Sequence Number=SeqID_6124
  Gene Ontology: Mol. function=receptor activity; Cellular component =chloroplast thylakoid membrane
  Homolog annotation: Hit_ID=Q6S3G1; Match level="QueryCoverage=84%, HitCoverage=85%, E-value=2e-97, Identity=59%"; Hit description =Extracellular calcium sensing receptor
  Subcellular localization annotation: CTP_CleavageSite=57; ConfidenceScore=5.66e-01
MAPVPVSVSATLAPPPAAPPKATSRSWERRAPADAAFAAASSVAISAALLTLTPAAPAAALSKEDVAGSLTKAVDTVSQAIDVGGKAAEQVAAVLKALGEAVKPALPVLKSASDEALKLAAPVVSAASKQATEALQGAGVDPAPVLSVAKTAAEQSTKVIDAAKPVASAAVETITSLGPEDYVVAAGAAFLAYLLVPPVWSLVSSSLRGYKAASLQHIAASHCSPCGCYNKGDLTPAQALDKVTTQGYVLIDVRSDKDKAKAGLPQLPSNAKNKLVSVPYAAISSSAFSSLQPLQLITLWYSDVAKTVAKTLDSVGFKNCWVMAGGFSGRKGWAQSRLGTDSYNLSVVEVVTPSRVIPAVAGRRTGTTAARIGTASSASRATTRKLLPGGVD

SEQ ID NO: 47904 - protein, 265 aa, Zea mays
  Coding DNA Sequence Number=SeqID_6125
  Gene Ontology: Mol. function=protein serine/threonine kinase activity; Cellular component=integral to membrane; Biological process=protein amino acid phosphorylation
  Homolog annotation: Hit_ID=Q9FP13; Match level="QueryCoverage=85%, HitCoverage=42%, E-value=2e-82, Identity=62%"; Hit description =Putative somatic embryogenesis protein kinase 1
  Pfam annotation: Domain name=Pkinase; Domain location=32-259; Score =6.6; E_value=5.9e-09; Accession=PF00069.15; Description=Protein kinase domain
  Pfam annotation: Domain name=Pkinase_Tyr; Domain location=39-259; Score=-22.8; E_value=4.5e-11; Accession=PF07714.7; Description =Protein tyrosine kinase
  Pfam module annotation: Pfam domain module=Pkinase::Pkinase_Tyr; Domain location=32-259::39-259
MATRSGSSIPAPVPRNAAARSRTSDEPMTDFSRNGEEPGEADFSNLSDGSLVAVKRLKDGNAADGEAQFQTELEMISLAVHRNLLQTLWGFCMTSSERLLNKEYDSLITNSNYREDTTGLDHQITRKRIALGAARGLPYLHEQCDPKIIHRDVKAANILLDDCCEAVVGDFGLAKLLDHRESHVTTAVRGTVGHIAPEYLSAGQSSEKTDVFGFGILLLELITGQTALAFGKSSNQKGTMLDWFLPGHRSKMSEMVRMLKGDGVA

SEQ ID NO: 47905 - protein, 129 aa, Zea mays
  Coding DNA Sequence Number=SeqID_6126
  Homolog annotation: Hit_ID=Q6Z329; Match level="QueryCoverage=43%, HitCoverage=8%, E-value=4e-23, Identity=92%"; Hit description =Putative protease IV
MSEAWERINRGKPFPVNVERLLRTRDSVRQLTALTTLGVLEKVGIEPEIQRIGKYKSAGDQLARKSMSNEVREMLAALLDNIYGNWLETISSTHEHIYVGCLFKGIFNRKMKLEKVDLIAVGGSPSVFA

SEQ ID NO: 47906 - protein, 130 aa, Zea mays
  Coding DNA Sequence Number=SeqID_6127
MPTTPRERPGCSPHACPRRILSLPGAPTSRLAVAPAAALATRSSEGATYHLTGVGDRGGGFAGQGSQFIQPATSIQKQVAQFGKEKTVLRTEVDRGFTFYALRLIAVSLQKYLACILCHFVSFVTKPVLY

SEQ ID NO: 47907 - protein, 150 aa, Zea mays
  Coding DNA Sequence Number=SeqID_6128
  Gene Ontology: Mol. function=protein dimerization activity; Cellular component=nucleus; Biological process=regulation of transcription, DNA-dependent
  Homolog annotation: Hit_ID=Q0GPI4; Match level="QueryCoverage=97%, HitCoverage=71%, E-value=4e-14, Identity=40%"; Hit description=BZIP transcription factor bZIP35
  Pfam annotation: Domain name=bZIP_1; Domain location=83-142; Score =31.1; E_value=3.9e-06; Accession=PF00170.11; Description=bZIP transcription factor
  Pfam annotation: Domain name=bZIP_2; Domain location=83-134; Score =24.6; E_value=0.00035; Accession=PF07716.5; Description=Basic region leucine zipper
  Pfam module annotation: Pfam domain module=bZIP_1::bZIP_2; Domain location=83-142::83-134
MYPAAEIASVRYLSPAAGAASLRPHYRDDFLFQFQYSDLLLAPAHPSLYQDVADHLVLGASFPADGVNRSSSEESDAYLQRSLAEERRKRRMVSNRESARRSRVRKQKQLSELWAQVVHLRGTNRQLLDQLKCSTVSSETATVSSVKTPG

SEQ ID NO: 47908 - protein, 125 aa, Zea mays
  Coding DNA Sequence Number=SeqID_6129
MLSTWLGIMQLSVCLVRAPCWMCIWCAQKKLRTLNCHAGPQSPGQSTTTPLAVAAGAYHLLPHTKTKVAYEYEAVTRGSCSRIKRCVSAFMPSVSSGDDVMNPGCSFHHDGHVPLHGCERPVWAD

SEQ ID NO: 47909 - protein, 35 aa, Zea mays
  Coding DNA Sequence Number=SeqID_6130
MERYRTPVYTVQAFEYGPGPPRGDPMLPRGLLHVT

SEQ ID NO: 47910 - protein, 90 aa, Zea mays
  Coding DNA Sequence Number=SeqID_6131
MEEEKGHNCKEGEGARCSHPNTFALGYPTLAASALSRAHKATLMATHLTKSGPPSHVSHLGHCHIEPGWLLRTGGHTLADRALDLAIPRE

SEQ ID NO: 47911 - protein, 65 aa, Zea mays
  Coding DNA Sequence Number=SeqID_6132
MAAAVTGAGAAVFHYEVPSRSGEDYGREMLKVFDPMGKDSSGTLFYWMWSHYGLEGVREKADRAR

SEQ ID NO: 47912 - protein, 270 aa, Zea mays
  Coding DNA Sequence Number=SeqID_6133
  Gene Ontology: Mol. function=heat shock protein binding; Biological process=protein folding
  Homolog annotation: Hit_ID=Q9LJG5; Match level="QueryCoverage=37%, HitCoverage=43%, E-value=5e-16, Identity=47%"; Hit description =Arabidopsis thaliana genomic DNA, chromosome 3, P1 clone: MAG2
  Pfam annotation: Domain name=DnaJ; Domain location=44-105; Score =27.5; E_value=9.5e-06; Accession=PF00226.21; Description=DnaJ domain
MAHFAPWIRPCLVELLWRERKVFSLGDSSLQQQHATSSDAREEGVPNGDYNEDQTTKDMSEKWHPDKCSSSSISVKHMEEAKEKFQEIQGAYSVLSDANKRLLYDVGVYDDEDDEDSMQGMGDFIGEMTQMMSQVRPMRQESFEELQQLFVDMFQSDIDSGFCNGTAKGHQVQGQAKSRTCSPRSPPTTIVKEAEVSSCNGFNKRGSSAMDSGKPPRPVECGAGQSQAGFCFGASVDSLEKYEVPRWLLKEVSSYVKVSYSGESLSADIP

SEQ ID NO: 47913 - protein, 139 aa, Zea mays
  Coding DNA Sequence Number=SeqID_6134
  Subcellular localization annotation: CTP_CleavageSite=23; ConfidenceScore=5.07e-01
MILKYYSLFSGVADGLDLKYYPRRSTGSTRGVILSPVVEGNPRLSTMMSDNRRQGGRCTQREQQAPQDEAPQQQLPLTPPMTIERMFLMWTQAVQPVGQTLAAMQQTPWMPKIGYAQWSGSCIPLSAMTVTRFCMVPAC

SEQ ID NO: 47914 - protein, 52 aa, Zea mays
  Coding DNA Sequence Number=SeqID_6135
MDKASGIRISMGDAEEDSSLSEAMDLGLRARERWRLNPCPNERRRETLDKAV

SEQ ID NO: 47915 - protein, 69 aa, Zea mays
  Coding DNA Sequence Number=SeqID_6136
MKGSISDIEGKGYFDPYQKRGLGRRTVESLKAKRSTVNCRKLEGEAIYRSKRGLFRTLGITTSLGGSKS

SEQ ID NO: 47916 - protein, 98 aa, Zea mays
  Coding DNA Sequence Number=SeqID_6137
MFKWSAKGQNKNHHRLYGVLLNMKRFQELWIEEKVKLRAILVSCSIEDFNRRLSSFPPTLNQVDNGTLTNRVMRKTTQVDPKRGLLRRMVLMDESEDG

SEQ ID NO: 47917 - protein, 114 aa, Zea mays
  Coding DNA Sequence Number=SeqID_6138
  Homolog annotation: Hit_ID=Q8LNU6; Match level="QueryCoverage=61%, HitCoverage=8%, E-value=3e-16, Identity=58%"; Hit description =Putative DNA-directed RNA polymerase I subunit, 5'-partial
MAGLDKKRASVFFEASADGYTSCAKEMTKLSGVSSFYNSEGVIKNFGEMKKLLSAVRVGMNPVLPKIEQTGPPEVLHVHLDGCILGTIASAMIEKAVNYLRTLKLLAQSLAITD

SEQ ID NO: 47918 - protein, 306 aa, Zea mays
  Coding DNA Sequence Number=SeqID_6139
  Gene Ontology: Mol. function=oxidoreductase activity; Cellular component=cellular_component; Biological process=induction of apoptosis by oxidative stress
  Homolog annotation: Hit_ID=Q948G0; Match level="QueryCoverage=99%, HitCoverage=100%, E-value=1e-125, Identity=72%"; Hit description =Putative quinone oxidoreductase
  Pfam annotation: Domain name=ADH_N; Domain location=29-111; Score =65.3; E_value=1.9e-16; Accession=PF08240.2; Description=Alcohol dehydrogenase GroES-like domain
  Pfam annotation: Domain name=ADH_zinc_N; Domain location=126-262; Score=120.7; E_value=4.2e-33; Accession=PF00107.16; Description=Zinc- binding dehydrogenase
  Pfam module annotation: Pfam domain module=ADH_N::ADH_zinc_N; Domain location=29-111::126-262
MRAVVITRGGGGPEVLEAQEVEDPAPLGDGEVLLQVVAAGVNRADTLQRHGRHPPPAGAPPYPGLECSGTILALGPNAPPRWAVGDKVCALLSGGGYAEKVVVPAGQLLPVPEGVSLADAAGLPEIHGGSSGIGTFAIQIAKHLGIMVFVTAGTEEKLAACKGLGADVCINYKTEDFVERVKQETNGKGVDVILDNIGGPYLERNLNSLGVDGRLFIIGFQGGAVAEVNLQAVFAWRLTIQAAGLRGRSAASKTQIVSEVEKNVWPAVAAGKVNPVIYKTFPLSEAADAHRLIESSMHIGKILLLP

SEQ ID NO: 47919 - protein, 781 aa, Zea mays
  Coding DNA Sequence Number=SeqID_6140
  Gene Ontology: Mol. function=RNA-directed DNA polymerase activity; Cellular component=intracellular; Biological process=RNA-dependent DNA replication
  Homolog annotation: Hit_ID=UPI00004C1731; Match level="QueryCoverage =94%, HitCoverage=52%, E-value=0.0, Identity=78%"; Hit description =UPI00004C1731 related cluster
  Pfam annotation: Domain name=RnaseH; Domain location=312-427; Score= -24.4; E_value=0.011; Accession=PF00075.14; Description=RNase H
  Pfam annotation: Domain name=rve; Domain location=494-652; Score =49.4; E_value=1.2e-11; Accession=PF00665.16; Description=Integrase core domain
  Pfam module annotation: Pfam domain module=RnaseH::rve; Domain location=312-427::494-652
MPFGLRNAGATYQRCMNHVFGEHIGRTVEAYVDDIVVKTRKASDLLSDLEVTFRCLKAKGVKLNPEKCVFGVPRGMLLGFIVSERGIEANPEKIAAITSMGPIKDLKGVQRVMGCLAALSRFISRLGERGLPLYRLLRKTECFARTPEAEEALENLKALLTKAPVLVPPADGEALLVYVAATTQVVSAAIVVERQEEGHALPVQRPVYFVSEVLFETKIRYPQVQKLLYAVILTRRKLRHYFESHPVTVVSSFPLGEIIQCREASGRIAKWAVEIMGETISFAPRKAIKSQVLADFVAEWVDTQLPTAPIQPELWTMFFDGSLVKTGAGAGLLFISPLGKHLRYVMRLHFPASNNVAEYEALVNGLRIAIELGVRRLDARGDSQLVIDQVMKNSHGRDPKMEAYCDEIDDAPEPEAPSARPEAPSARPEVPSAPEAEALNVEEELSGATPDRDWQAPYLQYLRRGELPLDQAEARRVARRAKSFVLLGDEEELYHRSPSGILQRCISIAEEGARGLHAPAGRHRQILKWIEVRPLNSIRSEQAVAFFTNIIHRFGVANSIITDNGTQFTGKKFLDFCEDHHIRVDWAAVAHPMSNGQVERANDMILQGLKPRIYNGLNKFDKRWMKELPSVVWSLRTTPSRATGFTPFFLVYGAEAILPADLEHGSPRTRAYTDQSNQASREESLDQLEEARDKALLHSARYQQSLRRYHARGVRSRDLQVGDLVLRLRQDARGRHKLTPPWEGPFVIAKVLKPGTYKLANNQGEIYGNAWNIKQLRRFYP

SEQ ID NO: 47920 - protein, 401 aa, Zea mays
  Coding DNA Sequence Number=SeqID_6141
  Homolog annotation: Hit_ID=Q2QY21; Match level="QueryCoverage=34%, HitCoverage=18%, E-value=3e-09, Identity=34%"; Hit description=Kelch motif family protein
  Pfam annotation: Domain name=Kelch_1; Domain location=14-73; Score =3.9; E_value=1.4; Accession=PF01344.15; Description=Kelch motif
  Pfam annotation: Domain name=Kelch_1; Domain location=142-190; Score =35.8; E_value=1.5e-07; Accession=PF01344.15; Description=Kelch motif
  Pfam annotation: Domain name=Kelch_1; Domain location=210-260; Score =8.3; E_value=0.44; Accession=PF01344.15; Description=Kelch motif
  Pfam annotation: Domain name=Kelch_1; Domain location=322-378; Score =0.4; E_value=3.4; Accession=PF01344.15; Description=Kelch motif
  Pfam annotation: Domain name=Kelch_1; Domain location=80-140; Score =18.3; E_value=0.027; Accession=PF01344.15; Description=Kelch motif
  Pfam annotation: Domain name=Kelch_2; Domain location=142-190; Score =16.4; E_value=0.1; Accession=PF07646.5; Description=Kelch motif
  Pfam annotation: Domain name=Kelch_2; Domain location=22-73; Score =8.1; E_value=3.3; Accession=PF07646.5; Description=Kelch motif
  Pfam annotation: Domain name=Kelch_2; Domain location=263-307; Score =2.0; E_value=21; Accession=PF07646.5; Description=Kelch motif
  Pfam annotation: Domain name=Kelch_2; Domain location=322-366; Score =1.1; E_value=27; Accession=PF07646.5; Description=Kelch motif
  Pfam annotation: Domain name=Kelch_2; Domain location=80-140; Score =4.5; E_value=9.7; Accession=PF07646.5; Description=Kelch motif
  Pfam module annotation: Pfam domain module=Kelch_1::Kelch_1::Kelch _1::Kelch_1::Kelch_1::Kelch_2::Kelch_2::Kelch_2::Kelch_2::Kelch_2 Domain location=14-73::142-190::210-260::322-378::80-140::142
MGSLYCDAAASPTISSTGSSTGSSGNVAGVGGDGDGDGDGSVKIYACFALGSSNSLECYEPGANTWRRVGALPGVPDGHILKGFAVATLGESVYVIGGRLCRRERGAAAGGYRDADVGVRADVLRYDARRGEWHHCAPLLVPRFDFACAPCRGRICVAGGQRSLSGARGTAAAEVYDAEKGQWSALPDMSTLRYKCVGVTWQGSFHVVGGFAESALTACDTSLLAPGGATAVLQSSALERSSAEVFHCARGTWEILPGMWQLDVPPNQIVAVANRLFSSGDCLTSWKGHVEVYDGELNIWSIVDHSALPDLSLLASLPSSAQRLYLTMAVVGTQLYFLAGYQVPSGDDSFRTVSLVHSFDTSAAPGLAPAWSSFRPEMSHEDAEDGGKELFSQCCTVQLSN

SEQ ID NO: 47921 - protein, 583 aa, Zea mays
  Coding DNA Sequence Number=SeqID_6142
  Homolog annotation: Hit_ID=Q1PEB4; Match level="QueryCoverage=49%, HitCoverage=39%, E-value=3e-72, Identity=52%"; Hit description =Hydroxyproline-rich glycoprotein family protein
  Pfam annotation: Domain name=Extensin_2; Domain location=8-281; Score= -141.9; E_value=0.094; Accession=PF04554.4; Description=Extensin-like region
MHTGRCKVEAPAPGHETDEGVCTREEDGQTSSREPLSAPIPTAEFLPLQPTLSSVSPHLLSAPPPSPMPVVGLSMLLQSWEATQDGHATAAAVVPPAGVAQPAEAAPTAHKDTTPVGTSMEVEGSTSSVLLEAGQPEPCVDSPNGSTQAPAQGGNAAVPNVPPPPPPVPAHRGRSQEGPSMDEPGPAVTDTPPRPPCEMQGEPPALPPAAAKVLPSPSPSPSPPPLPAHRGRFQEGASMDEPGQAVTDTPPRPPCEVQGGPPAPPPAAAKVSPAPPPPPGSISAAVRGKKAASKLKRSTQMGSLYRRLRDRVEGSGSTHGDRMRQNRKRPRTVGASKSDAGGQGMADALAEMAKRSTYFRQIEEDAEKYAAVILELKDAIGSFQSKDMSELVRFRQHVERQLVCLTDETQVLARFEGFPSKKLEALRTAAALYSKLDGTASRLQCWKHTAGPVSAQLDRLESYFNKVKDEVDMVERNRDEEMKRLQSQGVHFDFGVLVRIKEGMVDLSSACMELALKESQDARETPTPTRAKWASSHGDGESRMLWRVFQLAFRVYNFAGGQDERADRLTSILAHEIEERALL

SEQ ID NO: 47922 - protein, 460 aa, Zea mays
  Coding DNA Sequence Number=SeqID_6143
  Gene Ontology: Mol. function=catalytic activity; Cellular component =alpha,alpha-trehalose-phosphate synthase complex (UDP-forming); Biological process=trehalose biosynthetic process
  Homolog annotation: Hit_ID=Q1W5S5; Match level="QueryCoverage=52%, HitCoverage=100%, E-value=1e-128, Identity=93%"; Hit description =Ramosa 3
  Pfam annotation: Domain name=Trehalose_PPase; Domain location=210 -437; Score=340.9; E_value=2.2e-99; Accession=PF02358.7; Description =Trehalose-phosphatase
MRLRPTKQPGDHPRPRRRLHSGYYVAGPLGPPPSYKYAALLLLPTRIASAHISSPEKPAHSPRSLRLTAFVPSKCFVLGRSRKSPGLPPTSLPCCLGPLVKRKHMTNQDVVVSEMGIAAGTALPGSSPALLACRGAAAGAMSLRYLDLAAAAARSASCTWVEAMRASSPTRSRAAADVDELTAWMRKHPSALGKFEQIASASQGKKVVMFLDYDGTLAPIVADPDAAYMSDVMRAAVRDVAKHFPTAIVSGRCRDKVRSFVDLSELYYAGSHGMDIEGPSSNPESVLCQPASEFLPVIDEVYKALVEKTKSTPGAKVENNKFCLSVHFRCVDEKRWNALAEQVKAVIKDYPKLKLTQGRKVLEIRPSIMWDKGKALEFLLESLGFASCSDALPVYIGDDRTDEDAFKVLRKRGQGVGILVSKCPKETNASYSLQDPGEVMDFLLRLVEWKRKSTTTRPPV

SEQ ID NO: 47923 - protein, 184 aa, Zea mays
  Coding DNA Sequence Number=SeqID_6144
MEFHGDETMLTRFQGLENCVKPPLRLETPNDIDVLFENATVKAHLDEYKPRSGRGYRAIKRRAMRSGSRKTTRDPSNRRQAKARGTSAPLGLPWVPSARPLATAVEYALSSPVESAALLYASPLPPPPQRLVPGGRAGSRGGSTLYQYHPACRPAGLWCVAWHVLLARTSRFAVESCEGTPDAR

SEQ ID NO: 47924 - protein, 169 aa, Zea mays
  Coding DNA Sequence Number=SeqID_6145
MALHKLYDDGGPQLSYGSRTTSAGTRPLQQLSLRQAPPHLRQPRHHASRGLLREGWPRGTEDGTGALLGPLASLTRVDACNPLLQAHLTWARDEHEGRGTSTSLRLDSGHLASPPFALAHALDPSGLGHAAHSLVGLGTPLSRNADSKRAESRRRHGASGAPSLPIWRS

SEQ ID NO: 47925 - protein, 284 aa, Zea mays
  Coding DNA Sequence Number=SeqID_6146
  Gene Ontology: Mol. function=nucleic acid binding; Cellular component= nucleus; Biological process=regulation of alternative nuclear mRNA splicing, via spliceosome
  Homolog annotation: Hit_ID=Q6ZGY4; Match level="QueryCoverage=93%, HitCoverage=14%, E-value=1e-95, Identity=63%"; Hit description =Putative photoperiod independent early flowering1
MSKSQNVTVYWSMQRSLVVKLLQKESEIPLEELLARYREDGCADHETAELKNSPHFVEEVNTDMSLDDQSVSILEAKSDLFVDHQSRDVLETEDTAPRSEIASEPCAKQNFDEENNLTDVKTVNGDKSDDVKSDDVIADAAAAARSAQPTGNTFLTTKVRTKFPFLLKHSLREYQHIGLDWLVAMYEKRLNGILADEMGLGKTIMTISLLAHLACEKGIWGPHLIVVPTSVMLNWETEFLKWCPAFKILTYFGSAKERKQKRQGWMNPDVFHVCITTYRLVIQD

SEQ ID NO: 47926 - protein, 111 aa, Zea mays
  Coding DNA Sequence Number=SeqID_6147
MWNENNRTRPNLFGYEDVTIPVLRLVERMRMDGDSHPVNHCVSSGTQADEKPVMQCKPCQVLPARMGTSEDYSEGGGSRKNQEDQRAAVLGEDCQRGRLKQAGTALIGDRA

SEQ ID NO: 47927 - protein, 260 aa, Zea mays
  Coding DNA Sequence Number=SeqID_6148
MRCKRHPNQGRRRRVRHVPPRPPARARGRAERRRVPAGARAGAGARAPAGVPEVGPAYGGGGGGGALEEPHIGYGYGYGHEKRRAGKFSVLATLFGRHHHHRRPEARHQERKKHSWLAGIMPRRRRSKGQVPASATSPQSAPPRRSCRAVSNRGLSPERDGDGDDDESSSPAAWRPSPSPMRRTTCRRRQTSGSMPSGFAVCLSPLVRPIPGRRPVQPPDPGAFSSELRPPPPPPLHSSLSSASVTRCRSRKLADGGRFR

SEQ ID NO: 47928 - protein, 676 aa, Zea mays
  Coding DNA Sequence Number=SeqID_6149
  Gene Ontology: Mol. function=RNA-directed DNA polymerase activity; Cellular component=intracellular; Biological process=RNA-dependent DNA replication
  Homolog annotation: Hit_ID=UPI00004C1731; Match level="QueryCoverage =99%, HitCoverage=49%, E-value=0.0, Identity=81%"; Hit description =UPI00004C1731 related cluster
  Pfam annotation: Domain name=RnaseH; Domain location=312-439; Score =2.1; E_value=3.7e-05; Accession=PF00075.14; Description=RNase H
  Pfam annotation: Domain name=rve; Domain location=441-622; Score =84.3; E_value=3.7e-22; Accession=PF00665.16; Description=Integrase core domain
  Pfam module annotation: Pfam domain module=RnaseH::rve; Domain location=312-439::441-622
MSFGLRNAGATYQRCMNHVFGEHIGRTVEAYVDDIIVKTRKASDLLSDLETTFQCLKAKGVKLNPEKCVFGVPRGMLLGFIVSERGIEANPEKIAAITNMGPIKDLKGVQRVKGCLAALSHFISCLGERGLPLYRLLRKAECFTWTPETEEALGNLKALLTNAPILVPPAAGEALLIYIAATTQVVSAAIVVERREEGHALPVQRPVYFISEVLSETKIRYPQIQKLLYTVILTRRKLRHYFESHPVTVVSSFPLGEIIQCREASGRIAKWAVEIMGETISFAPRKAIKSQVLADFVAEWVDTQLPTAPIQPELWTMFFDGSLMKTGAGAGLLFISPLGKHLRYVLRLHFPASNNVAEYEALVNGLRIAIELGVRRLDARGDLQLVIDQVMKNSHCRDPKMEAYCDEVRRLEDKFYGLELNHIARRYNETVDELAKIASGRTTVPPDVFSRDLHQPSIKIDDAPEPEAPSAQPEAPSAPEEGTRGYTHLLVAIDKFSKWIEVRPLNSIRSEQAVAFFTNIIHRFGVPNSIITDNGTQFTGRKFLDFCEDHHIRVDWAAVAHPMTNGQVECANDMILQGLKPRIYNDLNKFGRRWMKELPSVVWSLRTTPSRATGFTPFFLVYGAEAILPTDLEYGSPRTRAYDDQSNRANREDSLDQLEEALDMALLHSARYQQSL

SEQ ID NO: 47929 - protein, 934 aa, Zea mays
  Coding DNA Sequence Number=SeqID_6150
  Gene Ontology: Mol. function=nucleic acid binding; Cellular component= nucleus; Biological process=regulation of alternative nuclear mRNA splicing, via spliceosome
  Homolog annotation: Hit_ID=Q6ZGY4; Match level="QueryCoverage=80%, HitCoverage=37%, E-value=0.0, Identity=74%"; Hit description =Putative photoperiod independent early flowering1
  Pfam annotation: Domain name=Helicase_C; Domain location=129-207; Score=101.8; E_value=2e-27; Accession=PF00271.21; Description =Helicase conserved C-terminal domain
MDYSSSLADLVLPSVERFQKMLDIVESFTFAIPAARAPPPVCWYSKGNSPVFIDPAYREKCMNEFSPILSPIRSAIVRRQVYFPDRRLIQFDCGKLQELAILLRRLKSEGHRALIFTQMTKMLDVLEEFINLYGYTYLRLDGSTPPEERQTLMQRFNTNPKFFLFILSTRSGGVGINLVGADTVIFYDSDWNPAMDQQAQDRCHRIGQTREVHIYRLISESTIEENILKKANQKRALDDLVIQRGSYNTEFFKKLDPMEFFSGHTSLHAEDQEKNCSTTSGVSNDVDLALSIADVEAAIRQAEDEADYMALKKLEEEEAVDNQEFSEEAAGRQEEDELVNEENGKPDEHINEEQKYNSSDVEKEKHITLSTNRLNKEKALTLAVGDEDTDMLADVKQMAAAAAAAGQASSSFENQLRPIDRYAMRFMELWDPVIDKAALNHQVNVEEEEWELDRIEKFKEDLEAEIDEDQEPLSYESWDVDFATTAYRQHVEALTQKQLLEEQERQAQEATKELEEKNDNMSSHHRKSKKNKKKTGKLKPLKRVRLSPESEVILEETSVDNAPSPELTSDESPHHYCNKRKKITVATEENSNSRSLKKLKKTTKSSFISEALSPRLKEDLNDSDSKSVGRTKSDGRFFIPCMPVKRVIVIKPERLKRKGIWSRDCASDSWSSEEDAVLCGTVHEYGPLWELASDFLHFLPGGSLYRGRYHHPVHCCERYRELFCKHGMSATDNSNSEKVPSGTGKAILRVSELLGIAGSGPSRSPQWCPPTVAVPLPRSQGVGGAIEAQIWFIQHALKEIGGMPYPQLTRNYEDCSLLMNMKLEASGMRLSMMTRSHRGTCLLMPSSSLCYRRYYPHAGGEEDDQVSIHVGSKRTCKSTLQWFWRDRELLSFHDGEHMYDFVLHQIGMVSSLNLYDEDITEQRTVEKILHVVPR

SEQ ID NO: 47930 - protein, 45 aa, Zea mays
  Coding DNA Sequence Number=SeqID_6151
MKAQFLMTGLGLLSYLGIEGCYAYAGCILNSSRMRNCSSSPTPME

SEQ ID NO: 47931 - protein, 328 aa, Zea mays
  Coding DNA Sequence Number=SeqID_6152
  Gene Ontology: Mol. function=galactosyltransferase activity; Cellular component=membrane; Biological process=protein amino acid glycosylation
  Homolog annotation: Hit_ID=A0EVG3; Match level="QueryCoverage=73%, HitCoverage=82%, E-value=4e-54, Identity=48%"; Hit description =Hypothetical protein hypro1
  Pfam annotation: Domain name=Galactosyl_T; Domain location=92-268; Score=-52.5; E_value=0.0043; Accession=PF01762.12; Description =Galactosyltransferase
MGNGKDALQQVGTKQRHGGGGGGLPRLSASSKALVLLPLLLLAFIFLFVYPKEFELQAMLSACGPAAAEPAAVRKPEFRLLIGVLTRADLYERRHLLRMVYGLQLASPGGLAAHVDVRFVFCRLYKDDQRVLVPLEILAHGDVIVLDGCEENLNGGKTYTFLSAVAALYADEPYDYVMKADDDIFLRLPQLVGSLGGMPREDMYYGATIPCDSMDPFREYMAGMAYALSWDLVQWIATSDVARNHSVGTEDMLTGLWLRIGGKGKNRFNAKPAIHDYLNPVPVDQCEHEFMPTTIGVHRLKSNPRWAEALKYFNFTAGLQPSKFYKID

SEQ ID NO: 47932 - protein, 200 aa, Zea mays
  Coding DNA Sequence Number=SeqID_6153
MPPPGAPSRCQLALAAHVRENTGHLLRDRAPPLSAFSAAAPPPLCYIDQQLRKQRAFQWYDMIPQNALRVSTLRRHRAPAFLPTRGSIRAINVLPQTPSGHLAFNDARAILPTRGASTTPTTPEPHYPAFNGARTPSSPRAVPPHRQRCPKPPPPCPIPYATMPQRCEAFPLLSDAAAAVVLPPSPARPLKSARVWAILL

SEQ ID NO: 47933 - protein, 742 aa, Zea mays
  Coding DNA Sequence Number=SeqID_6154
  Gene Ontology: Mol. function=protein serine/threonine kinase activity; Cellular component=integral to membrane; Biological process=protein amino acid phosphorylation
  Homolog annotation: Hit_ID=Q69KD0; Match level="QueryCoverage=97%, HitCoverage=97%, E-value=1e-167, Identity=37%"; Hit description =Putative disease resistance protein Cf-2.1
  Pfam annotation: Domain name=LRRNT_2; Domain location=26-67; Score =43.9; E_value=5.4e-10; Accession=PF08263.3; Description=Leucine rich repeat N-terminal domain
  Pfam annotation: Domain name=LRR_1; Domain location=121-143; Score =13.1; E_value=1; Accession=PF00560.23; Description=Leucine Rich Repeat
  Pfam annotation: Domain name=LRR_1; Domain location=145-167; Score =6.6; E_value=17; Accession=PF00560.23; Description=Leucine Rich Repeat
  Pfam annotation: Domain name=LRR_1; Domain location=169-191; Score =19.6; E_value=0.011; Accession=PF00560.23; Description=Leucine Rich Repeat
  Pfam annotation: Domain name=LRR_1; Domain location=193-215; Score =14.3; E_value=0.45; Accession=PF00560.23; Description=Leucine Rich Repeat
  Pfam annotation: Domain name=LRR_1; Domain location=218-240; Score =10.3; E_value=3.4; Accession=PF00560.23; Description=Leucine Rich Repeat
  Pfam annotation: Domain name=LRR_1; Domain location=242-265; Score =8.4; E_value=7.5; Accession=PF00560.23; Description=Leucine Rich Repeat
  Pfam annotation: Domain name=LRR_1; Domain location=266-289; Score =1.5; E_value=1.5e+02; Accession=PF00560.23; Description=Leucine Rich Repeat
  Pfam annotation: Domain name=LRR_1; Domain location=291-313; Score =13.1; E_value=0.99; Accession=PF00560.23; Description=Leucine Rich Repeat
  Pfam annotation: Domain name=LRR_1; Domain location=315-337; Score =7.9; E_value=9.5; Accession=PF00560.23; Description=Leucine Rich Repeat
  Pfam annotation: Domain name=LRR_1; Domain location=339-361; Score =8.7; E_value=6.9; Accession=PF00560.23; Description=Leucine Rich Repeat
  Pfam annotation: Domain name=LRR_1; Domain location=363-386; Score =7.1; E_value=13; Accession=PF00560.23; Description=Leucine Rich Repeat
  Pfam annotation: Domain name=LRR_1; Domain location=388-410; Score =3.5; E_value=65; Accession=PF00560.23; Description=Leucine Rich Repeat
  Pfam annotation: Domain name=LRR_1; Domain location=412-433; Score =11.3; E_value=2.2; Accession=PF00560.23; Description=Leucine Rich Repeat
  Pfam annotation: Domain name=LRR_1; Domain location=435-460; Score =6.9; E_value=14; Accession=PF00560.23; Description=Leucine Rich Repeat
  Pfam annotation: Domain name=LRR_1; Domain location=462-484; Score =13.1; E_value=1; Accession=PF00560.23; Description=Leucine Rich Repeat
  Pfam annotation: Domain name=LRR_1; Domain location=487-509; Score =18.8; E_value=0.019; Accession=PF00560.23; Description=Leucine Rich Repeat
  Pfam annotation: Domain name=LRR_1; Domain location=511-533; Score =16.9; E_value=0.073; Accession=PF00560.23; Description=Leucine Rich Repeat
  Pfam annotation: Domain name=LRR_1; Domain location=535-557; Score =10.9; E_value=2.6; Accession=PF00560.23; Description=Leucine Rich Repeat
  Pfam annotation: Domain name=LRR_1; Domain location=559-581; Score =10.5; E_value=3.1; Accession=PF00560.23; Description=Leucine Rich Repeat
  Pfam annotation: Domain name=LRR_1; Domain location=583-606; Score =5.8; E_value=23; Accession=PF00560.23; Description=Leucine Rich Repeat
  Pfam annotation: Domain name=LRR_1; Domain location=608-630; Score =6.5; E_value=17; Accession=PF00560.23; Description=Leucine Rich Repeat
  Pfam annotation: Domain name=LRR_1; Domain location=632-654; Score =15.3; E_value=0.22; Accession=PF00560.23; Description=Leucine Rich Repeat
  Pfam annotation: Domain name=LRR_1; Domain location=656-678; Score =11.4; E_value=2.1; Accession=PF00560.23; Description=Leucine Rich Repeat
  Pfam annotation: Domain name=LRR_1; Domain location=680-702; Score =14.6; E_value=0.35; Accession=PF00560.23; Description=Leucine Rich Repeat
  Pfam annotation: Domain name=LRR_1; Domain location=704-727; Score =7.2; E_value=13; Accession=PF00560.23; Description=Leucine Rich Repeat
  Pfam annotation: Domain name=LRR_1; Domain location=97-119; Score =12.9; E_value=1.1; Accession=PF00560.23; Description=Leucine Rich Repeat
  Pfam module annotation: Pfam domain module=LRRNT_2::LRR_1::LRR_1::LRR_ 1::LRR_1::LRR_1::LRR_1::LRR_1::LRR_1::LRR_1::LRR_1::LRR_1::LRR_1: LRR_
  Pfam module annotation: Pfam domain module=LRR_1::LRR_1; Domain location=26-67::121-143::145-167::169-191::193-215::218-240::242 -265::266-289::291-313::315-337::339-361::363-386::388-410::412 -433::435-460::462-484::...
  Pfam module annotation: Domain location=487-509::511-533::535 -557::559-581::583-606::608-630::632-654::656-678::680-702::704 -727::97-119
MAHPVRLLCLLAFFGSLHVAATSNERENDQQALLCFKSQLSGTVGTLSSWSSNTSMEFCSWHGVSCSEHSPRRVIALDLASEGITGTIPPCIANLTSLTRLQLANNSFRGSIPPELGLLSQLRILNLSMNSLEGTIPSELSSCSQLQALGLWNNSLRGEVPPALGQCVQLEEIDLSNNDLEGSIPSRFGALPELRTLVLAGNRLSGAIPPSLGRSSLSLTHVDLGANALTGGIPESLAGSSSLQVLRLMRNSLGGELPRALFNTSSLIAICLQENKFVGPIPPATAVVSPPVKHLHLGGNFLSGTIPASLGNLSSLLDLRLTRNRLHGRIPESIGYLPALSLLNLNLNNLSGPVPLSLFNMSSLRALAMGNNSLSGRLPSGIGYTLPRIQILILPSNRFDGPIPASLLHAHHMQWLYLGQNSLTGPVPFFGTLPNLEELQVSYNLLDAGDWGFVSSLSGCSRLTRLYLAGNSFRGELPSSIGNLSSSLEILWLRDNKISGPIPPELGNLKNLSTLYMDHNRFTGSIPAAIGNLKRLVVLSAARNRLSGTIPDAIGDLVQLTDLKLDANNLSGRIPASIGRCTQLQILNLARNALDGGIPRSILEISSLSLELDLSYNRLAGGIPDEIGNLINLNKLSVSNNMLSGSIPSALGQCVLLEYLKMQNNLFTGSVPQSFAGLVGIRELDVSRNNLSGKIPGFLTSLNYLNYLNLSFNDFDGAVPEGGFFGNASAVSIEGNGRWTNL

SEQ ID NO: 47934 - protein, 110 aa, Zea mays
  Coding DNA Sequence Number=SeqID_6155
MTAGLLNLGATPRRQAEGAAHHSPLPPCNSGILPSLPCNNGIKGFCNSDMDDQFPGEAVFSNNDIKVVILIVAQLSPVPMNQRNEPMEICCVQVLSGEAIDTAKALALKE

SEQ ID NO: 47935 - protein, 289 aa, Zea mays
  Coding DNA Sequence Number=SeqID_6156
  Subcellular localization annotation: CTP_CleavageSite=70; ConfidenceScore=5.22e-01
MPMHADPGAHPHGHFGVASAVGGGAPSPSPSHLDEWSFTTTQLVANLMQKPPLLLHQRSNSIFAQPTMVAVATGKGSLKSDLGAVPIASIDEHAAESTIARHQARFLAWPKHGTAPLDSCLGRPEPTNQTVPGLPAAAAEWHGPARQKTAGTNRSDNGERGISPASLSTRPLSAHLLSTLSFPLASRPLRRSSLCVALCLLLTASPSTVAVVSAGSSSPPPFRAAPLSRLRLSIGEIPNPNQKYLTLIPSSPDSGSPSRCPASSSSAPGCGLADKSLSGSPSPVGQPNP

SEQ ID NO: 47936 - protein, 150 aa, Zea mays
  Coding DNA Sequence Number=SeqID_6157
  Gene Ontology: Mol. function=protein dimerization activity; Cellular component=nucleus; Biological process=regulation of transcription, DNA-dependent
  Homolog annotation: Hit_ID=Q0GPH3; Match level="QueryCoverage=42%, HitCoverage=32%, E-value=5e-14, Identity=62%"; Hit description=BZIP transcription factor bZIP73A
  Pfam annotation: Domain name=bZIP_1; Domain location=83-142; Score =31.1; E_value=3.9e-06; Accession=PF00170.11; Description=bZIP transcription factor
  Pfam annotation: Domain name=bZIP_2; Domain location=83-134; Score =24.6; E_value=0.00035; Accession=PF07716.5; Description=Basic region leucine zipper
  Pfam module annotation: Pfam domain module=bZIP_1::bZIP_2; Domain location=83-142::83-134
MYPAAEIASVRYLSPAAGAASLRPHYRDDFLFQFQYSDLLLAPAHPSLYQDVADHLVLGASFPAAGDNRSSSEESDAYLQRSLAEERRKRRMVSNRESARRSRVRKQKQLSELWAQVVHLRGTNRQLLDQLKCSTVSSETATVSSVKTPG

SEQ ID NO: 47937 - protein, 431 aa, Zea mays
  Coding DNA Sequence Number=SeqID_6158
  Gene Ontology: Mol. function=receptor activity; Cellular component =chloroplast thylakoid membrane
  Homolog annotation: Hit_ID=Q6S3G1; Match level="QueryCoverage=85%, HitCoverage=85%, E-value=1e-113, Identity=63%"; Hit description =Extracellular calcium sensing receptor
  Subcellular localization annotation: CTP_CleavageSite=57; ConfidenceScore=5.66e-01
MAPVPVSVSATLAPPPAAPPKATSRSWERRAPADAAFAAASSVAISAALLTLTPAAPAAALSKEDVAGSLTKAVDTVSQAIDVGGKAAEQVAAVLKALGEAVKPALPVLKSASDEALKLAAPVVSAASKQATEALQGAGVDPAPVLSVAKTAAEQSTKVIDAAKPVASAAVETITSLGPEDYVVAAGAAFLAYLLVPPVWSLVSSSLRGYKAASLQHIAASHCSPCGCYNKGDLTPAQALDKVTTQGYVLIDVRSDKDKAKAGLPQLPSNAKNKLVSVPLEDLPSKLKGMVRNAKKAEAEIAALKISYLKKIGKGSNVIIMDSSVHPTHLHFRLLLPFKYSDVAKTVAKTLDSVGFKNCWVMAGGFSGRKGWAQSRLGTDSYNLSVVEVVTPSRVIPAVAGRRTGTTAARIGTASSASRATTRKLLPGGVD

SEQ ID NO: 47938 - protein, 83 aa, Zea mays
  Coding DNA Sequence Number=SeqID_6159
  Homolog annotation: Hit_ID=Q6ZGY4; Match level="QueryCoverage=54%, HitCoverage=2%, E-value=5e-10, Identity=72%"; Hit description =Putative photoperiod independent early flowering1
MSKSQNVTVYWSMQRSLVVKLLQKESEIPLEELLARYREDGCADHETAELKNSPHFVEEVNTDMSLDDQSLLQDQHNQLATPS

SEQ ID NO: 47939 - protein, 280 aa, Zea mays
  Coding DNA Sequence Number=SeqID_6160
MAPKRANSKAATSIDDAVKATLLAKNKDKAPIADDITLEAFDDEAVNNKRQHQDNLPTPEGTARTCSSKEVPQAPPLGFIHSEGEETIKDSEIIGISAKDQLKLRALRIKNNHLQKQKEILAAKRQRINMQAKLRQMIVDEEQKARELEQQITDMQGEGSHHMQWSPLITPTVNVWDPTAHPGLPLEVLLGRTVLPTVARWFVLGARETIDNFIQLFQRSSLYTSEISDRLPAYALEINILSLGVEDSLGAPEVHPMGVAQSFEWITESNPLKGLYLMLF

SEQ ID NO: 47940 - protein, 322 aa, Zea mays
  Coding DNA Sequence Number=SeqID_6161
MMKKEDAENARAKAQATRKHAADLELVLKNMCGHRERTESSTRAGVDRAHRLFVDAYRDLGAQTAPFDKLGEEAGTHFLGWLQDELESLPSIMTGLMSYASLVTCEGAANALSREGCRHFEVFHRANKDFDRGVFQIEDDVLKRSAGALDDRMWALTAVASSRRGQTERWCRYVMGLARGVAMNEEDVEDLTSLKSSVTRRDASTEAGAKEQTMLQGGGIGGPVTADASLSIDAQVPASGPAQANPDDDTNDDILMHGNAVFLSSNASREYDVGSWSLEGGKLGSTFSWIDDESSEDDLDYFAALDLAVVESPLRSPPVKRR

SEQ ID NO: 47941 - protein, 152 aa, Zea mays
  Coding DNA Sequence Number=SeqID_6162
MADRRGIPALRSLETVAGFLKLLELCKGLVVLPCYNLGNMTCGYRGDSTDVGDDRGKQVKPRAEEGTSKGKALVAATRKRKLGMGDDETGPRAYGIFVEELMGICAVPGEVMSLPELRETSSRMLKRWRKITRTLSGRSVRPPSASGPTPRS

SEQ ID NO: 47942 - protein, 180 aa, Zea mays
  Coding DNA Sequence Number=SeqID_6163
MGKNKKGGSSSHHSDDKRKCKPSLPSEDFGDSEYSEEEFSFESEGSPVYASPPVSSGELDDSQGIAAEVWTYIRAVERSGLKGSDESEISSDEENSSDSSEEESGGDGDGEGDDSNGGDGGDDGDDDGDGKGDDCDGGDGGNDGDGDGKGYRGNSGKGDDSGGKATVMARPVAKRHWFKY

SEQ ID NO: 47943 - protein, 143 aa, Zea mays
  Coding DNA Sequence Number=SeqID_6164
MDSDPHGTVPDPYIYGLDLRAESRTSTEGNAIPPGRVPDLSVWGPGCSQQGPALCYLSIKCALSTPLTDDDQTILQAVCLSIPWPVVRPCCDMDGRVHSATRPENSLSDNDQEDEPPQEEDNDQGGDEDDQDKEDDQAILKVA

SEQ ID NO: 47944 - protein, 135 aa, Zea mays
  Coding DNA Sequence Number=SeqID_6165
MASWTSSIMKGAVKITFSISETEDISSEPTTKLKCYKDIELNFAMPQRMVHVDYSSLYASGGLKLALTFSPLYIRDLDIKRKLKHSKAFRSLSLEEGGKHALEYWRSQLLLSPSNTLRYRRPQLLLSPLKYRTNL

SEQ ID NO: 47945 - protein, 652 aa, Zea mays
  Coding DNA Sequence Number=SeqID_6166
  Gene Ontology: Mol. function=cysteine-type peptidase activity; Biological process=proteolysis
  Pfam annotation: Domain name=Peptidase_C48; Domain location=485-652; Score=-10.3; E_value=0.0033; Accession=PF02902.9; Description=Ulp1 protease family, C-terminal catalytic domain
MVPKRTHDPRSGDESTADESSLEASNFEKNTKPGKTGLGSHCEPTPVVNAAKLLSPEARQYVIDCGFGAFLEMKATKIFSLETIIVILNKCDVSSSDESFTIVLSDEHQLKVTTEVVHSIFGLPTGEISIDQKNFTHTEFLKFWKILKAGGHVTESTTRCRGKPVSTKRITLQSLLNYMEAEADKEKQAFAFFTILLSKLLLTTTSNVPTKGHVALCSYIENTQKYDWCKFVCQDLKNKISSWKQKPTSKIPGCLLLLLICSFRIVVPEPKLEEASAGPLIKHYDDNRILELLKAVKDTIKFKEESSRAIAPVPLCIGSHFALQKDRFNGLQPEGSNSQRRKQVLRHKVNLLHGHIPAKIIYTSSEHLIANLKVQRNAKPQPPKEKKPASKRQKGEGQNLGIQIHVEDLLKGYEVDENQRGILLKVIEDEVGSSEIKLMEKLKKIVANRSFFIFYDEIKNRAQIKDKERIQQMEKNLVVDIEDVTISEAVFVKTFKPYGRLHTSIIETLIRIWNKSWDDRIMLSLLAVEQILGKRKDYLERELKDYDKEKKHTIFVPFIIDQHWSLVVVEPGREVITVLDSFYELRLCEKRHENLMAQLQKNLYPFIGLENATHRFITPPVVQNQNNSHDCGFHMLLYIKRYEDQNYHNISE

SEQ ID NO: 47946 - protein, 177 aa, Zea mays
  Coding DNA Sequence Number=SeqID_6167
  Gene Ontology: Mol. function=protein translocase activity; Cellular component=integral to membrane; Biological process=protein transport
  Homolog annotation: Hit_ID=Q84Q83; Match level="QueryCoverage=100%, HitCoverage=23%, E-value=2e-88, Identity=85%"; Hit description =Protein TOC75, chloroplast precursor
MMRSREVSARMLQKIRDHVQKWYHNEGFVCAQVVNFGNLNTNEVVCEVVEGDITKVEYQFQDKLGNIVEGNTQLQIIDRELPQQLRPGHIFNIGAGKQALKNINSLALFSNIEVNPRPDETKEGGIVVEIKLKELEPKSAEASIQPGGTVSFEHRNIYGLNRSIVGSVTSSNLLNPQ

SEQ ID NO: 47947 - protein, 62 aa, Zea mays
  Coding DNA Sequence Number=SeqID_6168
MAQMSIAQLSFCLPQHQGRPFIARVEQQSWHLRRDCDGGANNVHLSARELLKSSKNVVKKVG

SEQ ID NO: 47948 - protein, 102 aa, Zea mays
  Coding DNA Sequence Number=SeqID_6169
  Subcellular localization annotation: CTP_CleavageSite=22; ConfidenceScore=5.19e-01
MDDLELFNDAGIVISSPQGAVMSSPPSSSSLPLVPLGGNTANKVNDWESFVLSDFWDEEGRHDVPSEMEMYSQLGLNEEDKAKENKIDEAGLGGTSNVDQSE

SEQ ID NO: 47949 - protein, 205 aa, Zea mays
  Coding DNA Sequence Number=SeqID_6170
  Gene Ontology: Mol. function=chitinase activity; Cellular component =vacuole; Biological process=cell wall catabolic process
  Homolog annotation: Hit_ID=Q7GC32; Match level="QueryCoverage=91%, HitCoverage=82%, E-value=2e-74, Identity=66%"; Hit description=PR-3 class IV chitinase
  Pfam annotation: Domain name=Glyco_hydro_19; Domain location=18-205; Score=337.3; E_value=2.6e-98; Accession=PF00182.9; Description =Chitinase class I
MTKEAGQGSGSSERIGGSHARDGCEGKNFYTRSAFVSAAGAFPGFAHGGTEADGKREIAAFFAHVTFETGYFCYINQINGRGQASCDSGVKQWPCAPGKQYYGRGPLQISWNFNYGPAGQSIGFDALGDPDRVAQDPVISFKTALWLWMSSAHQVVPQGFGATIRALHGALECNGNSPATVNARVGYYKEYCKQFGVGPGNNLTC

SEQ ID NO: 47950 - protein, 340 aa, Zea mays
  Coding DNA Sequence Number=SeqID_6171
  Gene Ontology: Mol. function=hydrolase activity, acting on glycosyl bonds; Cellular component=vacuole; Biological process=polysaccharide catabolic process
  Homolog annotation: Hit_ID=P29022; Match level="QueryCoverage=82%, HitCoverage=100%, E-value=1e-145, Identity=86%"; Hit description =Endochitinase A precursor
  Pfam annotation: Domain name=Chitin_bind_1; Domain location=85-118; Score=51.9; E_value=2.1e-12; Accession=PF00187.9; Description=Chitin recognition protein
  Pfam annotation: Domain name=GRP; Domain location=61-137; Score= -26.6; E_value=0.039; Accession=PF07172.2; Description=Glycine rich protein family
  Pfam annotation: Domain name=Glyco_hydro_19; Domain location=143-340; Score=437.9; E_value=1.3e-128; Accession=PF00182.9; Description =Chitinase class I
  Pfam module annotation: Pfam domain module=Chitin_bind_1::GRP::Glyco _hydro_19; Domain location=85-118::61-137::143-340
MGGGGGNPNLMISQPRLECLCLDTWGTLVTPQITSHNKLHRSNEHEPWQNEAEVVRCEPSMANAPRILALGLLALLCAAAGPAAAQNCGCQPNFCCSKFGYCGTTDAYCGDGCQSGPCRSGGGGGGGGGGGGGGSGGANVANVVTDAFFNGIKNQAGSGCEGKNFYTRSAFLSAVNAYPGFAHGGTEVEGKREIAAFFAHVTHETGHFCYISEINKSNAYCDASNRQWPCAAGQKYYGRGPLQISWNYNYGPAGRDIGFNGLADPNRVAQDAVIAFKTALWFWMNNVHRVMPQGFGATIRAINGALECNGNNPAQMNARVGYYKQYCQQLRVDPGPNLTC

SEQ ID NO: 47951 - protein, 393 aa, Zea mays
  Coding DNA Sequence Number=SeqID_6172
  Gene Ontology: Mol. function=nutrient reservoir activity; Cellular component=cellulose and pectin-containing cell wall
  Homolog annotation: Hit_ID=Q43557; Match level="QueryCoverage=89%, HitCoverage=90%, E-value=1e-103, Identity=54%"; Hit description =Unidentified precursor
  Pfam annotation: Domain name=DUF642; Domain location=58-393; Score =612.9; E_value=2.8e-181; Accession=PF04862.3; Description=Protein of unknown function, DUF642
MAGGTRSRCPVLLLLLLGVTARLASGVVSDVLPPFLFISRWSLLPNGNFELGPAKSDLNGTRVMNQNSVPNWEILGFVEYIGSGQKQDDMILPVPEGACAVRLGNDATIRQNLNLIRETTYSITFCAARTCAQAERLKVSVAAESGVLPIQTVYTSNGWDSYSYAFRARHSTAWFSIHNPGHEDDPACGPLIDSVAIKALNPPHLTKESHTAGLSQRSEHADNMLRNGDFEEGPVIFPDTAWGVLVPPMSEDDVSPLPGWMVMSDTKVVKYVDAAHHAVPRGARAVELVAGREAALVQEVRTVPGRHYRLSLAVGDAANGCEGPMAVEAYAARATLRTTYESRGNGGSKRAVVDFTAIANLTRVVLQSYNHHMKPDGTLCGPVVDDVSLVGLR

SEQ ID NO: 47952 - protein, 206 aa, Zea mays
  Coding DNA Sequence Number=SeqID_6173
  Gene Ontology: Mol. function=nutrient reservoir activity; Cellular component=cellulose and pectin-containing cell wall
  Homolog annotation: Hit_ID=Q43557; Match level="QueryCoverage=79%, HitCoverage=43%, E-value=3e-28, Identity=41%"; Hit description =Unidentified precursor
  Pfam annotation: Domain name=DUF642; Domain location=38-205; Score= -102.5; E_value=1.1e-07; Accession=PF04862.3; Description=Protein of unknown function, DUF642
MSINGFNHRRYLVMAWSYPFWRQLPNGNFEDAPARSQLNGTQVLGLYAIPRWEVSGFVEYIGSGQRQGDIIHSSSRCRREPTPCGWGTRPPSGSGWPCRGARATPSPSAPRAPAPRPLNVTVAPDSDVLPIQTVYASSGWDSYSWAFEARHGAVTLIVHNPGVSEDPACGPLLDSFAIKALRPPPVPTKRTRMCLFLNAVREESGT

SEQ ID NO: 47953 - protein, 276 aa, Zea mays
  Coding DNA Sequence Number=SeqID_6174
  Gene Ontology: Mol. function=nucleic acid binding
  Homolog annotation: Hit_ID=P93802; Match level="QueryCoverage=97%, HitCoverage=37%, E-value=2e-76, Identity=49%"; Hit description=MURAZC
  Pfam annotation: Domain name=SWIM; Domain location=58-90; Score=40.1; E_value=7.5e-09; Accession=PF04434.8; Description=SWIM zinc finger
MELFHRRRKIGERLHGLILPSVMATLKAQTRGLGHLTIVKSDNYLAEVRDSTNCLTKHVVKAESRQCSCEEWQHTGKPCQHGLAVIIAQDARNVGMKNFVDDYYSIEKFRKAYMGRIPPIGDRSFWTKVDFANEVCAPMAKRGVGRQRKNRMKSCLEGGSGKNERKRKPRKNTTKNWISKELRTSTSQPSAPNEDVEAVGDAEATQDVETAVIDNGGHEDEALVCVPAEDAALVRVQTPPSSAPRSVKWLVKKITPRKNLKRAAQNSEHNCLLLAV

SEQ ID NO: 47954 - protein, 87 aa, Zea mays
  Coding DNA Sequence Number=SeqID_6175
MKKSLTTCKNTSNQGRAIIKDLSEKLDLSRTKNLAQPKVEKVIAKKKSAQEETKAHKSLIKSMMTRLYGSNARKGFTGLQKLESLSQ

SEQ ID NO: 47955 - protein, 279 aa, Zea mays
  Coding DNA Sequence Number=SeqID_6176
  Homolog annotation: Hit_ID=Q5N8C4; Match level="QueryCoverage=18%, HitCoverage=4%, E-value=1e-09, Identity=63%"; Hit description =Putative receptor-like protein kinase 2
MEPKLSSVGVRDLRRVVIPTPVLVVLLDARHDLHRVFIPTTVPFDPYRHPPPALGFGSSKAPLEMASTTYALSSEPTSKLGRYALDDRLPVAPRVVDLCNGASAPRMELESSSAPAGSSALALRPPNPRISQSCPIHGATGGGEQPSGEARRQCATVGVGKMKRDSVKMKNEGFKNLPLHFAENTTHRPAPATVFGFKLKLNATVLREEAEQLELELEMRRELRDITTCRDVSFNLGLNGRMPATIGNLAQLTTLILAGCSFTGGIPQQLGNLQQLSFL

SEQ ID NO: 47956 - protein, 93 aa, Zea mays
  Coding DNA Sequence Number=SeqID_6177
  Homolog annotation: Hit_ID=Q2QNA3; Match level="QueryCoverage=69%, HitCoverage=8%, E-value=1e-14, Identity=63%"; Hit description=GRAS family transcription factor containing protein, expressed
MYMHSVGNSRMYLGKVSPTVKEQLTYLAKLEAVCAEDLDIDPDEVLVVISHFCFKNLMDESVTVDRPNPRDTVLKNIANMRPKVFIHDILNGS

SEQ ID NO: 47957 - protein, 89 aa, Zea mays
  Coding DNA Sequence Number=SeqID_6178
MARLIRSTPRLSSAPDRDGATVFYSTYGDHGTQATRVRNFLSIPGHGKVEDLQAGKRSRDWILEFTGGITMCMGCSRGLLKEAHAGAAG

SEQ ID NO: 47958 - protein, 89 aa, Zea mays
  Coding DNA Sequence Number=SeqID_6179
MARLIRSTPRLSSVPDRDGATVFYSTYGDHGTQATRVRNFLSIPGHGKVEDLQAGKISRDWILEFTGGITMCMGCSRGLLKEAHAGAAG

SEQ ID NO: 47959 - protein, 74 aa, Zea mays
  Coding DNA Sequence Number=SeqID_6180
MKDAKTHQDTPGNQWGILDLDTEGKSVDQSDFNQVQDCIVSEVFRRDKGILLIYIKLRTRRHRHHDSSASLKYR

SEQ ID NO: 47960 - protein, 68 aa, Zea mays
  Coding DNA Sequence Number=SeqID_6181
MSGGAPDTVRWCTGHCPVRQTRANAHFFRANWLKHSAKTHSDAPVYGELSDPFRNTVKAAVLTVSDFQ

SEQ ID NO: 47961 - protein, 61 aa, Zea mays
  Coding DNA Sequence Number=SeqID_6182
MNVCELTLAVSHPPQVKNRFYLTFGDSPYKLSYPNLDIKQQIKPCHDPSAYNQPLDYLFAY

SEQ ID NO: 47962 - protein, 215 aa, Zea mays
  Coding DNA Sequence Number=SeqID_6183
SASERQPLDLSQPLEDSKDSEREMCSWAISTKTVTKEEEKKRKRVGCVQPTPTLARHIGPFGGAPDSVRCSRLAGGEPAALEKMQRRTAIIHRTVRWCIGLSGEPTVASANGQPRDLRATHGPQQWSAGHTGLSGVHRTVSGVHQTVSGVHQIVSGAPTDPEDQRSDAPNLEGDRATDNYSDCPVVHRTVRCTTRQKASLAFQVGLQRLLAALRL

SEQ ID NO: 47963 - protein, 241 aa, Zea mays
  Coding DNA Sequence Number=SeqID_6184
  Gene Ontology: Mol. function=zinc ion binding; Biological process =regulation of transcription
  Homolog annotation: Hit_ID=Q6F2W0; Match level="QueryCoverage=76%, HitCoverage=47%, E-value=3e-20, Identity=40%"; Hit description =Putative Dof zinc finger protein
MPNCSMKHGMLVIRNNTPAVAQYVPFGEWPLTAAGDVSPGGGEGCHAAVTVSSSVATSIESLSFINLDLHWKLQQQRLATMLLGAPPSSAAAAHADDDDGAARAAAHVGGGAFLQVAPGPSPGMEATGTVPPPVATSSWFMDSSCYDVLPSSPAAHANTAAAAAAVGASDCNVVNSGGGDNATSRNSSNCCGPGSAIPPWGDMSTCELGDWRRRAMEGRQGHGNPIYEPRANVYQYLYPCV

SEQ ID NO: 47964 - protein, 375 aa, Zea mays
  Coding DNA Sequence Number=SeqID_6185
  Gene Ontology: Mol. function=transferase activity; Biological process= metabolic process
  Homolog annotation: Hit_ID=Q75ID3; Match level="QueryCoverage=76%, HitCoverage=87%, E-value=7e-88, Identity=58%"; Hit description =Expressed protein
  Pfam annotation: Domain name=FTCD_N; Domain location=88-273; Score =161.5; E_value=2.2e-45; Accession=PF07837.3; Description =Formiminotransferase domain, N-terminal subd
MEVREVLAADLSPKADKPHAASTDGLGTLAKWIGKQEKIKQQDTQRVPCKHSQREIREERGGEERRKKKKQQQLQLQGSRHGASSRKQVERASKSDPQVVVVSQFGDHHYNRFRYTLVSYIVVVDGGGSSAAGEATVVHSPIRKVLLAMIEAAFSSIDLESQSGAHPRIGVVDDLSFHPVGQATIEDAASLARQVASDIACIAAVPVFLYAAAHPAGKSVGAVRRELGYYRPNYRGNQWSGSVLPNVLPVKPDVGPAHVVSHKRGATTVGVTPWIENYNVPVLCKDVATVRRITRGVTGRSGGLPTVQALALFHGDDCTEIACLLDPDHASAYQVQTVVEQIAGDQGLEVEQGYYTDITKDEALDKYLKIACADD

SEQ ID NO: 47965 - protein, 269 aa, Zea mays
  Coding DNA Sequence Number=SeqID_6186
  Gene Ontology: Cellular component=integral to membrane; Biological process=protein transport
  Homolog annotation: Hit_ID=Q75IC7; Match level="QueryCoverage=99%, HitCoverage=91%, E-value=1e-99, Identity=65%"; Hit description =Putative secretory carrier membrane protein
  Pfam annotation: Domain name=SCAMP; Domain location=122-269; Score =182.9; E_value=8.1e-52; Accession=PF04144.4; Description=SCAMP family
MAGRSTYDNPFEEGAAAAEVNPFADQAKRGGPTAQSSYSGGAFYTTQSQRPAPPSTRLSPLAPEPAGFYNDFATPVDIPMDDTNNKDRKTREKELLAKEAELNRREKLALCWKRKTGHRFSPSSITILATRYLSICKVHWLVVCLFWNIICVTAAWAKGSGPKIWFLAIIYFILGCPGAYYLWYRPLYRAMRNESALKFGWFFLFYLVHIAFCVYAAVSPSILFVGKSLTGIFPAISLIGDSVIVGIFYFIGFALFCLESLLSMCVIQV

SEQ ID NO: 47966 - protein, 95 aa, Zea mays
  Coding DNA Sequence Number=SeqID_6187
  Homolog annotation: Hit_ID=Q75ID5; Match level="QueryCoverage=63%, HitCoverage=67%, E-value=3e-17, Identity=67%"; Hit description =Expressed protein
  Subcellular localization annotation: CTP_CleavageSite=6; ConfidenceScore=5.15e-01
MASRLVAAAASSSSLSSASPLARLISRRGLAGAADGHGSAKVPLWKDPLSPSKWKEEHFVLASLSMWGVIFYGGYKLFSGKKEAKTEGAGSNKDP

SEQ ID NO: 47967 - protein, 282 aa, Zea mays
  Coding DNA Sequence Number=SeqID_6188
  Gene Ontology: Cellular component=integral to membrane; Biological process=protein transport
  Homolog annotation: Hit_ID=Q75IC6; Match level="QueryCoverage=98%, HitCoverage=98%, E-value=1e-116, Identity=73%"; Hit description =Putative secretory carrier membrane protein
  Pfam annotation: Domain name=SCAMP; Domain location=92-266; Score =298.3; E_value=1.4e-86; Accession=PF04144.4; Description=SCAMP family
MAGRWKHDNPFEEGDGGDVNPFSHRRPTPLPPEPAGFYNDIGASSVDIPLDTKKDLKKKERELMAKEAELNRREQEIKRREEALAKAGVLIEPKNWPPFFPVIHVDISNDIPVHLQRVQYVSFASLLGLVICLFWNILCVTAAWITGNDPRIWFLAVIYFITGCPGAYFLWYRPLYRAMRKDSAFSYGWFFLFYFFHIAFCIYAAVSPPFFYVGRSLAGIFQSIDEIGRHAGVGIMYFMGFALFVLESLLSIWVFQIVYRFFRGKGSEAQMRPDAASRAPPF

SEQ ID NO: 47968 - protein, 249 aa, Zea mays
  Coding DNA Sequence Number=SeqID_6189
  Gene Ontology: Mol. function=transferase activity, transferring glycosyl groups; Cellular component=cytosol
  Homolog annotation: Hit_ID=Q6CKD7; Match level="QueryCoverage=61%, HitCoverage=54%, E-value=7e-24, Identity=42%"; Hit description =Similar to sp|Q9C0Y8 Schizosaccharomyces pombe Hypothetical 34.7 kDa protein
  Pfam annotation: Domain name=DUF1749; Domain location=45-249; Score= -0.4; E_value=7.5e-16; Accession=PF08538.1; Description=Protein of unknown function (DUF1749)
  Subcellular localization annotation: CTP_CleavageSite=31; ConfidenceScore=5.38e-01
MAGGVASASASASASGPASAFLPDAPKSVIGAGSGGGKRNHLCGALFKYGPKSAQGNTLYFVFLVWIDLQPLKVMVAFRTGDFNHQVIFIGGLTDGLLATDYLEPLSLALEVEKWSLVQPLLSSSYTGYGISSLQQDALELEQLISYLINKENSEGVILLGHSTGCQDIVHYMRTNFACSKAVSGVILQAPVSDREYRATLPETAEMIDLAAKLISEGRGMDLMPRKANSDAPITAYRYYAFCVIFPLL

SEQ ID NO: 47969 - protein, 438 aa, Zea mays
  Coding DNA Sequence Number=SeqID_6190
  Homolog annotation: Hit_ID=Q8H4U8; Match level="QueryCoverage=99%, HitCoverage=64%, E-value=2e-70, Identity=40%"; Hit description =Putative bZIP protein
  Pfam annotation: Domain name=DUF630; Domain location=1-61; Score =74.7; E_value=2.9e-19; Accession=PF04783.3; Description=Protein of unknown function (DUF630)
  Pfam annotation: Domain name=DUF632; Domain location=287-438; Score= -86.8; E_value=3.4e-05; Accession=PF04782.3; Description=Protein of unknown function (DUF632)
  Pfam annotation: Domain name=Extensin_2; Domain location=45-377; Score=-119.4; E_value=0.012; Accession=PF04554.4; Description =Extensin-like region
  Pfam module annotation: Pfam domain module=DUF630::DUF632::Extensin _2; Domain location=1-61::287-438::45-377
MGCGPSKEDAEGGAESRCRERKHLLSAAVHARHALAGAHAGHTAALKNVGAALSDYAAGETDRHDAVLVPRSASAAAALSAGQGSAATVVKALPSPLDALLPPPPPPGAGDGDGDDGGHTTLHRSMSAPDIQLQPPIRKGRSGEAPIMEEDGEGDAPGDDAGRRREDDDPQLQPPPPPPPPANNPPPSRSPPPVPAAKANLERATAEGNSWKDYLFGSPDAMPGPPPTLDPSASAAAESSWAAERRMPAPPPPPPESDQQPTKQPQPVPSAEEIAEGKKPAAELVTRRARKPEGKKGRVVMVTPQPARLGDILRRLDDEFLKASQGAHEVSKMLEAARMHYHSNFAETRGFVDHSARVMQAITWNRSFKGIPPPENVKNELADDEWETHATVLDKLLAWEKKLCHEVKEFETMESTIAEIDRLRDQQLYPKLLELVKG

SEQ ID NO: 47970 - protein, 48 aa, Zea mays
  Coding DNA Sequence Number=SeqID_6191
MDRVPKALVPPTSDLLDITERLGSHRLPPRGGAKGSQQANKKTKNGFK

SEQ ID NO: 47971 - protein, 320 aa, Zea mays
  Coding DNA Sequence Number=SeqID_6192
  Gene Ontology: Mol. function=nucleic acid binding
  Homolog annotation: Hit_ID=Q0WQM7; Match level="QueryCoverage=79%, HitCoverage=85%, E-value=3e-44, Identity=41%"; Hit description =Putative RNA-binding protein
  Pfam annotation: Domain name=RRM_1; Domain location=216-283; Score =14.6; E_value=0.0064; Accession=PF00076.12; Description=RNA recognition motif. (a.k.a. RRM, RBD, or
  Pfam annotation: Domain name=RRM_1; Domain location=60-131; Score =37.0; E_value=6.6e-08; Accession=PF00076.12; Description=RNA recognition motif. (a.k.a. RRM, RBD, or
  Pfam module annotation: Pfam domain module=RRM_1::RRM_1; Domain location=216-283::60-131
MAAYFNHSSSYPPPPPPPGTSPYGAYRHAYPPAPAPPAAYGAYYDRAEQALPARDEVRTLFIAGLPADAKPREVYNLFRDFPGYVSSHLRTGKSSQAYAFAVFADQQSALAALSATNGMVFDLEKNCSLHVDLAKSNSRSKRLRSDDTSPYSPEKRNRKPRGFPDSGAGSNIYISGMEIIVDIVPSCSYTSLESSASLSKDPSTFAPQNNPPCPTLFVANLAPACSEQQLIDVFSSCAGFVKLKMQNKLGAPVAFVDFKKQDENDVTIFTFPGYSAFICTEYLGLGSAIMQSSHLCHIVVALSSYGLALLYTCHLMNLMV

SEQ ID NO: 47972 - protein, 224 aa, Zea mays
  Coding DNA Sequence Number=SeqID_6193
MTRRAKDAIEVCRRPPLLPNLRLVHFVAVKNIGPKRLKPLWCKVEVPVGIVEELPRILVEEGELEVEAQECLDHHPSSFDKGEPWHLTSYIRNSLIYSLPNYIVALGVTGIRRYDPWWMVRPNPLVVGRSLGMVAPVESEMCSKAATGMSVVVIVSHEVLWVKSKVEMQTLVDDTGIYIKGKGKRWKRADPGAQWAHARTSHVLGVIVLRPFVFPAPNILKRQR

SEQ ID NO: 47973 - protein, 136 aa, Zea mays
  Coding DNA Sequence Number=SeqID_6194
  Subcellular localization annotation: CTP_CleavageSite=48; ConfidenceScore=5.38e-01
MTRVLRQLPVRLAPIPPPLSLSRSATSFADCAQLIPSRLPVPKLRRTRAVLVTATAPRQCPILASPGVVIASAPETYRRRLSSTLPELRPSLAVAPSVRRQCPGIPVASPSRRSSRWTMGPACQRALAIMSQTEDA

SEQ ID NO: 47974 - protein, 143 aa, Zea mays
  Coding DNA Sequence Number=SeqID_6195
MTTTSGVTSDESGDPSFGSCSSESSMLWLELPPSLSSPLGSSLADGVPYGGAGAPLAKAQGRVDSQTPPPAEARGKSPAATTPGVDAPAPRAGDDAVSPGDSTVLPPCGVVDAPQGPYREVLREQPESPKVSQFIIIINIIIS

SEQ ID NO: 47975 - protein, 218 aa, Zea mays
  Coding DNA Sequence Number=SeqID_6196
  Homolog annotation: Hit_ID=Q6QP51; Match level="QueryCoverage=51%, HitCoverage=57%, E-value=4e-09, Identity=44%"; Hit description =Putative growth-regulating factor 1
  Subcellular localization annotation: CTP_CleavageSite=44; ConfidenceScore=5.39e-01
MEHAGRHQYLLTGASQMGRRTCSPYPELARGRVMMVPPVTRSVRALVGRGGVRRLLRLSPSPSPEVGRGGVSRLPGPSPSLGGRARRSSSSSGAEPESEPWGRARRSSSSSGAEPEPDSWGRARRSSSSSGAEPEPWGRARRSSSSSGAALESEPWGRARRSFLWRLRPDLAAVSLTLSSGTAVGAMRAALSSCQAGQWSGKVTAVTSAQSTEGRASG

SEQ ID NO: 47976 - protein, 39 aa, Zea mays
  Coding DNA Sequence Number=SeqID_6197
RSNGYFTPTVDGNRIKCTTVRARVRTRAEGAPDSLQDLS

SEQ ID NO: 47977 - protein, 203 aa, Zea mays
  Coding DNA Sequence Number=SeqID_6198
  Subcellular localization annotation: CTP_CleavageSite=52; ConfidenceScore=5.07e-01
MALPVTWSVRALGRARRRLLRGRGRVGLPRSRSCPSLGSGEEETVVFWGRARVRALGSGEAEFVVFRGRARVRALGSGEAEFVVFRGRARVQALGSGEAEFVVFRGRARVRALGSGEAEFPMAPEAGLSCCQPHSVEWHSSRSDAGVAVFLIRCQAILALNAPAIRSVGVAIWPRLLLGEDWVSGEPKLCADGGYQLRLGVLG

SEQ ID NO: 47978 - protein, 280 aa, Zea mays
  Coding DNA Sequence Number=SeqID_6199
  Gene Ontology: Mol. function=molecular_function; Cellular component =cytoplasm; Biological process=red or far red light signaling pathway
  Homolog annotation: Hit_ID=Q5W7C4; Match level="QueryCoverage=95%, HitCoverage=96%, E-value=4e-69, Identity=53%"; Hit description =Unknow protein
  Pfam annotation: Domain name=SRR1; Domain location=97-152; Score =40.3; E_value=6.8e-09; Accession=PF07985.2; Description=SRR1
  Subcellular localization annotation: CTP_CleavageSite=63; ConfidenceScore=5.50e-01
MSAAAATSASDWTIVRRRGRRRGNAPRSTSQPDAPTPLPVTPVLWSPSDSSLDPARVSRLVARAHAAISRVAASPLYHSLLQDSSLRRRLSLLAPAHLSLLGVGSFESSPAARLQLALAALLRRDLLPKAASADVFDPVLSAVECAAAAALGFSVPSLDDGCRRCAEEPTLFYMPHCEASLYDALLAANWDSPAQLRRVCVLGNSFRRYALQAEENRSGPAAKAPHVLAAERFAREERFGDPRDLDDEDWFAHAFNETSWHFFELRDDVDLSATIAVGGS

SEQ ID NO: 47979 - protein, 151 aa, Zea mays
  Coding DNA Sequence Number=SeqID_6200
  Subcellular localization annotation: CTP_CleavageSite=70; ConfidenceScore=5.14e-01
MAHCYISYCTPGPSPYAYKRKDNTEAAGFPLFSLSSTPFVLRLAPTHLGWDTRRQFTRRSRDPPGSKRRQAATAPGNLCKGYVVRPRLLTLGVFKGPYNPRQKGNHGSWVAMRLMVFGVDSSNGCPHCNHCSGEDEAVEGDFQEFQDYVEF

SEQ ID NO: 47980 - protein, 185 aa, Zea mays
  Coding DNA Sequence Number=SeqID_6201
  Gene Ontology: Mol. function=protein serine/threonine kinase activity; Cellular component=cytoplasm; Biological process=protein amino acid phosphorylation
  Homolog annotation: Hit_ID=Q6Z8C8; Match level="QueryCoverage=70%, HitCoverage=28%, E-value=3e-67, Identity=94%"; Hit description =Putative serine/threonine-protein kinase Mak
  Pfam annotation: Domain name=Pkinase; Domain location=25-185; Score =45.5; E_value=2.8e-11; Accession=PF00069.15; Description=Protein kinase domain
  Pfam annotation: Domain name=Pkinase_Tyr; Domain location=25-185; Score=-89.9; E_value=5.9e-07; Accession=PF07714.7; Description =Protein tyrosine kinase
  Pfam module annotation: Pfam domain module=Pkinase::Pkinase_Tyr; Domain location=25-185::25-185
LMRYFPEVIIFQSMPDIYMQDIDQLELGKPLPFVSVHISRGLVILKADISFIVILLKSLRRMNHPNIVKLKEVIRENDILYFIMEYMECNLYQLMKERVKPFSESEVRNWCFQIFQALAYMHQRGYFHRDLKPENLLVSKGVIKLADFGLAREVSSLPPYTEYVSTRWYRAPEVLLQSSAYDSAV

SEQ ID NO: 47981 - protein, 190 aa, Zea mays
  Coding DNA Sequence Number=SeqID_6202
  Gene Ontology: Mol. function=protein serine/threonine kinase activity; Biological process=protein amino acid phosphorylation
  Homolog annotation: Hit_ID=Q6Z8C8; Match level="QueryCoverage=99%, HitCoverage=49%, E-value=5e-71, Identity=62%"; Hit description =Putative serine/threonine-protein kinase Mak
MKYQFPQTKGSQLSEVMTTASSEAIDLISSLCSWDPSKRPKATEVLQHTFFQGCTCVPLPVRRKASSLPKTPPCVGSKRISENSVARRFSTGTLSTMKSHSNAPAKSNGLSRTGNPVLRHSRSLPETGRRAVQKVSSITEKLSQMSVTSRTRSAVKPAAPTMKAGHGKSDFLGKSDDIPPAKRLTRKLVS

SEQ ID NO: 47982 - protein, 158 aa, Zea mays
  Coding DNA Sequence Number=SeqID_6203
MLRSMQLKAKPKLDPPEQTSRPIKDRFPTSFLYIERYLGRIIQQLQSHLMRGTGRHADREARGGTGTGRRSAAVGERVALDGGGGEGGAGTRRHAAAGGREARVQEGRGRAQGVIAGSEVGTRLSQLSLIVPSKLEGRERTSLSCLSSAATELVLSRN

SEQ ID NO: 47983 - protein, 182 aa, Zea mays
  Coding DNA Sequence Number=SeqID_6204
  Gene Ontology: Cellular component=chloroplast thylakoid membrane
  Homolog annotation: Hit_ID=Q6K8R1; Match level="QueryCoverage=96%, HitCoverage=72%, E-value=7e-70, Identity=74%"; Hit description =Putative glycine-rich protein
MTKALSERKATSSMKSLPLMESLKKAMADAKKPRSIQDLLKEQVAKLREQASGGGGGNGNRRGGSGGSGGPDDESFKEALDEVVQVILATVAFILVYIHIIRGEELYRLARDYTRYLVTGKRTARLKRSMQKWHNFSESFMQKEGSEEDQYEKPTWWQQPQKLVHLMEELCRGNWRPHAQES

SEQ ID NO: 47984 - protein, 184 aa, Zea mays
  Coding DNA Sequence Number=SeqID_6205
MGEEGEGIGHGGEGEAASRAQATGDFVEAWEVNGSRRENREHLGAAAGRGSSTATREQEPSWGGLPEDQGRWGQGWGDIRPSDTGAGGGGCAQPREGAGAPTPGHTGEPPRGCRLSTASRWASCAAVRAGRRAGWLPRWLAAAPAAPSSRAPAPRRRARGRRAWPHRAAGRGKQREHAGEAAMD

SEQ ID NO: 47985 - protein, 87 aa, Zea mays
  Coding DNA Sequence Number=SeqID_6206
GRERYGVARLEPSLHLIDEPTRVGSVQAFQCAVVAGWVVTDAFNIILKGLTTLSSMASLFVNQWSLKYHDLELDKEAENTWVDCYIE

SEQ ID NO: 47986 - protein, 177 aa, Zea mays
  Coding DNA Sequence Number=SeqID_6207
  Subcellular localization annotation: CTP_CleavageSite=45; ConfidenceScore=5.26e-01
MQLSFNDTSMKAICGHPSRSRPPAQLAPPTRCLLAVGLGSPTHARQEMVTEGKQHLEETSAPPAQRWNGRERYGVARLEPSLHLIDEPTRVGSVQAFQCAVVAGWVVTDAFNIILKGLTTLRARTRAQPRKTTNSASPDLELGLGLSPGRRRTPLRPTQGSDFGSAPEDDELRFARP

SEQ ID NO: 47987 - protein, 295 aa, Zea mays
  Coding DNA Sequence Number=SeqID_6208
  Gene Ontology: Mol. function=catalytic activity; Biological process =trehalose biosynthetic process
  Homolog annotation: Hit_ID=Q67VY4; Match level="QueryCoverage=58%, HitCoverage=34%, E-value=4e-31, Identity=47%"; Hit description =Putative trehalose-phosphatase
MRLRPTKQPGDHPRPRRRLHSGYYVAGPLGPPPSYKYAALLLLPTRIASAHISSPEKPAHSPRSLRLTAFVPSKCFVLGRSRKSPGLPPTSLPCCLGPLVKRKHMTNQDVVVSEMGIAAGTALPGSSPALLACRGAAGRRHVPAVPRPGSGGGALGQLHLGRGHARLLAHPLPRRRRRRRAHGLDGTMLTLFLSQRKHPSALGKFEQIASASQGKKVVMFLDYDGTLAPIVADPDAAYMSDVMRAAVRDVAKHFPTAIVSGRCRDKVRSFVDLSELYYAAAMAWTSMTSSCTLAR

SEQ ID NO: 47988 - protein, 119 aa, Zea mays
  Coding DNA Sequence Number=SeqID_6209
  Subcellular localization annotation: CTP_CleavageSite=27; ConfidenceScore=5.53e-01
MPFGLRLSAARARSASLVPPVSRPGPLCPTGPACTVLALPRLGAEVLSFCFLVTFLRGEYFFSEEVVCIVTTAQEKTKSWKETSRSSKTTTNSRCGLAATPSELPMKALSLLRFASTLI

SEQ ID NO: 47989 - protein, 54 aa, Zea mays
  Coding DNA Sequence Number=SeqID_6210
MNILYFLADTVGGNCTMVLCEDVVSNNKKDIDDDSTSKISLSSDELATETCPDL

SEQ ID NO: 47990 - protein, 60 aa, Zea mays
  Coding DNA Sequence Number=SeqID_6211
GKYNSFNYEDPVHFIANHPNMKGNQKADKSVYHSNRLKGKSKYTSRKHKSKERFAKVALK

SEQ ID NO: 47991 - protein, 74 aa, Zea mays
  Coding DNA Sequence Number=SeqID_6212
MSREHDKREMVTGEKPEALGKKNDEHTLLKEASDKHKEEFVGSIKSHRKGDKKKNKMKKAPQVGDEDYNFDEAA

SEQ ID NO: 47992 - protein, 220 aa, Zea mays
  Coding DNA Sequence Number=SeqID_6213
  Gene Ontology: Mol. function=dolichyl-diphosphooligosaccharide -protein glycotransferase activity; Cellular component=oligosaccharyl transferase complex; Biological process=protein amino acid N-linked glycosylation via asparagine
  Homolog annotation: Hit_ID=Q5N7W3; Match level="QueryCoverage=81%, HitCoverage=30%, E-value=3e-78, Identity=72%"; Hit description =Putative ribophorin II
MTYGAWDHNLLTSDVFFLITTLLCSNSLASFSFLSQELQYDLDNNVHYLDIAPLKIDVGKYSIVFEISLQEPEQETVYATGGRNTESVIVTGLIKVDKAEIGISDNDAGAVESVQNKCVQVFLKLRHESKVEHLFVVPGSARQFKIVLDFLGLVEKFYYLSGRYDLELTVGDAVMENSFLRPLGHLELDLPDAPEKAPRPPAQAVDPFSKLGQRIKLILR

SEQ ID NO: 47993 - protein, 308 aa, Zea mays
  Coding DNA Sequence Number=SeqID_6214
  Gene Ontology: Mol. function=dolichyl-diphosphooligosaccharide -protein glycotransferase activity; Cellular component=oligosaccharyl transferase complex; Biological process=protein amino acid N-linked glycosylation via asparagine
  Homolog annotation: Hit_ID=Q5N7W3; Match level="QueryCoverage=90%, HitCoverage=38%, E-value=5e-90, Identity=67%"; Hit description =Putative ribophorin II
MAGRRPAPVAILLLLAAAFAPISSAVRPVSDAHRSAAVELFAPSADGSFGDLESTYEAVRTFQILGLENYKSLSGKACKFAAENLASPGSTTKDLFHAVRISGALGCAVDAGVYDVGASFSGLDVATWCCGEAQGSDSGILIPCWNYTILWEVCLASRNKGHNCCFCLMQKGTFHATKALSQSDGRWRYDTASAESSTFAAGIALEALAGIVSLADAAVDPSMMGVVKNDVVKLFDTIKSYNDGTFYFDEKHVDATEYKGPIITSASVVRGVTSFAAVVSGKLNIPAEKILGLAKFFLGIGLPGSSFR

SEQ ID NO: 47994 - protein, 51 aa, Zea mays
  Coding DNA Sequence Number=SeqID_6215
MEDTSEITTARPHSGVEIVQRVMTLEAYNQKQFQQLLILHNNTSWWYKNGD

SEQ ID NO: 47995 - protein, 148 aa, Zea mays
  Coding DNA Sequence Number=SeqID_6216
  Subcellular localization annotation: CTP_CleavageSite=15; ConfidenceScore=5.18e-01
MAHTAKSSGQQGTATASSDAVLKKTQTNRRGIRWWSSPIYGGRHRGGQGRWHVGNAVGSWRSEDEAGTDLARAQGTQGVPLDGGGEHRGVVVLKEVTTSKLKTHYRRTTLLKGASIVVMKNLEKNPVQNWLSDCLELNFRVAVLWGEL

SEQ ID NO: 47996 - protein, 74 aa, Zea mays
  Coding DNA Sequence Number=SeqID_6217
  Homolog annotation: Hit_ID=Q8LR61; Match level="QueryCoverage=64%, HitCoverage=13%, E-value=2e-14, Identity=72%"; Hit description =Putative WD repeat domain 45
MSLPSYDNAKHATRECSTLTCPFWAPGQTRTMDPGYCDTAHRPLGLLKVCGVLAGEQVGTSIAKDVARMELPQR

SEQ ID NO: 47997 - protein, 69 aa, Zea mays
  Coding DNA Sequence Number=SeqID_6218
MDLLSDSKYSSLEYSESPKDSNEEDGFFISGEKTEVSRTQRLIERKQQGCTYLWAEEVPTSYPVHTTNS

SEQ ID NO: 47998 - protein, 254 aa, Zea mays
  Coding DNA Sequence Number=SeqID_6219
MWEGYPWPQGEGAAGEGGRGRGMGVGVEEGVDQTDEESSLSSPSEGVGPIEVVRGVGAISRTGSSTSSSCCCCSSSDGGTPETRLGFGGASAVAGVAMGRAKVENALLPPRHRPTPRPLASLPDPHRHRRVLLFLLRGSDRRLHLRLRRRGGLLLPCLPVLDPPDLLARRGAALDLISSGFPFLLCQVAVGAVATSSGDRVVADCGVCAICLDRIALQETALVKGCASDHVMWLLGVGGRDREVGRAGGGGSLH

SEQ ID NO: 47999 - protein, 239 aa, Zea mays
  Coding DNA Sequence Number=SeqID_6220
MNTTDQAKDGGKKSFEVPSAREKVKEAEEPKAKGEEEGMQSQGQDSAQSGTPDSVRCARLNSGEQAALGRSLATYGYNSPDCPVVHRTVCVWCANGSRTAMVDCSIYGRKSGTGQCPVVHRTVRLPYGPYPEGDSTDVGDDRGKQVKPRAEEGTSKGKALVAATRKRKLGMGDDETGPRAYGIFVEELMGICAVPGEVMSLPELRETSSRMLKRWRKITRTLSGRSVRPPSASGPTPRS

SEQ ID NO: 48000 - protein, 108 aa, Zea mays
  Coding DNA Sequence Number=SeqID_6221
MATAQTGCVVKGLLVLIPFHHLKLWKRHITMRAQDSRGEIRQPFDVARRHIKPKLPPVTPFILRTRNNLDHFSQSLSSPRSTTIAESLIVFSDDVAVEDAVSVDDDEE

SEQ ID NO: 48001 - protein, 124 aa, Zea mays
  Coding DNA Sequence Number=SeqID_6222
MGEKEKWRPSLLHHVGRRIGDGVIGHGRPGALAAWPARQRRGATARPRAALREEARHRGWGPRVRVRGRKSPGGDYWASTGLFWPGRAARVLQKWGKLLMNEYTEKDVTPATAVTDRLKSENEN

SEQ ID NO: 48002 - protein, 265 aa, Zea mays
  Coding DNA Sequence Number=SeqID_6223
  Gene Ontology: Mol. function=RNA-directed DNA polymerase activity; Cellular component=membrane; Biological process=RNA-dependent DNA replication
  Homolog annotation: Hit_ID=Q7F805; Match level="QueryCoverage=67%, HitCoverage=23%, E-value=1e-44, Identity=40%"; Hit description=Oryza sativa (japonica cultivar-group) genomic DNA, chromosome 1, PAC clone:P0433F09
MDLIDSKRKHFLWAGSERLTGGKCKVSWNRATRPKKHGGLVILQLGNFSWALRLRWLWQEAKMLTSQRMGKNRSIQEALSNNSWIHDLNFHHDDFSSTHLHEYCHLWVEVNRVRLLENTPDLTQWKLTPSGQYTARSAYQAQFVGSTLTNFNNIIWRVWAPPKCKFFSWLAVQNRLWTADSLRLMASPSPTEEFSREAARQSLIAISESTPETPSPQTVRTPPISSAENGKPGDGADKFRSKLMSITDLSSDAQPAQCPPEDVAA

SEQ ID NO: 48003 - protein, 327 aa, Zea mays
  Coding DNA Sequence Number=SeqID_6224
  Homolog annotation: Hit_ID=Q2R3Q9; Match level="QueryCoverage=21%, HitCoverage=16%, E-value=3e-23, Identity=73%"; Hit description =Transferase family protein, putative, expressed
MENANLDLIAISRVTKARMVTLGRRRRLWRASPPGGGGHGRRCPRVWRAPRAAVRGSGDPPVHTFPHHEFAEIPDVSDTAALYGAQELQYRSFCFDPDRLERVRGLTLADGALGRCTTFEALSGLVWRLWRLRRASGAAAARCAGGGTDAGGSADAGGGADAGGGADVGVRAAARTSTRDVGALCGRRRRTGGGGAVVGGRQRQTCHGGGVLVEAVRRRFTAFTWSCAGIMVPARARNSVHALPGSHVGSPLTLMSLHVYGLPLKADADSVRAGCRAMRVNSSAGGGGGDADAEHLPRWGRALSKQQQKLSPEPPVGMGTQFLLRGR

SEQ ID NO: 48004 - protein, 86 aa, Zea mays
  Coding DNA Sequence Number=SeqID_6225
MGAAAASSGECGGGQEEFGGDVKKLREQFGRIFAADRGSKIYGADPLELDTSAATYENDGGKEGGATMRCLGANDDGAEQRVHFLK

SEQ ID NO: 48005 - protein, 208 aa, Zea mays
  Coding DNA Sequence Number=SeqID_6226
  Homolog annotation: Hit_ID=Q8LHP0; Match level="QueryCoverage=44%, HitCoverage=83%, E-value=1e-32, Identity=76%"; Hit description =Transcription elongation factor 1 homolog
  Pfam annotation: Domain name=Elf1; Domain location=8-69; Score=66.3; E_value=1e-16; Accession=PF05129.4; Description=Transcription elongation factor Elf1 like
MGKRKSAAKPPPKKRMDKLDTVFSCPFCNHGSSVECRIDMKNLIGEASCRICQENFSTTVNECVKNRITSKLKLDTTLYIALTEPIDIYSEWIDECERVNTVEGDDDAWCISVFSVRCFSEGCSFIGLLGKENYAAVTRCRCVPTIQFGFMDGLSSVLPGTVVGAAVRMFQVSAWRTGRFGNFGTAEYWRRAIALPSRNILKKRFTFK

SEQ ID NO: 48006 - protein, 81 aa, Zea mays
  Coding DNA Sequence Number=SeqID_6227
MAPQLAAAGPTLYAPRFGTALPCRARTRKPVSRRRAALPKDEDYYLIDADESIGDGFSFSGGESGTWASSGLYQSGSIRID

SEQ ID NO: 48007 - protein, 106 aa, Zea mays
  Coding DNA Sequence Number=SeqID_6228
  Pfam annotation: Domain name=RNA_pol_Rpb4; Domain location=7-87; Score=-2.1; E_value=0.034; Accession=PF03874.6; Description=RNA polymerase Rpb4
MGHDIPPNSRMLMNCEAAELLQEIHEHMAILSEDPKIKIPEPLKKCGVSDGEICMIANIGPETVEEVYALVPSLKDKNLLVQANRSAIEGSVTEVLTALANIKAAK

SEQ ID NO: 48008 - protein, 164 aa, Zea mays
  Coding DNA Sequence Number=SeqID_6229
MGTLGQDLTLRQVLNQGGFRKHSPSWEEPFKVTEICRPKGDHLATAEGVPLPNLWSISPKFASNLHKVGDHPFLRMLEEEAGHQLMWKTEPQPNSLSTTARLMNILEAKHLWKGATPTGPCTSSKRKARSATPTRWEVEDRKHELSRGKFVEEDGAGANPSAKR

SEQ ID NO: 48009 - protein, 256 aa, Zea mays
  Coding DNA Sequence Number=SeqID_6230
  Gene Ontology: Mol. function=transporter activity; Cellular component= integral to membrane; Biological process=auxin mediated signaling pathway
  Homolog annotation: Hit_ID=Q5JLM1; Match level="QueryCoverage=98%, HitCoverage=64%, E-value=5e-86, Identity=69%"; Hit description =Probable auxin efflux carrier component 6
  Pfam annotation: Domain name=Mem_trans; Domain location=9-247; Score=- 22.6; E_value=1.5e-06; Accession=PF03547.8; Description=Membrane transport protein
MIGWGDVYKVVAATVPLYFALFLGYGSVRWWRIFTREQCDAVNRLVAFFALPFFTFEFTLHTDPFQVNYRAVAADVISKAVIVGVIGCWAGSRVGSAGKGKGAVGWSITGFSLSTLTNSLVVGVPMARAMYGEWAQQLVVQLSVFQAIVWLTLLLFVLETRKAAIGMYVVPGGAADSDGGVPDSPVKDKDVEAAAGDRRPAAGPAAAATVVVVVPVKPSLWALIKVVAHKLSRNPNTYASFVGITWACVANRYGVF

SEQ ID NO: 48010 - protein, 101 aa, Zea mays
  Coding DNA Sequence Number=SeqID_6231
  Subcellular localization annotation: CTP_CleavageSite=92; ConfidenceScore=5.57e-01
MGGAARSHGSPRAGVFPISRSKALNPNSTHYMTLEKAKRMDAKSSRRRRTQAVLDGAQLRRNSQLRRRIPTATACPTSITPSQRQCNQRKPRMAKLEPELH

SEQ ID NO: 48011 - protein, 69 aa, Zea mays
  Coding DNA Sequence Number=SeqID_6232
MTKVMLAEGVQSSRNGNRDLFLCFEESKIKSWRSSDLVAFGAIYAQVNKKEKDVEADLQEFQDFDEFKD

SEQ ID NO: 48012 - protein, 82 aa, Zea mays
  Coding DNA Sequence Number=SeqID_6233
MAAHIDFGERLRGQQGRKREIKGMGGVPVGAKAKTPPFARCLRRNRRINRDKTTGRLTLCPTRPAWPLRVTGLICKGIPEST

SEQ ID NO: 48013 - protein, 146 aa, Zea mays
  Coding DNA Sequence Number=SeqID_6234
MAMEEMELLRRPWTWSSPRSAQGAPARRGTSGGERSSAVAAGGARLGREHGDGAGFYGEEGEDAMTVGRAPCWPPWGRRQGVGGSRPALGRRRKRVAAEKFRGVGVQNNQVQGERVRIYRHEVGLGFLSGPIGLGWAGPKHLIGLC

SEQ ID NO: 48014 - protein, 39 aa, Zea mays
  Coding DNA Sequence Number=SeqID_6235
MQAIACQFFSFPGCGGCYLRCFFSISGAISGGRDFVQRN

SEQ ID NO: 48015 - protein, 62 aa, Zea mays
  Coding DNA Sequence Number=SeqID_6236
MGSRHSACSAEAGCRDDDDDDDNAGFYCDYDYGFLVFFPFGKGKEGVEADLQGFQDFDESED

SEQ ID NO: 48016 - protein, 218 aa, Zea mays
  Coding DNA Sequence Number=SeqID_6237
MRLTIVTQKVIKDKERKHGLTHARKEKQTTWDCGVQVGPTHGFAFDFFSVERHARQAVLPARGRGRGRGFGLGSGAWRVLEMATPARLLLQGPRRALAAGGWPGRLGWGRPPRAPRWLCRQAAAPTGRRGLDHGNAERGMEEREKKGIPHLRTTNDGPSAQGRRRFWTDAPGSPDTGSYCTDVDGETRSILAAEQHAGKRLSARGLAAAGMRLGRGRR

SEQ ID NO: 48017 - protein, 134 aa, Zea mays
  Coding DNA Sequence Number=SeqID_6238
  Subcellular localization annotation: CTP_CleavageSite=65; ConfidenceScore=5.15e-01
MAMGTQNSNPMGFYPIRVFVVARFGKGCTLSTVAVVLLKLPLVPRPSQYHFYVDFLRTVGRFAPLQSKPTENPASSLHLHAKKGSCHYRSVAPALHPVPAGRPPARQRHRARRRRVAHKFAGLEEAIHAAYVVA

SEQ ID NO: 48018 - protein, 313 aa, Zea mays
  Coding DNA Sequence Number=SeqID_6239
MAENTHGSGRHVLGDLTNVICKRAATSDLEKSTGGIKIRRIEKTGTRKEYDANAKASSIGKGIVFGHLFDDVAREKFQSHSIFQNSRVQHIAAEAAGLLSKEANDSKNHYASIGPLDLSDKEQDSSLESEDDYDDEDNDETNGELLHHFFSSELANKMSTNDGECLTQEEIVGSSGNQKPLSSLDATTGGDLPISSAQHASVRTGGLEEAVAPKSCACSFCLKVLKKSIKFARSLEEKCRGNEYAANVAGYESKRAVGVEFELSQQQRSLFLYTENALVRESTQLHSAFVKLKELRENCKTDLETLSNSSMRK

SEQ ID NO: 48019 - protein, 84 aa, Zea mays
  Coding DNA Sequence Number=SeqID_6240
  Subcellular localization annotation: CTP_CleavageSite=17; ConfidenceScore=5.01e-01
MAMYRRRRRAVCLTWARSPMNKSKEGRRAGERFQNARVSRRAESTLVKSLPLSFDRSAYALEISTSFLEVEDSLGAPVGVAPEL

SEQ ID NO: 48020 - protein, 144 aa, Zea mays
  Coding DNA Sequence Number=SeqID_6241
MGKSKKGRSSSHHSSDKRKREPSPPSKDFGDSEYSEEEFSSESEGLPAYASPPVLSDDSDDSQGIAAEVWTYIRAVERSGLKGSEESDISSDEEDSSDSSEEGSGSDGDDEGDGGDKGDDGKGDGGSGKDDGDSGRASGKASLA

SEQ ID NO: 48021 - protein, 138 aa, Zea mays
  Coding DNA Sequence Number=SeqID_6242
  Gene Ontology: Mol. function=amino acid transporter activity; Cellular component=membrane; Biological process=amino acid transport
MRLRRDAIERAIRAPLGIVRRDHALVHLLSAAAARLRLVHPSWAWALASPSTSSPTPLWRAASWCTSARIPVPGLPQGFNQVDLVTVGVILLSVCICYRSVATVDCYLLYCGISVPKIISAVEGAVGLGDHGRAVKDS

SEQ ID NO: 48022 - protein, 679 aa, Zea mays
  Coding DNA Sequence Number=SeqID_6243
  Gene Ontology: Mol. function=nucleic acid binding; Cellular component= nucleus; Biological process=DNA replication
  Homolog annotation: Hit_ID=Q6YZ49; Match level="QueryCoverage=99%, HitCoverage=99%, E-value=0.0, Identity=68%"; Hit description =Replication protein A 70kDa
  Pfam annotation: Domain name=Rep-A_N; Domain location=5-109; Score =113.0; E_value=8.3e-31; Accession=PF04057.3; Description=Replication factor-A protein 1, N-terminal domain
  Pfam annotation: Domain name=Rep_fac-A_C; Domain location=521-670; Score=253.7; E_value=3.7e-73; Accession=PF08646.1; Description =Replication factor-A C terminal domai
  Pfam annotation: Domain name=tRNA_anti; Domain location=255-332; Score=40.5; E_value=5.6e-09; Accession=PF01336.15; Description=OB -fold nucleic acid binding domain
  Pfam module annotation: Pfam domain module=Rep-A_N::Rep_fac-A_C::tRNA_ anti; Domain location=5-109::521-670::255-332
  Subcellular localization annotation: CTP_CleavageSite=74; ConfidenceScore=5.10e-01
MAAAKLTGNAVAAAMAGDTNLKPVVQVVDLRSIAVTGAPGSGPRFRAIISDGVATGHALFASQLCDLARSGVVRRGSVVQLLDYIVNNVGPTRNRNLLLLSCAGPFITSCIIGVADTVMAIVILNMEVLVAECEIIGNPALPPESGDSSSNSLRADQFNGAPPNGSMAGSTLNKVIKPSDNAPVIQRSMTGNSLNMVPRPSDNAQVFQPTVQPSYRPAPKYRSHGTIMKNDAPARIIPIPALNPYQGRWAIKARVTAKGEIRRYHNAKGDGKVFSFDLLDTDGGEIRATCFNALVDRFYEVVEVGKVYVVSRGNLKPAKKDYNHLNNEWEIFLEPQSTIELCLDENSSIPAQRFSFSSIDKIENSENNAIVDVIGVVTSVNPSTTIQRKNGMEAQKRTITLNDMSGRSVELTMWGDFCNREGSQLQEMVECGAFPVLAVKAGKVNDYSGKSVGTISSSQLHINPDLAEAHSLRQWFDCGGRDASTQSISRDFTPSASWNEVRKTVAQIKDDGLGMGDKPDWVTVKAAISFIKTDSFCYTACPNVIGDRQCGKKVTKSDSGNWLCDKCNQEFPECDYRYLLQLNIQDHTGTTSVTAFQDRGQEILGCSARELNIFKENKDPRYTDVLINCLYQNYLFRLKVKEEQYGDVRQVKNTVAKVERVDPLAESKFLLDSISRFIP

SEQ ID NO: 48023 - protein, 61 aa, Zea mays
  Coding DNA Sequence Number=SeqID_6244
MALRCALMALHDVSSVRDVGALLLHAGKQAFHHGTTGPLNAMWVPEPPPPSSGGTVAEVVS

SEQ ID NO: 48024 - protein, 982 aa, Zea mays
  Coding DNA Sequence Number=SeqID_6245
  Homolog annotation: Hit_ID=Q6ZGD1; Match level="QueryCoverage=96%, HitCoverage=97%, E-value=1e-168, Identity=60%"; Hit description=DENN (AEX-3) domain-containing protein-like
  Pfam annotation: Domain name=DENN; Domain location=665-829; Score= -87.2; E_value=0.089; Accession=PF02141.11; Description=DENN (AEX-3) domain
MVDKNDGSEGIKFNTSNLIQTTEEVARAFIAAASAATAQSARTSVVYSSKDESGSPMQKLQQHFSKIMKGFSSAPDLSGTYNPEVLTTQKRQWSRYQMKSLVTTFRRLEFIAGMGIRSGSEIHREQASGRRKKGDRCIREPSHLFESIVIVGLPPHADIQELENIALGRNDEDGKRSKNLFGNSHHQVHAITNLEPQVLFAYPPEKPLPLKYKDTLSFCLPGGVQLAVRWGELVPTPVTWKVSVAWWATSSLRKGGSIVLASGSIRFFGRSVSGCIDMGAQSSVLRRFYGCGCGGHCGGWSDVKSVPVKVSACGGMTVAERAVREAVVALRSAVCGGVLQWCSGDSVLGCLFGGGGFHSWSCFCGSKAVMVSRLAMLLPFLLYILHAFSSLDFMFLMAYRLQVHAVERTPSFSELNEILLGQEQLKESNQSFVFRLQSILMEERLEWLTDGVSMLTSLSLEESCENDICEGTAVTAQKHYLDSNTTDVDKSSESSNGVSSTELSDTDSSSGCRENQLDFVSKEQQQNSSCEEQSNFKREIVTCSDASEVSDHFVPEDTSSDQSGVKHHELHSAPSIPDESGARNCDDSPKENVDDEELDLFIIDTILPLMRSRLCEDCESSPSSQGSPSEGRNFDTQESDSEEPSSIGDGDLVKHNNILQWAKAKKYGSLQVVCQYYQLQCPARGSTLAFHPLEHLHSLSFHRPGETVLHIAGSTIELRSRDTSLEVAEMRNALFAEEESTALSTWAVASICGCLRLEHTHSLNLLKYSFCTENTIKNPLYHKKANIVLPNDMMDFLDAPVPYIVGVQNKTSDVLNRLTNAVVIDANRNQVLVTVNGEEIGLTLDFVLIKSSSVPQLPQHRELLSALRPYHSILVGESYLARKRPVYECTDAQVEGAKGFLAVLRDYLDTLCSNLRSHTITNVQSNNDKVSLLLKESFIGSFPSRDRPFMKPLDVELNCTYRQLSVCAKSSKEKPYTVRKKW

SEQ ID NO: 48025 - protein, 223 aa, Zea mays
  Coding DNA Sequence Number=SeqID_6246
MGAWQEQTGRAVQHAGGAYDVCEVSEARRARAAARPVSALDVILHMYRSVSGTVLRRHRLPALRRPFTAVTACRVRAAESAVSAAAAVPACSAGCSRATRADRAPAALTVASHPPTARSTRPAAGTDGDAATACSEKGRAATLAGVRRSPRVDVDRGRALPLCQCHQVQQEEERRGGPTVPVRIISILTATLQAADIYTCMFNTDSLRLSTTVTSKAVSNNDR

SEQ ID NO: 48026 - protein, 117 aa, Zea mays
  Coding DNA Sequence Number=SeqID_6247
  Gene Ontology: Mol. function=polyribonucleotide nucleotidyltransferase activity; Biological process=mRNA catabolic process
  Homolog annotation: Hit_ID=Q69LE7; Match level="QueryCoverage=80%, HitCoverage=7%, E-value=2e-20, Identity=60%"; Hit description =Putative polynucleotide phosphorylase
MPQAYLCEEVGSWREEEELFAEVDVKLVFKEISSKYLRKRIVEQLEANATGENSAMPKHDIKETNKGGKRSDGRSPWELWPINSQRGLPPRAHGSALFTRGETQGLHEYLAKLCSIL

SEQ ID NO: 48027 - protein, 118 aa, Zea mays
  Coding DNA Sequence Number=SeqID_6248
  Subcellular localization annotation: CTP_CleavageSite=56; ConfidenceScore=5.08e-01
MDGSDLGLYDTASHGDAPASAPEDGRRACGRGAGFVHACPGSRVVTWTAPTGSSTNGAATGSATERHGPRTAGACGRRFAVSQICYVPAGQTRAGPQALLSVSSAAIRATFSSICMRG

SEQ ID NO: 48028 - protein, 278 aa, Zea mays
  Coding DNA Sequence Number=SeqID_6249
  Gene Ontology: Mol. function=hydrolase activity, hydrolyzing O -glycosyl compounds; Cellular component=cellulose and pectin -containing cell wall; Biological process=carbohydrate metabolic process
  Homolog annotation: Hit_ID=Q1RTS8; Match level="QueryCoverage=88%, HitCoverage=44%, E-value=9e-97, Identity=66%"; Hit description =Glycoside hydrolase, family 1
  Pfam annotation: Domain name=Glyco_hydro_1; Domain location=27-277; Score=79.9; E_value=1e-22; Accession=PF00232.9; Description=Glycosyl hydrolase family 1
MTRLLLLSLLLSVAAGAYDGAGQPPISRRSFPEGFIFGASSASYQYEGGVTEGRRGPSIWDTYTHQHPGMFCFFEKKNIFLPPSHANKIIDRSNGDLAIDSYHLYKEDVRLLKDMGMDAYRFSISWTRILPNGSLSGGINKEGIRYYNNLINELLLKGVQPFVTLFHWDSPQALEDKYGGFLSPSIINDYKDYVEVCFKEFGDRVKHWITFNEPAAFCSTGYASGVLAPGRCSPWEQAKCSAGDSGREPYTVCHHQLLAHAEAVHLYKEKYQVRDGLG

SEQ ID NO: 48029 - protein, 302 aa, Zea mays
  Coding DNA Sequence Number=SeqID_6250
  Homolog annotation: Hit_ID=Q8LAY6; Match level="QueryCoverage=16%, HitCoverage=15%, E-value=7e-08, Identity=58%"; Hit description=Major intrinsic protein, putative
  Pfam annotation: Domain name=DZC; Domain location=159-195; Score =63.1; E_value=8.8e-16; Accession=PF08381.1; Description=Disease resistancezinc fingerchromosome co
  Subcellular localization annotation: CTP_CleavageSite=68; ConfidenceScore=5.07e-01
MHACFHGGGGGNSRITKSVGFIVKSMKALSLLKVKTAGDGHPHAPRRRRRRHRRRSPEADELQDKDVAAASSSASSSAKIAPAQPHEAADGDLRRDRLPQDEELRRQGGAKHGHCDKCCSPLEDDDEEAAAGTADAAGDGEWAAEPEPGVLMTLWPRGDGSNYLRRIRFSEEYFGDAWAAQTWWADNCDRIVELYSVVVQPEHPSQDGDDDDDDDDPAAPVTPCQSEDDEHQRQDGAGDLDYSASCSASASGGSTSNFSGPSSGSGSGSANKVDSPILGLVTEADSITRTARPQHSHTATGQ

SEQ ID NO: 48030 - protein, 178 aa, Zea mays
  Coding DNA Sequence Number=SeqID_6251
  Subcellular localization annotation: CTP_CleavageSite=3; ConfidenceScore=5.11e-01
MAKADARTRGRAASHVPTPTWAQRTEALTHVLTHPSHAPSLQSQLFLASRVPCPPRGLGSTTSYPPFLCPGASLLRWALASVFLPRAASLCLPPSSWRSRCPFQLPPPVVPSAAIEPAPERWADSELRAYARRRRERRGPLTVRPPVAVVGVVLTTVPNVVIVVAFVKEYFWGRTSRI

SEQ ID NO: 48031 - protein, 389 aa, Zea mays
  Coding DNA Sequence Number=SeqID_6252
  Homolog annotation: Hit_ID=Q76DY3; Match level="QueryCoverage=19%, HitCoverage=21%, E-value=6e-32, Identity=81%"; Hit description=AG -motif binding protein-1
MREQSLLEATCGDLFDHIDDLLDFPKEDSAADVLLLDAPAPGSPLSSARIIDVGRAGSAPAPPALAPSLPAQQDTTAFFAAAGPDVFDPRDVGAHLGSCDDIDMDMDMAQLEWLSGLFDDASIPHEPAFPGAAPIIKSSALAAGALLPPDKMEDALLFRSSSPISVLEHGSFNNANGGGGGCSASSESSSASSSSESFSGSGSGSGEGHAWSAPVSPPPVLVIPARARSKRSRPSAFTRAGAEAPTILVPTPMYSSGPSHSDPESIAESSPHPAPPMKKKKKAKKPPAPPRARLFRRQRRRRRLRGRRRARGAAGRRRQEVHALPDREDAAVARGAAGAQDAVQRLWRALQVRPPVPGVPSRGEPHLRAVHPLQLAQEGGGDAPEGCPE

SEQ ID NO: 48032 - protein, 41 aa, Zea mays
  Coding DNA Sequence Number=SeqID_6253
MESAFKQMKGEFVGLLIRREVMQGSCKMTNKQHELDYEKVP

SEQ ID NO: 48033 - protein, 935 aa, Zea mays
  Coding DNA Sequence Number=SeqID_6254
  Gene Ontology: Mol. function=protein binding
  Homolog annotation: Hit_ID=Q948G6; Match level="QueryCoverage=88%, HitCoverage=87%, E-value=0.0, Identity=68%"; Hit description =Putative epsin
  Pfam annotation: Domain name=ENTH; Domain location=23-146; Score =234.0; E_value=3.2e-67; Accession=PF01417.11; Description=ENTH domain
  Pfam annotation: Domain name=Extensin_2; Domain location=339-732; Score=-132.7; E_value=0.04; Accession=PF04554.4; Description =Extensin-like region
  Pfam module annotation: Pfam domain module=ENTH::Extensin_2; Domain location=23-146::339-732
MKKVFDQTVRDLKREVNKKVLKVPGIEQKILDATSNEPWGPHGSLLADIAQATNNYHEYQMIMHIVWKRVSDTGKNWRHVYKGLIVLDYLVAHGTERVIDDIREHAYQISALADFQYIDSSGRDQGSNVRRKSQSLVSLVNDKERIQEVREKALSTKDKYRSAFAPSGRSPGGYGGGYDNDRYEGSYGSRYDNRNGNGRGDYGYRDDDRYGGPGGTPNREGDRYSRDSNERYGRDYREDEYKGSHSNHEYAEGAGRRSYGQERDSYGDGEAYSSRGRGSNADDPTQDDRPIERKLSNQQISSPPPNYEDVTRDGQDNLHDDRNGGSVPAAVSRVPSPSVPATTVPAVQVNGVHDSTVEDVPAPPTAHAEPNGFDEFDPRGSVPDSSPPVNPASVANSLEMDLFGSDPISSLALVSVPQPTTTSNVEAPANSGFETNSFVGMPPASTGFGEIDASNPFGDPTPFKAVLDESPALPQTHAAPAGSFQPTGPGTDVNPFQPASAASFGFGDTLGDLTFAPNAAPELQDMFANTASLPSEVAPANPSVVLQQPVPTNFSSQVSQPVAGTLHAAPTAFAPSQAPPTSFAHSQAPQAAPAFSYSQGPHPGAAIQSQFPQTVAPSFPPSQVPQSVTPNLPPGQSNFFLQSASGSGIDSLSGVPTQNGAPSYIPPQNSQFTAPANQQPLQPSFIPQTSTPALQPALISRGASQPLGVPNSVPTSGSFPLQSSSSAPPETIVSALQVNQTEPVKKFEPRSKLWSDTLSRGLVNLDISGPKANPHADIGVDFDSINRKEKRQEKKINQAPVVSTVTMGKAMGAGSGIGRAGVGAMAPPPNQMGAGRGMGPGAGAGYGGGMGMNRPMGMGMGMNQQQMRMGMNQQPMGMGMGMNQQPMGGMNMGMGMNQGMPMRPPMGMGPGGMPGAGYNQMGAAYGGQQPYGGYR

SEQ ID NO: 48034 - protein, 165 aa, Zea mays
  Coding DNA Sequence Number=SeqID_6255
MGLGVCGSLYQAWVAMRLVVLGFDSGNASPPQPNRILAEYVDVYSPLLYTPNRPPHPQVVSIATTAQEKIKPWKETIRSSKIMMSSRRGDSDRGDDKKGKRREKKRYHKKRGGDAHVCREWDSDESSTDSSSDEDAANIAVTKGLIFLKVPFDPGTGSGCRLEGG

SEQ ID NO: 48035 - protein, 328 aa, Zea mays
  Coding DNA Sequence Number=SeqID_6256
  Homolog annotation: Hit_ID=Q6ZGD1; Match level="QueryCoverage=93%, HitCoverage=15%, E-value=2e-31, Identity=75%"; Hit description=DENN (AEX-3) domain-containing protein-like
MGIRSGSEIHREQASGRRKKGDRCIREPSHLFESIVIVGLPPHADIQELENIALGRNDEDGKRSKNLFGNSHHQVHAITNLEPQVLFAYPPEKPLPLKYKDTLSFCLPGGVQLAVRWGELVPTPVTWKVSVAWWATSSLRKGGSIVLASGSIRFFGRSVSGCIDMGAQSSVLRRFYGCGCGGHCGGWSDVKSVPVKVSACGGMTVAERAVREAVVALRSAVCGGVLQWCSGDSVLGCLFGGGGFHSWSCFCGSKAVMVSRLAMLLPFLLYILHAFSSLDFMFLMAYRLQVHAVERTPSFSELNEILLGQEQLKESNQSFVFRLQVAHD

SEQ ID NO: 48036 - protein, 353 aa, Zea mays
  Coding DNA Sequence Number=SeqID_6257
  Gene Ontology: Mol. function=sugar binding
  Homolog annotation: Hit_ID=Q6K3F6; Match level="QueryCoverage=97%, HitCoverage=95%, E-value=3e-72, Identity=54%"; Hit description =Phloem-specific lectin-like
  Pfam annotation: Domain name=F-box; Domain location=4-51; Score=22.3; E_value=0.0017; Accession=PF00646.23; Description=F-box domain
MAESAIYRLPEECVAYAISLTTPGDACHSSAVSPAFRAAADSDAVWARFLPPDHADILARADDPGAVTAGCASKKELFSRLCDSPVLLDGATMLAAATAANCVRVVCMRKQSFGAGEAERRQVLHDVGEGAQQEKRPFRAGRGPLARQDSGGPLFFFCITTHTNHVTDRPIRFPEVVKLQDVCWLEISGKLSLSLLSPGTTYAAHLVFAIADDSYGLECHVGMPALKATVTVTVSGKTTMAEHDICLHHMQGEAEAAAHRRTQQYVRLRRGYGGGGKATVLTTTREADPDIRCPRRRGDGWAEVEVGEFAVAGDEGDAADVEVTVQEDSLRWKRGLVVLGVDIRPKQHTPTPC

SEQ ID NO: 48037 - protein, 56 aa, Zea mays
  Coding DNA Sequence Number=SeqID_6258
  Homolog annotation: Hit_ID=Q6K3F7; Match level="QueryCoverage=82%, HitCoverage=6%, E-value=3e-16, Identity=87%"; Hit description =Putative translation initiation factor eIF-2B epsilon subunit
  Pfam annotation: Domain name=W2; Domain location=1-55; Score=16.8; E _value=0.00016; Accession=PF02020.8; Description=eIF4-gammaeIF5eIF2 -epsilon
ILPYVYDTEVVSEDANLRWAEEKKHADESDKVFVKQPEAFIQWLKEAEEDDDDGEE

SEQ ID NO: 48038 - protein, 565 aa, Zea mays
  Coding DNA Sequence Number=SeqID_6259
MATAATVKAEVEGLGCGDGSPHKHVKPMPQPPPQPPPPEAGCKPGCLQPLTKSRTRLTCPLWTMSAKFLEVLRLQLYKGLSSFSDLHLNWLQDLPFDVLDGPSPLGLRLRKSRSLVDLIQCKLFQDKSAHEQFDGHNNVSDTPMKKEVRSGAPTAGERMKASNFPANVLRIGSWEVKNFQFPLFLRTREFPKQLFCSFPKQPHLNTNNISEQYISHYEGDLVAKCYFAKHKLVWEVLHNGLKSKIEIQWSDIIALKATCPENEQEGVLDLVLARPPLFFKETDPQPRKHTLWQAASDFTDGQASSKRRHILRCPSSLLSRNFEKLIQCDQRLRELSQQPAAILQNPGFEPKRSIFQNPNESKDCLDIGGLKFEHKATLPKFTAPLSTRVFSSLSNNVGRPINIGFGAGHFGGNVPEESKNCNQWNQLIVPGLEALQGDERSAGGPPLTTNDAISKKAWEDLVQHLFSDTPSLPALDDNNLTSRVDSLYSLLEKDTAPPAMRDPECSSDGGDIGAIQVDSDGFKGRLDPSPPGISRNDSLDELLLNLPKIASIPQFLFNRTEDSDE

SEQ ID NO: 48039 - protein, 166 aa, Zea mays
  Coding DNA Sequence Number=SeqID_6260
  Homolog annotation: Hit_ID=Q9LRE6; Match level="QueryCoverage=49%, HitCoverage=7%, E-value=2e-11, Identity=46%"; Hit description=DNA polymerase delta catalytic subunit
MEKLLAAWRLWTSLCVDVEPGLFARACVVAHGLQLDVAALNAVGWAGESPSWPAMFDRAAVAEVELATPHPAPSSRDSSLPQLPHPAIPVVQMHGAFHPSILAEDVFLDESILAEDEAALLMLQCDEALTSRLAQWKRTTIPTNLAARCSCAVDSSTVLKSVDLGY

SEQ ID NO: 48040 - protein, 58 aa, Zea mays
  Coding DNA Sequence Number=SeqID_6261
MEGIIHGKQAVGGEDAGAAGSRGTCYMDYKRERVKQPKKEENSQREFSTPSFLHKHML

SEQ ID NO: 48041 - protein, 239 aa, Zea mays
  Coding DNA Sequence Number=SeqID_6262
MAAVAGTERVDDAAERRRRARALLDATTPGRSLAVGRCKLALETFRSDRDGGLEEARTLLGDALVCSNVHHPAIYRAWIGMELEAGTDASGVRELFEGWHIWYLRSAFKNGDDEENRRPSQDEGGFWCHYIDFELRHGTAARVRCVAERAVATCPRDPAVHAKYAKAELRLGCPDRANAVLLSALDAFAADAGTREWLEKEVTAYRDSIGHGSWRRLRGLLSLCRRSRPAPGYELLGVV

SEQ ID NO: 48042 - protein, 89 aa, Zea mays
  Coding DNA Sequence Number=SeqID_6263
MAYLGGQQAPHCEGQSQRGRELSAEGKLAMRGSSTRRASSLWKRYQRGGQARCGRELSGTQHAATRAAAFVRGDDVVHKLFTDLAYRYS

SEQ ID NO: 48043 - protein, 82 aa, Zea mays
  Coding DNA Sequence Number=SeqID_6264
MAERRRQGLCYNSDKPFVRGHHYQRLFYLEVTTDNDGVAAEEDHPPSYMGTGGDIEDLLSTFQLEEDELFLEAGRDVMIGIQ

SEQ ID NO: 48044 - protein, 440 aa, Zea mays
  Coding DNA Sequence Number=SeqID_6265
MAQPACEAVMNWFTSAGMADLIQGPNMQPSERIMMMRETYPLSMSLLSGLSINLCLKLAYQLEETIFLGQAVPSIAMVETYVRLLLIAPHSLFRPHFTALTQRSPSILSKSGVSLLLLEILNYRLLPLYRYHGKSKALMYDVTKIISMIKGKRGEHRLFRLAENLCMNLILSLKDFFFVKKELKGPTEFTETLNRITIISLAITIKTRGIAEVEHMIYLQPLLEQIMATSQHTWSEKTLRYFPPLIRDFLMGRVDKRGLAIQAWQQAETTVINQCNQLLSPSAEPNYVMTYLSHSFPQHRQYLCAGAWMLMNGHLEINSANLARVLREFSPEEVTANIYTVVDVLLHHIQCEVQRGHLAQDLLSKAITNLSFFIWTHELLPLDILLLALIDRDDDPYALRLVRDEDIDEDFSLKKLRSKKGGGSDTKHLAFYVTRGYYRS

SEQ ID NO: 48045 - protein, 321 aa, Zea mays
  Coding DNA Sequence Number=SeqID_6266
MGNSLGGKRKGAKVMQLDGTSFRVKPPAAAADVLRDHPGFQLLESEEVKLLGARARPLASDAPLRRGRLYFLVALPRRAPAGPMRRAWSGNLNVGARERLESLKLARRSTSDLSSLSAHASASAPTSPLPGGAASPLPPTGSGATPVRVKMRLPRAQVEKLMGESKDPAEVAAKIMELCGAAVCDAHASARVIPERPPGILRSQRFAKTPEWGAGFMLPAAAAAKTPQRWPTLPRTNEVPLCLSPTYIALLFVPMRREHKITNKLACVVKLLFSAHNGEQRTYKCAGCRNMIDFSSGIWRCFFDKKEDTISVILSVKRTHR

SEQ ID NO: 48046 - protein, 401 aa, Zea mays
  Coding DNA Sequence Number=SeqID_6267
  Gene Ontology: Mol. function=acyltransferase activity; Cellular component=integral to membrane
  Homolog annotation: Hit_ID=Q5Z7E7; Match level="QueryCoverage=99%, HitCoverage=99%, E-value=7e-97, Identity=75%"; Hit description =Putative very-long-chain fatty acid condensing enzyme CUT1
  Pfam annotation: Domain name=ACP_syn_III_C; Domain location=291-373; Score=16.4; E_value=2.8e-07; Accession=PF08541.1; Description=3 -Oxoacyl-[acyl-carrier-protein (ACP)
  Pfam annotation: Domain name=Chal_sti_synt_C; Domain location=232 -375; Score=9.2; E_value=0.0003; Accession=PF02797.6; Description =Chalcone and stilbene synthases, C-te
  Pfam annotation: Domain name=FAE1_CUT1_RppA; Domain location=69-275; Score=168.5; E_value=1.7e-47; Accession=PF08392.2; Description =FAE1Type III polyketide synthase-lik
  Pfam module annotation: Pfam domain module=ACP_syn_III_C::Chal_sti _synt_C::FAE1_CUT1_RppA; Domain location=291-373::232-375::69-275
MSMGSPVQLRRLKPLYQLVVNNILAIVAVPLAAAVLLKASSLGPEEILALRPAHMFLAAFLPAAATVLYLMLRPRAVYLVDYACFRTSPNCRVPFATFLEHSRVWPGFDERSVRFMTRLLERSGLGEETCLPYAQHYIPPSRDLESSRAEAELVIFLCHRRPARQDRGLPAGHRHPGGELQPVRADAVLRGHGRAPARGSRLARVVRTLRGASDGAYRCVYQEEDERGNVGINLSKDLMSIAGDALKANITAMGPLVLPASEQLLFALSFIARKVLNNRIRPYIPDFRTAFEHFCIHAGGRAVIDELQRSLTLSDEQVEASRMTLHRFGNTSSSSLWYELAYVEAKGRMRRGDRVWMIGFGSGFKCNSAAWECIRPAANADGPWANCIHRYPVHIPDVLKH

SEQ ID NO: 48047 - protein, 164 aa, Zea mays
  Coding DNA Sequence Number=SeqID_6268
MDHAPVRFFEFLDTPDTVSDPIGPQHKLLPIGTLPGDPGVSAGTTVSSLVSTPALYVPPGRHGLTSYTSCANSTTFAPHTASTRGDARFKFPGAKGIFSAGFAPGLDDIPLLSISTAAMTSSSSMAPLPSPTSAPSSALCLLCHTNNVLTHPPDIVPALTFLAP

SEQ ID NO: 48048 - protein, 829 aa, Zea mays
  Coding DNA Sequence Number=SeqID_6269
  Homolog annotation: Hit_ID=UPI0000D55925; Match level="QueryCoverage =16%, HitCoverage=11%, E-value=8e-07, Identity=26%"; Hit description =PREDICTED: similar to CRSP complex subunit 3 (Cofactor required for Sp1 ...
  Homolog annotation: Hit description=transcriptional activation subunit 3) (Transcriptional coactivator CRSP130) (Vitamin D3 receptor-interacting protein complex 130 kDa component) (DRIP130) (Activator-recruited cofactor 130...
MPQLLTTETPRFQTTHRRKMTTGEAVETLADQVVRYQRNHPRRALTVPPGLPRLDLGPSLHRLLGALSDHETPGIVSRKRGSSAQSQVGGTFAHRWNLDRPWVAQTADAKGREISLLEKPELQQRVKNFCNTRSPEHWLKNQHPKRAELQKALGSHLSWKDRYPPFFDDIAARLLPVIPLIIYRLIENDATDIADRVLAFYSSLLAFHPLRFTFVRDILAYFYGHLPIKLIGRILNLLGVSTKTPFSESFAKYLVSSNSSICPPPEYFANLLLNLVNNVIPPLSSKSKSNPADTTRSTFNKHHASSQPGGVGNTDGQRAFYQNQDPGSYTQLVLETAAIEILSLPVPAAQIVSSLVQIIAHVQAILIQSNSGQGMSGGLGQSSGLPTSPSGAAESSGPNQANSAATGINATNFVSRSGYSCQQLSVLMIQACGLLLAQLPPEFHMQLYSEAARVIKDCWWLADGSRPVKELDSAVGYALLDPTWASQDNTSTAIGNIVALLHSFFSNLPQEWLESTHTVIKHLRPVNSVAMLRIAFRILGPLLPRLAFARPLFMKVLKGAKNTLALLFNVLGDVFGKNPQVSNPNPVEASEIADIIDFLHHAVMYEGQGGPVQSTSKPKLEILTLCGKDERQPTRSHDARFVPVGRLSPCRSLRNSAARGSHNRIVSLVLDLESFRRAPTRAGKASSALNIPDESVRYVSSNIRYDLRQIIECVCDPANVANSATTRYPLFTLLCFLCSLPRKQKLPVGCCTFFVVFGFDDGEATRRIQDYAFVHDEAAWGRQGKTTLLHVVQHPACGAGRFAATCELCAGRRWCASAAVLRPSAPSLS

SEQ ID NO: 48049 - protein, 528 aa, Zea mays
  Coding DNA Sequence Number=SeqID_6270
  Homolog annotation: Hit_ID=Q2HTU9; Match level="QueryCoverage=27%, HitCoverage=31%, E-value=8e-20, Identity=36%"; Hit description =Octicosapeptide/Phox/Bem1p
  Pfam annotation: Domain name=Extensin_2; Domain location=139-500; Score=-115.1; E_value=0.0079; Accession=PF04554.4; Description =Extensin-like region
  Pfam annotation: Domain name=PB1; Domain location=59-161; Score=71.2; E_value=3.4e-18; Accession=PF00564.15; Description=PB1 domain
  Pfam module annotation: Pfam domain module=Extensin_2::PB1; Domain location=139-500::59-161
MAESGESSPNSAAATDDTHHEMPEAGAAAAAVHAQPRPPPPPSKVRLMVSYGGRIQPRPNDNQLAYVNGETKILSLERPLCFPDFAARLAALVGNAADVRVKYQLPGEDLDALVSVTNDEDLEHLVHEYDRLHVHRHATASSAGSSRGGSAPRLRVFLFPVQSPPPPPQPAGILEPKVEQRQWFVDALNTVLLPSSKQDPPPVPPQQQKQEQESVFAQQSPPPQAKHEAVFVQQSPPQPQTVVQMQMPPPQHVVLAAASPDYLFGLDNGFVHPPAVKVKDPAGDPPAVRESVPVELPAKNEDRHPIPNPAGDNVAVSPAEYQRQIPGLEKLQVADNAAHQPPPPAPAPAPAPSLAPTPVPAALPRNGSDDSLTRGYPLATPHPRTPARSTTFQSSRRSPPCRRRRSHPLRPHRPICRCRADRGPVFFIPAPHGYFAATASPGATSYPAVYAVAPPSTAANGSAASPAASNATAYSPAPTQVAYDSNGRAIYYTSMLPQYPSAVNGMSSAGAVLGTEPVNPVAVKPTVS

SEQ ID NO: 48050 - protein, 813 aa, Zea mays
  Coding DNA Sequence Number=SeqID_6271
  Gene Ontology: Mol. function=ubiquitin thiolesterase activity; Biological process=ubiquitin-dependent protein catabolic process
  Homolog annotation: Hit_ID=Q9FPS9; Match level="QueryCoverage=72%, HitCoverage=68%, E-value=8e-97, Identity=73%"; Hit description =Ubiquitin-specific protease 15
  Pfam annotation: Domain name=UCH; Domain location=153-601; Score =44.6; E_value=3.4e-10; Accession=PF00443.19; Description=Ubiquitin carboxyl-terminal hydrolase
  Pfam annotation: Domain name=zf-MYND; Domain location=32-69; Score =42.8; E_value=1.2e-09; Accession=PF01753.9; Description=MYND finger
  Pfam module annotation: Pfam domain module=UCH::zf-MYND; Domain location=153-601::32-69
MACPDIILPGSSLRTMPYFRPMPALRQEYHECATCHAPAKTRCSRCKAVRYCSGKCQIVHWRQGHKETCQKWLGSGSSSFGGSSTEATEQMPFLTNLNSPLPGGDIHLRDLNFDTLSEPSFPTTDGYNLDTDPFLADRSNMNKSNQGIHMSENGAVGVSFEKNNYNADDEIHSPENLSRNKVSNNYFGSDAISGNGDAIYPAKSNAQQPSSCAPDMRKQPKASITVYQPDIGVYLTSDMVSSCEGSYASASEPLQRSLSSGRTIGKANAVNKRPPYPSSKVVSAQKPQDRVSTSYQNDGHEKNPCNKNDQRSTPKCESSQSTSSNLQKFGASKVEVLKKPSKFLKTSLVGLINDNKRNKVLFPYEDLVKFFQYEARGISPRGLFNCGNRHLVMSMQAACLDGLGGEKHVEPSLQETTLIQQMFGGRLKSKVKCLRCYHESERYENIMDLTLEIHGWVESLQDALTQFTAPEDLDGDNMYKCGSCAAYVKARKQLSVHEVPNILTVVLKRFQSGKYGKINKCVTFPDMLDMVPFVTGSGDNPPLYFLYAVVVHVDTENASFSGHYISYVKDMQGTWLRIDDSEVQVVSVNQVMSEGAYMLFYMRSFPRPPRIYIEKGPTVPSAKRHTSKYSKGSKHEREQTELLLSANDPAYGVYDFRPDGEGYTQDQQAELRSRDFHRADDAFADSVSADFSEATSSEWSLFTSSDESSFTTESTRDSFSVVDYGDNAGLDPISSIFGPSYAPEHHPGPPGSFAACTRLSPSNPQTRYFSESTGFVSDYSSSGIVHRGRDPGRAYTCSAEPLASAAAAHQHQR

SEQ ID NO: 48051 - protein, 319 aa, Zea mays
  Coding DNA Sequence Number=SeqID_6272
  Pfam annotation: Domain name=AT_hook; Domain location=142-154; Score =8.2; E_value=0.88; Accession=PF02178.9; Description=AT hook motif
  Pfam annotation: Domain name=AT_hook; Domain location=48-60; Score =8.2; E_value=0.88; Accession=PF02178.9; Description=AT hook motif
  Pfam module annotation: Pfam domain module=AT_hook::AT_hook; Domain location=142-154::48-60
  Subcellular localization annotation: CTP_CleavageSite=51; ConfidenceScore=5.24e-01
MTASKKSRLRALGLRARYWSEVRRTAPQKGSTAASGHSSSAPTTDQGARTRARPRKTTNSASPDPGLGLGLGPGRRRTPPRPTQGSDSGSAPEDDELRLARPQGSDSGSAPEDDELRFGRPQGSDLGSAPEDDELRLARPRARTRARPRKTTNSASPDPRARTRAQPRKTTNSASLDPRARTRAQPRKTTNSASPDPGLRLSPGLSRRSPPRPTQGLRLDLGLGRQTRPRPRRSLRLAQPRAWTDHVTGGAIITLPQANSGYGEQDRRPIWLAPINKLQRSSDGHDTTRTRCQNLSGCHDDMALLQRVGRTGKDGMALA

SEQ ID NO: 48052 - protein, 770 aa, Zea mays
  Coding DNA Sequence Number=SeqID_6273
  Gene Ontology: Mol. function=transporter activity; Cellular component= membrane; Biological process=oligopeptide transport
  Homolog annotation: Hit_ID=Q6Z8E5; Match level="QueryCoverage=76%, HitCoverage=99%, E-value=0.0, Identity=71%"; Hit description =Putative nitrate transporter NRT1;
  Pfam annotation: Domain name=MFS_1; Domain location=55-536; Score= -11.9; E_value=0.0011; Accession=PF07690.6; Description=Major Facilitator Superfamily
  Pfam annotation: Domain name=PTR2; Domain location=130-524; Score =291.7; E_value=1.4e-84; Accession=PF00854.12; Description=POT family
  Pfam module annotation: Pfam domain module=MFS_1::PTR2; Domain location=55-536::130-524
MDAAGDAMERGDRAPLLPVSQGPKVRDDDSLQVPLLKDKKRAGSKAPAVVLGEQLSIAPSMFSFSFRSPGFECLESTAFNGISTNLVVYLETVLHGSNLASASDVTTWFGTSFLTPVFGAIIADTFLGNYNTILVSLAVYLLGMMFVTFSAFLPTAAALGGATSVFGAKTVAFLGLYLVAIGRGGVQSSLAPFGADQFDDANPADRDSKASFFSWFYLCVDFGMIVSGLVIVWVQDNVSWGLGFGISTACLALAFAAFVLATPMYKRRMPTGTPLKSLSQVVVAACRKIALKAPADAGMLFEVSDKVDAAQPKIAHTDEFSFLDKAAIVSESDMEEMSSEEACSSSWKLCTVTQVEELKILMRLLPIWVTSVIVSSAYAQMTTTFIQQGSAMDMSILSVPVAAASMGSFEVVFLLTWVLLYSKVIVPVLRGFSSGGDGEPSQLQRMGAGRLLMALSMAASALAEMKRLDSAARGEEITIAWQLPQYFFMAGAEVFCYIAQLEFFYAEAPDTMKSTCTSLSLLTIALGSYMSSFIYAIVAAFTATPDSPGWISDNLNQGHLDYFFWTMAAMCTLNFVVYSGFAKNYKLKTGSDSGSAPEDDELRFAPTQGLGLGLGPGRRRTPPRPTPGLGLGLGPGRRRTPPRPTQGSDSGSAPEDDELRLARPQGSDSGSAPKDDELRLARPKARTQARPRKTMNSASPDPRARTRAQPRKTTNSALTRPQGSDSGSALEDDELRLARPQGLDSALASADGLGPTTSQEAPSLPYSKLT

SEQ ID NO: 48053 - protein, 593 aa, Zea mays
  Coding DNA Sequence Number=SeqID_6274
  Gene Ontology: Mol. function=binding; Cellular component =intracellular; Biological process=metabolic process
  Homolog annotation: Hit_ID=Q10K51; Match level="QueryCoverage=86%, HitCoverage=70%, E-value=6e-93, Identity=32%"; Hit description =Pentatricopeptide, putative
  Pfam annotation: Domain name=PPR; Domain location=114-148; Score =26.5; E_value=9.5e-05; Accession=PF01535.11; Description=PPR repeat
  Pfam annotation: Domain name=PPR; Domain location=215-249; Score =39.6; E_value=1.1e-08; Accession=PF01535.11; Description=PPR repeat
  Pfam annotation: Domain name=PPR; Domain location=318-352; Score =36.6; E_value=8.4e-08; Accession=PF01535.11; Description=PPR repeat
  Pfam annotation: Domain name=PPR; Domain location=353-387; Score=8.7; E_value=0.69; Accession=PF01535.11; Description=PPR repeat
  Pfam annotation: Domain name=PPR; Domain location=419-453; Score =38.2; E_value=2.8e-08; Accession=PF01535.11; Description=PPR repeat
  Pfam annotation: Domain name=PPR; Domain location=454-488; Score =14.6; E_value=0.14; Accession=PF01535.11; Description=PPR repeat
  Pfam annotation: Domain name=PPR; Domain location=490-524; Score =20.1; E_value=0.008; Accession=PF01535.11; Description=PPR repeat
  Pfam module annotation: Pfam domain module=PPR::PPR::PPR::PPR::PPR::PP R::PPR; Domain location=114-148::215-249::318-352::353-387::419 -453::454-488::490-524
  Subcellular localization annotation: CTP_CleavageSite=34; ConfidenceScore=5.34e-01
MGMKIDPNFDLNSYPNRVKTHRVSIFGTRMRKLRSQKAGPPAAAASLRFAALLQSCGRTGDIRRGRALHARLLLTGAAAASTFLANHLITMYSHCADAVSAVRVFGVVPRPNLVSWTTLVSGLVQNSMHHDALAAFAAMRRAHIAPTQFALSSAARAAAALSAPRPGTQLHCIGIRLGFDNELFVASNLADMYSKCGLLHEACRVFDQMPQKDAVTWTTMIDGYAKNGSLEAAILIFRDMKCEGLVGADQHVFCSALSASGGLKDGWFGRSLHCCIIKAGFELETVVRNALLDMYAKSGDLENASRVVSIDPGGWNVVSATSLIDGYVEAGRIEEALETYTELGRQGVEPNEFTFASMIKGCAMHDLLEQGAQLHAQVLKTNLISDSFVGSTLVYMYGNCGLISLSLQLFNEIGYRTEIAWNAVINVYAQHGHGWGAIQAFDRMTSSGIRPNHITFVCLLTACSHAGLVDEGLGYFHSMKDAHGIEPKAEHYSCIIDMYGRAGRLDEAEKFISEMPVKPSAYAWCSLLGACRMQGNKELGEVAAQNLMKLDPNNTGIHISLSGIYTSLGQWEDVKAVKKSMKDISIKKLPGFS

SEQ ID NO: 48054 - protein, 540 aa, Zea mays
  Coding DNA Sequence Number=SeqID_6275
  Gene Ontology: Mol. function=protein binding; Cellular component =nucleus; Biological process=regulation of transcription, DNA -dependent
  Homolog annotation: Hit_ID=Q8LNU5; Match level="QueryCoverage=96%, HitCoverage=71%, E-value=0.0, Identity=77%"; Hit description =Nucleolar complex protein 2 homolog
  Pfam annotation: Domain name=Noc2; Domain location=256-540; Score =358.0; E_value=1.5e-104; Accession=PF03715.4; Description=Noc2p family
MDDGDGESGGGSSKKKAKQHVEQLKRLQQKDPDFYKYLEEFDKDLLGFDDDDDEIENDRETGVEEKEQYVSKEELKHVKPITMEMVDSWCNGVENEKIGSIRSILQAFRRACHYGEDHGDNSTPKLSVMSGSVLDKVMHFVLKHMDKVLRQLLGAPSYGGKKEVISELMLSKSWKRHGNLMRIYLANALHMITEMTDEQMIAFTVHRVRASAVFLAAFPSLLRKYVKALLHTWARGRGAMPLVSFMFLRDLCIQVGSDCLDTCLKGIYKAYLVNCKLSKSISGSKQQHIQFLGNCVRELYSLDPQSAYQHAFVFIRQLGVILRGALTERGPKKSYQKIYDWQYIFCLELWTSVVCGCSSEEEFRPLAYPLTQIIHGVACLVPSARYFPVRFRCVRMLNCIAEATGTFIPVSSLLLDMLEMKELRGRPDGVGKAVNLFSVKQVDKKTVKTRAFQEACIYSVVDELAKHLTQWSYSIAFFEMSFIPLVRLRSFCKTIKADRFRKEMKDLIYQIEANVEFIKSKRVGIAFSPNDPAVESFLQA

SEQ ID NO: 48055 - protein, 143 aa, Zea mays
  Coding DNA Sequence Number=SeqID_6276
MGKSNKRKREPTPPSEEFGDSEYSEEEFSSESEGSPAPIPLRESSDDSDDSQGLAAEVWTYIRAVERSGLEGSDESGFSDEEDSDGGEDEDDDDDDDDDGGDGDGDGGNGGGGSGGKVGTKGGSSVGSTRGGGGKGSGGRASG

SEQ ID NO: 48056 - protein, 281 aa, Zea mays
  Coding DNA Sequence Number=SeqID_6277
  Homolog annotation: Hit_ID=Q6QP51; Match level="QueryCoverage=17%, HitCoverage=22%, E-value=2e-12, Identity=69%"; Hit description =Putative growth-regulating factor 1
MQAACNRTKWAHPFDSNASSMEAQAHTSWTGKGDTPKGILLREGNGPRAPLLIRGSKAGPSEGFNSRLRALGLHAHYWLEVRRPAPRKGSTAASGHSGSAPTTDQGFVGWPSKAKSGLRRHRKLHLTRPRARTRAQPRKTTNSASPDPGLRLGLSPGRRRTSPRPTQGSDSGSAPEDDELRLARPRARTRAQPRKTVNSASPDPGLGLDLGLSRRSPSRPTQGLGLDLDLGRQTRPRPRRSLRLALPRARTDYVTGGAIITLPLASSGYGEQDWRPIWLAP

SEQ ID NO: 48057 - protein, 791 aa, Zea mays
  Coding DNA Sequence Number=SeqID_6278
  Gene Ontology: Mol. function=protochlorophyllide reductase activity; Cellular component=chloroplast; Biological process=chlorophyll biosynthetic process
  Homolog annotation: Hit_ID=Q70L71; Match level="QueryCoverage=46%, HitCoverage=100%, E-value=0.0, Identity=95%"; Hit description=NADPH -protochlorophyllide oxidoreductase
  Pfam annotation: Domain name=KR; Domain location=479-642; Score= -82.2; E_value=0.014; Accession=PF08659.1; Description=KR domain
  Pfam annotation: Domain name=adh_short; Domain location=479-651; Score=4.9; E_value=2.6e-06; Accession=PF00106.15; Description=short chain dehydrogenase
  Pfam module annotation: Pfam domain module=KR::adh_short; Domain location=479-642::479-651
MSGEHAKREMVTGGKPESSGKKNDERTPSKEAGDKHKEESAGSIKSYKKGDKRKKKMKKVVYYETDSSSPSTSGAESTSSKHQERKKYSKILLRYPRISKRAPLLFVPLGKPPYFDGEDYCIWSDKIRHHLTSLHESIWDIVEFGAQEPQVGDKDYDSDEAVQIRHFNSQATSILLASLCREEYNKVQELKSTKEIWDVLKTAHEGDEVTKITKRETIEGKLGRFVLNKGEEPQAMFNRLKTMVNQVRNLGSTKWDDHEMIKVILRSLVFHNPTQVQLIRGDPRYKQMSPKDVIGKVGPAWGREIQATKLPLAGLVPGRRRVANPTPPHPIALSPPAHRSRSRPNKLPRCRASLSHPPAERRGRRRTQPNPQSSGCSQLVPSTLPRGSLLRSLLDMALQAATSFLPSALSARKEGSVKDSASFLGVRLAADGLKLDTTALGLRTVRVSRSADIRAQTAAVSSPSVTPASPSGKKTLRKGTAVITGASSGLGLATAKALAETGKWHVIMACRDFLKASRAAKAAGMDKDSFTVVHLDLASLDSVRQFVRNVRQLEMPIDVVVCNAAVYQPTAKEPSYTADGFEMSVGVNHLGHFLLARELLSDLQSSDYPSKRLIIVGSITGNTNTLAGNVPPKANLGDLRGLAGGLNGVGSSVMIDGGEFDGAKAYKDSKVCNMLTMQEFHRRYHEETGVTFASLYPGCIATTGLFREHIPLFRLLFPPFQKYITKGYVSEEEAGKRLAQVVSDPSLTKSGVYWSWNKNSASFENQLSEEASDADKAKKLWEISEKLVGLA

SEQ ID NO: 48058 - protein, 100 aa, Zea mays
  Coding DNA Sequence Number=SeqID_6279
MCWRPETGKKPGAQLRGQRRGNLPDNDEMAQGNHGDTVEKLGHAAEDRRPELEKKRELWMRWQAFRAAVSELAFCIKVVVPPTSYKFVMEIIHKFALDLT

SEQ ID NO: 48059 - protein, 58 aa, Zea mays
  Coding DNA Sequence Number=SeqID_6280
MESRMIAEREARLADEQRMAEMFRYMQSFGVAHGFAPLPPLFPPFNSARLHTPNSKNK

SEQ ID NO: 48060 - protein, 132 aa, Zea mays
  Coding DNA Sequence Number=SeqID_6281
MALGSCATAHRIAVNYNIAKFGARDGGKGRLELDFDHALGCQPTETHYMRPVARTVTFASNNSIYVTPPSPSPQPQQQSAPPEPQRPQTPPRHEPEQHDGAPESQPQAEQPEAPAHSEDAPPQAAGAEPKPP

SEQ ID NO: 48061 - protein, 143 aa, Zea mays
  Coding DNA Sequence Number=SeqID_6282
  Gene Ontology: Mol. function=hydrolase activity; Biological process =metabolic process
  Homolog annotation: Hit_ID=Q0ZPW5; Match level="QueryCoverage=64%, HitCoverage=31%, E-value=3e-14, Identity=39%"; Hit description=CXE carboxylesterase
  Subcellular localization annotation: CTP_CleavageSite=36; ConfidenceScore=5.09e-01
MSPANSRASSPPSPRSSLVEISPANARVRNRVLNPHAAIEPDSKLEFDMPDALRVYKIDCVERFDDTKSVPSSPNGNSTNGVASKDFATGISSRLYLPARVDPEKKLPIVVFFHDGAFMVHNASFPLYHIYIASVNVAVPASR

SEQ ID NO: 48062 - protein, 253 aa, Zea mays
  Coding DNA Sequence Number=SeqID_6283
  Gene Ontology: Mol. function=carboxyl- and carbamoyltransferase activity; Cellular component=ornithine carbamoyltransferase complex; Biological process=amino acid metabolic process
  Homolog annotation: Hit_ID=Q8SA97; Match level="QueryCoverage=96%, HitCoverage=25%, E-value=7e-11, Identity=51%"; Hit description =Ornithine carbamoyltransferase
MAPPVDVAGPRPRLGDVEAPPRSRSSLSSVAEVESEPLGRARRRPSAEARAESEPWGRVKQRAEPESEPWVGRSGVRRLPGLSPSPSPGSGGAEFTVFRGLARVRALDRAERSSPSSGAEPKSEPWIGRSGVRRLLGLSPSPSPGSGEAELPMVPEAEPDCLSASLYQVAQQSVRRRRRCPSVRPATGPSSLRATWDKGATIISGVVLGEDRASGDPELCADGGYQLRIRSLEGTPNYGPRQDDTMHYCPVLL

SEQ ID NO: 48063 - protein, 390 aa, Zea mays
  Coding DNA Sequence Number=SeqID_6284
  Gene Ontology: Mol. function=nucleotide binding; Cellular component =endoplasmic reticulum; Biological process=translation
  Homolog annotation: Hit_ID=Q6ZFX8; Match level="QueryCoverage=99%, HitCoverage=48%, E-value=1e-149, Identity=66%"; Hit description =Putative growth regulator
MKKMPVKMFRSIRHTKDFDMSLNYDKAYELPPGIPSHKFAEYSVSGLTDASEKSGIIALDRAEAVIEITEWVEVPKKILTPESNITNQNSSSKVGVANSTTDIKENLSSGSDNNSSTPINGSNVQEIITEKVLKKRTFRVPLKVVEKTTGGGTILSKELYSEAKNRLEALDKKDAERRKTAELKNNLESYVYSMKEKVQDWLYMDGEDAQANEFKERLGQLKAIGEPILFRLSELKARPAACENARLYLDELQKIVNKWETNKQWLPKKRVDEVVSQAEKVKAWLEEKENLQKNTPVYSSPVFTSEQVYEKVLDLQDKVSSVNRIPKPKPKAEKKIAEEEPASKGKTTSSESAPNEGEYTETSQEPKAREGDHSASANSSDLDPESHDEL

SEQ ID NO: 48064 - protein, 418 aa, Zea mays
  Coding DNA Sequence Number=SeqID_6285
  Gene Ontology: Mol. function=DNA binding; Cellular component=nucleus; Biological process=DNA repair
  Homolog annotation: Hit_ID=UPI000065F8A2; Match level="QueryCoverage =97%, HitCoverage=45%, E-value=4e-43, Identity=28%"; Hit description =UPI000065F8A2 related cluster
  Pfam annotation: Domain name=VRR_NUC; Domain location=311-417; Score =83.1; E_value=8.5e-22; Accession=PF08774.1; Description=VRR-NUC domain
MQRLFFLNGDQDLSSFLSVEFGIVKFPDYVCSISHRIFQERNDLLEYEDAIRVAQVMDESLDNNKMDLVTRCIDLSENRLCIMPKRENAITPERLPSFFSRFSASWVYSKILTLGVSVYERDRRYEDAVRILKTLLSTVACDRRRGYWALRLSIDLEHMGRSNESLSTAEGGAIDPWVHAGSKFALQRRVLRLSKPPRRWKVPSYADYVKRNIREVSIEGRPLNCETGAKNVFYGYDGELCGVEQLALQYYADEGGGWQDCLLDLVKIFSLRSLLFFTTLGTLQYDFFVLVQTDDFYKSRENIAESQLKRIRDGMAEEMLISSWELHQGTSCQGVNWARYSLTDLRAVVACVGGHRLASLLRHLAVDYRSWSSGMPDLLLWRFLDERGGGEAKLVEVKGPRDQLSEQQRAWILDLTWK

SEQ ID NO: 48065 - protein, 152 aa, Zea mays
  Coding DNA Sequence Number=SeqID_6286
MTASAEARAVGAIAISRGAICGGGDDLSRRERTTIYGLRPMREVDFGPERLGGRGSRAHGASGRPNCERITARYVQEYTHWHRDAERQAMSAQPVPAETRDSSKQSKRPDDHCLCPGRSGNGEGHDWRRRHPVRGRPAAGKLGYGGGSTGLI

SEQ ID NO: 48066 - protein, 114 aa, Zea mays
  Coding DNA Sequence Number=SeqID_6287
  Gene Ontology: Mol. function=hydrolase activity; Cellular component =peroxisome; Biological process=aromatic compound metabolic process
  Homolog annotation: Hit_ID=Q8SAY7; Match level="QueryCoverage=81%, HitCoverage=28%, E-value=1e-41, Identity=82%"; Hit description =Putative hydrolase
MDAAAVRHRTVEANGISMHVAESGPDGDGAPAVVFLHGFPELWYSWRHQMAHLAARGYRCVAPDLRGYGGTAAPPDVASYSAFHVVGDIVALLDALGIHNKPPKSVEDYLTEST

SEQ ID NO: 48067 - protein, 197 aa, Zea mays
  Coding DNA Sequence Number=SeqID_6288
MPGNCIAKEYGTYAPKEKGKKHTFFWLWVACKEALTSYNSLDNPAAGAPVEQLNELEEVFKKAAKTDTPAEQFRLTRQNEERSKKVANDLAAALFVVTVEVKQVKAWLSDAQDELEASNIEADLTTYIGAGMICPHIVNISVLLGGILSWGLQCYIRRRFLLTGKETSRFLRVILRSESGFLLVHEIFFGGFLNPTR

SEQ ID NO: 48068 - protein, 234 aa, Zea mays
  Coding DNA Sequence Number=SeqID_6289
  Homolog annotation: Hit_ID=Q8SAY9; Match level="QueryCoverage=22%, HitCoverage=15%, E-value=1e-17, Identity=72%"; Hit description =Putative hydrolase
  Pfam annotation: Domain name=HMA; Domain location=4-69; Score=24.3; E_ value=0.00043; Accession=PF00403.16; Description=Heavy-metal -associated domain
MAPVILAMNVHCYGCAGKIREVVKNLLGVEEVWVSVDTGLVVVSGTSLDAWLLRCRIQNSTRRPVTVVSDVAADTAPEPQHAAPPLGGYYPQHHYSGVLHMAPPPLPAGAYPYYYYYGSGDGWVPAPPQHLLQYVPTTTTVDGYFPSRQYVPNLAPLRTNKDLEIKSYQRYLEAADVVGGPVGAVEVVDGRDGGGGGADEDVAHEGDAGVDKRRHPVRPEQAELVTLTSEQKAG

SEQ ID NO: 48069 - protein, 535 aa, Zea mays
  Coding DNA Sequence Number=SeqID_6290
  Gene Ontology: Mol. function=heat shock protein binding; Cellular component=integral to membrane; Biological process=protein folding
  Homolog annotation: Hit_ID=Q7Y151; Match level="QueryCoverage=94%, HitCoverage=96%, E-value=1e-153, Identity=70%"; Hit description =Putative heat shock protein
  Pfam annotation: Domain name=DnaJ; Domain location=239-303; Score =82.7; E_value=1.2e-21; Accession=PF00226.21; Description=DnaJ domain
MARKGNQSKSGPNHASPKWKNTTDGDALSTPERGAADSENPSSHVQGRSKGPEGSSEKKGRGSKRNSTNNGISSSGKKQQMDTGCDINSSEEKEIPPEAPSPQNDDTIDPFSLTLPCNLVGLPPPVLKQPLISPRSEAIAASAFAFIGLGFAILLISVLAVFLRDNADNKKFNGSSRYSERSSGRQGNIFEEFQPSANSTYQARYARASDRDPGDPSTSGPEKELTSEDEVARLLNCTDHYSALGFRRYENIDVSSLKREYKKKAMLVHPDKNMGNDKAADAFKKLQNAYEILLDSLKRKTYDDELRREDLLNYFRQSVSQKNGRNSTFQHGFSPSEGVDEGPYGLSRRIACKKCSDFHLWIYTGRAKSQARWCQDCKEFHQAKDGDGWVEQSFQPVLFGMLQKPDLPHAYVCAESYIFDVTEWFNCQGMRCPANTHKATFHVNANMAKQSSGKASTSTQRAGKAPSGVNMDGGGLNEEEFFEWFQNAVNSGMFETTFGAQGDPTSPGNGSNAKSSGSSSSNNNSRKKKKGKKQW

SEQ ID NO: 48070 - protein, 246 aa, Zea mays
  Coding DNA Sequence Number=SeqID_6291
  Homolog annotation: Hit_ID=Q75LH5; Match level="QueryCoverage=91%, HitCoverage=86%, E-value=1e-76, Identity=66%"; Hit description =Expressed protein
  Pfam annotation: Domain name=DUF715; Domain location=9-243; Score =175.7; E_value=1.2e-49; Accession=PF05206.5; Description=Protein of unknown function (DUF715)
MPYQERHVAQQASIVGNMEAFGLLQKASHEVVDGENAAVSAQAVVEFGAGRGYLTQVLVDCYGIRNVFLVERRSYKLKADRSLRQNEDVTLERLRIDIEDLKLHGIEALRGLQYLAIGKHLCGPATDKSFLSGLGITEEDFHAMTWFSSWAVDGDHSYPDAPVEVEDTPSEVRGPEKLDQEAVGIERVIRSIPAGERATLGSMCKDIIDTGRLLWLGQKGLVADLVSYVPSSISPENRLLIAKCTS

SEQ ID NO: 48071 - protein, 184 aa, Zea mays
  Coding DNA Sequence Number=SeqID_6292
  Gene Ontology: Mol. function=hydrolase activity; Cellular component =peroxisome; Biological process=aromatic compound metabolic process
  Homolog annotation: Hit_ID=Q8SAY9; Match level="QueryCoverage=91%, HitCoverage=50%, E-value=3e-67, Identity=69%"; Hit description =Putative hydrolase
MEAAAAAVLHRTVEANGISMHVAESGPDGDGAPAVVFLHGFPELWYSWRHQMAHLAARGYRCVAPDLRGYGGTAAPPDVASYSAFHVVGDVVALLDALGIHNKVFVVGHDWGAIIAWYLCLFRPDRVAALVNTSVAFMRHIFVRAAAAAVTPIDYFHRTYGPTYYICRFQVPLVTFYFEIFIST

SEQ ID NO: 48072 - protein, 617 aa, Zea mays
  Coding DNA Sequence Number=SeqID_6293
  Gene Ontology: Mol. function=triacylglycerol lipase activity; Biological process=lipid metabolic process
  Homolog annotation: Hit_ID=Q850Z2; Match level="QueryCoverage=93%, HitCoverage=94%, E-value=1e-175, Identity=57%"; Hit description =Putative heat-shock protein
  Pfam annotation: Domain name=Lipase_3; Domain location=228-369; Score= 72.9; E_value=1e-18; Accession=PF01764.16; Description=Lipase (class 3)
MPAAVAAAAAAASAGAVLLCLLLNCRPQPALDAQRESERGEDEASPLLSGSGPGSDREEEEPWPDRAPVTCCEAAAVAARTARRTWELTVGRWGLHGLAFGIKRHMKRQVVLDSLQSSDFVRSLYYDTALAVPLAYPVLEPESRSAGNLQHEYSGNDCLQLKGHQTYTEVSSLLEHLKLCMFFSKKSFSAFLKFGGYKQEDILIHKARARLMQPSFALVCDKRTKCLLLFIRGAISTKERLTAATSAEVPFHHIILSEGKISNVVLGYAHCGMLAGARWIAKLVIPHLHNKMQEFSGYHIKVIGHSMGAGIGAILTYILHEHYEFLSCSCLAFAPPACMTWELAESGKDFITSLVNRNDVVPAFSKVSSESLRSEVMVSSKLDDVQDHFHHGLFATISQRVAFIRSHMLSISHSTGKIADYGSSISEPLLKDTIPPTANGHGVDCSQQQQVVASEETVVVLVNNNDHFTSLKAADSGVTSQEGSDSNAASSDSPQRPPPPADEAPNQNGTGKDKQKEPVSAGCSSSRQLFPPGRIIHMVALPPQQPDPNSDDGTSSGEVVGIYETPRGLYGKIRLAPNMIKEHYMPSYIRTMESLLEQLQKDDDDGSVCTCTAPSDL

SEQ ID NO: 48073 - protein, 238 aa, Zea mays
  Coding DNA Sequence Number=SeqID_6294
  Homolog annotation: Hit_ID=Q1S322; Match level="QueryCoverage=40%, HitCoverage=49%, E-value=2e-28, Identity=56%"; Hit description =Uncharacterized Cys-rich domain
  Pfam annotation: Domain name=PLAC8; Domain location=112-211; Score =179.0; E_value=1.2e-50; Accession=PF04749.7; Description=PLAC8 family
MAGDGECSSMHEQSFRWPSDQVDRSRSLTRAAALTKKTRPAARPPGWWANSRRALGIGRDDQANPNATAATAQHSTAQHVGMYPPKASGDPAAGAAPVTGFPVGGPAASSQWSSGLLDCFDDCGLCCLTCWCPCITFGRVAEIVDRGATSCGTAGALYAVLAYFTGCQWIYSCTYRAKMRAQLGLPETPCCDCLVHFCCEPCALCQQYKELKARGFDPVLGWDRNATMLPPSAQGMGR

SEQ ID NO: 48074 - protein, 110 aa, Zea mays
  Coding DNA Sequence Number=SeqID_6295
  Homolog annotation: Hit_ID=Q2HTV1; Match level="QueryCoverage=35%, HitCoverage=6%, E-value=8e-08, Identity=69%"; Hit description =Protein kinase-like
MAVRVALGKSSHWVWQQEVGVPIYLEGTEAMEEAKSKNIERIHFSGSCLLDTMVKLTMIARVTDGRPLAEGGCQHKLDPNYNAMKTLQTLLFKEYWAKSLQYTIQGLMAP

SEQ ID NO: 48075 - protein, 95 aa, Zea mays
  Coding DNA Sequence Number=SeqID_6296
  Gene Ontology: Cellular component=spliceosome; Biological process =mRNA processing
MEIMNLVDGCGGGERVSARGTFVVAGGRRREANVHGAGAALGAAGGDRGMGGEVPAEAVEGRLTWVVRQSCGGCHGNHAVAVGVRGHGSVKDLNP

SEQ ID NO: 48076 - protein, 92 aa, Zea mays
  Coding DNA Sequence Number=SeqID_6297
  Subcellular localization annotation: CTP_CleavageSite=76; ConfidenceScore=5.22e-01
MADRLDVLLYLGPFVDSLNISPHDSVQTLVKFLASKPLATRATPCLAPTAVRPPSLPPASSSPLRDRSPHPSLALCASVIAPPHPMFSGALK

SEQ ID NO: 48077 - protein, 896 aa, Zea mays
  Coding DNA Sequence Number=SeqID_6298
  Homolog annotation: Hit_ID=Q10MM5; Match level="QueryCoverage=98%, HitCoverage=96%, E-value=3e-44, Identity=31%"; Hit description =Expressed protein
MDVEKPASKGHGFFALFDWGKKSKKRLFVGSTGSSPNLKNAADGKDIDDSTPSTRSNLILEDTPSLKESTEHSCSSSVIDEEAHSRRSPTVVARLMGLDSMPAASSTESNPMPLTVQPPFQTNSHEDFIGRSYVGSPLKTPGSPIDRFKVEALPPRLAKRTVSVAQYKLLSPMKNPNNISSRNAADIMEAASRIIRPGVENISPYRVHDVGSAIAARAYNPGELIGAQQRSQKLNEALRKCDGPASFRPPSGKPSDGRLRGSEGTSTSRISQANVCVPVGPKVKSGDRLDTARAMHAQEKRGMRKGGRKLETLKNPENNMAKRSGLNRQKDSNQIGTTSSSSVLMPNSRKQNATATKHKVNSNPATPSRQRSNIHQINAHPRKVRVASTFAGNSSQGSRKVDLQPNAHANVRNNSVPKAIPKPRRLQDRRAYSDTSQSSDSINSERSQRRIRHNIVIDEQSSFSTNKKKVSTEIVSFTFTSPVDKSLHGIHFPNHSVFTSPVDKSLHGIHFPNHSVEKQFLGNLNTVSTSSNTSNTKLDVIDGDFLGLLLEQKLRELTSGVRSPYTKTTKGVQAHHTSTAWEDMASACETSSIASTDYDRESLQSFNDGKATLPQTDLASRSLQPVKKYDHDVTDQAEPPERLGRGPLFTWEASISTETCSSSESWRSAKGTRLFGSAEGGRTCDSTRSSKFLEADASSEYSDTASSITVATTEIPRSESNSSCHMDGRQDLQFIREILKASSPARHIFSYLERFGDSGVLDAHVLEELNGDIRLLGGEERKGYRLRRRLLFDCVNESLSARCAYYFNGGYGLWFTGTAVLQSLSAEGIHREMTGLQVGEEWMVDELVYREMSGPLGSWVDFKVESYQGGGDMAAELLGSLIDEVVADLLTTGSFS

SEQ ID NO: 48078 - protein, 176 aa, Zea mays
  Coding DNA Sequence Number=SeqID_6299
  Subcellular localization annotation: CTP_CleavageSite=34; ConfidenceScore=5.60e-01
MAAHPVAAPTAPPPPCPRLPVPPRHPSPKSRLPLASSTSIPSPSHSLDRDSQQRRREHDPPPLPPPRPRRMILSPPSQPPPWPHPSLRETNTRSACHRPTMEIRQYATTSCSKEHQKISALGRMSDFVPLLCFLRSPIPFPASEEPRVKKFFVQHIEIVHHSKVIVLLKMPYNLFW

SEQ ID NO: 48079 - protein, 192 aa, Zea mays
  Coding DNA Sequence Number=SeqID_6300
MASSEHVRMEQTRLAATPWARKEDGARAGTERIWAHARGSAMEREGARLGKAEKRRVRVEEKPGRSSELRAAAGTRGKASRQPWELGGGSHGVQGSRRAEEEESRAEGERAWRSEEQGNGRQGARPWEPRGQAKEKRSAGDKKPCSAVVFFHGLRNGENIRREEKAIEDRDAGYFPFSLSQKRLPKYPGSKI

SEQ ID NO: 48080 - protein, 49 aa, Zea mays
  Coding DNA Sequence Number=SeqID_6301
MALQKGRDKHQGKDQGVTRVKVITGKHNQGGILDKTCEASKKGKQSMVK

SEQ ID NO: 48081 - protein, 127 aa, Zea mays
  Coding DNA Sequence Number=SeqID_6302
MGGAQMGAMLPWERSLGVLHGCSDLRRSRGLFQALKHGGAEEGKREIAGGSIEKLLCGVHCRGGGACREGRRAGEGRRELRLELDGVKFPAMGALLGSHGCWPSRGVGAWASAACCVCKRRCRGELL

SEQ ID NO: 48082 - protein, 86 aa, Zea mays
  Coding DNA Sequence Number=SeqID_6303
MGRVAEKTNWSREGAVKGAWHRGKASSPWEQLEAAMGNIKGAVPSMGRWSAASMAGGRGELMAGEDAAGELQGRNSSSSRRPWEGR

SEQ ID NO: 48083 - protein, 107 aa, Zea mays
  Coding DNA Sequence Number=SeqID_6304
MATRWLPPRDWAWDLTRGGEVPNHGRRSFGSGEPVPAKIRMTGALEWLTPNSTPNNHFPSTNFKVLAPNLSAHGDSAINGQPEAFTVILHVLAQLAGSRSITSTQGC

SEQ ID NO: 48084 - protein, 128 aa, Zea mays
  Coding DNA Sequence Number=SeqID_6305
MAQAEALQTTDMTSKVTPHNSTTLEEMDPKQENNKLVKESIFYTVETLGVVLAYMGSLESLLMYHKDVDEKLLYETFSVFGVIVTNPKDGFKNGSDMPIEMMMARVTKKIDRIPIYFYVKDEILNNYF

SEQ ID NO: 48085 - protein, 56 aa, Zea mays
  Coding DNA Sequence Number=SeqID_6306
MKDLDSSDGGTNRLLEQTRVAKIGGHRVAGVPNGGTKRTLQRAEALRGRVTLRFRA

SEQ ID NO: 48086 - protein, 406 aa, Zea mays
  Coding DNA Sequence Number=SeqID_6307
  Gene Ontology: Mol. function=drug transporter activity; Cellular component=membrane; Biological process=multidrug transport
  Homolog annotation: Hit_ID=Q5GAV3; Match level="QueryCoverage=95%, HitCoverage=32%, E-value=0.0, Identity=93%"; Hit description =Putative integral membrane protein
  Pfam annotation: Domain name=MatE; Domain location=39-199; Score =125.1; E_value=1.9e-34; Accession=PF01554.9; Description=MatE
MDVPNATVEAEPLLVPRRSTEGGSAAATESKRLLRLAGPLVLSFILRNAVQMVSVMFVGHLGKLPLAGASLASSLANVTGFSLVAGMAGALDTLCGQAFGARRYALLGVYKQRSMLVLALASLPVVLTWVFVEQLLLAIGEDPDIAAEAGAYARWLIPSLAAFVPLTCHMRFLQTQSVVVPVMASSGVTALAHVLLCYTLVYKVGMGSKGAALGAAVSYSVNLAVLALYVRLSSACKATWTGFSTEAFSFSGLREYAKLAVPSAMMVCLEWWSFELLVLLSGFLPNPKLETSVLSICVNTAILLYMVPLGLGTSARCSTIRAEQKIGCGKQKIGARVNLGAFYMVGIPTGLLLAFVFNLNGMGLWLGIVCGSISKLALLLWIALRIDWESEAIKAKDRVLRSSGQT

SEQ ID NO: 48087 - protein, 465 aa, Zea mays
  Coding DNA Sequence Number=SeqID_6308
  Gene Ontology: Mol. function=drug transporter activity; Cellular component=membrane; Biological process=multidrug transport
  Homolog annotation: Hit_ID=Q5GAV3; Match level="QueryCoverage=89%, HitCoverage=42%, E-value=0.0, Identity=91%"; Hit description =Putative integral membrane protein
MEVPMNSTQSGPHFPVQHQSLSLDIKGNKTDIVISKYEDTFLLIVAQIGCMGTILAAKHLQVKIQIPVHHPDPVVVMSARIEGGTFSSDSTQSPIWTCCPVTTPPFIDLSPGETLKSGVVEKQVGRKRRANIDSALTLALESQTRALLSELDKRLQILDNKWESRVSTLESKATEAAQSLSEFSGTHRANVEAHLTAADASTDTKIGQIEADLGYRVAALESTVGEDLHSSMDWLRSEVSKMEIQWSRGARANDFHMSGVLGAHGSTPGRSSVAGDVVDISRFGHRNDAHHRDSGPWHPNADARYPVTVCRTTTSIHVMATILPVMLSVLTIAAMTWMEVVVPNKISSKCADTIQLHAVQELWEIFYSEPHESEGEFEDSAKTFMILLSTEAMSTKKAPSRSFRLQGQLQGENMLILLDLGSSHCLLNASRTSLVSGFMSLETPLVVTVANGRIMHCPLELPNAT

SEQ ID NO: 48088 - protein, 247 aa, Zea mays
  Coding DNA Sequence Number=SeqID_6309
  Gene Ontology: Mol. function=drug transporter activity; Cellular component=membrane; Biological process=multidrug transport
  Homolog annotation: Hit_ID=Q5GAV3; Match level="QueryCoverage=84%, HitCoverage=17%, E-value=1e-110, Identity=92%"; Hit description =Putative integral membrane protein
MAFGLTGAPGTFQRAMNHTLAPLLRKCALVFFDDILVYNASLNEHISHLEQVFELLSADDWKELRSFLGLADYYHKFIRHFGIICQPLTALLKKGVLYIWTSDHTCAFHTLKTALTQAPVLSLLDFASPFFIETDASAVGVSAVLMQHCHPLAFPSKVLGPKSHGLSTYEKEYLTVILPVQQWRYYHENAIRRSRTSLSLLRLVTSACTFAMFWFAICFFRSKDQKLLGLFRELALDEIRGSASSGH

SEQ ID NO: 48089 - protein, 633 aa, Zea mays
  Coding DNA Sequence Number=SeqID_6310
  Pfam annotation: Domain name=Extensin_2; Domain location=290-614; Score=-116.6; E_value=0.0091; Accession=PF04554.4; Description =Extensin-like region
MAPCQDRLQCRDLPSVEKILRSGGEGGLQNLVQDKWDFEVFFNNVGYELKFTAEGPQQQGSVLAGSSAAGNSDDKDSSRDRGNSRRKEERKGGGRFDRKGKEAEMKHDSSHGESQEDMENIESLGLDLEGSIPNLPIARFHPKDKFANVQILLDSQLSEVVDLEEVCKIPDDGSMIFEKIKKTLEGEPPDHNVGMESRMVREGNQQGIKDGLMLSKQLKNKGGLKIAAGTDKNRGSLGQQSEVTEVSFDKGVDEDGLESLTDWDSDFSMGDVEQRWNIAASKKLKKKKSKRKYPVMRASSRIPRDGISILEKATKRAQEKDAPQAPELPQPSTLLCSERSRPSPPAHGGAAGSPFPGSAQGAGADFPASGLLLTVAASPVPPSGAAQIRARRPRLPPARPPLPSPLEHGRDPPPPFAGAVATGAAMGSAAPAPPDPRAPSMRHAANRPPLRGPPPRRVLPWMPPPRRADARPTTAGCAPPRPYLPGSGALSLPHHVVAALEADVSAEQAANAAAALAARPAAPMGASTPSPAVVVAFPFLSGADVTGPYTSSDAAACTASPPAPTAAAAAAANARGWAPTTVPPASNLLSSRLQQLSVRANRSLFGALPPPLASMQSLQVALLPSPTLAALIR

SEQ ID NO: 48090 - protein, 77 aa, Zea mays
  Coding DNA Sequence Number=SeqID_6311
MAKPTTPQVPPISQLRASHTTLMVALFSWVVIQRTGPYGESTGIKLTTITQKVIKDKMLRAFNHVELEDVDHLIVEA

SEQ ID NO: 48091 - protein, 349 aa, Zea mays
  Coding DNA Sequence Number=SeqID_6312
  Gene Ontology: Mol. function=acyltransferase activity; Cellular component=integral to membrane; Biological process=metabolic process
  Homolog annotation: Hit_ID=Q7XEP2; Match level="QueryCoverage=82%, HitCoverage=54%, E-value=1e-133, Identity=84%"; Hit description =Acyltransferase family protein, expressed
  Pfam annotation: Domain name=Acyltransferase; Domain location=126 -246; Score=30.3; E_value=6.9e-06; Accession=PF01553.11; Description =Acyltransferase
MEKEREASVPMRTLHDYVPLHHVVLLLLTCVHTQAASSAMCGLAGRLSHEAYIVPRAPVEPLPMDQLPRPVIFHDGRLVRRPTPLAALLVVLWFPVGFALACLRIAAGALLPMPLVYYAFWALGVRVHVRGAPPPPRAERATGRRGVLFACSHRTLLDPIFLSTALGRPVAAVTYSLSRLSEFLSPIRTVRLTRDRASDAAMIRDLLAEGDLVICPEGTTCREPFLLRFSALFAELTHEVVPVAMENRMSMFHGTTARGWKGMDPFYFFMNPSPAYVVTFLNKLPPELTCAGGRTSHEVANYIQRLIAATLSYECTSLTRKDKYLALAGNDGVVATPKPPAPAKKPNGC

SEQ ID NO: 48092 - protein, 83 aa, Zea mays
  Coding DNA Sequence Number=SeqID_6313
MEDVDVIASSVHLSGKAAMSLLTNLGGEDDRVDTLDLYDEGIPNLMKPPTPKFMLEKHHLRWDTGKEGLWGPPILMEVDVTIP

SEQ ID NO: 48093 - protein, 241 aa, Zea mays
  Coding DNA Sequence Number=SeqID_6314
  Gene Ontology: Mol. function=acyltransferase activity; Cellular component=integral to membrane; Biological process=metabolic process
  Homolog annotation: Hit_ID=Q7XEP2; Match level="QueryCoverage=85%, HitCoverage=38%, E-value=2e-74, Identity=71%"; Hit description =Acyltransferase family protein, expressed
MEEAVEAVVAAGVEPFPTVDKCDASGRGAHAVVADLDGALLRSRSAFPYYALVAFEAGGVPRLLLLLLLAPLAAALRALASESACARVLVFAATAGARVRDIESAARAVLPRFYAADVHPAAWRVFSACARRRVVLTAAPRIMAEPFLRDCLGADAVAGTELATWRGRATGMVDSRRGVLVGWSRADALREILAGDDDDDAAPDVGLGNSRSDYPFMSMCKESGALLIEFVVEDSLELVEN

SEQ ID NO: 48094 - protein, 147 aa, Zea mays
  Coding DNA Sequence Number=SeqID_6315
  Subcellular localization annotation: CTP_CleavageSite=60; ConfidenceScore=5.67e-01
MTIEAPAPASALYNAPPGGQAPSGGHGPRTSSTGGSARSPATTPAAPHPASTTDGKRHPRKGGRRGGSSTHGGSTGRGRPGLAVGLQPLDRYHLHVAGSGPSTSHPPVPAPALLTAPTYGAPSPPAFGMPPYSVPPTTPTPPQRAPD

SEQ ID NO: 48095 - protein, 70 aa, Zea mays
  Coding DNA Sequence Number=SeqID_6316
MCSGVQGLCLVAGRERRLKEEATGHVGGGANDVFGSGVLRRGVGTRETQLDTMVRKKVGANQAGRTLTCV

SEQ ID NO: 48096 - protein, 111 aa, Zea mays
  Coding DNA Sequence Number=SeqID_6317
  Homolog annotation: Hit_ID=Q6QP51; Match level="QueryCoverage=46%, HitCoverage=24%, E-value=3e-08, Identity=57%"; Hit description =Putative growth-regulating factor 1
MAPHMLCDDGGSQPLTEARGRQQGLNRSDSCPSARLHRSSDGHDITPAGRQISEAATTACSKADPSEGFHGRLRLLGLRTHYGSGVRRLAPEGFTAASDTEQGMTMGTFDT

SEQ ID NO: 48097 - protein, 106 aa, Zea mays
  Coding DNA Sequence Number=SeqID_6318
  Subcellular localization annotation: CTP_CleavageSite=49; ConfidenceScore=5.29e-01
MVNAAKNGPAVMAVAGGQEQRPCRQPSSRPIRGQQENPLSRREDNAPALCSSNGSRTRNGRPVALTPRRDRRRLWQEKWATLRLRHNDHIKKGTEKGGYPEKDPSP

SEQ ID NO: 48098 - protein, 210 aa, Zea mays
  Coding DNA Sequence Number=SeqID_6319
  Subcellular localization annotation: CTP_CleavageSite=54; ConfidenceScore=5.35e-01
MAPLVTWSVRTLGRARRRLLRGRGRVCLPWSRSSPSPGSGEAETVVFRGRGRVRAPGRARRRPSSSGAEAESEPWVGRGGVRRLPGLSPSPSPGSGEAEFIVFRGRARVRALGSGEAELPMAPEAGLGRCQPHSVKWHSSRSDTGGAVLLSGRIRCQATFALNAPAIRSVGAAIWSRLLLGEDWASGEPKLLDFHTEKLTRSSNNQGLRA

SEQ ID NO: 48099 - protein, 133 aa, Zea mays
  Coding DNA Sequence Number=SeqID_6320
MDNSLILYSNSDDTLAGPHNARGLEQRGRVVLRDAVPASREGWAVVEISLRVVTMELRLKGRQSGSRSMTLSLVTACESLRRRSWVVKATTRLASAIFYDQFLLGDACWSAGFDMGTWHGGAYKSGPLTGVLK

SEQ ID NO: 48100 - protein, 154 aa, Zea mays
  Coding DNA Sequence Number=SeqID_6321
  Homolog annotation: Hit_ID=Q2QZZ1; Match level="QueryCoverage=44%, HitCoverage=8%, E-value=2e-12, Identity=40%"; Hit description =Expressed protein
MNHQPLTDFEVFHDTGWRGSRDSQPPVASHILLGNQHSTMRCGAVSDMRLHKGQQGFCGHPQEPVLLKVHINTSSMFWVSSIDCKSRARYWKSIFLNVLIVKALENYFGGISALNYIKKIVVDASTLDEGTLALGYDVRYYWGQPKQGQFHKKA

SEQ ID NO: 48101 - protein, 283 aa, Zea mays
  Coding DNA Sequence Number=SeqID_6322
  Homolog annotation: Hit_ID=Q67UA7; Match level="QueryCoverage=100%, HitCoverage=67%, E-value=2e-96, Identity=61%"; Hit description=F-box protein-like
MDTLPEGVVQHILSQLSNARDVAGCAAVARCWRDCVAFLPSLYFPRGAFEALAGGPASAVAFADDAIGRMVDAAARLEELVVYCPFSASLLPHWLAARAATLRVLELRMDSAAADKSGHLNLDSIGVAAGLEELRLWGLTMTRAPAWGPDGAAPRAGDPVNDVLAACPNLTDLSLLGCQCDGEAVISLASLERCRLDFLGSGNSSLRFAAPRVESLEVQGFSFIYLQGGNRLKHLTISKNTGSVHHVEMGKLPELDQLSLRGVQWSWGAISSVLQCASEVKHL

SEQ ID NO: 48102 - protein, 443 aa, Zea mays
  Coding DNA Sequence Number=SeqID_6323
  Gene Ontology: Mol. function=metal ion transporter activity; Cellular component=membrane; Biological process=metal ion transport
  Homolog annotation: Hit_ID=Q6YSC5; Match level="QueryCoverage=85%, HitCoverage=72%, E-value=1e-102, Identity=57%"; Hit description =Putative IAA-alanine resistance protein
  Pfam annotation: Domain name=Zip; Domain location=1-380; Score=120.0; E_value=6.6e-33; Accession=PF02535.12; Description=ZIP Zinc transporter
MGCSLLVSMASLVCLVLLPVIFCPDCLVYFNSAVKGKPSKAIVDSLAVFGLYLGSQGQFSGPGTIFALPLDIGGDMGGFCKGGGHSHSHDHEGHDHAHAHEHAHAHSLQDLSVGLSVLFGIVLFFIVEKIVRYVEDNSQNGAHSMGHGHHHHNHKRHDSSDKAKLNYQKSDTDGKDIDHAEEEPSVNDTTGKISDGHESEATIRKRSSSKATDGEATNSGRDPAPEKAPSISNSNLVFGYLNLFSDGVHNFTDGMALGSAFLLHGSVGGWSRTLFLLAHELPQEVGDFGILVRSGFTVSKALFFNFLSALVALAGTALALSLGKDPGHSSLIEGFTAGGFIYIAVAGVLPQMNDQKTTIKSSVAQLISLAMGMLVALGISLDQQHIVESLFPSRGEALLAATPACPGPVHGAPVGMHATTTSVKICPCFGLELWLCRTPDVHS

SEQ ID NO: 48103 - protein, 98 aa, Zea mays
  Coding DNA Sequence Number=SeqID_6324
  Homolog annotation: Hit_ID=Q5VRC9; Match level="QueryCoverage=65%, HitCoverage=21%, E-value=2e-15, Identity=61%"; Hit description =Putative BRI1-KD interacting protein 128
MGAVQWQETPQKEQFWAPAPLTTKSWADVEDDDDYFATTASPRPFWGTAGEPAKEEDDVDDVVRAALQELRMRWVGLPSLGDCGLGGSLVFCVVDHWG

SEQ ID NO: 48104 - protein, 225 aa, Zea mays
  Coding DNA Sequence Number=SeqID_6325
  Gene Ontology: Mol. function=nucleic acid binding; Cellular component= intracellular; Biological process=DNA integration
  Homolog annotation: Hit_ID=Q8H6I0; Match level="QueryCoverage=99%, HitCoverage=14%, E-value=6e-79, Identity=63%"; Hit description =Putative gag-pol polyprotein
MSGAHAKKEMVTDKKPATSHGKALSGESGNKKREESPPRVKSHRSGDKKKKMKKVVYYETDSSSPSTSGSDTPSVTSKRHERKKFSKIPLHYPRISKRTPLLSVPLGKPPVFDGEDYCMWSDKMSHHLTSLHASIWDIVEFGAQEPSMGDEGYDSDEVTQIWHFNSQATTILLASLSREEYNKVQGLKSAKEIWDVLKTAHEGDKVTKITKRETIEGGLGRFMLH

SEQ ID NO: 48105 - protein, 532 aa, Zea mays
  Coding DNA Sequence Number=SeqID_6326
  Gene Ontology: Mol. function=structural constituent of ribosome; Cellular component=ribonucleoprotein complex; Biological process =translation
  Homolog annotation: Hit_ID=P35684; Match level="QueryCoverage=59%, HitCoverage=93%, E-value=1e-165, Identity=81%"; Hit description=60S ribosomal protein L3
  Pfam annotation: Domain name=AAA; Domain location=1-94; Score=-25.6; E_value=0.018; Accession=PF00004.19; Description=ATPase family associated with various cellular activities (AAA)
  Pfam annotation: Domain name=Ribosomal_L3; Domain location=238-486; Score=476.7; E_value=2.8e-140; Accession=PF00297.12; Description =Ribosomal protein L3
  Pfam module annotation: Pfam domain module=AAA::Ribosomal_L3; Domain location=1-94::238-486
MDRVVSQDLFIIGATNRPDLLDSALLRPGRFDKLLYVGVNTEASYRERILKAQTRKYKLHKNVSLLSVAQRCPPNFTGADIYALCADAWFHAAKRSVETFETDPSRSNDASAEEVIVEIDDFITCQQRCLLVRARQVGRCEQNPYVIVSSGAILRGSAHGRGLGGLAGSFVPPNGFTCSASAQPAPPPLPLALPSDSRNRRVLILDLIVLSEMIASVKSFPRDDPKKPCHLTAFLGYKAGMTHIVVRSRSLAPTPRGLRTLNSVWAQHLSEEVRRRFYKNWCKSKKKAFSKYALKYDSDAGKKEIQLQLEKIRKMKGLKQKKAHLMEIQVNGGTIADKVDYGYKFFEEVPVDAVFQKDEMIDIIGVTKGKGYEGVVTRWGVTRLPRKTHRGLRKVACIGAWHPARVSYTVARAGQNGYHHRTEMNKKVYKIGKAGQESHDASTEFDRTEKDITPMGGFPHYGIIKGDYLMIKGCCVGPKKRVVTLRQSLLKQTSRLALEEIKLKFIDTSSKFGHGRFQTTDEKQRFFGKLKA

SEQ ID NO: 48106 - protein, 183 aa, Zea mays
  Coding DNA Sequence Number=SeqID_6327
  Gene Ontology: Mol. function=binding; Cellular component=nuclear pore; Biological process=protein import into nucleus, docking
  Homolog annotation: Hit_ID=Q6K6G8; Match level="QueryCoverage=91%, HitCoverage=22%, E-value=3e-58, Identity=79%"; Hit description =Putative Importin 7<Ran-binding protein 7
MTKSYGKKIPMNMFARAMVNLLLSVYQSWLEWVITDKNHVVFVFVSVQQYIIEDLYSPRTAAMDFVSELIRKRGKNNLQKFIHFIVDIFRRYDEAPADLKPYRQKDGALLAIGTLRDKLKQTDPYKTELESMLAAWVAGQYAHINFSDQNNFRQAMHCIVSGMCDPDLPSKNCVPDLMSEGAG

SEQ ID NO: 48107 - protein, 235 aa, Zea mays
  Coding DNA Sequence Number=SeqID_6328
  Gene Ontology: Mol. function=nucleic acid binding
  Homolog annotation: Hit_ID=Q8H912; Match level="QueryCoverage=57%, HitCoverage=17%, E-value=6e-07, Identity=34%"; Hit description =Putative zinc knuckle domain containing protein
  Subcellular localization annotation: CTP_CleavageSite=92; ConfidenceScore=5.38e-01
MASECLLPAIAADPPPTSTQLPTAFLHRRSIDQPATSLPSPVSPRQMRSPTAPPPCPPLPSPPARTHRRPRPASVIVVPEPCAAVPCQPATPAPAKWDIMLPPAGTLCVVSDAEAQAIKLGSVPRPRPPRIRLPRNRPPDSTATTSLRSFKPPCLDQAIQGRAPVKPSPSLLPPDMEAELERLSTHAVVAWLGRDRPEVSADRMKRAFYHQFCVRPDNISVARYHPADFVVTFSH

SEQ ID NO: 48108 - protein, 385 aa, Zea mays
  Coding DNA Sequence Number=SeqID_6329
  Gene Ontology: Mol. function=DNA binding; Biological process=RNA -dependent DNA replication
  Homolog annotation: Hit_ID=Q9LGH0; Match level="QueryCoverage=80%, HitCoverage=98%, E-value=1e-46, Identity=33%"; Hit description=NAM -like protein-like
METAQTGMCTGSVDSVHVSQFLQQRLEQETSHLEGEFDESTVRSLHHRVVPVTIEDQLAEDVPNGTQFDGTMDSGYYTNLLVNGIEESQATRSDVRIQHGHATTKSSQGRSKNFRDEEDILLVSAWLNVGMDPIQGVDQTHGTLWRRIHEYFNANKKFDSNRSEVSLMNRWSGIQHDVNLFCGCLSRVEARNHSGWSIDDKIANACVMFKVEDPKDKKFSYLHCWKILKDKTKWMDRRKEIGSAKKSATKKQKTTTNSSPASVANAIVVDAPLGGADHDEPSCRPDGKKKEKQKLRQRSSMEVVDYLIAKKKDSDLEKDLKKEERCNKAFALQEERIKLDKEKFAFQRQLEEDRIIGLDLSTMNYKQQQYYEDRQNEILARRFNI

SEQ ID NO: 48109 - protein, 103 aa, Zea mays
  Coding DNA Sequence Number=SeqID_6330
  Homolog annotation: Hit_ID=Q75GQ1; Match level="QueryCoverage=90%, HitCoverage=86%, E-value=3e-08, Identity=39%"; Hit description =Putative auxin responsive protein
  Pfam annotation: Domain name=Auxin_inducible; Domain location=8-98; Score=17.6; E_value=5.1e-07; Accession=PF02519.5; Description=Auxin responsive protein
MNWKRNKVAGRCRKEETRERLIQQAAAADPDGGGSVPRGCVAVLVGGREDGAEPEERVVVDVRALLDMAAREFGYGQKGVLRIPCAADELRRAVAADRHRWTR

SEQ ID NO: 48110 - protein, 171 aa, Zea mays
  Coding DNA Sequence Number=SeqID_6331
  Subcellular localization annotation: CTP_CleavageSite=69; ConfidenceScore=5.45e-01
MAPVGGRARPLAQATGAQGAEAAPVALAQGRPRLRSAVAASPVALGRSRRPHCRRGALPHSPVALRSAVAGRAGAVEPGWPPWRWESGWRWESPRQDRDTATRDRKDGGRRLAGIWKWVARPRFRPLLACRLQLPRTHFGPFRAGDRWRRVVVAPLAHRTVRCTPDMSGEL

SEQ ID NO: 48111 - protein, 736 aa, Zea mays
  Coding DNA Sequence Number=SeqID_6332
  Gene Ontology: Mol. function=translation initiation factor activity; Cellular component=cytoplasm; Biological process=multicellular organismal development
  Homolog annotation: Hit_ID=Q5Z5B2; Match level="QueryCoverage=72%, HitCoverage=56%, E-value=0.0, Identity=78%"; Hit description =Putative AGO1 homologous protein
  Pfam annotation: Domain name=DUF1785; Domain location=422-474; Score =109.9; E_value=7.6e-30; Accession=PF08699.1; Description=Domain of unknown function (DUF1785)
  Pfam annotation: Domain name=PAZ; Domain location=475-613; Score =172.7; E_value=9.3e-49; Accession=PF02170.12; Description=PAZ domain
  Pfam module annotation: Pfam domain module=DUF1785::PAZ; Domain location=422-474::475-613
MTTHSRTKWRSSLTCFVRWCWTGWVGGEVHGAEVVIVDKGAPRQQTVQLLEQLTKPCRLGDAVSHNVVLDFGARARDDNMSLRRPGDKTITKEHDEGPVGVDVDNEVVSRRSSKKEAKDYGASERIEFVSFTAHGMGSWRQKLPGLGEGSGSGSQAAEAGGGGRGFRGRGGFYHQQQSPQGGRGRGTGYYSGGGGGRGGRGAVPSAIAPELRQAMQTSNEPDNIPAPEAGSQSQDAPSPSEEAVDQLKGLSVQDIVQAFPVSSKFPHRPGNGSVGTRCLVKANHFFAELLPAKKDLHQYDVSVTPEVTSRIVNRSVMEELVRLHKLSYLGGRLPAYDGRKSLYTAGPLPFTSKEFHITLLEEDDGSGVERRKKTYKVVIKFAARADLRRLEQFLAGRQAEAPQEALQVLDIVLRELPTTRYAPFGRSFFSPDLGRRRSLGEGIESWRGFYQSIRPTQMGLSLNIDMSATAFFEPLPVIDFVAQLLNTDDIYSRPLLDAERVKIKKALRGVKVEVTHRGNMRRKYRIAGLTSQETRELTFPVDQGGTVKSVVQYFQETYGFAIQHTYLPCLQVGNQQHPNYLPMEVCKIVEGQRYSKRLNQSQIRALLEETCQRPHDRERDIIQMMNHNSYHEDPYAKEFGIKISERLASIEARILPAPRLKYNETGREKDCLPRVGQWNMMNKDFALEPILPPIYAHPDKVERALKARFHDAMNLLGPQRREQLDLLLVGILPDNN

SEQ ID NO: 48112 - protein, 841 aa, Zea mays
  Coding DNA Sequence Number=SeqID_6333
  Gene Ontology: Mol. function=sucrose synthase activity; Biological process=sucrose metabolic process
  Homolog annotation: Hit_ID=Q6K973; Match level="QueryCoverage=95%, HitCoverage=95%, E-value=0.0, Identity=81%"; Hit description =Putative sucrose synthase
  Pfam annotation: Domain name=Glycos_transf_1; Domain location=563 -750; Score=79.3; E_value=1.2e-20; Accession=PF00534.10; Description =Glycosyl transferases group 1
  Pfam annotation: Domain name=Sucrose_synth; Domain location=8-560; Score=897.8; E_value=4.8e-267; Accession=PF00862.10; Description =Sucrose synthase
  Pfam module annotation: Pfam domain module=Glycos_transf_1::Sucrose _synth; Domain location=563-750::8-560
MASKLSFKRADSIAESMPDALRQSRYQMKKCFHRYVSKGRRLLKNQQLIEELDKSLDDKVEREKLVEGFLGYIICSTQEAVVLPPYVAFAVRMNPGIWEYVKVHSDDLSVEGITPSEYLKFKETLYDENWAKDDNSLEVDFGALDLSTPHLTLPSSIGNGLQFVSKFMSSKLGDKPEISMKPLLDYLLSLNYRGEKLMVNDTIDTVNKLQTALLLAEVFVSGLPRYTPFLKFEQRFQEWGLEKGWGDNAERCKETLNCLSEVLQAPDPINMEKFFSRVPSIFNIVVFSIHGYFGQEKVLGLPDTGGQVVYILDQVRALEEELLQRIKLQGLNVTPKILVLTRLIPDAKGTKCNVELEPVENTKHSHILRVPFKTENGKELRQWVSRFDIYPYLERYAQDSCAKILDILEGKPDLIIGNYTDGNLVASLMSSKLGVTQGTIAHALEKTKYEDSDVKWRDLDQKYHFSCQFTADMIAMNTSDFIITSTYQEIAGSKEKPGQYEHHYAFTMPGLCRYATGINVFDPKFNIAAPGADQSIYFPFTQKQKRLTDLHPQIEELLYSKQDTGEHRGYLADRNKPIIFSMARLDKVKNITGLVEWYGQNKKLRDLVNLVVVAGLLEASQSKDREEIEEINRMHSLIDKYQLKGQIRWIKAQTDRVRNGELYRCIADTRGAFVQPALYEAFGLTVIEAMNCGLTTFATNQGGPAEIIVDGVSGFHINPTNGREASNKIAEFFQKCKEDPSYWNKVSTAGLQRIYECYTWKIYATKVLNMGSTYGFWKTLNKEERVAKQRYLQMFYNLQFRNLAKTVPRLFEHPPPQAPAGAGPSTMTDHDQLDGAEACYF

SEQ ID NO: 48113 - protein, 415 aa, Zea mays
  Coding DNA Sequence Number=SeqID_6334
  Gene Ontology: Mol. function=translation initiation factor activity; Cellular component=cytoplasm; Biological process=multicellular organismal development
  Homolog annotation: Hit_ID=Q5Z5B2; Match level="QueryCoverage=83%, HitCoverage=30%, E-value=1e-153, Identity=86%"; Hit description =Putative AGO1 homologous protein
  Pfam annotation: Domain name=Piwi; Domain location=1-271; Score =318.0; E_value=1.7e-92; Accession=PF02171.8; Description=Piwi domain
VGGRNTVLADAVSRRIPLVTDRPTIIFGADVTHPHPGEDSSPSIAAVVASQDWPEVTKYAGLVSAQSHRQELIEDLYNVTHDPQKGTVCGGMVRELLISFKKSTGQKPQRILFYRDGVSEGQFYQVLLHELDAIRKACASLEANYQPQVTFIVVQKRHHTRLFAHNHNDQNSVDRSGNILPGTVVDSKICHPTEFDFFLCSHAGIKGTSRPAHYHVLWDENNFTADALQTLTNNLCYTYARCTRSVSIGRFVKVISIAESMHEQQINQKMHMPSLQSRRRTTLTWPHSAPGSTWSLTAQTAGRWRVAPVEAERPPARQRPAAPAPPPAEPLDPSPRSRTASRRSCSTADEPEHEDSRQPCLKSDPLGAVVCRAQKTFAWCLFDEGWLEWWIRFLLVLRDDRNSTIANKKFEIKLN

SEQ ID NO: 48114 - protein, 110 aa, Zea mays
  Coding DNA Sequence Number=SeqID_6335
MENDGKALPWSSSKENKEPQMLEAGMQMVSKGLKVVQTFRSSKDDLAQLASKIYVEINKPVAGVGGYLIDVECSYIDEWVGTEHNVELAACYHLLLDGKGVKRVDFLDVR

SEQ ID NO: 48115 - protein, 185 aa, Zea mays
  Coding DNA Sequence Number=SeqID_6336
RACSCAHPSAYCAHCLLPARQDLYRAPHGGFPMPRSSPCSSPKLGPPWRRIPCKLAQVATVEAPCACCFFSAPPAAPYLSLSLAASLPCEILPAFLLAMVLVVVALLWSSPWPALPASRPAVPSPIAARPYSLVSLISFPSASRELAHGAHSSPGPMLVAFNVADSSMILVDELRFIDSSPSVRL

SEQ ID NO: 48116 - protein, 122 aa, Zea mays
  Coding DNA Sequence Number=SeqID_6337
MLGCAVCGWPAGHLALWPARAQGGNSEHVGPQGTTGTQEFSSHGFRIRRREDADRWRMRCCVCRVSSAGCRAMGVAGRANPTSSLRSRRCLRMRPSYAPFSEPFTEPPAPAAPSYPAAAHSA

SEQ ID NO: 48117 - protein, 524 aa, Zea mays
  Coding DNA Sequence Number=SeqID_6338
  Gene Ontology: Mol. function=RNA-directed DNA polymerase activity; Cellular component=mitochondrion; Biological process=RNA-dependent DNA replication
  Homolog annotation: Hit_ID=Q8S463; Match level="QueryCoverage=99%, HitCoverage=27%, E-value=0.0, Identity=86%"; Hit description =Putative prpol
  Pfam annotation: Domain name=RnaseH; Domain location=1-123; Score= -13.9; E_value=0.0011; Accession=PF00075.14; Description=RNase H
  Pfam annotation: Domain name=rve; Domain location=314-473; Score =116.2; E_value=9.2e-32; Accession=PF00665.16; Description=Integrase core domain
  Pfam module annotation: Pfam domain module=RnaseH::rve; Domain location=1-123::314-473
MFFDGSLMKTGAGACLLFIPPLGKHLRYVLALHFSASNNMAEYEALVNGLRIAIELGVRRLDARGDSQLIIDQVMKNSHCRDPKMEAYCDEVRRLEDKFYGLKLNHIARRYNETADELAKIASGRTTVPPDVFSRDLHQPSVKIDDTPEPEAPSARLEAPSARPESPSASEGEALRIEEERSGVTPDRNWQTLYLQYLHRGELPLDRAEARRLARRAKSFVLLGDGKELYHRSPSGILQRCISIAEGQELLQEIHSGACGHHATPRALVGNAFRQGFYWPTAVADATRIVRTCEGCQFYARQTHLPAQALQTIPITWLFAVWGLDLVGPLQKAPGGYTHLLVAIDKFSKWIEVRPLNSIRSEQAVAFFTNIIHRFGVPNSIITDNDTQFTGRKFLDFCEDHHIRVDWAAVAHPMTNGQVERANGMILQGLKPRIYNDLNKFGKRWMKELPSVVWSLRTTPSRATGFTPFFLVYGAEAVLPTDLEYCSPRTRAYADQSNQANREDSLDQLEEARDMALLHSARYQ

SEQ ID NO: 48118 - protein, 104 aa, Zea mays
  Coding DNA Sequence Number=SeqID_6339
MMRISMIRCFPLSYYDVILVVIKRARAVSRVPLRGYEIDGFGYDYGAASPLQPNRILAEYVDVYSPLPYTPTPPSPGCQHCNHCSGEDEAMEGDFQEFQDYDEF

SEQ ID NO: 48119 - protein, 476 aa, Zea mays
  Coding DNA Sequence Number=SeqID_6340
  Gene Ontology: Mol. function=electron carrier activity; Biological process=electron transport
  Homolog annotation: Hit_ID=Q6EPG5; Match level="QueryCoverage=99%, HitCoverage=98%, E-value=1e-150, Identity=61%"; Hit description =Aluminum-activated malate transporter-like
  Pfam annotation: Domain name=UPF0005; Domain location=61-430; Score =363.5; E_value=3.3e-106; Accession=PF01027.11; Description =Uncharacterised protein family UPF0005
MDAAAREAQQSSGLEWRVTVPEGASVTVEHEAGPAARALAWLLACFAKAWSRVAGFARKVWRIGADDPRKAVHGLKVGLALALVSVFYYTRPLYDGVGGAAMWAIMTVVVVFEYTVGGSVYKCFNRVVATASAGVLALGVHWAADKSGELEPYILSGSLFLLAAAATFSRFIPTVKARLVAVSGYRVDELAALAQQRVSTIAIGIFLCLAVSMLICPVWAGKELHLLTTRNMDKLAAAVVACVESYFAEGPASGAGAGADGYKCVLNSKASEDAQANLARWEPAHGPFGFRHPYGQYARVGAAMRACAYCVEALSSCAGAEVQAPPHVKRLLRDACSAVAARCARVLREASRSVATMSTSSSRALDFAVADMNTAVQELQADLRALPSMLAVKLGETSLMDTMPVFTVASLLVEISARVEGVVDAVDALATLANFKQTEDDDDDDKKGEAEMTIKVHPLNEPDTAEESRENQTSKA

SEQ ID NO: 48120 - protein, 98 aa, Zea mays
  Coding DNA Sequence Number=SeqID_6341
MECERMSGRITNELNAQVHGAGGLAVETPVPARNSTGPGRHFDCGTRSLHTESPSESTERGIVLKWGKGPTTDAPRRCGCGGEVRPVAQVVSGPLVAA

SEQ ID NO: 48121 - protein, 488 aa, Zea mays
  Coding DNA Sequence Number=SeqID_6342
  Gene Ontology: Mol. function=electron carrier activity; Biological process=electron transport
  Homolog annotation: Hit_ID=Q6EPG5; Match level="QueryCoverage=99%, HitCoverage=98%, E-value=1e-166, Identity=65%"; Hit description =Aluminum-activated malate transporter-like
  Pfam annotation: Domain name=UPF0005; Domain location=60-442; Score =414.8; E_value=1.3e-121; Accession=PF01027.11; Description =Uncharacterised protein family UPF0005
MDAAAREAQQSGVEWRVTVPEGTSVTVEHEAGPAARAWTWLVACFAMAWSRVAGFARKVWRIGTDDPRKAVHGLKVGLALVLVSVFYYTRPLYDGVGGSAMWAIMTVVVVFEYTVGGSVYKCFNRVVATASAGVLALGVHWAADKFGELEPYILSGSLFLLAAAATFSRFIPTVKARFDYGVTIFILTYSLVAVSGYRVDELAALAQQRLSTIAIGIFLCLAVSVLICPVWAGQELHLLTTRNMDKLAAAVVACVEGYFAEGPASSSRAGADGYKCVLNSKASEDAQANLARWEPAHGRFGFRHPYGQYARVGAAMRACAYCVEALCSCAGAEAQAPPHVKRLLRDACATVAVRCARVLGEASRSVATMSTSSSRALDFAVADMNTAVQELQADLRALPSMLAVKLGETSLMDTMPVFTVASLLVEISARVEGVVDAVDALATLANFKQLDDDDNDDKKGEAEMTIKVHPLNEPDTADESRENQTSKA

SEQ ID NO: 48122 - protein, 63 aa, Zea mays
  Coding DNA Sequence Number=SeqID_6343
MANLSYPLFPFLELEEEGKGHDHAARGGGGELELLTVELEASGPVSEKRGRSDNIDSKNRGQI

SEQ ID NO: 48123 - protein, 121 aa, Zea mays
  Coding DNA Sequence Number=SeqID_6344
MGKDKKGRGSPRHSGDKQKREPSPPSEDFGDSEYSEEEFYSESEGPPGIAAEVWTYILSVERAEFEGLDESEVSSDDGDDSGGGGDDGKSDGAGSGGGRSDDDGKDDSSNSSKASGKAPLA

SEQ ID NO: 48124 - protein, 349 aa, Zea mays
  Coding DNA Sequence Number=SeqID_6345
  Gene Ontology: Mol. function=6-phosphofructokinase activity; Cellular component=6-phosphofructokinase complex; Biological process=glycolysis
  Homolog annotation: Hit_ID=Q948J0; Match level="QueryCoverage=96%, HitCoverage=68%, E-value=1e-166, Identity=86%"; Hit description =Putative pyrophosphate--fructose-6-phosphate 1- phosphotransferase
  Pfam annotation: Domain name=PFK; Domain location=169-347; Score= -110.2; E_value=5.3e-06; Accession=PF00365.10; Description =Phosphofructokinase
MAVAPMDCGAGSISLGHKVLCRFGVPNSSRLRWVGYDRKQRTDQLIARAVSVDRTQLDFSNPDWKTQFQEDFDKRFSLPHLTDVIDVEPRPTTFSLKSRAPLENANGTMQGSWNGYVNDDDRALLKVIKFASPTSAGADCIDPDCSWVEQWVHRAGPRKQIYFEPQYVKAGIVSCGGLCPGLNDVIRQIVLTLEKYGVKNIVGIQHGFRGFFEDHLSEVPARRLDMLFVLGGNGTHAGANAIHDECRKRKLQVSIVCVPKTIDNDILLMDKTFGFDTAVEAAQRAINSAYIEAHSAFHGIGLVKLMGRSSGFITMHASLSSGQVDICLIPEAKYGLIKANGFYPPINPD

SEQ ID NO: 48125 - protein, 234 aa, Zea mays
  Coding DNA Sequence Number=SeqID_6346
MESAIYWGGMEKKRRDQTLQMKQRLCLEDFAGLGVVVTDFAEELAETTGEATSPKSLMAAHARRGGKTCAIGCRNRGGISRGANAVSIYVYFTESLLSDEPLTLGLAGADEGMNLVAKPRSEPTKAVVDVVVDPWARFCSVVDSGRDPRLYIDVKFPDIAQWGMRFIVTPYQRESSDCAFFVMLFMEFYNRADRDFETMINDEKVQQHLAQGTYPLLHVVSFHEQSKKGISLLP

SEQ ID NO: 48126 - protein, 148 aa, Zea mays
  Coding DNA Sequence Number=SeqID_6347
MRHEMLEMYIAKVCPECYWTRVFIGVAGVSLAAPVDTKFYCGAVQICVGDDYILWGVFEWGFAKHYCLHWQKKKVGGKVVQFGSCTFTLKTGKTGGVVYELVPCERIDGVVGLSLGFMWTFKKGCLVWLNQWPVLLWRRTSSPVLTSK

SEQ ID NO: 48127 - protein, 197 aa, Zea mays
  Coding DNA Sequence Number=SeqID_6348
MRQGVCARHWRVSKKGAGRVGGHRGREIRRSARVRTRRSMASAEGAELTVIEHHGGPVFARIHSLDGVVHPSGHDGLVLVLDAGHSNAVGGGEEVGQVREVQEVIVDEDRLAVVARIGHTSSGSTSAGPGCGGTPHLPRAPAGCTPRTHGMAPPPPATSNLDAVAPAWLDVWGVVDLLGGMERRSARMDGTGGGGRG

SEQ ID NO: 48128 - protein, 695 aa, Zea mays
  Coding DNA Sequence Number=SeqID_6349
  Homolog annotation: Hit_ID=Q53KW9; Match level="QueryCoverage=86%, HitCoverage=74%, E-value=2e-59, Identity=31%"; Hit description =Expressed protein
MSACGGTIPASRFLRRRAAVRDLGGDAAAGDTDAFWAAPPRLYDFSQQQQQQHTAQAARRSPSPAPTSPCLLARKRHQQSPSPPPSPRRSPSSPGTCLLSALHRTCVGWGVTRRAEYPRRHRPVSPAACGQVTGMHTHGRAAARCVDEDEESTSKNSKCLLAVGKNELEEEVGQDHESCLHRRRRAKKAPWAVKEEQETSGEAAEEGAKRAKRTPLKHEAAAAAESKPAGAATATATPDSGSPRGNGKVDRWAAWRYAAGEAALANILRERGATAGNPTPRAVLRAQARRFISDTGLLDNLLRHVADKVPAGTADRVRRRYNPAGGMEYWIEPAGLAAARREAGVEDTYWVPPPGWKPGDPVSPEARTLEVQKQVEVLAGELAVVKRQMEQLDSNLVQMSKEAYISWKGYDCMVKANGKLEKEVLSLEEKYETAAQVNGELKELLLLLKDKYDTVLEKNEKLEGQMVALSTSFQSMKEELLLQRMEEHPLLMLAQEPWEGDKREAGGANKALVVCAGDQLAGADAFDGSFSSNHSAYGDEKMVLRKRICVREGACQWPRSATSSGATAGSPGDLPEPLTPGADLIVTDFDTMIDSLALPSMEEYLQVDGLPTPTSASSTTASPKLQLLPSPASPSQVQPLPSTTMVVGDFNMQLRHMDTSSSSSSGPCGAKALKLDAGAGGGEVGTELVLATPTY

SEQ ID NO: 48129 - protein, 188 aa, Zea mays
  Coding DNA Sequence Number=SeqID_6350
  Homolog annotation: Hit_ID=Q2QM08; Match level="QueryCoverage=80%, HitCoverage=19%, E-value=1e-24, Identity=47%"; Hit description =Expressed protein
EMRRADMSSGGFDTEQGSAFASTAGNVCYSMEVKDAVLPPWVVSGLCAAMSLDATSFDLTYVRATTPPPDTDSSSALSFCRGFSRRIATEPSSMGLNVALDSMGTTTTDVQPEGSTPSSCSAPTTPLVGAVPDAALVPALHSASLRRLTYTDGGGAAQACSFENLEPALAFVVQGRRVVTRLVGLDGN

SEQ ID NO: 48130 - protein, 120 aa, Zea mays
  Coding DNA Sequence Number=SeqID_6351
MWYCSFDLLLTVFCTYLWLLYGSLYLWRRLRACYQHAVLRRGLGYATVGLGVFLSAIFLYSFASVIPLLQAVGVWLFALLVAYCLYRVIVLHIEEEEEEKEGAVLVAQPHKHAVVIRPLV

SEQ ID NO: 48131 - protein, 88 aa, Zea mays
  Coding DNA Sequence Number=SeqID_6352
MTSGRMLLPQGPRPCPHSRGENKQKAVELERVKGRTAMQAACNRTKGAHPFGFNASSMEAQAHTSCNRRAGYYVQGNCTATCASTTPP

SEQ ID NO: 48132 - protein, 127 aa, Zea mays
  Coding DNA Sequence Number=SeqID_6353
MQHCSSLTQPGDGGDRARTKVSSPAGLTLPALVLRIPENESDKMAEVLPTPLTSRGRSTVQREFGEGPHSGEESMAIPTQTPPAEDPHSFPGIKRNFTASNGFRFWAWLDFLLRRCGGVLCVFSDWE

SEQ ID NO: 48133 - protein, 514 aa, Zea mays
  Coding DNA Sequence Number=SeqID_6354
  Gene Ontology: Mol. function=amino acid transporter activity; Cellular component=membrane; Biological process=amino acid transport
  Homolog annotation: Hit_ID=Q2QLZ1; Match level="QueryCoverage=99%, HitCoverage=99%, E-value=0.0, Identity=72%"; Hit description=Amino acid permease family protein, putative, expressed
  Pfam annotation: Domain name=AA_permease; Domain location=36-440; Score=45.8; E_value=1.4e-10; Accession=PF00324.11; Description=Amino acid permease
  Pfam annotation: Domain name=Spore_permease; Domain location=31-368; Score=-162.7; E_value=0.025; Accession=PF03845.4; Description=Spore germination protein
  Pfam annotation: Domain name=Trp_Tyr_perm; Domain location=30-358; Score=-278.0; E_value=0.059; Accession=PF03222.4; Description =Tryptophantyrosine permease family
  Pfam module annotation: Pfam domain module=AA_permease::Spore _permease::Trp_Tyr_perm; Domain location=36-440::31-368::30-358
MGSGVRALMRRKQVDSERTRAAGSAHQLRKELSVTQLVAIGVGSTIGAGVYVLVGTVAREHSGPALTLSFLIAGIAAALSAFCYAELASRCPSAGSAYHYSYICVGEGVAWLIGWALILEYTIGGSAVARGISPNLSSFVQGVVTVLNCFVMLFVIIAGSYIGFQTGWVGYKVAGGFFPYGANGMLAGSATVFFAYIGFDSVASTAEEVKNPQRDLPLGIGTALSICCSLYMLVSVVIVGLVPYFAMDPDTPISSAFAKHGMHWAMYLVTTGAVLALCSTLMGSILPQPRILMAMARDGLLPSFFSDVHKTTQVPVKSTVVTGICAAALAFFMDVSQLAGMVSVGTLLAFTIVAVSILILRYVPPDEVPLPSSLQASFRLSQENDEEKLRGTLGDDDHEQGSAEISDVVVEPITDPLIEKQLYASNLSEAKRRKTAACSITSVCIGVLILTTSASATFLPFGGTWMRVGVWLVMGVFVYIFYGRTHSSLTDVVYVPVAEANEIYGSSSSLGFVA

SEQ ID NO: 48134 - protein, 40 aa, Zea mays
  Coding DNA Sequence Number=SeqID_6355
MAHLVEVTVLEPGVRMCRRCALQMFVHQRTCSCRIYRDQR

SEQ ID NO: 48135 - protein, 88 aa, Zea mays
  Coding DNA Sequence Number=SeqID_6356
  Gene Ontology: Mol. function=catalytic activity
  Pfam annotation: Domain name=4HBT; Domain location=2-67; Score=19.1; E_value=0.0042; Accession=PF03061.12; Description=Thioesterase superfamily
MAADDVCAATIMSVEGIVKVSVHYDISYFTPAKLHDEVEMDGRVVEQKGRMTAVAVEIRKKESGELVAIRRQWMTASRPKCVAAHSKI

SEQ ID NO: 48136 - protein, 68 aa, Zea mays
  Coding DNA Sequence Number=SeqID_6357
MAATKEADHCIKYLDCFVLQGQVIIVEKCISVFTDETTISVFNESVELNCKNRNCSILFECTNRTQRN

SEQ ID NO: 48137 - protein, 99 aa, Zea mays
  Coding DNA Sequence Number=SeqID_6358
MSSPARSTISAAEDVADSIDALYRKDEALAELKSEVMEALQREVRSLDEDNWMFAAPRSRINLVSRPDTCKDFSSDCDFNVMICMIATLVGDSKYIDNY

SEQ ID NO: 48138 - protein, 184 aa, Zea mays
  Coding DNA Sequence Number=SeqID_6359
  Gene Ontology: Mol. function=NADH dehydrogenase (ubiquinone) activity; Cellular component=mitochondrial membrane; Biological process=photorespiration
  Homolog annotation: Hit_ID=Q9M9B4; Match level="QueryCoverage=50%, HitCoverage=86%, E-value=3e-37, Identity=70%"; Hit description=NADH dehydrogenase [ubiquinone] iron-sulfur protein 6
MVRKAKVEFDEQPPDNFDPKNPYADPVAMLEYREHLVREKWIQIETAKIIRERLRWCYRIEGINHHQKCRHLVDQYLEATRGVGWGKDARPPELHDQERSKKTDQRRRRDGEGSGPSTAHMGTSTRWERDCRVVADREQMLAAEKKPEIFVEVEKSANGIGPRFSVSQISYPSSWAPKRLDKFY

SEQ ID NO: 48139 - protein, 102 aa, Zea mays
  Coding DNA Sequence Number=SeqID_6360
MAGSKDHFDVLPNNIIEPIMETLSAEDQQEFEKHKEQLIREVKAKYLANFKVVMHQKAIRIQETDLASFRPTAIIPNANIVGLEDPKAKASRILAQKAMSKQ

SEQ ID NO: 48140 - protein, 155 aa, Zea mays
  Coding DNA Sequence Number=SeqID_6361
MARTKTTQRKATEAHGVPRHQLAPRHEGSSSGSNNPIADLEAMLEIIERDTTIDWAVNSRSFAWDCEAKALARVAQLSASLENLQAYCNTLHKEVHVLYDQLHPNVPPEVAAMGARPSRMANRGSDGELDLFGAPPSMNLADERSPEAGSGASQD

SEQ ID NO: 48141 - protein, 394 aa, Zea mays
  Coding DNA Sequence Number=SeqID_6362
  Homolog annotation: Hit_ID=UPI0000DA43ED; Match level="QueryCoverage =37%, HitCoverage=92%, E-value=7e-09, Identity=36%"; Hit description =PREDICTED: similar to keratinocytes proline-rich protein
MFGALRGQHGAFPPPPCGKATQGRIAACAAPTAEPLDRVRLTAAKSGPRRHGKLLFARPQGSDSGSAPEDDELRFARPQGSDSGPAPEDDELRSARPQGSDSGSAPGRRRTPLCPTPGLGLGLSLGRRQTPLRPTLGLGLGPGIRRRSPPHPTQGLGLDLDLGRQTRPRPRRSLHLAQPRARTDHKKTKSPMVRIMKGIWETMQKNATATQKAVDGDVQSDSIKKAMSLVVECGAPEGSAEHFMASQLFAKSAYRDIFFTLTTKNMGTKYHLAEFRQGCNPCGKKEQEKESLRDYYKKFHLVKSQLPSVDDKIAINYAINDLHANVLYSHCIRDPLSNLKELYHLFKKYAHTEELHQRKVESQRKSKETPQSSTTWTRVPQQDPPCCQECGQQL

SEQ ID NO: 48142 - protein, 136 aa, Zea mays
  Coding DNA Sequence Number=SeqID_6363
MYNVQYSVSGVPVPSMQLGRNQIISGLTHIRCGYANTKFFDSQSTTQLVTQWSVPHWASRGVKIEGRFSWTPWRQGMSEKKGENVGPALGSGEWASRDDAGSGGNRARTRRRVGRQGQALKTHASTIGNHAAPRSG

SEQ ID NO: 48143 - protein, 117 aa, Zea mays
  Coding DNA Sequence Number=SeqID_6364
MDSQAPTNSDGDQGRPPDLRWTSEIQRSARSGRPVLSAVAPLDPRRGVAGNKEDGHGRALEDWGKAQARLGRHGGLNRGHSAEAELIEAVGAAETPRRPQNERRTMESGGGASLVRV

SEQ ID NO: 48144 - protein, 153 aa, Zea mays
  Coding DNA Sequence Number=SeqID_6365
MQKTPWGNPESNPRSFPYWNSTRDGEKGGGAYRRRDSFDEVVDNVGEVVAITLMCGSLAGVAGAQVAQAGGVELAGTKSWIWTVRASAEWSVAHSGWLYRSGRGARSGMDQRGRAGLACTGASVVVEHVAHCLCSCSNTDRLHIFTNLGKIAV

SEQ ID NO: 48145 - protein, 73 aa, Zea mays
  Coding DNA Sequence Number=SeqID_6366
  Subcellular localization annotation: CTP_CleavageSite=9; ConfidenceScore=5.25e-01
MTRPPPNAPANLATSGLEKRGPGICHRSAVFTTGAPTIVAERQQSGNRRTRRPHTLFTKSRILSEQPPDLSGK

SEQ ID NO: 48146 - protein, 57 aa, Zea mays
  Coding DNA Sequence Number=SeqID_6367
MRDRAMFHLRAIFSRAPSASLPSPGQALPQAYFQEMSCPLKVAKRARYFVVRQPQSF

SEQ ID NO: 48147 - protein, 104 aa, Zea mays
  Coding DNA Sequence Number=SeqID_6368
MTARASSGSHIDYTPGAAILGNLDFVIKQESKMVGMAPTWPPLPESPDTVLEVVGDLRIVSRKRPFFASYTELSGLYNAKTMSYYGGSSNSHDAFRVDYATPWR

SEQ ID NO: 48148 - protein, 170 aa, Zea mays
  Coding DNA Sequence Number=SeqID_6369
  Gene Ontology: Mol. function=sequence-specific DNA binding; Cellular component=nucleus; Biological process=regulation of transcription, DNA-dependent
  Homolog annotation: Hit_ID=Q6EP49; Match level="QueryCoverage=82%, HitCoverage=61%, E-value=1e-31, Identity=48%"; Hit description=MADS -box transcription factor 27
  Pfam annotation: Domain name=K-box; Domain location=9-113; Score =66.9; E_value=6.7e-17; Accession=PF01486.8; Description=K-box region
MPLNLSPPSQSLNIGGRWEKKKRKHTPLLWQREAGSLRQQLHNLQEHHRKLLGQQLSGLDVRDLQNLENQLETSLRNIRLKMDQLIFYQIQELNRKGYLMHQENIELHNKVNLLHQENIKLRRKAYGQGVNEHPTSTTVRHSILNTENEDVRINLELSVQGDKSETPSIG

SEQ ID NO: 48149 - protein, 141 aa, Zea mays
  Coding DNA Sequence Number=SeqID_6370
  Gene Ontology: Mol. function=sequence-specific DNA binding; Cellular component=nucleus; Biological process=regulation of transcription, DNA-dependent
  Homolog annotation: Hit_ID=Q6VAM4; Match level="QueryCoverage=42%, HitCoverage=37%, E-value=2e-22, Identity=88%"; Hit description=MADS -box transcription factor 23
  Pfam annotation: Domain name=SRF-TF; Domain location=9-59; Score =98.4; E_value=2.2e-26; Accession=PF00319.9; Description=SRF-type transcription factor (DNA-binding and dimerisation domain)
MGRGKIEIKRIDNATSRQVTFSKRRGGLFKKAKELAILCDAEVGLVVFSSTGRLYHFASTRFQPSCFAECFIYSTKSRKYSTKSLPSMTFSKLYIDNGFFIEYLLSNTQQKLCRVPPGTQQRKVVIMAPSNGDRAFAECPP

SEQ ID NO: 48150 - protein, 41 aa, Zea mays
  Coding DNA Sequence Number=SeqID_6371
MESVIERYEEREGHHQTMSASAEAKVPDEGPRSHMGRLQTP

SEQ ID NO: 48151 - protein, 103 aa, Zea mays
  Coding DNA Sequence Number=SeqID_6372
MPPIAGVFLRTCSLTDGPQSPTPLGAVLEHVAQLLILVPSTISLRMLVYYPHPIHLMSHPSSVVMDNMTILTFTSDIVDNMNILLFARCDSSRPMPSFMLATG

SEQ ID NO: 48152 - protein, 129 aa, Zea mays
  Coding DNA Sequence Number=SeqID_6373
MPKDMYQSKKLLEGLGMEYEKIDVCQDKCGGDFLSVFAQEGWLREERSRRSSYLSPLDSARDMGEGRPRFTGDGSEFLARGGRASRQSLSWGMTTWVPCDSVMGEANAAGAYDQGDPHDRANGVQVNRS

SEQ ID NO: 48153 - protein, 486 aa, Zea mays
  Coding DNA Sequence Number=SeqID_6374
  Gene Ontology: Mol. function=calmodulin binding
  Homolog annotation: Hit_ID=Q6YYA1; Match level="QueryCoverage=91%, HitCoverage=90%, E-value=1e-143, Identity=56%"; Hit description =Putative calmodulin-binding protein
  Pfam annotation: Domain name=Calmodulin_bind; Domain location=94-400; Score=523.0; E_value=3.2e-154; Accession=PF07887.2; Description =Calmodulin binding protein-like
MAAAWRPRDNDDDDEDDAGGGADDDDPHRSGPRPTQTRVVRGFVDQESIQQIFHYLEPLISRVVREEIQNIFSHCHNDHMPIRSLPLRIREAHVLPHLKLVFAKQLKQPIFTNNKIVDIANNPIEIHLMDTTTNSMIPPADTHLGPSSVVRLEVLVLNGDFQCEDRDVWTADQFNAVVLKAREGKRPLLVGSLNVPMNNHGVAVIDDVFFTDNSSWIRCRKFRIGVRIMPADHLGSRVKEAVSESFTVRDHRGESYKKHYPPLMTDNIWRLKNIGKDGPIDKRLQSEGIRNVQDFLKLNTIDPEKLQALVGMSDKQWNTTLNHAKTCDMGRKCYTFKTVGCDITFNPIGEVLRARIGDHTFPLQELHPYQLFHVKQLAAQAYQMWDQLEEVPNEKLFAANKSFVPRSSSDQERTESQAESMISSGSQNTKYLDYTGTATSGAAAMPNSCSTSDSIGAAPADDAMLWRPSIPPECNFSWQDSAACWD

SEQ ID NO: 48154 - protein, 201 aa, Zea mays
  Coding DNA Sequence Number=SeqID_6375
MAGGKVNKKGCRLAEGKRKRPASPPSEDFGDLKYSEEEFSSEYDRSPAPASPVASSDDSDNSMGLSAVEQAYIRSIEHVGLGGSDDSEEEEDSSDSEEGDDDEGGGGSSEGGDDSSGAAKATTKVVVAAAVTPVAINSNNNSSSSAGLGGSDDSEEEEDSSDSEEGDDDEGGGGSSVGSEGDDQGRSGGGGDAGGMCHRLK

SEQ ID NO: 48155 - protein, 351 aa, Zea mays
  Coding DNA Sequence Number=SeqID_6376
  Homolog annotation: Hit_ID=Q6AST9; Match level="QueryCoverage=28%, HitCoverage=48%, E-value=2e-45, Identity=87%"; Hit description =Expressed protein
MKRTSTGERKQSGLCYDGKMNAIGLVEYTKIELHCRARLSGYSIKVMGPRVSLAGPRELSGAVDLISRYKLLNHHSFFCKKPLPLAISDTNYLNNVVGDTEIRKGEGMELDQLFQNSCSSEKTAYIQPFDMETLGQAFQLRETAPAEKGTPTISGKSKVKSKDKVKKHKKHKEKDRDKEKEQKKHKHRHKDRSKDKDKDKDKDKEKKKDKSGNHDLGGDHSKKHEKKRKQEVTGSSANVQNHKKRAQVSWPCHCLAQGRGGGMDTGKAVATTRSYWRRHRELGVVVRELGHCWAADPHPAVHDCFVDRSACNKNEICRCLTWFSFGFIIGVDIFMLTEFTVEISMSSGHAY

SEQ ID NO: 48156 - protein, 221 aa, Zea mays
  Coding DNA Sequence Number=SeqID_6377
  Gene Ontology: Cellular component=nucleolus
  Homolog annotation: Hit_ID=Q6BTJ4; Match level="QueryCoverage=60%, HitCoverage=31%, E-value=3e-13, Identity=31%"; Hit description =Similar to CA1621|CaIFF6 Candida albicans CaIFF6 unknown function
  Subcellular localization annotation: CTP_CleavageSite=34; ConfidenceScore=5.31e-01
MACPNLILKSREPTLDQLSLASSAIGSSTSPNPRAQAQPRRRTTDSASPDPKARTQPRPRTTDSASPDPRARTQPRPRKTDSASPDPRARTQPRPRKTDSASPDPRARTQPRPRTTDSASPDPRARTQPRPRKTDSASPDPRARTQPRPRTTVSASPDPRARTQPRPRRSLRLARPRARTDHVTGGTIITLLLASSGYGEQDQRPIRLAPGPPGVETPTGG

SEQ ID NO: 48157 - protein, 317 aa, Zea mays
  Coding DNA Sequence Number=SeqID_6378
  Gene Ontology: Mol. function=transcription cofactor activity; Cellular component=nucleus; Biological process=abscisic acid mediated signaling
  Homolog annotation: Hit_ID=Q75LB9; Match level="QueryCoverage=80%, HitCoverage=78%, E-value=2e-58, Identity=44%"; Hit description =Putative pirin-like protein
  Pfam annotation: Domain name=Pirin; Domain location=49-130; Score =33.5; E_value=6.8e-08; Accession=PF02678.6; Description=Pirin
  Pfam annotation: Domain name=Pirin_C; Domain location=186-298; Score =113.3; E_value=6.9e-31; Accession=PF05726.3; Description=Pirin C -terminal region
  Pfam module annotation: Pfam domain module=Pirin::Pirin_C; Domain location=49-130::186-298
MADAVERRQPGGMETTKTGSEGTLGRVVRSQVFGNEDDDRAGHGDGDEVSKPRAVVHTLTCERKPLFEGFALWRSIGRIHMGGISYHDFSGHKGTINPGDVQWLTAGRGVVHAEMPAAGQGVQRGINIWINLSAADKMVEPRYQDLASHDIPAAAADAAGGVSVKVIAGECLGARSPLRPRTPALCLDVALRPGARLRQPVPRGWSACAYVIHGEAAFGTASGEGNGASTATARTLVVFGGDGDGVELRGDAAGQGARVMLVAARSHGEAVARDGPFVMNTREEVDQAREDYRHRRNGFEMADGWTSDHASAAEKHS

SEQ ID NO: 48158 - protein, 66 aa, Zea mays
  Coding DNA Sequence Number=SeqID_6379
MERRRIKDQGHASSGGRHGGDVRCVSVCTDFAVAAPAGWPVEQMDNGKACGYVYVVMVLLVATAGV

SEQ ID NO: 48159 - protein, 117 aa, Zea mays
  Coding DNA Sequence Number=SeqID_6380
MASVDIGGRKEEQREEDGRRGARSRCPDGVDDRGGASRGARRPWGPPAQRPSEGGAKPQGKLQGRVCGAMGEGGDPQLAVVWEKEKLHGRDGWEKKKGWRLVDLTGHRWCWGLVLKC

SEQ ID NO: 48160 - protein, 72 aa, Zea mays
  Coding DNA Sequence Number=SeqID_6381
MATGRRLLLADWKRRTGGVIAADGTSGGGARVAHPGPGVRRGGVASVSVPFVLASGVTGATGLGVWSPLAMP

SEQ ID NO: 48161 - protein, 134 aa, Zea mays
  Coding DNA Sequence Number=SeqID_6382
  Gene Ontology: Mol. function=calcium ion binding; Cellular component =integral to membrane; Biological process=pollen maturation
  Homolog annotation: Hit_ID=Q6Z8U1; Match level="QueryCoverage=86%, HitCoverage=10%, E-value=6e-51, Identity=80%"; Hit description=C2 domain/GRAM domain-containing protein-like
  Pfam annotation: Domain name=C2; Domain location=3-83; Score=121.4; E_ value=2.5e-33; Accession=PF00168.20; Description=C2 domain
MRLSVRVIEARNLRAMDSNGFSDPYVKLQLGKQRFKTKVIKMNLNPTWDQEFSFLVGDIKDVLKLDVYDEDILQMDDFLGHLRVPLEDVLSADDLSLGTRWYQLLPKGKTNKTVDCGAAGDLSPPPAHARTVRP

SEQ ID NO: 48162 - protein, 155 aa, Zea mays
  Coding DNA Sequence Number=SeqID_6383
  Subcellular localization annotation: CTP_CleavageSite=38; ConfidenceScore=5.22e-01
MKKGRIQTGGSKAQVVLLSRPCPETSLARCLPMLPVIRSTYLAGLRSKKRNRLAVTGAARRAPHPSIQSSLDEIMGRNVAIVGVDSAGPVPACFVPAPPPAASTADRLGGEDERDNSEMKSTMTPVGADPGANHRDENRWRCSLQRHGWSVARAK

SEQ ID NO: 48163 - protein, 188 aa, Zea mays
  Coding DNA Sequence Number=SeqID_6384
  Homolog annotation: Hit_ID=UPI000034F09D; Match level="QueryCoverage =94%, HitCoverage=10%, E-value=6e-46, Identity=48%"; Hit description =SPK1 (SPIKE1)
MEPAVATAGEGQRFKRIPRQAWSGNLELGPLLNESLDHWPHLNELVQCYKADFVKDDCKYGHYESVASPSFQNQIFEGPDTDIETELQLCNARHSKSEDATEDDTPSTSGRQIYETESSGSSSKVHCSLSPLPAYEAAFDWENERSLIFGQRVPEKPFSGTICLYNRDRRERLSEDFYFHMLPTDMQV

SEQ ID NO: 48164 - protein, 225 aa, Zea mays
  Coding DNA Sequence Number=SeqID_6385
  Homolog annotation: Hit_ID=UPI000034F09D; Match level="QueryCoverage =99%, HitCoverage=11%, E-value=2e-68, Identity=62%"; Hit description =SPK1 (SPIKE1)
MMHVSCSVQQESSDGAERNRFLINYVDFAFDDFGDRQAPVYPGLTTVWGSLARSKIIQAPKITKELKSFLAASITLELLLIHRVSKEWSSYWGQRPCQHPIFKSSNQNCLAKTQSTSEDVPPLQLKEGVFRCIMQLFDCLLTEVHERCKKGLSLAKRLNSTLAFFCYDLLSIIEPRQVFELVSLYMDKFAGVCQSVLHDCKLTFLQIICDHDLFVEMPGRDPSDR

SEQ ID NO: 48165 - protein, 67 aa, Zea mays
  Coding DNA Sequence Number=SeqID_6386
MEVTSRLEVLQESTTPSPAYCEWVDKTSPALSYLGFALFECRSGEVDFLSLTLLPTLSIAPEPRTEL

SEQ ID NO: 48166 - protein, 676 aa, Zea mays
  Coding DNA Sequence Number=SeqID_6387
  Gene Ontology: Mol. function=guanyl-nucleotide exchange factor activity; Cellular component=soluble fraction; Biological process =multicellular organismal development
  Homolog annotation: Hit_ID=Q10M07; Match level="QueryCoverage=97%, HitCoverage=81%, E-value=0.0, Identity=84%"; Hit description=Guanine nucleotide exchange factor, putative, expressed
  Pfam annotation: Domain name=Ded_cyto; Domain location=483-669; Score= 408.0; E_value=1.3e-119; Accession=PF06920.3; Description=Dedicator of cytokinesis
MDTCGTGLHVSLFNLRQFLQELWEENLSTAVSLEVLGITEKFSVAAGARSITTDYAKLDCVTSILMGLLSRNQSLAFWKAFLPVVYNIFNVHGATLMARENDRFLKQIAFHLLRLAVFRNDSIRKRAVVGLQILVRNSFNYFKNTTRLRVMLTITLSELMSDVQVTQMKFDGSLEESGEARRLRKSLEEMADVRSKDLLKDCGLPVTALEAAPEGSSDNRWSWVEVKHLSKCLVQALDAGLEHALLEMQSWAEAAQCAVAVAGVIMQALVGRNDAVWSKEHVASLRKICPIVNTDVSAEASAAEVEGYGASKLTVDSAVKYLQLANKLFTQAELYHFCASIQELIIPVYKSRRAYGQLAKCHTSLTNIYESILEQEASPIPFIDATYYRVGFYGERFGKLNKKEYVFREPRDVRLGDIMEKLSHIYEAKIDGSHTLHIIPDSRQVNADELQPGFCYLQITAVDPVMEDEDLGSRRERIFSLSTGTVRARVFDRFLFDTPFTKNGKTQGGLEDQWKRRTVLQTEGSFPALVNRLPVIKSESLEFSPVENAIGMIETRTAALRNELEEPRSSEGDQLPRLQSLQRILQGSVAVQVNSGVLSVCTAFLSGEPATRLRSQELQQLIAALLEFMAVCKRAIRVHFRLIGEEDQEFHTQLVNGFQSLTAELSHYIPAILSEL

SEQ ID NO: 48167 - protein, 190 aa, Zea mays
  Coding DNA Sequence Number=SeqID_6388
  Gene Ontology: Mol. function=guanyl-nucleotide exchange factor activity
  Homolog annotation: Hit_ID=UPI000034F09D; Match level="QueryCoverage =90%, HitCoverage=9%, E-value=3e-70, Identity=74%"; Hit description =SPK1 (SPIKE1)
MKLMDDKHSTFFLINYLSSVLIQEIFLTLDHDDLSQRAKAARILVVLICKHEFDARYQKSEDKLYIAQLYFPLIGQILDEMPVFYNLNAIEKREVLVVILQIVRNLDDATLIKAWQQSIARTRLFFKLLEECIIHFEHNKTGDNMLLGASSRSPDVEHPASPKYSERLSPSVNTYLSEASRHEIRVIVLQ

SEQ ID NO: 48168 - protein, 124 aa, Zea mays
  Coding DNA Sequence Number=SeqID_6389
MNVLPLNADRANLGREKAKLKVSRVANGERNSPRLRTGAGLTAIIDGQRPSVSGDRATWSRAESERGGERVRLRAQVSEGKWASGRRAQKGRGRAEVAGDRTVVGASTVGEHGREFEDELTGNF

SEQ ID NO: 48169 - protein, 53 aa, Zea mays
  Coding DNA Sequence Number=SeqID_6390
MASEGGYLNYRSVMSVLTFNIAMESNYEYQQISSHGSKDAPTIGYLHVLMIRD

SEQ ID NO: 48170 - protein, 431 aa, Zea mays
  Coding DNA Sequence Number=SeqID_6391
  Gene Ontology: Mol. function=kinase activity; Cellular component =nucleus; Biological process=regulation of progression through cell cycle
  Homolog annotation: Hit_ID=Q2QN26; Match level="QueryCoverage=90%, HitCoverage=89%, E-value=1e-115, Identity=58%"; Hit description =G2/mitotic-specific cyclin C13-1, putative, expressed
  Pfam annotation: Domain name=Cyclin_C; Domain location=287-422; Score= 144.4; E_value=3e-40; Accession=PF02984.9; Description=Cyclin, C -terminal domain
  Pfam annotation: Domain name=Cyclin_N; Domain location=156-285; Score= 225.8; E_value=9.9e-65; Accession=PF00134.13; Description=Cyclin, N -terminal domain
  Pfam module annotation: Pfam domain module=Cyclin_C::Cyclin_N; Domain location=287-422::156-285
MGDKENAPPLGARGAAAPRLTRAAAKRAAAAAAAAEGPGDAKRRRVALGELPALANNAGLRAPSCPVKPSKPASRPGRHARNVAPEARGPSSAHEAERCASSPPRTADADAESNSVSNPAPRATAYADSCASSSPPRAAAAGAPADPQLCGSYASDIYTYLRSLEVEPQRRSRPDYIEAVQADVTAHMRGILVDWLVEVAEEYKLVADTLYLAISYVDRFLSVNALGRDKLQLLGVASMLIAAKYEEISPPHPEDFCYITDNTYTKEELLKMESDILKLLKFELGNPTIKTFLRRFTRSAHEDKKVANPFLFMRSILLMEFLGSYLAELSLLDYGCLRFLPSVVAASVMFVARLTIDPNANPWNMKLQKTTGYKVSELKDCIVAIRDLQLNRKFPSLTAIRDKYKQHKFKCVSTLLPPVVVPTSYFEDLAE

SEQ ID NO: 48171 - protein, 176 aa, Zea mays
  Coding DNA Sequence Number=SeqID_6392
  Gene Ontology: Mol. function=kinase activity; Cellular component =nucleus; Biological process=regulation of progression through cell cycle
  Homolog annotation: Hit_ID=Q40492; Match level="QueryCoverage=84%, HitCoverage=35%, E-value=4e-29, Identity=55%"; Hit description =Cyclin A-like protein
  Pfam annotation: Domain name=Cyclin_N; Domain location=31-126; Score =16.6; E_value=5.3e-06; Accession=PF00134.13; Description=Cyclin, N -terminal domain
MGQGGARAQAGGQVASSPRGTLPALRSYASDIYTYLRSLEVEPHGVQTRLHRGGAGGRYGAHAGILVDWLVEVAEEYKLVADTLYLAISYVDRFLSVNALAATSCSSLASLHAHCCGIAQLGIDLGPALTGSMRRSARRTRRLLLHHRQHLHQRGAPQDGERYTQASQVRVGQSYH

SEQ ID NO: 48172 - protein, 177 aa, Zea mays
  Coding DNA Sequence Number=SeqID_6393
  Homolog annotation: Hit_ID=Q2QVV5; Match level="QueryCoverage=46%, HitCoverage=10%, E-value=3e-09, Identity=43%"; Hit description =Leucine Rich Repeat family protein
MRIKNYRGTAKRKQINLHTKTVQSASCIGGLTSLVSLDLSTSYEFYDLLDDSFLLHRDSNSDARLTIQIFETLVANLRNLRELYLVVLSSDDDVGPCWRWCSIVAASCPELHVLSLPRCRLSGPICGRAGGSGGQGQGRPRRAGSRLVRRRAQLARVGAGVQRRLRFGGRDTGVRKG

SEQ ID NO: 48173 - protein, 104 aa, Zea mays
  Coding DNA Sequence Number=SeqID_6394
MGAFTVGERRWEVEDELTGGVGGAERETGARAKGTTPIGLAHWTAGGREGREGARIGADRVFNSNSNQVSNSNQIKHVQQFKEYLELNMMQHYKTHMFCQKENK

SEQ ID NO: 48174 - protein, 490 aa, Zea mays
  Coding DNA Sequence Number=SeqID_6395
  Gene Ontology: Mol. function=oxidoreductase activity; Cellular component=integral to membrane; Biological process=electron transport
  Homolog annotation: Hit_ID=Q2QN17; Match level="QueryCoverage=79%, HitCoverage=69%, E-value=1e-128, Identity=66%"; Hit description =Cytochrome P450 family protein, expressed
  Pfam annotation: Domain name=p450; Domain location=37-477; Score =151.8; E_value=1.8e-42; Accession=PF00067.12; Description=Cytochrome P450
MDAVATSDAVLLLAAVAISLLITATFWSRHRRQGEAPSPPSLPLLGHLHLLGNGKPLHHSLAALAIARGTGGAPAPLLSLRLGARRALLAQLRIHHGGAGPRTATTGAPSAGSWPSSCSPRPASPRAPPTGAPRSPRSSAPWSATPPAPGAAVALRPRLFELVLNVMLRALTGAPGHGGGDVRGLQEIIEETFAVTGVMSVGDFYPALRWVDRLRGVDAALLRLQARRDAFVAGLVHDGRRSHNRKAGGGGGPTDTEKRSTIDELLSLQETDPGYYTDTVIKGIVSILLSAGTDTTALTMEWAMAQLLMHRDAMQKARAEIDANVGTSRLVDESDTTHLPYLQCVVKETLRLCPVGPVIPAHEAMEDCAVGGFRVRRGTMVLVNAWLIHRDPRLWEAPEEFRPERFLDATATVAAPLLPFGLGRRRCPGEGMALRLLSLTLAALLQCFDWEVGGCVDMAEGVGLSMPMAKPLAAVCRPREFVQTVLSAST

SEQ ID NO: 48175 - protein, 181 aa, Zea mays
  Coding DNA Sequence Number=SeqID_6396
MAGPRRVAGSAAVRPPARPMGEIGEGKKVCRSRGEVAELKSYTNLTRIQQRGEGGSSPEMEMTAALAQLSSGKGEEMAKAGVRNWGARGGPFLGAQGGEGGERWRAPASSPQRGWWRTVVTTGWLGQTGRRDGSGRWGGRMAQVDASHQTEMVSAIMAGRRGGKWPAAIVSLARSQARGRH

SEQ ID NO: 48176 - protein, 97 aa, Zea mays
  Coding DNA Sequence Number=SeqID_6397
MAVAPRRGMTVHNFPEVSSTGREIHLQLKIDALFLKREGREKRKRKRLTLEFVDESKEILDPKSQVVTMSYEATISSYGDNLAVMAKSFVMVIRNVT

SEQ ID NO: 48177 - protein, 57 aa, Zea mays
  Coding DNA Sequence Number=SeqID_6398
MAWAAWVIYRHSCYLVGNNSAATTTSKLSCRCPPAAAQLCNHAGCREKPKQVDVEDE

SEQ ID NO: 48178 - protein, 294 aa, Zea mays
  Coding DNA Sequence Number=SeqID_6399
  Homolog annotation: Hit_ID=Q3S4H8; Match level="QueryCoverage=17%, HitCoverage=22%, E-value=3e-16, Identity=86%"; Hit description=Dual -specificity protein-like phosphatase 1
  Pfam annotation: Domain name=ChaC; Domain location=3-147; Score= -65.0; E_value=0.0017; Accession=PF04752.3; Description=ChaC-like protein
MVLWVFGYGSLIWNLGFDFDDKILGFIKGYNRTFNLGGDTVLHVQFRYGFGRLKSFTEMSAWYKPTRRKFIQKTRLLIYIDIYDMCLPVLSRTIQVINPYDRGHEGSSSPLPLLPPSVNSIIPGPIKEVSNCVYENEHVLLGAVPFPSDVLRLKTLGVCGVVTLNESYERLVPTSLYEISFAQALVCGMLVLLPGYEPLGLQFGQQAYGKEKAKDPSEFITHRAKDFVSSMKDIETRFMCIVEAGNKVSRMLETKKILLDICAKIPGTKYMVIQGEPRVVIRGKKFIAFASFVS

SEQ ID NO: 48179 - protein, 148 aa, Zea mays
  Coding DNA Sequence Number=SeqID_6400
MPSIDSALASTITTIQAALEASKERERAATRALDQERTLGATLTAQMATAQRLIIGPLRSLLRHHRPPQRLPTPLDSTPITSPLSTPRSPNVCIREPLKHVVIGLSDQRIQREGVQSGGRAATYAAGKRSSASAHTCSLIDGQKARVP

SEQ ID NO: 48180 - protein, 49 aa, Zea mays
  Coding DNA Sequence Number=SeqID_6401
MGKARQGLLSKRGEKKQHRKELIAKKRQQRALSRGVDLGQINSVSHCFT

SEQ ID NO: 48181 - protein, 125 aa, Zea mays
  Coding DNA Sequence Number=SeqID_6402
MSSDQSTVDVTGRYNVDDELEQEVVGQHGVDAILKGKCVPWGISILFWDYEKSSKKEQKKIEIRKEKLGCSAEHRAVQCHPPDSPVHGLAKQATLGKTKTLSAINHRTVHTERRTVRCANWATNS

SEQ ID NO: 48182 - protein, 156 aa, Zea mays
  Coding DNA Sequence Number=SeqID_6403
MAARLRVDLDAVTKNSVHGPIKVHEGVSDKLAVVKEELGGARKEVAPTARAKAGPEKSGATEAAGKARLIGGEVGHQGLVEGHRGSSPLVEWAEPTEVEHVGEGARHAGKKTSGRTAADGNLLAPERWEDAPMPDSGWLKPPEGPKVAEKRWPGGR

SEQ ID NO: 48183 - protein, 108 aa, Zea mays
  Coding DNA Sequence Number=SeqID_6404
MSLSQRGNWLCLRLSLLLVFACQLIGDVEGLPSLPPAILCSHCYVAFPQFEVAEEDQDEEALRYAARLSSGRDLVEEFIAYGVWPLAHGWVLGEITPHRMPTLGDRLA

SEQ ID NO: 48184 - protein, 189 aa, Zea mays
  Coding DNA Sequence Number=SeqID_6405
MQRPKLARKRADDMELELKNIHDHRERTESSTCAGVERAHMLFVDAYHELGAQTAPFDELGKEVGLRFLVWLQDELELLPSIVTGLMSYASLVTCEGAANALFREGCMHFEVFDRENEDFDHGVFQIEDDVAGVLYDRMWAPHDLGIVRERADRALAHVMNEEDMEDLAGLESSVSRRVLQPMREPKSK

SEQ ID NO: 48185 - protein, 136 aa, Zea mays
  Coding DNA Sequence Number=SeqID_6406
MTETTVTRSNGAAQELSVDDYLVGGVTMFDAQTGLPPIGAEAGQLTAVPSTVAAGLVGAAKGDAAKGGAGTLEDPWSRFCAHRQRRGQTCFCRRCCWRGCVSYATATICYFLRPASCLRGADLAVCFREETARGKD

SEQ ID NO: 48186 - protein, 230 aa, Zea mays
  Coding DNA Sequence Number=SeqID_6407
  Gene Ontology: Mol. function=receptor activity; Cellular component =integral to membrane
  Homolog annotation: Hit_ID=Q8S1S0; Match level="QueryCoverage=54%, HitCoverage=32%, E-value=5e-36, Identity=62%"; Hit description =Putative lung seven transmembrane receptor 1
  Pfam annotation: Domain name=Lung_7-TM_R; Domain location=1-173; Score=-135.7; E_value=0.011; Accession=PF06814.3; Description=Lung seven transmembrane receptor
  Pfam annotation: Domain name=PPR; Domain location=11-45; Score=40.6; E_value=5.3e-09; Accession=PF01535.11; Description=PPR repeat
  Pfam module annotation: Pfam domain module=Lung_7-TM_R::PPR; Domain location=1-173::11-45
MHNNGLSPNVFTYNVLINGYCKEGNEKKALEVFEDLSRKGVLTPFLQNKEKKVLLVVIPLQAIAYIPAVIFLSVDAAYYHAVLFLVVWSMHSLRESFKTYVKEARTLAKLTLFRQFYVVMIGYLYFTRTIVYAHRTITNYKYRWVSVVAEEVSTMAFYMFMFYMFRPSIGTNTGLNLIGSGIGAGLVTSSLGAASSGQGNFSFFLWDPSGHVKSSLGTTCISRSGECQVY

SEQ ID NO: 48187 - protein, 135 aa, Zea mays
  Coding DNA Sequence Number=SeqID_6408
  Subcellular localization annotation: CTP_CleavageSite=17; ConfidenceScore=5.13e-01
MDSASPDPRARPRPRLRAESRPHTTPGSASGGVSASPDLGLGPTMPQGDHHYPTPSQLRLRGTRPTSHLARTAEYMSLPASQYSVLDAERIERVDDSTFRCYVYRFRFFALELEGSPLVEAQNDKFSGKVLFLRS

SEQ ID NO: 48188 - protein, 70 aa, Zea mays
  Coding DNA Sequence Number=SeqID_6409
MDPSLSMAVTERRRSAPHGGASPAFCPPLRIGVTPQPEVLADGEAEAKACAAGGDDHQRADEWSLASFSG

SEQ ID NO: 48189 - protein, 184 aa, Zea mays
  Coding DNA Sequence Number=SeqID_6410
MTGKVEVGSIELLIHKGETGSIEISKFVKGLKGELQGHVLAQLPRTVDRAILLAQIQQEEKGTPEQEWALVSWLRREKYEPGHQAKCPKRGGTQLHSLTMEDMGLTLLDEVLQQLDKEDREMEEAKPASHVRVKVANGEFMLSSRRVKGKCAFGPFLSILVIECQHKYLNVNLCPWMNKVQIKS

SEQ ID NO: 48190 - protein, 141 aa, Zea mays
  Coding DNA Sequence Number=SeqID_6411
MGAGLVSLEGGLSERHGWTSSTAGEGGALDSSAHRPSKVEMGDRDHGRARRPAKEVDDEVSLVGQGEKTEVETEHFAARQRRPQTKAQRLKTTQLAWWQAQDAGHGAQPATLLQEDAKHGKANRRYQLFWRRKEGSPRRLN

SEQ ID NO: 48191 - protein, 82 aa, Zea mays
  Coding DNA Sequence Number=SeqID_6412
MKESPIDGEWGTHEDGGGGHIGFVNGYGTEVTHLGVIGYDAELNDEDSPAAGSLSSWIAHSHQQHMRHAKNQCFCHHIQWRS

SEQ ID NO: 48192 - protein, 118 aa, Zea mays
  Coding DNA Sequence Number=SeqID_6413
  Subcellular localization annotation: CTP_CleavageSite=21; ConfidenceScore=5.30e-01
MLPARHKLLTPGARLQVATARASGMWPPPSVQREEAGTNGSPVGTRSNPFFWAVRVCLMGRSQKKFGPERRYRSQKKFLELFSIFTIYIFSNKLQIGYYMKEARDIIKIANEACWGRL

SEQ ID NO: 48193 - protein, 53 aa, Zea mays
  Coding DNA Sequence Number=SeqID_6414
MASLNLTEASWRTSPYLHRWIEFHEGRQSLSREEKLTEATSQHMSLGSSRTNV

SEQ ID NO: 48194 - protein, 191 aa, Zea mays
  Coding DNA Sequence Number=SeqID_6415
  Gene Ontology: Mol. function=metal ion binding; Cellular component =nucleus; Biological process=multicellular organismal development
  Homolog annotation: Hit_ID=Q2QM17; Match level="QueryCoverage=79%, HitCoverage=89%, E-value=2e-21, Identity=80%"; Hit description=YABBY protein, expressed
  Pfam annotation: Domain name=YABBY; Domain location=50-161; Score =1.6; E_value=5.4e-11; Accession=PF04690.4; Description=YABBY protein
MAASNPCIHLGLLCVTSAWARHTTIITRGHPWALFIHCCSGSECPGEQHAQHGDSSVWALHKSTVSESESTHALSPRTRSAPVRRRPPSGAGLFVVLKVPAADDDVVRAAERALAAGTDTEQRSSEEIRRIKANNPDISHREAFSTAAKNWAHYPNIHFGLNSGREGGKNKLVDEAVAAVAVAPKKIQGFY

SEQ ID NO: 48195 - protein, 152 aa, Zea mays
  Coding DNA Sequence Number=SeqID_6416
MANYKKDMNECQFTITTAEGSRNIAKKTGIRLEEFWLSSARTAPACGAPDSVRCPGWPDDELVALGKKRRRRGYNSPDYPVSQMALVANGRLPDQRATHGRANGRMVTPDCPVCTGQCLVRQRDQRPNNRIRQKRKEIMHRTGTVHVRCTTR

SEQ ID NO: 48196 - protein, 80 aa, Zea mays
  Coding DNA Sequence Number=SeqID_6417
MSIQEVDELANDKAGNSLAAQQAQPGVGRQRSEREIDGRRHCTMSAREPGWEQHCGTVEAGILAEGQMEKDDVRAWRGGC

SEQ ID NO: 48197 - protein, 156 aa, Zea mays
  Coding DNA Sequence Number=SeqID_6418
MPALPAAEGDKTKSDDIVEVGVAPPKVKESETIIFAKTPIVVMESGAKEFPKTEEQMKVQDQSKAISSPAGTPRRGKRMTNVLEVVLRPAKMVPPAAPKISKDKVREPKMAIGVKTVPGSIADDPSGSGSARIVLDSLTEEGNLPTAETMLAEDLV

SEQ ID NO: 48198 - protein, 1015 aa, Zea mays
  Coding DNA Sequence Number=SeqID_6419
  Gene Ontology: Mol. function=RNA-directed DNA polymerase activity; Cellular component=chromatin; Biological process=chromatin assembly or disassembly
  Homolog annotation: Hit_ID=Q338U1; Match level="QueryCoverage=99%, HitCoverage=56%, E-value=0.0, Identity=48%"; Hit description =Retrotransposon protein, putative, Ty3-gypsy subclass
  Pfam annotation: Domain name=RVP; Domain location=346-474; Score=1.3; E_value=0.0029; Accession=PF00077.10; Description=Retroviral aspartyl protease
  Pfam annotation: Domain name=RVP_2; Domain location=354-488; Score =113.7; E_value=5.3e-31; Accession=PF08284.2; Description=Retroviral aspartyl protease
  Pfam annotation: Domain name=RVT_1; Domain location=584-753; Score =156.4; E_value=7.5e-44; Accession=PF00078.17; Description=Reverse transcriptase (RNA-dependent
  Pfam annotation: Domain name=Retrotrans_gag; Domain location=113-210; Score=71.3; E_value=3e-18; Accession=PF03732.7; Description =Retrotransposon gag protein
  Pfam annotation: Domain name=RnaseH; Domain location=845-963; Score= -25.1; E_value=0.013; Accession=PF00075.14; Description=RNase H
  Pfam annotation: Domain name=zf-CCHC; Domain location=316-333; Score =34.6; E_value=3.5e-07; Accession=PF00098.13; Description=Zinc knuckle
  Pfam module annotation: Pfam domain module=RVP::RVP_2::RVT _1::Retrotrans_gag::RnaseH::zf-CCHC; Domain location=346-474::354 -488::584-753::113-210::845-963::316-333
MADETRQHPRGHGETGGNQQAPPVPQPPSMEAILAAQTELLRQLVQRQQPLPPPHNGHNNHQLQVASYQDFLSTQPPLFNKTEEPLDADAWIRIIESKFTLLTADCPEESKARFAAQQLRGTARLWWDNYHAMLPADHLVLWEEFKIAFRAHHIPEGLMERKLTEFLALTQGNRTVLQYAQVFNNLSQYAGYHADTDAKKRDRFRRGLNTKLKERLNPVKMDNYNELVNVAISQEDCIMAHRAEKKRKAPAVPPSAPNQKFRLVPSARPGAPPQPSPSGRWVLRPPQQQGNPRFTIPPSQNTRPNYQQPNRPGSGNRCFTCGSTGHFAKECPQNRQQKQGQNSNQSKGKKPTVQVKQGRINFTTLADLPEGAPVMAGNFLIQNRPAVILFDSGASHSFLSSRFSVKCQLVICHTKGSYMITTPGGRISSNQLTRQVPIKLGSKIFHADLIILGLEGIDVILGVDWMTKHQVVMDIAARVLEFKSPAYGTLTLYLPVEQSINSSNCSMIESKLGEIPVVREYADVFPDDLPGMPPDRDIEFVIELQPGTAPISKRPYRMPPVELAELKKQLQELLDKGFIRPSTSPWGCPALFVKKKDKSLMLCVDYRPLNAVTIKNKYPLPRIDVLFDQLAGARVFSKMDLRSGYHQIKIRPSDIPKTAFSTRYGLYEYLVMSFGLTNAPAYFMYLMNSVFMPELDKFVVVFIDDILVYSKNEEEHVKHLHTVLQRLRKHQLYAKFSKCEFWLDKVKFLGHTISSEGIAVDPVKVQEVMDWKPPTSVHQIRSFLGLAGYYRRFIPNFSRIAKPMTELLRKGVKFVWNQQCEEAFHLLREHLTTTPVLAQLDNAKPFDVYCDASGIGLGCVLMQENRVIAYASRALRPHEQSYPTHDLELAAVIHALKIWRHYLMGTRCNIYTDHKSLKYIFTQTELNMRQRRWLELIKDYDLEVHYHRGKANVVADALSRKTQCHCLTIDSHVATLCDELSKLSMEVVSPGTLDYVSVETTLQDQIIMTQLSDKG

SEQ ID NO: 48199 - protein, 345 aa, Zea mays
  Coding DNA Sequence Number=SeqID_6420
  Gene Ontology: Mol. function=hydrogen-translocating pyrophosphatase activity; Cellular component=membrane; Biological process=proton transport
  Homolog annotation: Hit_ID=Q6ER91; Match level="QueryCoverage=99%, HitCoverage=39%, E-value=1e-145, Identity=84%"; Hit description =Putative vacuolar-type H+-translocating inorganic pyrophosphatase
  Pfam annotation: Domain name=7tm_1; Domain location=58-257; Score= -108.9; E_value=0.09; Accession=PF00001.12; Description=7 transmembrane receptor (rhodopsin family)
  Pfam annotation: Domain name=H_PPase; Domain location=71-345; Score= -167.6; E_value=1e-17; Accession=PF03030.7; Description=Inorganic H+ pyrophosphatase
  Pfam annotation: Domain name=NnrU; Domain location=78-244; Score= -116.9; E_value=0.088; Accession=PF07298.2; Description=NnrU protein
  Pfam module annotation: Pfam domain module=7tm_1::H_PPase::NnrU; Domain location=58-257::71-345::78-244
MMEEDMENGRSYQERPRTFSTVRSKSSIPLVGVNMEPTTKALRLLMRINPRALIILSLLVFSGVLYVGASTSPIVVFVFCICTLSLFFSLYLTKWVLAKDEGPPEMSEISDAIRDGAEGFFKTQYGTISKMAFILAFVILGIYLFRTTTPQQEASGLGRATLAYITVASFLLGALCSGIAGFVGMWVSVRANVRVSSAARRSAREALQIAVRAGGFSAIVVVCMAVFGVAILYSTFYVWLGVDSPGSMKVTDLPLLLVGYGFGASFVALFAQLGGGIYTKAADVGADLVGKVEQGIPEDDPRNPAVIADLFIFCYDIFLYNKGKLLRLVTMLEIVLPEALIFLRA

SEQ ID NO: 48200 - protein, 280 aa, Zea mays
  Coding DNA Sequence Number=SeqID_6421
MAALDHVVVDEHGFAHSVCLHWEGFPAILWDLLRTVGYTTPPHYVGYEFEEHGVPRCRVQLTLWSHPVYPEWPSLDTETEGFRLGDTWEASALHALVAFCEYMGLFPLKQQDDPLWLDRIANIVLLGFSCPQEAILMATRCIRALQHLQALQSQAMTYLVALAQTTRQILSERQVRIINLSTELSDRKLQIEAMGVQVHELQEQVGVQAMTIADLEDQLHDLNLELEEANDHIEMHHQEHVEMEADLEDADMDEEEEDPEEIEGVSELTTESGAPLPPVD

SEQ ID NO: 48201 - protein, 40 aa, Zea mays
  Coding DNA Sequence Number=SeqID_6422
MEFSSGVLSPLIPAVAEPPCIIQLKCIDFHPEGDDTLKWD

SEQ ID NO: 48202 - protein, 421 aa, Zea mays
  Coding DNA Sequence Number=SeqID_6423
  Gene Ontology: Mol. function=hydrogen-translocating pyrophosphatase activity; Cellular component=membrane; Biological process=proton transport
  Homolog annotation: Hit_ID=Q6ER91; Match level="QueryCoverage=94%, HitCoverage=49%, E-value=0.0, Identity=90%"; Hit description =Putative vacuolar-type H+-translocating inorganic pyrophosphatase
  Pfam annotation: Domain name=H_PPase; Domain location=1-417; Score =468.1; E_value=1.1e-137; Accession=PF03030.7; Description=Inorganic H+ pyrophosphatase
MEGGNILFKGEHFPPGERFPTWDGISTRWLLYTEQAPSAWLNFALCGLVGIVTAYAFVWISKYYTDYKHEPVRLLALSSSTGHGTNIIAGVSLGMESTALPVLVISVAIISAYWLGQTSGLVDESGNPTGGLFGTAVATMGMLSTAGYVLTMDMFGPIADNAGGIVEMSQQPESVREITDVLDAVGNTTKATTKGFAIGSAALASFLLFSAYMDEVASFAQLPFKEVDIAVPEIFVGGLLGSMLIFLFSAWACSAVGKTAQEVVKEVRRQFIERPGIMDYKEKPDYGRCVAIVASASLREMIKPGALAIISPMAVGVVFRILGHYTGQPLLGAKVVASMLMFATVAGILMALFLNTAGGAWDNAKKYIETGALGGKGSESHKAAVTGDTVGDPFKDTAGPSLHVLIKMLATITLVMAPIFL

SEQ ID NO: 48203 - protein, 312 aa, Zea mays
  Coding DNA Sequence Number=SeqID_6424
  Homolog annotation: Hit_ID=Q93XI2; Match level="QueryCoverage=95%, HitCoverage=98%, E-value=5e-31, Identity=33%"; Hit description=BURP domain-containing protein
  Pfam annotation: Domain name=BURP; Domain location=90-308; Score =181.3; E_value=2.3e-51; Accession=PF03181.6; Description=BURP domain
MYMHPSKLLILTVVVTGAAAAHDHPSASTPAAQFWQQALPGTPMPEAIADLVQKGIDHSPLVERYPSAPGLSACGAWSNLCTRSVAAGTGIFFHEAELRPGSAMALSFPAEVDTPILPHAVAAAAPFANLTAVFATFGVAGGSAEAEHVRDTLRWCEAPPRPAGERVAACATSLESTVRSATRMLGAAGGDGVWAAATSARLRAGLPRGRYVVGAVAPLHGDQLVACHRVPFPYAVYQCHMTTRKTDRAYVVSLRGRGGPVLDDVLAFCHRDTSGWSPDHPAFRILRVRLGTPVCHFVPYGNPVFGRKASTT

SEQ ID NO: 48204 - protein, 171 aa, Zea mays
  Coding DNA Sequence Number=SeqID_6425
  Subcellular localization annotation: CTP_CleavageSite=38; ConfidenceScore=5.68e-01
MTDFGAGLRSKTPASSSLQSRGSRLLHRALVSSTAAIVSSTAATAPPRPPATALLLLRLPHAPAPPPATGRPAPSRLPLDRAPRARAAPAARAPTARQPRPRHRPRPESLEPATSPPRPIPDTAPGTSTVPRPPAPRTGASPSSLHRAPQQAPTLSTTVPRRSRTELRLAS

SEQ ID NO: 48205 - protein, 118 aa, Zea mays
  Coding DNA Sequence Number=SeqID_6426
MAAPSRSRPGQEADDGERKTQALSDLNNPQRSRRLRADLGVCVGIRLREHREDRAVSVLPARRARSVGRGEERDDKRAPRVNGKRHCAEGPATQWKNGARERARVLRLGWERARGGKK

SEQ ID NO: 48206 - protein, 107 aa, Zea mays
  Coding DNA Sequence Number=SeqID_6427
MARAQQQRWVILRRPPFNCPEPNHSRGLVQNVAEVKAKLEEYFSPAMVQWGTRAMAEARCGRNPDAAALTRLSAHSDEVVMAPPGPFLPSLARSALDACTRVRGFIV

SEQ ID NO: 48207 - protein, 462 aa, Zea mays
  Coding DNA Sequence Number=SeqID_6428
MEEDPLIQLVHVWSNAACDNAAASSSGEGDKENLRPEPDVEAEIGHIEAEILRLSSRLHHLRTSQQLQPPKCAEVAPAPETKAAAARPRPRGRSLGPLDIVAAVNPNLLTTDKQQPPRAAQGLKPIKQAPAAARGRGFSLAPLDTVAANPRVPSAAPQRKIQGEGGGAWPTLRPIKEPPVQRRRGVSLGPLEIHHGVGSKPGATVAAARVKPLSNKLGAVREEGQRSKQHAVPARPWPSSNAKHPLDAKQSTVASRAKARSGSMSPSRLRRQSTSKATETRAGNAKATEARGGNATLGDNNVADVLTLKCAVADHNRNVSTGKRPAGSSKVRIVPSRYSLTPGSSLIAAPVTQGKLCKQPLSGSARAASHREEMGAKLTEPSNDELSPESLAKVAELLPRIRTMPPSDESPRDSGCAARRVADLAGKRSFFTAAADDGNPVTPYQARVVELETPETAAAAEA

SEQ ID NO: 48208 - protein, 216 aa, Zea mays
  Coding DNA Sequence Number=SeqID_6429
MPLLILPAEPAVIARGFRRCGGQHDARRLPSKERVASCHWPVISYSRWLGKAQGSFHSTAAGAQRTNGDRTRRAGTTPPTGFGGLGPGAFAGFGGGAAATRGSQPAVERVSGSRRARGMCNGRECGRERAFRASLHERDARPRPGPEPAAAAAPACRHDAKTEEGETVATLRAKGEGRARTAGEERNQEWRQRPRLREAEIERTEKLMHLLLWGPN

SEQ ID NO: 48209 - protein, 361 aa, Zea mays
  Coding DNA Sequence Number=SeqID_6430
  Gene Ontology: Mol. function=RNA-directed DNA polymerase activity; Cellular component=mitochondrion; Biological process=RNA-dependent DNA replication
  Homolog annotation: Hit_ID=UPI00004C1733; Match level="QueryCoverage =99%, HitCoverage=22%, E-value=1e-137, Identity=72%"; Hit description= UPI00004C1733 related cluster
  Pfam annotation: Domain name=RnaseH; Domain location=1-116; Score= -18.8; E_value=0.0032; Accession=PF00075.14; Description=RNase H
  Pfam annotation: Domain name=rve; Domain location=257-361; Score =28.9; E_value=1.8e-05; Accession=PF00665.16; Description=Integrase core domain
  Pfam module annotation: Pfam domain module=RnaseH::rve; Domain location=1-116::257-361
MSTGAGAGLLFISPLGKHLRYVLRLHFPASNNVAEYEALVNGLRIAIELGVRRLDARGDSQLVIDQVMKNSHCCDPKMEAYCDEVRRLEDKFYGLELNHIARRYNETADELAKIASGRTTVPPGRLLSRPASTLRQDRQHARGTLGPSPRYLLLSPRHPRLGPRHPRFSPRYPQPPRARHCASRRSEAGSCLIKTGRPRTEISPPRRATPRPSRGSAVGFYWPTVVADATRIVRTCEGCQFYARQTHLPAQALQTIPITWPFGVWGLDLVGPLQKAPGGYTHLLVAIDKFSKWIEVRPLNSIRSEQAVAFFTNIIHRFGVPNSIITDNGTQFTGRKFLDFCEDHHIRVDWAAVARPMTNGK

SEQ ID NO: 48210 - protein, 100 aa, Zea mays
  Coding DNA Sequence Number=SeqID_6431
MTSVLDAVVETTRALTPAPMKKVAEASTAHTETEAGPSMLAEMKPATTEQRAEEFPDIVIVLVKNVAKEAKSPALEALSEDLDYIIRHALGKKLSEEEVF

SEQ ID NO: 48211 - protein, 650 aa, Zea mays
  Coding DNA Sequence Number=SeqID_6432
  Gene Ontology: Mol. function=binding
  Homolog annotation: Hit_ID=Q10P70; Match level="QueryCoverage=99%, HitCoverage=100%, E-value=0.0, Identity=61%"; Hit description =Armadillo/beta-catenin-like repeat family protein, expressed
  Pfam annotation: Domain name=Arm; Domain location=180-220; Score =29.3; E_value=1.3e-05; Accession=PF00514.13; Description =Armadillobeta-catenin-like repeat
  Pfam annotation: Domain name=Arm; Domain location=221-261; Score =11.5; E_value=0.45; Accession=PF00514.13; Description=Armadillobeta -catenin-like repeat
  Pfam annotation: Domain name=Arm; Domain location=513-553; Score =10.8; E_value=0.55; Accession=PF00514.13; Description=Armadillobeta -catenin-like repeat
  Pfam annotation: Domain name=Arm; Domain location=559-598; Score =11.0; E_value=0.52; Accession=PF00514.13; Description=Armadillobeta -catenin-like repeat
  Pfam annotation: Domain name=HEAT_PBS; Domain location=165-202; Score= 7.7; E_value=8.5; Accession=PF03130.6; Description=PBS lyase HEAT -like repeat
  Pfam annotation: Domain name=HEAT_PBS; Domain location=207-234; Score= 8.3; E_value=7.1; Accession=PF03130.6; Description=PBS lyase HEAT -like repeat
  Pfam annotation: Domain name=HEAT_PBS; Domain location=248-285; Score= 2.4; E_value=46; Accession=PF03130.6; Description=PBS lyase HEAT-like repeat
  Pfam annotation: Domain name=HEAT_PBS; Domain location=87-114; Score =6.0; E_value=15; Accession=PF03130.6; Description=PBS lyase HEAT -like repeat
  Pfam module annotation: Pfam domain module=Arm::Arm::Arm::Arm::HEAT _PBS::HEAT_PBS::HEAT_PBS::HEAT_PBS; Domain location=180-220::221 -261::513-553::559-598::165-202::207-234::248-285::87-114
MGEGVKEMLAPPIQLADEVAKQCAAARSFRAECAELKARADKLAALLRQAARAQELYDRPAARILAGATQALSRASTLATRCARGHPRLRSLFTLSPAAGFPRAVAALDTALEDVAWLLRISSPGATGDGDDDSLLGLPNIAQNEPILFFIWDHVARLHTGSPAARADSAANLASLARGSQHFAKLIIEEDGVPPLLKLLKDGTDEGQEAAARALGLLGCDGESVDKLVQAGVCSSFTAALKELPMRVQVAVAEAIASLADQSSTCQDLFAQNNAVRYLVGHLASGTIQEHSRYSVSSSSYKSSAATAATTQQPMKFLHSVVLAKTLSMRHSSDRDTTSSGADELPRMSNGTPGERNPQMQSVVHSAMAAKTNTNGLLVPLFRPQLGTSGRGAREVEDPETKAHLKAMAAKALWKLAHNHLGVCKSITESRALLCFAVLLEKGDGDMGTNVQYFSAMAIMEIARVAEHSLVLRQSAFKPSSPAAKAVVDQLLRVVRRGEYDALLLPCITALGCLARTFTASETRIVPPLVQLLDEREPPVIKEAVVALTKFACTENHLHVNHCKAIVDDGGARHLVQLVYLGDEVQIEALILLCYIALYVPESEELAQAGVLAVLLWASKQAHMVQDMRVEALLPDAKGRLELFQSRASR

SEQ ID NO: 48212 - protein, 164 aa, Zea mays
  Coding DNA Sequence Number=SeqID_6433
  Pfam annotation: Domain name=zf-GRF; Domain location=22-75; Score =15.8; E_value=0.00036; Accession=PF06839.3; Description=GRF zinc finger
  Subcellular localization annotation: CTP_CleavageSite=52; ConfidenceScore=5.00e-01
MSRASSSNRLQGFPSFDHVPLVQCPDCTRSEPLVRLRTKKSENGNYGREFVKCESKSQPGKILKKCNFFMWMDEYIEWLRLSGMTKQTWSSFEQEQGATQLMVNNCGAELCGADKGDVSVKLDILAIELMKINGNLNKIIYILVICAFMIFVVLLFIMNQGGKH

SEQ ID NO: 48213 - protein, 41 aa, Zea mays
  Coding DNA Sequence Number=SeqID_6434
MVRGPPGGVMREPVFWSMRKRRVKVLILEFQTKCHTNQISV

SEQ ID NO: 48214 - protein, 115 aa, Zea mays
  Coding DNA Sequence Number=SeqID_6435
  Subcellular localization annotation: CTP_CleavageSite=26; ConfidenceScore=5.09e-01
MTTQRAPAVSSGRTPGCTTPRRQPTPAQLYGGDRLLVIFTASRRIFLVTHQGYNAARIMDERRQAASCARRHAPLAPGCWQVVDEMRQSRPPNWPKPNAPNGPTQQDGNPKSVNP

SEQ ID NO: 48215 - protein, 253 aa, Zea mays
  Coding DNA Sequence Number=SeqID_6436
  Gene Ontology: Mol. function=motor activity; Cellular component =myosin complex
  Homolog annotation: Hit_ID=Q9XFK8; Match level="QueryCoverage=66%, HitCoverage=15%, E-value=2e-81, Identity=88%"; Hit description =Myosin VIII ZMM3
MDQSWESNGNHHVSSGSQLADASLNPDMELRRLKQNFDSWKKALLILKTIPPPSPRSRPHPRWLEYEQKMKAMEEMWQKQMRSLQSSLSVAKKSLALDETPRMPDSSVDQSWDSNGNHHVSSGSQLVPHTGGREMNAGLSVISRLAEEFEQRSQVFADDAKFLVEVKSGQADASLNPDMELRRLKQNFDSWKKDFSGRMRETKVILNKLGIGNESSPNSVKRKWWGRLNTSRRASCIVLPQWLPFEGSRTTEL

SEQ ID NO: 48216 - protein, 154 aa, Zea mays
  Coding DNA Sequence Number=SeqID_6437
MKLNEEQLKLGLRNSLAVVNLKLLAAKTHRCLSLYDSLPDLLILTDQKGYDLTLSLDSAEADAVAITGAEEAMEATRGQKPSDFEVYKEDHKGPDPNNSNQLCSQTTTDRLATPTTGGSESEPMGTGFVDCLFTNTPSGGGSGQSSNHPNGGYP

SEQ ID NO: 48217 - protein, 720 aa, Zea mays
  Coding DNA Sequence Number=SeqID_6438
  Gene Ontology: Mol. function=protein serine/threonine kinase activity; Cellular component=integral to membrane; Biological process=protein amino acid phosphorylation
  Homolog annotation: Hit_ID=Q2QMQ0; Match level="QueryCoverage=96%, HitCoverage=94%, E-value=0.0, Identity=55%"; Hit description=Protein kinase domain containing protein, expressed
  Pfam annotation: Domain name=Pkinase; Domain location=356-647; Score =141.2; E_value=2.8e-39; Accession=PF00069.15; Description=Protein kinase domain
  Pfam annotation: Domain name=Pkinase_Tyr; Domain location=356-647; Score=73.1; E_value=9e-19; Accession=PF07714.7; Description=Protein tyrosine kinase
  Pfam module annotation: Pfam domain module=Pkinase::Pkinase_Tyr; Domain location=356-647::356-647
MRRLHFLLLLFLHATSSAAAPAAASGGVGCDRQCGNTTVPYPFGFSGACPIRLDCNVTTPQLVTNSSAASPYPILSFDATASTFLVSLPPSCNRTVGEARAALDGSRYGVTSHTGLFLARGCLGKAAATGNCSVSATIMKTALRTAGCGDKGAIWTCVAAPLPPPQGLNATAAAAAWDGEAGQFLPWKKVEDAGCEDALTSAVSALSPEGLPSVDFGAAELGWWLDGTCANATAGGQCARNATCQDIETSRGTRGHRCACVVAGMSGDGYAAGDGCYYVAERSAKKIVLVVAAGVAASVAAATGALLLCWLQCRRRKAGRSASERLAAMRLLSEAATSSGVPVYSYGEIARATNSFSHTHRLGTGAYGTVYVGKLPGTGSAPALVAIKRLRRRHHHDEDEDAAAEAALLLNEIKLISSVSHPNLVRLLGCCLDGGEQVLVYEYVPNGTLSQHLHSAGASTGGRGALTWRARLGVAVETAGAIAHLHGMRPPIFHRDVKSSNILLDAALRPKLADFGLSRAVDRLEAARSHVSTAPQGTPGYVDPEYHQNFHLSDKSDVYSFGVVLLELVTAMKVVDFDRPPAEVNLASLALDRIGKGQVAEIVDPALLGAGEDWVMGSVRHVSELAFRCLAFQKDVRPSMREVAAELQRIRSAAPDGADPEEPAGSRLRPVSMMDIQIDVSLGGPDTAAKKAASPVSVQEVWVSDRSSPSTNGSMPRFAA

SEQ ID NO: 48218 - protein, 411 aa, Zea mays
  Coding DNA Sequence Number=SeqID_6439
  Gene Ontology: Mol. function=catalytic activity; Cellular component =mitochondrion; Biological process=lipoate biosynthetic process
  Homolog annotation: Hit_ID=Q2QMP8; Match level="QueryCoverage=55%, HitCoverage=74%, E-value=1e-100, Identity=76%"; Hit description =Lipoate-protein ligase B containing protein, expressed
  Pfam annotation: Domain name=BPL_LipA_LipB; Domain location=112-199; Score=62.4; E_value=1.5e-15; Accession=PF03099.9; Description =Biotinlipoate AB protein ligase family
  Subcellular localization annotation: CTP_CleavageSite=35; ConfidenceScore=5.55e-01
MALLPLPPCSPCHRRAAPLPAPTVASARHRRGSLRLAAAGACSGPTAARKPRPTAADRRRCECFDLHRRLVPYAEAYCWQKSIVERRKRLIDSGEDHSDTLIALQHPPVYTLGTDSKEEYLHFDKEDAPFEVHRINRGGEVTYHGPGQLVMYPIMNLRYHKEDLHWYFRSLEEVIIRALKSAFSITAARVEGLTGVWVGDRKVAAIGIHGSRMIVYHGLALNITTDLAPFRMIDPCGIKDRGVGSIKEILQRVSDAEEIDDASLMDIVYDSMIKEFAELFQLSLDFSPGCSFHLYSKCSGLRYGFCFLQFLEGQMTSLSEHREVPASAAITVSKASPRHPGAQKVGDFGLTRFKRNTLVSGGVRDTLPWMAPELLNGSSSKVYEKASMHRGAIIFFAGFSAYIASCSAGSL

SEQ ID NO: 48219 - protein, 401 aa, Zea mays
  Coding DNA Sequence Number=SeqID_6440
  Gene Ontology: Mol. function=phosphoprotein phosphatase activity
  Homolog annotation: Hit_ID=Q6H7J3; Match level="QueryCoverage=77%, HitCoverage=94%, E-value=1e-48, Identity=42%"; Hit description=5 -azacytidine resistance protein-like
  Pfam annotation: Domain name=PP2C; Domain location=166-377; Score= -66.4; E_value=0.043; Accession=PF00481.12; Description=Protein phosphatase 2C
  Pfam annotation: Domain name=SpoIIE; Domain location=187-378; Score= -25.7; E_value=0.019; Accession=PF07228.3; Description=Stage II sporulation protein E (SpoIIE)
  Pfam module annotation: Pfam domain module=PP2C::SpoIIE; Domain location=166-377::187-378
  Subcellular localization annotation: CTP_CleavageSite=38; ConfidenceScore=5.42e-01
MALPPPPSMNRVPSTASSSEPAPARPFFRHGAAPVEVVATGKMTRTKWIHGSQKTLMRGSRQITIRGNEIRYIWWQGGGNTGKMEKHMAETMIEFDRRIPDALRAAFGIYRASRPTTGQQDDAANLAAVLLAPLDDDGASDPKAIDCDKNPMAMDCASDPIAMGCDLAMELGSCYIKKHDEDDHFGHAEACVIGVADGVGGYRSQGVDASAFSRGLMNNAYAEVAKASVPGTRFCPRALLERAHQMTAAAHTPGASTAAIVSLVGSTLKWAFVGDSGFAVLRGGRILRRSPTQQHYFNCPYQLSSRQDRTRVADALVGEVAAKEGDIVILGTDGLFDNVFDDEIEGIVRMGTTLGFAPLNMAEVLAGFRLRGCGLRLQRLAVQLLGPETAREESHDGREAG

SEQ ID NO: 48220 - protein, 118 aa, Zea mays
  Coding DNA Sequence Number=SeqID_6441
MGKSKKGGSLSHHSGDKRKREPTPPSEDFGDSEYSKEEFSSESEGSPAIEHSGLKGSDESEVSSDEENSSDSSEEGSGDDGDGEGDGDDGGDGKGDGSKGDGKGGDGSSRASGKAPLA

SEQ ID NO: 48221 - protein, 422 aa, Zea mays
  Coding DNA Sequence Number=SeqID_6442
  Gene Ontology: Mol. function=transcription regulator activity; Cellular component=nucleus; Biological process=regulation of transcription
  Homolog annotation: Hit_ID=Q8S0N2; Match level="QueryCoverage=82%, HitCoverage=86%, E-value=3e-31, Identity=58%"; Hit description=BHLH transcription factor-like
  Pfam annotation: Domain name=HLH; Domain location=294-341; Score =22.6; E_value=0.00057; Accession=PF00010.16; Description=Helix-loop -helix DNA-binding domain
MDATFGCWAGAGHHVDEYLSRQAAGCGRLDMVDEAFLGACFGQLQCDGALTTAAGGVDAGACQLVSSNAGAVQGGAGMDGDPLAFLSAGTGDVFDAGLLDAALAFTRELGVGVVGDGGAASNGALLSSYDSGTTGGNISSGESNNYSGGGGGHDAEVVSPTTAPPPPLTFTHHASSNSQAQQAAHHAKRKVTDEYPATTTTTTAAPPPAFPLPGGGGGAKRRAATSISFGGGHVPSCGAAAAGYEPDMEAMAQVKEMIYRAAAMRPVNLGPEAVGAAGAGAERPRRKNVRISSDPQTVAARLRRERVSERLRVLQKLVPGGSKMDTASMLDEAASYLKFLKSQVQALETLGTTTATNANSSASATTSRSSAASRSPQYNYYGGGGNNNNPAGFLGFSNVISPAGSSVVTNSIDRCVVPGLAA

SEQ ID NO: 48222 - protein, 126 aa, Zea mays
  Coding DNA Sequence Number=SeqID_6443
  Gene Ontology: Mol. function=receptor activity; Cellular component =integral to membrane; Biological process=intracellular protein transport
  Homolog annotation: Hit_ID=Q8S0N4; Match level="QueryCoverage=93%, HitCoverage=51%, E-value=4e-51, Identity=89%"; Hit description =Vesicle transport v-SNARE (Vesicle soluble NSF attachment protein receptor) protein-like
MSEVFEGYERQYCEASASLSRKCTAASALDGVVLSAEKKKQKLSEIQSGVEEAESLIRKMDLEARNLQPSIKAGLLAKLREYKSDLNNVKSELKRISAPNARQATREELLESGMADTLAVIRFALK

SEQ ID NO: 48223 - protein, 186 aa, Zea mays
  Coding DNA Sequence Number=SeqID_6444
  Subcellular localization annotation: CTP_CleavageSite=5; ConfidenceScore=5.13e-01
MAWARAGARPGTAPAAPCGAAVTVPAAPFPVRDSGADPARARGWSGSLTACWLGQPAQPGWRAVRRAYGERACSPAGARAGVRPHRAGAATTHSERVGTGVARRGYSGAGHSARARHQGAATTLRQRHALEVKKELFASYIQLLDIVAHPFLLASDIFFFFFFSDLASSADNVLKRSENEIQSNNK

SEQ ID NO: 48224 - protein, 147 aa, Zea mays
  Coding DNA Sequence Number=SeqID_6445
MEGVSNGGECGKEKRSHLKLFTPKERMDAACSGSARVGLGAHGAVSCLGAVFGAAGGVGCRGVEHGLGRLPVTSVSGLRRQAAGHRAARWRGCARWLERRVLRDRPRSTSGAGLLAASVLGERGREMAGWGRCKREKGREARRGGGG

SEQ ID NO: 48225 - protein, 248 aa, Zea mays
  Coding DNA Sequence Number=SeqID_6446
  Gene Ontology: Mol. function=DNA binding; Cellular component=nucleus; Biological process=regulation of transcription, DNA-dependent
  Homolog annotation: Hit_ID=Q4JL76; Match level="QueryCoverage=88%, HitCoverage=100%, E-value=3e-85, Identity=72%"; Hit description=Myb -related protein MYBAS2
  Pfam annotation: Domain name=Myb_DNA-binding; Domain location=72-114; Score=39.7; E_value=1e-08; Accession=PF00249.21; Description=Myb-like DNA-binding domain
MADTKGGGMESSVPMIMGGRKAIAFQDRYGDSERGDSQGAMDRAGGPATGLNRTGKSCRLRWVNYLHPGLKRGRMSPHEERLILELHARWGNRIARRLPGRTDNEIKNYWRTHMRKKAQERKRNMSPSSSSSSLTYQSGYPDTPSTIGVEGQELHGGSGCITSILKGTPPDMDGYPMDQIWMEIEAPQMPSEESFVGGNHNVCSSLATPLPPPTVWEYYPDACWKVDDEIKMATQFQFGYSEGVGPCF

SEQ ID NO: 48226 - protein, 67 aa, Zea mays
  Coding DNA Sequence Number=SeqID_6447
MRVYNLHGEKLRLKRKGVLDERFARRVVPFIEVQSSKQGGVGEGTTGDVREGEGAADDSVMLGPCPA

SEQ ID NO: 48227 - protein, 250 aa, Zea mays
  Coding DNA Sequence Number=SeqID_6448
  Subcellular localization annotation: CTP_CleavageSite=72; ConfidenceScore=5.03e-01
MPDYALFCLWSAAPSPFAPAQLAAQPPPFPLWAQAAQPPLPPKFPLSPLPWAPPVIPSPNSLSPNPSRRRPSAAAAPSPAHGEASPSSPFSLPSLLLPPLVGALPRAMGALARPRRARPAPAPPCRAPTPPRRLGHGAPPLPTPGSAVPRRARLGPASPCPRRPRLAPRRARAATTSSRARRRPASPRPRPESPPPPRRGRARPPPASLPLRRLAPASPAPPSTWTRVVKSPLPVPVTKLRTSSLTTHDP

SEQ ID NO: 48228 - protein, 149 aa, Zea mays
  Coding DNA Sequence Number=SeqID_6449
MNKSMKWAVIKRSGGALDSEQWMYGGTSDSLRREARNYALSGCNTGLSGVHRIVWVTVDSYRPQRSAAVARASDEQWMSSVHWTVRITKSSLVGFGALDDNPIKGLAESTDQAKDGGKKSFKVPSAREKVKEAKEPKARGEEEDLQSQG

SEQ ID NO: 48229 - protein, 161 aa, Zea mays
  Coding DNA Sequence Number=SeqID_6450
MGKGRRGRGSPRHASDKRKRAPSPPSEDFGDSEYSEEVSSGSEGSSAFASPLASSDDSDDSQGLAAEVWTYICSVERAGLEGSDESEVSSDESSFGSSEERSGDDSDDEGSGSGDDSGDGDGGEGDDDGGKGGGEGGDGSGDGGGEGDGGGGKASGKAPLV

SEQ ID NO: 48230 - protein, 111 aa, Zea mays
  Coding DNA Sequence Number=SeqID_6451
  Subcellular localization annotation: CTP_CleavageSite=25; ConfidenceScore=5.41e-01
MGVVRATTAGRGSGRHRSRDGRSAVCSPAPARHFGFGSFQFQFNKDMKSQKRPRTTLHRFFKPVDSSTLVAADVHAETESPTNPTNATATAQVEADQELPYSKVNPNSLPQ

SEQ ID NO: 48231 - protein, 150 aa, Zea mays
  Coding DNA Sequence Number=SeqID_6452
MSRLLPRRTSGDSKYLEEEFSSESEGSPVYASPLVSSDDSDDSQGITAEVWTYIRAVERAGLEGSDESEYSSDEENSSDSSEEGGGDDDGGDGDDDEGDDDGGGDDGDGGGDNGEGDGNGGSSDGGGRGGSGDGGDGGKGSSRGSNKASG

SEQ ID NO: 48232 - protein, 1047 aa, Zea mays
  Coding DNA Sequence Number=SeqID_6453
  Gene Ontology: Mol. function=protein kinase activity; Biological process=protein amino acid phosphorylation
  Homolog annotation: Hit_ID=Q0WP97; Match level="QueryCoverage=72%, HitCoverage=70%, E-value=1e-165, Identity=41%"; Hit description=COP1 like protein
  Pfam annotation: Domain name=WD40; Domain location=1007-1045; Score =7.7; E_value=4.6; Accession=PF00400.22; Description=WD domain, G -beta repeat
  Pfam annotation: Domain name=WD40; Domain location=752-789; Score =13.2; E_value=0.98; Accession=PF00400.22; Description=WD domain, G -beta repeat
  Pfam annotation: Domain name=WD40; Domain location=801-839; Score =19.3; E_value=0.014; Accession=PF00400.22; Description=WD domain, G -beta repeat
  Pfam annotation: Domain name=WD40; Domain location=859-897; Score =17.0; E_value=0.07; Accession=PF00400.22; Description=WD domain, G -beta repeat
  Pfam annotation: Domain name=WD40; Domain location=902-939; Score =30.7; E_value=5.2e-06; Accession=PF00400.22; Description=WD domain, G-beta repeat
  Pfam module annotation: Pfam domain module=WD40::WD40::WD40::WD40::WD4 0; Domain location=1007-1045::752-789::801-839::859-897::902-939
MEGAAAAEVGGGGEDVQIKGAKESGQPAAAAQQPPPLPSGSEALEMPATPLPRDMDWSEHFSFFTSPGGFAGSSDGARGLASVGLSNSESRPDSVTQRGVDHGAEERVEELTLKNCISADAAQPEASAGGSTSGGDRPAVIKGLWGNFTRMARRTSYLASRENAALSYGDIASSRAGDASSRENLATSLANNIISRNNDVSGNEAPTSRVGYVNNEFKTPFHSQQILLSPWSNQDNALKVSSFSNRILDQMRSKTVAPPSGVLGSPLKSKSKGKGVAYQRAREEIRVQANARPRDPLDKIPTIPTSIHDSVARVDMLFSTSGDVSKSHSEGTSLRELIKPGRQTMSKFEKLHLFKQILDLVDNCHAQGFTLQHLRPSYFTILSSNQVKYIGSYTTQDLPTSIKQEFAREDLVSRKRAFGHRIDYQDSNGHGNLMLKHQKVGEQGLVAVRRLANTFLTDKIRDNQIEDNDPGISRQENFSYTTREHFKFVESYGSNMSSAQHVSSSGTQQPAFELRNIEESWYKSPEELSQFKGTPPSNIYSLGVLLFEKVPRRLASAFGYCIQILVQDQKQNKSPVSISEDDTESSLLLNFLSQLKEEKEMQAAKLSAELGSLQTDITEIDRRHSAGMRLSLEDMDVLPSSSLPGASVSALQGALLSGLLPASCKSSIYEERVMRNLVQLENAYYSMRSSVDTCETNVIKRPDNEALRVRENFHQRHSDSDAKGEKTDRLGCFFDGLCKYARHNRFEVRGILKNADVLSSPNVICSLSFDRDEEYFAAAGVSKKIKIFEFDALLNDRVDIHYPLVEMPSKSKLSCVCWNSYIKNYLASTDYDGTVQLWDAGSGQGFTQFTEHRKRAWSKNSIDTIRNVANVCCVQFSPYSSRMLAFGSADYKIYCYDLRNTRIPWCTISGHGKAVSYVRFLDPETLISASTDNTLKIWDLNQTNCSGLSADSCSLTLNGHSNEKNFVGLSVHDGYITCGSETNEVFSYYKDFPMPITSHRFGSIDPITGQVTNEDNQQFVSSVCWRGKSNMVVAANSSGSIKVLELV

SEQ ID NO: 48233 - protein, 114 aa, Zea mays
  Coding DNA Sequence Number=SeqID_6454
MKKGGSTGTFIAQGKESASRTIGWRGREDPEIPDDGHGGIARVRRGLCSEVDGRADNWDPTWRWQAMVYARPGSLVDGPMGQWSSQRGGVRKWVVRARRQTNGGLNSGSKAQYR

SEQ ID NO: 48234 - protein, 364 aa, Zea mays
  Coding DNA Sequence Number=SeqID_6455
  Subcellular localization annotation: CTP_CleavageSite=26; ConfidenceScore=5.66e-01
MAADGTTPRVSASSPPTVGTLLTRASAARDRGCSSPRSLLSRILHGGRGRSGAGFGCRIRLLPRYCASASAAAAKEDAIAAAKHEEEDEPAEVEAAQPAPREPGGPRSSLGKQDALPASLGLGASLVLLLSKSAAELSRMAELRAQMERLLVDARADARSCTGRPSASGGRSDCASAVKGPVARAGGEDEDDGALSRSDGDGGRDMDRMEAELEAELSRLQLQGASDVEDSPPSRRRDDQLVVQAGPKSGASSRRHSAICSEDDSDDGETDNSGDESQDDEEEYEHDADEGNVINGPAHGGVSARELQLRLHQLLQSRHEARIAELESALESARWKLRETEREACRWRDTAKLATRFADESRLR

SEQ ID NO: 48235 - protein, 482 aa, Zea mays
  Coding DNA Sequence Number=SeqID_6456
  Gene Ontology: Mol. function=acyltransferase activity
  Homolog annotation: Hit_ID=Q7EYV6; Match level="QueryCoverage=96%, HitCoverage=96%, E-value=1e-153, Identity=62%"; Hit description =Anthocyanin 5-aromatic acyltransferase-like protein
  Pfam annotation: Domain name=Transferase; Domain location=7-474; Score=-14.1; E_value=2.9e-10; Accession=PF02458.6; Description =Transferase family
MAPTLVYPVTAMEKFDVTPSPAPAAGQPRALPLTFYDLVFWAIPPVQRLFFYDRADLLDVSDFTLGELPRFRDSLAAALHHFYPLAGKLTCELVHEEGAAPPEVVFSDGDSVPLTVAVSGDDFRDLAGDHARDTARLRALLPALPQHGGSSRSHSQQGVLAVQITVFPRAGVCIGTTVHHAVADGSSYAHFLRTWATAHRLGPERSGAVAVDVPPPLFDRGVVRDDARLREAFLRDHLALGTAGRGGGERLCDWDLSRRPGVVFATFRFTEKRLRALGRRAEAETSARCSPYALACGAAWAGIVRARGIGTGTGTDGAPAPDALFGFVTGCKPRASPPVPANYFGNCLGLCRVAHHAKRGELTAVAASAAIWRAIEGLAEAGSVFRGARGWVRWVREYASARAVTVAGSPKLGLYAAADFGGAWGRPAKVEIASVERTGALALAESGRDGDGGIEVGLALPRAEMETFRAFYLDLLASLDLD

SEQ ID NO: 48236 - protein, 97 aa, Zea mays
  Coding DNA Sequence Number=SeqID_6457
  Homolog annotation: Hit_ID=Q6QP51; Match level="QueryCoverage=69%, HitCoverage=30%, E-value=6e-10, Identity=52%"; Hit description =Putative growth-regulating factor 1
MRLMLSCIGVLVVGVTSVAHEREGPALSGAVGPRSRSGEAETSPKAEAEVGRGCDFSRGRGRGPRSGEDVTPPEAEAEAEARGRARRRPSPEAEAEA

SEQ ID NO: 48237 - protein, 166 aa, Zea mays
  Coding DNA Sequence Number=SeqID_6458
  Homolog annotation: Hit_ID=Q2QYV8; Match level="QueryCoverage=42%, HitCoverage=18%, E-value=1e-30, Identity=87%"; Hit description =Ribosomal protein L10 containing protein
MYNLSLRQLIVDYNSWGAKDNHLRVKGPVRIPTKVLHVTTPKSPGGKALRQPPYSGQKVIQFLPDETTLQHCEFLQGNSGLFFTNLPRDDVERMFREFEEHDFARTGCTAVDTVELKEGPLEQFTHEMEPFLRKQGLPVRLNKALFPQGCTPDEGYNDRATKVIPP

SEQ ID NO: 48238 - protein, 121 aa, Zea mays
  Coding DNA Sequence Number=SeqID_6459
  Subcellular localization annotation: CTP_CleavageSite=45; ConfidenceScore=5.63e-01
MACGALKRGGAPPAVRRARLVASAQPRRDRPQPLAMASCAPTPVSASNLARRLVARRAASHPSPSARPLSQPRTPMMMRRMVMFMLMVMVAFGAIYAQVKKKENGVEADLREFQDFDEFED

SEQ ID NO: 48239 - protein, 115 aa, Zea mays
  Coding DNA Sequence Number=SeqID_6460
MEGMGAATDGIAGHARSACRAWSKGGQGTRGPEGTRRGWALSTSGCRDTWARGKGTMARGGRGWGIGQGRGLLTSTGKQQLQSMDEPSTRHGSSATRRSSGRLGNVSGVACRGFE

SEQ ID NO: 48240 - protein, 67 aa, Zea mays
  Coding DNA Sequence Number=SeqID_6461
MVTGHGDAGFRGKEEAPTPPSQSNADAHAQRLRAALSADSKLRGAGVGEEELELGAPKLGDGSGLTV

SEQ ID NO: 48241 - protein, 80 aa, Zea mays
  Coding DNA Sequence Number=SeqID_6462
MVTGHGDAGFRGEEEAPVSIPKRRIPAIPTDPSVTVERRCACAEATTALSADSKLRGAGVGEEELELGAPKLGDGSGLTV

SEQ ID NO: 48242 - protein, 428 aa, Zea mays
  Coding DNA Sequence Number=SeqID_6463
  Homolog annotation: Hit_ID=Q10MF5; Match level="QueryCoverage=99%, HitCoverage=99%, E-value=1e-168, Identity=70%"; Hit description =Expressed protein
  Pfam annotation: Domain name=DUF247; Domain location=30-428; Score =178.3; E_value=2e-50; Accession=PF03140.6; Description=Plant protein of unknown function
MERESDAGFFHHDDAQVEAMQRRVDAAAPLADDPYTIFRLPSAVRERRRDLYEPKVVSVGPYYHGRAGLGVAQQHKWRLLRDFLSRGEKAAAAGGLGAYVRAAREVEADARRCYAEGFGLGADEFAELLVLDGCFLLEFFLKKGEGQLAAPGGAKWAWHHMYHDVLLLENQIPFFVVEKLHGVAFAGADRDRDALLDIFCKAFAGDLPSSRVIRPRSDKTIHHLLHLHYECNIRSPAAADSDKARSSSFGDANGASLAIWKQPAIPSPRSGEGAGAGAGSKGRLTSMIPPAGKMEEAGVAFKRKAAPRDLFDVSFRYGVLHVPAFVLDEGAKVLLANLVAFEQGGGRAARQLDGGNLVTGFVALVGSLVNSRRDLEVLRRCGIMHCMLPDDDAVAYFNHVVQYTTMDYDRNLLASLFRDVREHCHWNR

SEQ ID NO: 48243 - protein, 743 aa, Zea mays
  Coding DNA Sequence Number=SeqID_6464
  Gene Ontology: Mol. function=transferase activity, transferring glycosyl groups; Cellular component=nucleus; Biological process =gibberellic acid mediated signaling
  Homolog annotation: Hit_ID=O82422; Match level="QueryCoverage=99%, HitCoverage=81%, E-value=0.0, Identity=86%"; Hit description =Probable UDP-N-acetylglucosamine--peptide N- acetylglucosaminyltransf erase SPINDLY
  Pfam annotation: Domain name=Sel1; Domain location=172-203; Score =9.4; E_value=1.1; Accession=PF08238.2; Description=Sel1 repeat
  Pfam annotation: Domain name=Sel1; Domain location=281-312; Score =11.0; E_value=0.69; Accession=PF08238.2; Description=Sel1 repeat
  Pfam annotation: Domain name=TPR_1; Domain location=138-171; Score =9.2; E_value=0.43; Accession=PF00515.18; Description=Tetratricopeptid e repeat
  Pfam annotation: Domain name=TPR_1; Domain location=172-205; Score =34.3; E_value=4.1e-07; Accession=PF00515.18; Description =Tetratricopeptide repeat
  Pfam annotation: Domain name=TPR_1; Domain location=206-239; Score =47.2; E_value=5.6e-11; Accession=PF00515.18; Description =Tetratricopeptide repeat
  Pfam annotation: Domain name=TPR_1; Domain location=247-280; Score =5.7; E_value=1.1; Accession=PF00515.18; Description=Tetratricopeptide repeat
  Pfam annotation: Domain name=TPR_1; Domain location=281-314; Score =33.0; E_value=1.1e-06; Accession=PF00515.18; Description =Tetratricopeptide repeat
  Pfam annotation: Domain name=TPR_1; Domain location=29-62; Score=7.2; E_value=0.73; Accession=PF00515.18; Description=Tetratricopeptide repeat
  Pfam annotation: Domain name=TPR_1; Domain location=315-359; Score =19.6; E_value=0.011; Accession=PF00515.18; Description =Tetratricopeptide repeat
  Pfam annotation: Domain name=TPR_1; Domain location=360-393; Score =41.7; E_value=2.5e-09; Accession=PF00515.18; Description =Tetratricopeptide repeat
  Pfam annotation: Domain name=TPR_1; Domain location=63-96; Score =32.5; E_value=1.4e-06; Accession=PF00515.18; Description =Tetratricopeptide repeat
  Pfam annotation: Domain name=TPR_1; Domain location=97-130; Score =23.4; E_value=0.00082; Accession=PF00515.18; Description =Tetratricopeptide repeat
  Pfam annotation: Domain name=TPR_2; Domain location=138-171; Score =9.2; E_value=2.8; Accession=PF07719.7; Description=Tetratricopeptide repeat
  Pfam annotation: Domain name=TPR_2; Domain location=172-205; Score =23.0; E_value=0.0011; Accession=PF07719.7; Description =Tetratricopeptide repeat
  Pfam annotation: Domain name=TPR_2; Domain location=206-239; Score =36.9; E_value=6.8e-08; Accession=PF07719.7; Description =Tetratricopeptide repeat
  Pfam annotation: Domain name=TPR_2; Domain location=281-314; Score =22.9; E_value=0.0012; Accession=PF07719.7; Description =Tetratricopeptide repeat
  Pfam annotation: Domain name=TPR_2; Domain location=29-62; Score =13.5; E_value=0.79; Accession=PF07719.7; Description=Tetratricopeptid e repeat
  Pfam annotation: Domain name=TPR_2; Domain location=315-359; Score =10.1; E_value=2.2; Accession=PF07719.7; Description=Tetratricopeptide repeat
  Pfam annotation: Domain name=TPR_2; Domain location=360-393; Score =34.2; E_value=4.5e-07; Accession=PF07719.7; Description =Tetratricopeptide repeat
  Pfam annotation: Domain name=TPR_2; Domain location=63-96; Score =28.3; E_value=2.8e-05; Accession=PF07719.7; Description =Tetratricopeptide repeat
  Pfam annotation: Domain name=TPR_2; Domain location=97-130; Score =23.2; E_value=0.00095; Accession=PF07719.7; Description =Tetratricopeptide repeat
  Pfam module annotation: Pfam domain module=Sel1::Sel1::TPR_1::TPR _1::TPR_1::TPR_1::TPR_1::TPR_1::TPR_1::TPR_1::TPR_1::TPR_1::TPR _2::TPR_2::TPR_2::TPR_2::TPR_2::TPR_2::TPR_2::TPR_2::TPR_2; Domain location=172-203::...
  Pfam module annotation: Domain location=281-312::138-171::172 -205::206-239::247-280::281-314::29-62::315-359::360-393::63-96:: 7 -130::138-171::172-205::206-239::281-314::29-62::315-359::360-393
MDSVPGKENNGIAPNLNGVVSPAKQQLEGKEAMRYANILRSRNKFADAINLYTIVLEKDGTNVEALIGKGICLQAQNLPRQAIECFTEAVKIEPGNASALTHCGMIYKDEGHLVEAAEAYQKARMADPSYKPASEFLAIVLTDLGTSLKLAGNTEEGIQKYCEALEVDNHYAPAYYNLGVVYSEMMQFDMALSCYEKAALERPLYAEAYCNMGVIYKNRGDLDAAIICYERCLTISPNFEIAKNNMAIALTDLGTKVKIEGDINRGVAYYKKALYYNWHYADAMYNLGVAYGEMLNFEMAIVFYELALHFNPRCAEACNNLGVIYKDRDNLDKAVECYQGKMDSAASMIEKAIHANPTYAEAYNNLGVLYRDAGSITLAIHAYERCLQIDPDSRNAGQNRLLAMNYIDEGSDDKLYEAHREWGKRFMKLYPQYTSWDNSKVADRPLIIGYLSPDYFTHSVSYFIEAPLTHHDSTVCKVVVYSGVVKADAKTLRFKDKVLKKGGLWRDIYGIDEKRVASLVREDKVDILVELTGHTANNKLGTMACRPAPIQVTWIGYPNTTGLPTIDYRISDSLTDPPMTKQKHVEELVRLPESFLCYTPSPEAGPVCPTPAISNGFVTFGSFNNLAKITPKVLQVWARILCSVPNSRLVVKCKPFCCENIRQKFLATLEELGLESLRVDLLPLIHLNHDHMQAYSLMDISLDTFPYAGTTTTCESLYMGVPCVTMAGAVHAHNVGVSLLSKA

SEQ ID NO: 48244 - protein, 407 aa, Zea mays
  Coding DNA Sequence Number=SeqID_6465
  Gene Ontology: Mol. function=RNA-directed DNA polymerase activity; Cellular component=mitochondrion; Biological process=RNA-dependent DNA replication
  Homolog annotation: Hit_ID=UPI00004C1732; Match level="QueryCoverage =96%, HitCoverage=28%, E-value=1e-164, Identity=72%"; Hit description= UPI00004C1732 related cluster
  Pfam annotation: Domain name=RnaseH; Domain location=1-123; Score= -8.1; E_value=0.00033; Accession=PF00075.14; Description=RNase H
  Pfam annotation: Domain name=rve; Domain location=163-310; Score =85.3; E_value=1.9e-22; Accession=PF00665.16; Description=Integrase core domain
  Pfam module annotation: Pfam domain module=RnaseH::rve; Domain location=1-123::163-310
MFFDGSLMKTGAGAGLLFISPLGKHLRYVLRLHFPASNNVAEYEALVNGLRIAIELGVRRLDARGDSQLVIDQVMKNSHCRDPKMEAYCDEVRHLEDKFYGLELNHIARRYNETADELAKIASGRTTVPPDVLSRDLHQPSVKIDDTSEPEAPSVQSEAPSAQPEAPSARLEAPSVQPEKAPGGYTHLLVAIDKFSKWIEAVAFFTNIIHHFGVPNSIITDNGTQFTGRKFLDFCEDHHIRVDWAAVAHPMTNGQVERANGMILQGLKPRIYNDLNKFGKRWMKELPSVVWSLRTTPSRATGFTPFFLVYGAEDILPTDLEYGSPRTRAYADQSNQASREDSLDQLEEARDMALLRGTSSPCDATTPEGSGPKTSRWATWCFGCDRTPEGGTSSRLPGKGRSSSPKF

SEQ ID NO: 48245 - protein, 44 aa, Zea mays
  Coding DNA Sequence Number=SeqID_6466
MNGWAKVTHCNAVKAPKHVAQGHEVANSEQLTEHIQGSFSPKFM

SEQ ID NO: 48246 - protein, 68 aa, Zea mays
  Coding DNA Sequence Number=SeqID_6467
MGKALAPGAEWASGQAGGVALGRTGDHKDGGGRAGWASWERWAAGELEWAAGAGHEAELGRGEMLETD

SEQ ID NO: 48247 - protein, 117 aa, Zea mays
  Coding DNA Sequence Number=SeqID_6468
  Homolog annotation: Hit_ID=Q9SNN7; Match level="QueryCoverage=46%, HitCoverage=55%, E-value=5e-13, Identity=50%"; Hit description =Putative CYP10L
MEDSAGQEVCAVLGIGDNIKGLLATLSRVDAIISYDSSPRSTCILSYPISYRVPDSRWLCGAPHTENFLALCTSGYYDDTVFHRNIKGFMVAHYAGANSGPNANGSRFFITYAKQPF

SEQ ID NO: 48248 - protein, 68 aa, Zea mays
  Coding DNA Sequence Number=SeqID_6469
MAADLDAPPAAAEVWRGVVPGMSSGLGMLNLSRNRNALGGGITDAFTPRSYFTLLDGWTCRGTGSRAA

SEQ ID NO: 48249 - protein, 156 aa, Zea mays
  Coding DNA Sequence Number=SeqID_6470
MGVDGWSTRGHEGSSTTGHTATARLDSEAGAWRLGQLEKLDGAFGRVGKGREVLTEWPRTGGELGLRRRSSGRDYSSGSGEAVDWRSRIRGGGEVLVGGIRMIALREARRGGGATEPRCRRSEAPCTPAVLRAPPEFALERPLVLLRQRDAHGRVR

SEQ ID NO: 48250 - protein, 56 aa, Zea mays
  Coding DNA Sequence Number=SeqID_6471
MALISAIVPRGCGGIQLLLTPIKSLNYFKLLYLGWLPEIRTNYSRKSYSEEQKTGS

SEQ ID NO: 48251 - protein, 63 aa, Zea mays
  Coding DNA Sequence Number=SeqID_6472
  Homolog annotation: Hit_ID=O24587; Match level="QueryCoverage=65%, HitCoverage=3%, E-value=6e-16, Identity=95%"; Hit description=Pol
MAPRDSLKSCHTLVHKILGITDIKVFHVSTENQLADIFTKPLDEKTFCRMRSELNVLDSRNLD

SEQ ID NO: 48252 - protein, 183 aa, Zea mays
  Coding DNA Sequence Number=SeqID_6473
MGRGRRGRGWPRLADGKCKSAPSPPSEDFGDSEYSEEASSELDRSPAPASPLASSEDSDDSMGLSTAARAYWRSIERAGLEGSDESGVSSDKADSSDYSEGWSGGDGDDEGDDSGDDSGDGDDGDNGSEGDSGNGSGDDGDGGNGGCKGDGGDDDGKGDISGSSDDGKGDDSGGKASGIAPLI

SEQ ID NO: 48253 - protein, 661 aa, Zea mays
  Coding DNA Sequence Number=SeqID_6474
  Gene Ontology: Mol. function=protein binding; Cellular component =membrane; Biological process=defense response
  Homolog annotation: Hit_ID=Q8RYR1; Match level="QueryCoverage=92%, HitCoverage=96%, E-value=4e-74, Identity=47%"; Hit description =Putative RPR1
  Pfam annotation: Domain name=LRR_1; Domain location=320-341; Score =11.4; E_value=2.1; Accession=PF00560.23; Description=Leucine Rich Repeat
  Pfam annotation: Domain name=LRR_1; Domain location=343-364; Score =7.1; E_value=14; Accession=PF00560.23; Description=Leucine Rich Repeat
  Pfam annotation: Domain name=LRR_1; Domain location=572-594; Score =10.3; E_value=3.4; Accession=PF00560.23; Description=Leucine Rich Repeat
  Pfam annotation: Domain name=NB-ARC; Domain location=150-394; Score= -56.0; E_value=1e-06; Accession=PF00931.13; Description=NB-ARC domain
  Pfam module annotation: Pfam domain module=LRR_1::LRR_1::LRR_1::NB -ARC; Domain location=320-341::343-364::572-594::150-394
MLNKRGNSELANLLFLVFIKLLGTKQLYHEASALGRLFGEIRDIKEELESMQSFLQGAERFKDTDNNTANFIKKIRGLAFDIEDVIDEFIYKMEDKHGSFATKMNRRINRIWTWRRLTSKLQKIKLKLENVDKRNVRYDMRGIAREDGSSDAHHRSTDQISYFPKEENLVGIDENKELLMNWLRGDLHQQSVITTVWGMGGVGKTTLVAHVYNTVKVDFDSAAWITVSKAYQVEDLLKQIIRGFQKSDLKDDVWGVDIWFKIRDAFPTNSTSRSPTYSDWESFFKELELQMTNNVILNVNVLLKGAQIVELPDEVFNLFNLRFLSLRNTEVTNIPSTVGRLQKLEVLDVYNAKLLALPESVSKLRKLRYLHVATVPKINTKGVVTWIGIQVPKSIKYLTGLQTLRLVEASSETLFHLGALTQLRTFAITNVQRDQCADLCTVIMSMKHLVSLAIMAISEEEILQLEELCLPPTLSKLELGGQLDKKAMPQIVSSFSDLGNLTLLALAFSKLDEDSFSCLLTLHGLRGLWVDKAYEGKRLHFNAMSFPNLRQLAISDAPQLNSVVIERSALQSLVQLTLVDCPELKALPDGIEHLRTLEKLYLRGASKELTKLFQCNEETHESNGNLEKIGHIRRDVPPSCGFDDDGNDELQATIRASREEK

SEQ ID NO: 48254 - protein, 249 aa, Zea mays
  Coding DNA Sequence Number=SeqID_6475
  Gene Ontology: Mol. function=iron-sulfur cluster binding; Biological process=electron transport
  Homolog annotation: Hit_ID=Q411K9; Match level="QueryCoverage=90%, HitCoverage=22%, E-value=1e-08, Identity=30%"; Hit description =Hypothetical protein precursor
MALDPACGGYCHTGRFWGRGWGIGASNVDGGARRSACPHRWRSAWPSLQGPAATEALGEQGVGEPALTLMWRLPGGTPARMEPRCGSSGKLPSARARGRPRPTRPGHGRGLSAAAARPTSAPLPSVGSHAGFPPGAARPGSHRGPGGALGRHMVAGPGMDAAWGEAQASARPEPPWWRSARQAPGTDAWRRSARLPDRAPSGGWSWPLPSGTKGGGWIQGAHDPRLGEARRPGGGSLADPGGGQESPGG

SEQ ID NO: 48255 - protein, 62 aa, Zea mays
  Coding DNA Sequence Number=SeqID_6476
MITYEVSVASTAWASRDSAQDQQLRDRTGTAKVFGEPARSVCCGSRIVTGGFPYRLSNGFSG

SEQ ID NO: 48256 - protein, 294 aa, Zea mays
  Coding DNA Sequence Number=SeqID_6477
  Homolog annotation: Hit_ID=Q8LI32; Match level="QueryCoverage=29%, HitCoverage=17%, E-value=1e-26, Identity=76%"; Hit description =Putative oxidoreductase, FAD-binding
MAFSLHSLLPCLICPSSLSPPLTRLRAAATLEDVILSTPETTTGEHRVQLGFSSSIVEQFLLRPFLTGIFFDPALDKSSRLFELVFKHLTLGDNVLSEDGIGAIAAQLACPRSGDRGEEGGDHSVLPLSNKVLVGLTRLRATTTLDDVILLPSKTATRMWMTGAPRMRGGWGQGGGRARGGMGRHCGDDAGSVRWMRCGGRGGWGEVEGMAVWGYGARVSVCRGEGAEWRICSISRLGGGWRSRGWPGRGEAGVSGRCLRVRDLGAGAGMITEVVEGERQNGARCGRLHTVLIE

SEQ ID NO: 48257 - protein, 83 aa, Zea mays
  Coding DNA Sequence Number=SeqID_6478
MAGHWSRRRSKRLGQGVVEMNLPHRFFRLGTSRPLESDGHWSPGQREGGQGGRRGVGWVSIVEEQLLDRGSGDPGCERRAAAA

SEQ ID NO: 48258 - protein, 213 aa, Zea mays
  Coding DNA Sequence Number=SeqID_6479
  Homolog annotation: Hit_ID=Q6QP54; Match level="QueryCoverage=47%, HitCoverage=35%, E-value=2e-16, Identity=61%"; Hit description =Putative kinase
  Subcellular localization annotation: CTP_CleavageSite=50; ConfidenceScore=5.39e-01
MAPPVTWSVRALGWARRRLLRGRGRVCLPRPRSSPSPWVGRGGDRRLRPRLSPSPGVGRGGVRRLPGPSSSPSPGVGRGGVRRLPGLSPSPSPGVGRCGVRRLPGLSPSPSPRVGRGGVCRLPGSSPSPSPGIGAHVRIRCQAILALNAPAIRSVGVATWPRLLLGEDWASGEPKTTKLTLDSREDFVVDLSSELVEKDLQVEQLSQRIATLE

SEQ ID NO: 48259 - protein, 53 aa, Zea mays
  Coding DNA Sequence Number=SeqID_6480
MGATNATRDLGTSFGSRAHPIDQITTGSRIERRAMRRYERVGRLWAKLYKFKI

SEQ ID NO: 48260 - protein, 78 aa, Zea mays
  Coding DNA Sequence Number=SeqID_6481
MKLWKETSRSSKTTTSSRCGLAATPSRLPVKAAVIYVSFSHFDLLIRSAYYANRYALLAIGSRSYVYDENKVMNSHGR

SEQ ID NO: 48261 - protein, 66 aa, Zea mays
  Coding DNA Sequence Number=SeqID_6482
MSNDWVLLIHDDGIIKVSLKKVQNQGSWTPGCLGIATSHRLDEYLREDEFQEEMDEMRVVLGSSSG

SEQ ID NO: 48262 - protein, 341 aa, Zea mays
  Coding DNA Sequence Number=SeqID_6483
  Homolog annotation: Hit_ID=Q9FMZ6; Match level="QueryCoverage=64%, HitCoverage=81%, E-value=3e-41, Identity=49%"; Hit description =Arabidopsis thaliana genomic DNA, chromosome 5, P1 clone:MJB21
  Pfam annotation: Domain name=DUF617; Domain location=167-340; Score =95.0; E_value=2.2e-25; Accession=PF04759.4; Description=Protein of unknown function, DUF617
MCRDQAIEESVHRRRTDALHEDFRCYAATMGHPLPPRDPFLVTPDHPAPVTSFLLPTRVRDPFLVTQGLLAPVTTTILLLLLIRPGRATVAAPAAAQRRASGEAVRGGGGGRRRLGAVQDVQAPARAHHGLQGGRYAGTAQQPPGPTGRPLAHGDAVRAPARAAESGHPRGHARPARVPHRAAHAGARAAPGDGHGHRAPGVESDTRGGAAARRRRRPLLEEYVWAVYCNGRKAGYAIRRKDASDDERHVLRLLRGVSMGAGVLPPPPDDRAGARATATATATPAACPDGELTYMRARVERVVGSNDSQAFYMINPDDASGNTARGGDCAPELSVFFVRNK

SEQ ID NO: 48263 - protein, 117 aa, Zea mays
  Coding DNA Sequence Number=SeqID_6484
  Subcellular localization annotation: CTP_CleavageSite=76; ConfidenceScore=5.79e-01
MPYTGYPLAPSHNRASAVLPPTSAPPTSAPASLAALPSPPSAITAAASFCTGSVAATTPQIRWVDVHGAAPGMSSSASSVEGDAAGEFTEVVIVRHGETSWNASRIIQALLQNSFLK

SEQ ID NO: 48264 - protein, 112 aa, Zea mays
  Coding DNA Sequence Number=SeqID_6485
MGSWSLWQPWRAAGRLAGHPSGSGAEGAGHGGHHSWGRTTMGWSPTEEDDPGAMAAESQRPRRRGHGEEWRMGSDLSHGWGATCSMLQWRRRNSHGRGALADTAMGEERGGL

SEQ ID NO: 48265 - protein, 74 aa, Zea mays
  Coding DNA Sequence Number=SeqID_6486
MASSRSPGWASQREWSRGEPETKASRPWGGMENGLGPEPWMGCYLLHAPMEKGGIAHGRGALADTAMGEERGGL

SEQ ID NO: 48266 - protein, 219 aa, Zea mays
  Coding DNA Sequence Number=SeqID_6487
MAWEQLALDTASYVVKPSLDPLSGSWVVWLQGICYGFVRPLVVVTLCLHGVLEPLFQNHPDALISCGLLREGHYLLPGSKDVSVLLAGFVDVPPFLPLVLPFLDRVAPQLVDARRPGEGDPNRMCDHPYAWGTIQGGAPGTLKVRYGCPKDEEKRMVRAIAAMSVLHDHGVTLAARGTETFSIDEDGDDDDDANAGSELWAIPNASLDASTVDPVPTLP

SEQ ID NO: 48267 - protein, 1119 aa, Zea mays
  Coding DNA Sequence Number=SeqID_6488
  Gene Ontology: Mol. function=protein binding; Cellular component =membrane; Biological process=apoptosis
  Homolog annotation: Hit_ID=Q94J89; Match level="QueryCoverage=99%, HitCoverage=99%, E-value=1e-120, Identity=30%"; Hit description =Putative NBS-LRR type resistance protein
  Pfam annotation: Domain name=LRR_1; Domain location=1006-1028; Score =5.9; E_value=23; Accession=PF00560.23; Description=Leucine Rich Repeat
  Pfam annotation: Domain name=LRR_1; Domain location=1030-1051; Score =6.9; E_value=15; Accession=PF00560.23; Description=Leucine Rich Repeat
  Pfam annotation: Domain name=LRR_1; Domain location=1053-1076; Score =11.9; E_value=1.7; Accession=PF00560.23; Description=Leucine Rich Repeat
  Pfam annotation: Domain name=LRR_1; Domain location=575-596; Score =5.9; E_value=22; Accession=PF00560.23; Description=Leucine Rich Repeat
  Pfam annotation: Domain name=LRR_1; Domain location=598-619; Score =8.3; E_value=7.9; Accession=PF00560.23; Description=Leucine Rich Repeat
  Pfam annotation: Domain name=LRR_1; Domain location=621-643; Score =14.3; E_value=0.44; Accession=PF00560.23; Description=Leucine Rich Repeat
  Pfam annotation: Domain name=LRR_1; Domain location=896-918; Score =7.6; E_value=11; Accession=PF00560.23; Description=Leucine Rich Repeat
  Pfam annotation: Domain name=LRR_1; Domain location=983-1005; Score =12.7; E_value=1.2; Accession=PF00560.23; Description=Leucine Rich Repeat
  Pfam annotation: Domain name=NACHT; Domain location=192-343; Score= -41.3; E_value=0.096; Accession=PF05729.3; Description=NACHT domain
  Pfam annotation: Domain name=NB-ARC; Domain location=150-454; Score =161.8; E_value=1.8e-45; Accession=PF00931.13; Description=NB-ARC domain
  Pfam module annotation: Pfam domain module=LRR_1::LRR_1::LRR_1::LRR _1::LRR_1::LRR_1::LRR_1::LRR_1::NACHT::NB-ARC; Domain location=1006
MDDALLSAFLQSLYQVMVYLLKEEQSERHLEEGRKQLVSKLGMIQAALGTAEKKTQLSASEEAFFASLKDVSYQGSEALDEYCYEVQRRKVIRPATRLRNSTVTTVLNPSRAMFRHNMENKFKDFADRIDGIRNIQEMLLDLQAQNGQPCDGGGNERTSLLPPTVVCGRHGDEEKIVEMLLRPDPKPGNVVAVLPIVGEAYIGKTTVAQLVLKAERVAKHFELKLWVHVTHQFSIERIFSSIIESIQCSQFQSHSLNTLHTSLDRLLRGRRYLLVLDDYWNESWEDWDMLKRSFLSGAPGSKIIVTTRSENVAGLVRTLGPHRLQRLEEEDCLSLFSQCAQGTEHHAHVPDDTRLKEEVLRKCRGVPFIAASLGYTIRLRQENDRSKWADILREEKWDSSTSHFNRALRLSYVQLDYHLKPCFAYSSIIPHKFQFEKEWLIRHWMAQGFIPDAGSDDTVEDTGRAYFKSLVSQSFFQIAHVDRTGEEHRYVLSEMMHDLASNVSGADCGCYLMGRQRYSVPVRVRHLTVVFCKDASQDMFQVISCGESLHTLIALGGSKDVDLKIPDDIDKRYTRLRALDLSNFGVTALPRSIGKLKHLRCLQLQGTRIRCLPESICELYNLQTLGLRNCYELEELPHDLKSLCKLRHIDLLMAPDDPRHKVCSLRCMPKDIGLLTNLQTLSRFVVSERSVVHPHRGGIGELADLNDLRGELLISNMHLVKDVQEATQAQLSSKRFLQKLELSWDNQEEATQPSKKILQKLKLSPSSNEIEEAEAIVDRLKAPTSIKELTISGYTGMACPSWLGSAGYADLVTVSLCDFKRCDTLPCLGLLSHLENLHLKGWDSLVSISCREFCGDCFGESGVRRSFRSLKKLHFEGMTRLQRWEGDGDGRCALSSLLELVLENCCMLEQVTHSLPSLAKITVTGSVSFRGLRNFPSLKRVNVDASGDWIWGSWPRLSSPTSITLCNMPTVNFPPRIGQLHTSLQRLEISHCEQLQHIPEDWPPCTLTHFCVRHCPLLRELPEGMQRLQALEDLEIVSCGRLTDLPDMGGLDSLVRLEISDCGSIKSLPNGGLPSSVQVVSINNCPLLANSCINEGSAYRAKVKRVLVWIDGLLLDRFL

SEQ ID NO: 48268 - protein, 65 aa, Zea mays
  Coding DNA Sequence Number=SeqID_6489
MKVIGFGRSLEVGDAYDTLTMRVRGRDRGQLPTGALTPPRSYGFGCSPEVGDSYDTLTMRVRGRD

SEQ ID NO: 48269 - protein, 123 aa, Zea mays
  Coding DNA Sequence Number=SeqID_6490
MRQSLASLTRSLASRFCLLLDQREAWEHSVSDLPVAKSGTIDARASAALIQNAYGALVGAARSDADSMTLARVQSTKASSHLRILERGKEVVEAQVAVLEEELGSQTKKEEKFLPYMQDNTFY

SEQ ID NO: 48270 - protein, 164 aa, Zea mays
  Coding DNA Sequence Number=SeqID_6491
MAGGAPALGEVGHGGRLGDGRAARLQGTRPWGGGQGAPALRELGGMGGPALAAVVVLGVGARRPWEVLADPPPAVRIQGEEGRPIPRAPAPRAVGAGGCAPRLGSHARAELRGAAPVTAAPLEGAAPGGRSLPGAAAAQVGGGCSWRLLGGREPPAAAVGRKKT

SEQ ID NO: 48271 - protein, 276 aa, Zea mays
  Coding DNA Sequence Number=SeqID_6492
  Gene Ontology: Mol. function=structural molecule activity; Cellular component=protein storage vacuole; Biological process=lipid transport
  Homolog annotation: Hit_ID=Q8LN94; Match level="QueryCoverage=94%, HitCoverage=96%, E-value=1e-69, Identity=54%"; Hit description =Putative vesicle-associated membrane protein
  Pfam annotation: Domain name=Motile_Sperm; Domain location=6-117; Score=36.7; E_value=7.9e-08; Accession=PF00635.16; Description=MSP (Major sperm protein) domain
  Subcellular localization annotation: CTP_CleavageSite=38; ConfidenceScore=5.09e-01
MASCDLLDVDPLELQFPFVLDKQIPCPLRLANRTDRTVAFKQSSRNSSVLEPFLLSTLVENFGVLYAFCAPAVTMQAQTVVPPDLQCKDKFMVQSVVISDSLSAKDITSQMFAKEGGNVLQEVKLKVAYVMPPEPPSEIAEEHDGLDRVLVPMQRIVDNGKSTSELSSGSVSLRSAEEFGSPVGRIVKSEEFLKAAGPAMETKTYAGPGEQSHQLSAIITKLTEEKNSALEQNRKLQVELSRNHSRRLTVGLDVHSTLIGVLQIQCESLRIVNFSR

SEQ ID NO: 48272 - protein, 281 aa, Zea mays
  Coding DNA Sequence Number=SeqID_6493
  Homolog annotation: Hit_ID=Q9LDG7; Match level="QueryCoverage=53%, HitCoverage=14%, E-value=2e-14, Identity=33%"; Hit description=WD-40 repeat protein-like
  Pfam annotation: Domain name=WD40; Domain location=47-85; Score=20.5; E_value=0.0063; Accession=PF00400.22; Description=WD domain, G-beta repeat
  Subcellular localization annotation: CTP_CleavageSite=41; ConfidenceScore=5.19e-01
MTGAGAAGTTRNLSFYDKIPNDKPSPVVLNPDSVRLPCSVVASEACSDLVRVEGLAARFEWCINFSLDGRYLATAGEDHVIHVWEVSKGDRKGELLGEASVAKENGGGCSPFLAIVGNDSLEMAALSFTYTEGGYVDKKRRPRKQNNHKSVGSDHLVVPKCVFGFTDKPVCSLLGHAADVLDLSWSKSQKKLQYKSQIDLRIRKKKSGQKKITGFQQEIESVRSCSPVLPLEEPPAPPLSAPAAGVATGGDPDDGGGDSSSSHDTALSEEQELEGWVAQPM

SEQ ID NO: 48273 - protein, 91 aa, Zea mays
  Coding DNA Sequence Number=SeqID_6494
MEREKETVEAQISSLKVVVTHRTEEVEQLRASLKGMSDKLTLAENNLIKAQCRLGELDMEYSYLLRAVDTVPLRGWDRLRQLGSCIFQGMG

SEQ ID NO: 48274 - protein, 269 aa, Zea mays
  Coding DNA Sequence Number=SeqID_6495
MGGHGGLNILPQKRWNVYNFDNREKVQKDEAAAAREEQLQREAERRRESDLRLAALRRNRGLVQAETPPAPPSHPAGPADPADALPSPADALPSPATDGDHINLFSGGSGVATDFDALASASGGRGAAREREPDADPNPKKRKKKEEEVRVVGPDEEKYRLGYGLAGKGVAVPWYMSSPAAAAAKEGRGRDAREGNGVKRSGGKKSIEELREERKKREAKEKERERAILVAAGRKERQVDRGRQSRPGAGKERSCARLREEDLDRLAKV

SEQ ID NO: 48275 - protein, 146 aa, Zea mays
  Coding DNA Sequence Number=SeqID_6496
  Subcellular localization annotation: CTP_CleavageSite=69; ConfidenceScore=5.59e-01
MAAPTPGDVPPRRGPAPCAQSHPSTRPRPPARDVLAPGGVAPWPPRARPSRPRCVAPALGNVDPGAVPRASRRGSRGLGVASRPPFTQHRKWGVVRFAVVPLMGLGVCGSLCQGGDEYDGYDYAYGTGEDEVVEEDFQKFQEYDEF

SEQ ID NO: 48276 - protein, 100 aa, Zea mays
  Coding DNA Sequence Number=SeqID_6497
MDTTCPHRVSFTVAVANHRTLQVVHAAGWRLSCCTIVKEHLEEEFEVEVEEESAPTSETSLTKVVSEGPPEDPQLGINGFGSPNFFDMKIGSSTLSIDNK

SEQ ID NO: 48277 - protein, 120 aa, Zea mays
  Coding DNA Sequence Number=SeqID_6498
  Subcellular localization annotation: CTP_CleavageSite=31; ConfidenceScore=5.01e-01
MAASPCVLLHCAPSSLNAGAPCLLPLGAPPSGMAVAAVALASAPYADLHLAMLVENLQQGAIVASPGSCSPASSCAHGAFPCLLSVPSDQQQGLPLLHCSTALQFNLHSPSRVVALVLAA

SEQ ID NO: 48278 - protein, 68 aa, Zea mays
  Coding DNA Sequence Number=SeqID_6499
MTGRPAAVPLSLPRAGAREGPSGEGVVQACWDTVPPSSAEGRAGKLRLEHGEGRVLGKMRGVGHSVVF

SEQ ID NO: 48279 - protein, 392 aa, Zea mays
  Coding DNA Sequence Number=SeqID_6500
  Gene Ontology: Mol. function=RNA-directed DNA polymerase activity; Cellular component=mitochondrion; Biological process=RNA-dependent DNA replication
  Homolog annotation: Hit_ID=UPI00005A975E; Match level="QueryCoverage =89%, HitCoverage=22%, E-value=1e-168, Identity=85%"; Hit description= PREDICTED: similar to Retrovirus-related Pol polyprotein from transposon 297
  Pfam annotation: Domain name=rve; Domain location=104-263; Score =118.8; E_value=1.6e-32; Accession=PF00665.16; Description=Integrase core domain
MGSHLIETGIPRTCNISTEESYPSTEPKLDDWRGAPSRSSCWVTGRSSTTTAPQASSSDAYPSPKGFYWPTAVADATRIVHTCQGCQFYAKQTHLPAQALQTIPITWPFAVWGLDLVGPLQKAPGGYTHLLVAIDKFSKWIEVRPLNSIRSEQAVAFFTNIIHRFGVPNSIITDNGTQFTGRKFLDFCEDHHIWVEWAAVAHPMTNGQVERANGMILQGLKPRIYSDLNKFDRRWMKELPSVVWSLRTTPSRSTGFTQFFLVYGAEAILPTDLEYGSPRTRAYDDRSNRTNLEDSLDQLGEARDMALLHSARYQQSLRRYHARGVWSRDLQVGDLVLRLRQDARGRHKLTPPWEGPFIIAKILKPGTYKLANSQGEVYSNAWNIRQLRRFYP

SEQ ID NO: 48280 - protein, 113 aa, Zea mays
  Coding DNA Sequence Number=SeqID_6501
MGKKLSELEALNAEKDKRIESLDDELKGGKEINIEESMKNREKARQAAEKSGNNRKNLQGKKVEVSTSQVIIEVKHTEAKAVAARATKEVADDVALKIYEQIYDEMMPGHKEN

SEQ ID NO: 48281 - protein, 178 aa, Zea mays
  Coding DNA Sequence Number=SeqID_6502
  Gene Ontology: Mol. function=kinase activity
  Homolog annotation: Hit_ID=Q6QP54; Match level="QueryCoverage=60%, HitCoverage=31%, E-value=2e-11, Identity=68%"; Hit description =Putative kinase
  Subcellular localization annotation: CTP_CleavageSite=17; ConfidenceScore=5.15e-01
MALSPSSLRKGDTGAVRLTAAKPGPRRYGKLRFARPQGSDSGSAPEDDELRFARPQGSDSGLAPKDDELRFARPQGSDSGSAPEDDELRFARPQGSSSGSAPKDDELRFARPQGSDSALASADGLRLARPRGSDSTSALEDRLDLDSALASADGLHLAQPRARTDHVNRRHHHYPAPS

SEQ ID NO: 48282 - protein, 57 aa, Zea mays
  Coding DNA Sequence Number=SeqID_6503
MGKAVINIEKEHQSSSTFLRMQAYVCERLGENVHYLSSMCINERVIRVMIYLTIMTS

SEQ ID NO: 48283 - protein, 124 aa, Zea mays
  Coding DNA Sequence Number=SeqID_6504
  Subcellular localization annotation: CTP_CleavageSite=40; ConfidenceScore=5.06e-01
MDQSGTGWADSPVAKAGGGGSPGLGHAASALGLGRERGRSATMLACRGIRDWGSARGGRPGAGASAAPWEVLSSTQGLGRSRGRRLTVATGQCGADARSRVHDRTERRGRAERRQWPAGGVRLP

SEQ ID NO: 48284 - protein, 99 aa, Zea mays
  Coding DNA Sequence Number=SeqID_6505
MQVVCNRTAVAHPFGFNASSMEAQAHTSCNRRAGYYMQETAPPLAPMLRLLGCGTGAATRGNPVHGPTVPIEHNDHGDRESGYFERDPSPRRKRAPVTP

SEQ ID NO: 48285 - protein, 72 aa, Zea mays
  Coding DNA Sequence Number=SeqID_6506
MEPRKEMGTSSGRRHSFAAVKPHAGAAVHGQQHVPELSSPSLPSPPESQQTPTMPHMPESQNRSPNLAWSDF

SEQ ID NO: 48286 - protein, 164 aa, Zea mays
  Coding DNA Sequence Number=SeqID_6507
  Subcellular localization annotation: CTP_CleavageSite=37; ConfidenceScore=5.09e-01
MSGAPEDSNSNSPPSGISRGTHAIIHRTVRCTPDSVRCAKEERPRELASFGNRQRLVRYNSPDMSGGPTRQMLQRSESNGTGDVAGAPDMSGVHQTVRCAIEQTASTNGHLGGGCLFDGAPDSLVRPGHVRCPSHVTSSVGIPTVGSICLVGPAWMSGDPGQVL

SEQ ID NO: 48287 - protein, 260 aa, Zea mays
  Coding DNA Sequence Number=SeqID_6508
  Gene Ontology: Mol. function=oxidoreductase activity, acting on the CH-OH group of donors, NAD or NADP as acceptor; Cellular component =mitochondrion; Biological process=tricarboxylic acid cycle
  Homolog annotation: Hit_ID=Q9SDG5; Match level="QueryCoverage=98%, HitCoverage=95%, E-value=1e-128, Identity=70%"; Hit description =Putative isocitrate dehydrogenase
  Pfam annotation: Domain name=Iso_dh; Domain location=17-256; Score =226.3; E_value=6.8e-65; Accession=PF00180.10; Description =Isocitrateisopropylmalate dehydrogenase
MASAVAPFSTESGETIRATLFPRDGIGPEIAESVKQVFNVAGVPIEWEEHYVGTEVDPRTESFLTWESLESVRRNKVGLKGPMATPIGKGHRSLNLTLRKELGLYANVRPCNSLPEYAFHYAKANGRERVSAIHKANIMRKTDGLFLKCCREVAEKYPEIQYEEVIIDNCCMTLVKNPGGICLAEAVHGSAPDIAGKNLANPTALMLSAVMLLRHMQFNDKADRIHNAILQTIAEGKYRTADLGGKASTSEFTNAVCDHI

SEQ ID NO: 48288 - protein, 77 aa, Zea mays
  Coding DNA Sequence Number=SeqID_6509
  Homolog annotation: Hit_ID=Q96269; Match level="QueryCoverage=78%, HitCoverage=7%, E-value=3e-14, Identity=57%"; Hit description=Heat -shock protein
MAVGRLLSHGAPDSPIGDPVEARYEESTERGSSVDQLVYCINRFRETALSNDQKFGHIDISEKQKLRQNCKLPLKWH

SEQ ID NO: 48289 - protein, 89 aa, Zea mays
  Coding DNA Sequence Number=SeqID_6510
MGRWPVEKIASAAATPERRGRPGDDSSARSREGGGDGVQARASACAQGRSGARSQGSGGVRGLFNGDVRLHVRGQFLYAGCTGEDNIKF

SEQ ID NO: 48290 - protein, 188 aa, Zea mays
  Coding DNA Sequence Number=SeqID_6511
  Gene Ontology: Mol. function=transferase activity, transferring glycosyl groups; Cellular component=integral to Golgi membrane; Biological process=protein amino acid glycosylation
  Homolog annotation: Hit_ID=Q2WBH7; Match level="QueryCoverage=92%, HitCoverage=40%, E-value=1e-76, Identity=81%"; Hit description =Sialyltransferase like protein
MDSSLALVYENDSQDLPITNPVYLMLGTSFGSSAKGTGLKALEFALSICDSVDMYGFTVDPGYKECSVLTAEVIFQDKVLLRENHVQLVKIHSPMRGGPGRTVRWLPTKATIEAARVASEKLLKRPGAESDDPLGTCTMIKKHKKGKAPNRSGLRDAAMKHLEDMKGATTYPLEQNAGGGYLCMINDR

SEQ ID NO: 48291 - protein, 66 aa, Zea mays
  Coding DNA Sequence Number=SeqID_6512
MATVDCAPTVGAGESHWATWLTGQSDELYPERLANFPRATSSTTEQSGTLDNIRCTPDSPMLPRLA

SEQ ID NO: 48292 - protein, 36 aa, Zea mays
  Coding DNA Sequence Number=SeqID_6513
MNDICEECDRLLKFNIGDGPDLDSLEEFVDGDHQNW

SEQ ID NO: 48293 - protein, 120 aa, Zea mays
  Coding DNA Sequence Number=SeqID_6514
MYNCVQSERNWSVQLLAQTARRTLLTSLGGEKGSAWKRTDGATKVRIVNGRTTVVLNPKHAERRSAFCLKRREEKKQGKILLRGSKVQPLAGYGRTALGLQGSEPNTDQGFEGWPLRRAP

SEQ ID NO: 48294 - protein, 99 aa, Zea mays
  Coding DNA Sequence Number=SeqID_6515
  Gene Ontology: Mol. function=RNA-directed DNA polymerase activity; Biological process=RNA-dependent DNA replication
  Homolog annotation: Hit_ID=UPI00004C1731; Match level="QueryCoverage =62%, HitCoverage=4%, E-value=1e-23, Identity=82%"; Hit description =UPI00004C1731 related cluster
MILRGLKLRIFNDLNKFAKRWLIELPSVIWSLRTTSSRATGFMPFFLVYGAEAVLPTNLEYGPFIIAKVLKPGTYKLYNKEGEVYDNAWNIEQRRRFYP

SEQ ID NO: 48295 - protein, 101 aa, Zea mays
  Coding DNA Sequence Number=SeqID_6516
MGFEEGWRKVTYLEKALEAAWHGARGLRLSERRETATVANSDLRMGEVEHGPGRGIGGRENHCGFSVHKALAKLTVAETTVEDRQGRQDGGATEGAALQAE

SEQ ID NO: 48296 - protein, 111 aa, Zea mays
  Coding DNA Sequence Number=SeqID_6517
  Gene Ontology: Mol. function=phosphoprotein phosphatase activity; Cellular component=cytoplasm; Biological process=negative regulation of progression through mitotic cell cycle
  Homolog annotation: Hit_ID=O04951; Match level="QueryCoverage=77%, HitCoverage=39%, E-value=2e-42, Identity=94%"; Hit description =Serine/threonine-protein phosphatase PP2A-5 catalytic subunit
MDHILHSSTIVLGDPECSTKLHQTHRYLMKDPCVIFCGLTQMTDVGGEFHPEEQDKNVVTVFSAPNYCYRCGNMAAILEIGENMDQNFLQFNPAPRQIEPDTTRKTPDYFL

SEQ ID NO: 48297 - protein, 440 aa, Zea mays
  Coding DNA Sequence Number=SeqID_6518
  Gene Ontology: Mol. function=nucleotide binding; Cellular component =clathrin coat of trans-Golgi network vesicle; Biological process =intracellular protein transport
  Homolog annotation: Hit_ID=Q6Z6M0; Match level="QueryCoverage=96%, HitCoverage=87%, E-value=1e-176, Identity=74%"; Hit description =Putative ATP/GTP-binding protein
  Pfam annotation: Domain name=Clp1; Domain location=174-438; Score =273.9; E_value=3.2e-79; Accession=PF06807.4; Description=Pre-mRNA cleavage complex II protein Clp
MAAATTAGAGAATPQPPRQYKLAPQSELRVEVLPDAPLRVRLVTGTAEIFGTELPPEGWVPVPPRSKIAIFTWHGATVELDGVSESEYTSDETPMVIYVNTHAILDARRARARTAAAQGGDKEASQFSIFLEIVRGPRVIVVGPTDSGKSTLCKMLLSWAAKLGWKPTYVDLDIGQGSITIPGCISATPIEKPIDIIDGIPLEMPLVYFYGHPNPSINADVYKVLMKELAKTLEKQFSGNAESRAAGMVINTMGWVEGLGYEIHIVALCVLLLNAIETFKANVVLEKLWKMLKDAVQSKSNIDVVKLHKSEGVVLRNSKYRQRTRSFRIKHSCVTVHHHALSLFLFFPSSNVVLSSYYRYEEYFYGIANDLAPHSNIVNFSDVSVYKIGGGHQAPRSALPIGAEPVADPTRLVAVNISTDMIHTVLAISYAKEPEEIISR

SEQ ID NO: 48298 - protein, 129 aa, Zea mays
  Coding DNA Sequence Number=SeqID_6519
MASAGRWAWMAEVAGEELAKLEAAHPGRFAPLKAELERLVADPGLDEAAFPLVSPRAGAGAVIDPTPAASSQPAAAPSTTVPVCTQGVCQYYIGEGVEIQTQDRRERVGPKLYARLVPSSCRGFLKCIG

SEQ ID NO: 48299 - protein, 104 aa, Zea mays
  Coding DNA Sequence Number=SeqID_6520
MADSGKEIHPGQRIYSPELTLRRGFAACHGQSPPRRTIRYVTIYRVCSGMNFVLHVSGDNLTVGLRVPFLRQWRRRGRILAAVWCSTGEGNGILTVGCIKSDGD

SEQ ID NO: 48300 - protein, 494 aa, Zea mays
  Coding DNA Sequence Number=SeqID_6521
  Homolog annotation: Hit_ID=Q0MVR3; Match level="QueryCoverage=99%, HitCoverage=100%, E-value=0.0, Identity=87%"; Hit description=DNA damage signaling and repair protein
  Pfam annotation: Domain name=FHA; Domain location=25-110; Score=45.1; E_value=2.4e-10; Accession=PF00498.16; Description=FHA domain
MVWVLDPVDTVRGIQKRYIFAAGTYKVGRKDCDVIVQTDTSISRVHAEIAIEKMVAWDPHSGAPASPSFVRVIDRSKYGTFVNKVHGTQGSRLHKDEDMMLTDGDAVTFGTGAYATRKWSNECTHVLVDGSCSLTPELLDAVMAKKQIMLGDWFEAMAEKNIHTEIPSCTQYIPNLTLDGMVIKMVDINLIQNFLEGYTFILGSSDKYQFGEKLHGLLESTGAKYVHIDDFCANSQDSAAGDTDHQILVVPARYPLEFSKIRVLFTLSKISDIKLFAAILSGRLEATSIEPPAFIVTSSNSTDATIVADSDVEMETATSNPTGAANKSQHHTENISDDEKQTTNITNEVARKGNVIHPKHPESVEDLKPMEEDVKVIEKTATYRSTGRDEDARILSKAPKDEKLDTSRDGASDVIFSQNLVVRRSLPQSAPAAPAEIGGVNFKRFRKREMVSGNSFKDLIPFAREPYRQVLKRLPSKKRAAAGSSIHTLLTGHR

SEQ ID NO: 48301 - protein, 42 aa, Zea mays
  Coding DNA Sequence Number=SeqID_6522
MVDSGGEIHQGHWIYSPELTLRRGFAACHGQSPPHRAICFTI

SEQ ID NO: 48302 - protein, 85 aa, Zea mays
  Coding DNA Sequence Number=SeqID_6523
MVLQSEGHGLDGCHTLLLYGSNDCGLEHSRQTCLVFLHGLDEYMDLYLILRILLQAYKSLPHYIFVRLQQKYPAFIYFIATQMKW

SEQ ID NO: 48303 - protein, 483 aa, Zea mays
  Coding DNA Sequence Number=SeqID_6524
  Gene Ontology: Mol. function=RNA-directed DNA polymerase activity; Cellular component=mitochondrion; Biological process=RNA-dependent DNA replication
  Homolog annotation: Hit_ID=UPI00004C1731; Match level="QueryCoverage =97%, HitCoverage=31%, E-value=1e-163, Identity=66%"; Hit description= UPI00004C1731 related cluster
  Pfam annotation: Domain name=RnaseH; Domain location=37-185; Score= -29.7; E_value=0.034; Accession=PF00075.14; Description=RNase H
  Pfam annotation: Domain name=rve; Domain location=246-407; Score =43.3; E_value=8.1e-10; Accession=PF00665.16; Description=Integrase core domain
  Pfam module annotation: Pfam domain module=RnaseH::rve; Domain location=37-185::246-407
MGETISFAPRKAIKSQVLADFVAEWVDTQLPAVPIQPELWTMFFDGSLMKTGAGVGLLFISPLGKHLRYVLRLHFPASNNVAEYEALVNGLRIAIELGVRRLDARGDSQLVIDQVMKNSHCRDPKMEAYCDELEAPSAQPEAPSAQPEAPSAPEGEALRVEKERSGVTPNRNCDAYPPPKARSSYKKYTRGLAVITQRLEPLLETPSDKVSTGRPRWPTPLELSAPAKGVNSTQGRPTCPLRFYKQYPSPGRLLCGVWTSSVPCRRHPGATRTCWSPSTNSPSGSRSDPLNSIRSEQAVAFFTNIIHRFGVPNSIITDNGTQFTGRKFLDFYEDHHIRVDWAAVAHPMTNGQVERANDMILQGLKPRIYNNLNKFGKRWMKELPSVVWSLRTTPSRATGFTPFFLVYGAKVILPTDLEYGSPRARAYDDQSNQTNREDSLDQLEEARDIALLHSARYQQSLRRYHARGVQSRDLQVGDLVLQL

SEQ ID NO: 48304 - protein, 79 aa, Zea mays
  Coding DNA Sequence Number=SeqID_6525
  Subcellular localization annotation: CTP_CleavageSite=30; ConfidenceScore=5.33e-01
MAGVGGEPFVFNPIPFQLSFNTNSITRMPRAQPLGSESPTRAISRGPLASRGKPRCILHIPDQGHQRCMIVSEITASPR

SEQ ID NO: 48305 - protein, 553 aa, Zea mays
  Coding DNA Sequence Number=SeqID_6526
  Gene Ontology: Mol. function=RNA-directed DNA polymerase activity; Cellular component=mitochondrion; Biological process=RNA-dependent DNA replication
  Homolog annotation: Hit_ID=Q8S463; Match level="QueryCoverage=87%, HitCoverage=28%, E-value=0.0, Identity=82%"; Hit description =Putative prpol
  Pfam annotation: Domain name=RnaseH; Domain location=1-116; Score= -20.7; E_value=0.0049; Accession=PF00075.14; Description=RNase H
  Pfam annotation: Domain name=rve; Domain location=267-424; Score =106.9; E_value=6.1e-29; Accession=PF00665.16; Description=Integrase core domain
  Pfam module annotation: Pfam domain module=RnaseH::rve; Domain location=1-116::267-424
MKTGAGAGLLFISPLGKHLRYVLRLHFPASNNVAEYEALVNGLWIAIELGVRRLDARGDSQLVIDQVMKNSHCRDPKMEAYCDEVRRLEDKFYGLELNHIARLYNETADELAKIASGRTTVPPDVFSRDLHQPPVKIDDAPEPEATLVQPEAPSARPEVPSASEGEALRIEEERSGDTPDRNWQTPYLQYLRQGELPLDRAEARRVARRAKSFVLLGDEKELYHRFPSGILQRCISITEGQELLREMHSGACGHHAAPLALVGNAFRQGFYWPTAVADATRIKAPGGYTHLLVAIDKFSKWVEVRPLNSIRSEQAVTFFTNIIHRFGVPNSIITDNGTQFTGRKFLDFCEDHHIRVDWAAVAHPMSNGQVERANGMILQGLKPRIYNDLNKFGKRWMKELPSVVWSLRTTPSRATGFTPFFLVYGAEAILPTDLEYGSPRTRAYSDQSNQASREDSLDQLEEARDKALLHSARYQQSLRRYHARGVQPRDLQVGDLVLRLRQDARGRHKLTPPWEGPFVIAKVLKPGTYKLANSQGEVYGNAWNIQQLRRFYP

SEQ ID NO: 48306 - protein, 112 aa, Zea mays
  Coding DNA Sequence Number=SeqID_6527
  Subcellular localization annotation: CTP_CleavageSite=44; ConfidenceScore=5.59e-01
MQAACSRAKWTRFSDSQRAQPGGPGPRVMQPARRMLHASNCTATCATTSPPRLWNQYRDSRGSGDALANPASAEPLTASTYQPENLGPDRTPGLWPVRMREQPDRPKRYSRH

SEQ ID NO: 48307 - protein, 289 aa, Zea mays
  Coding DNA Sequence Number=SeqID_6528
  Gene Ontology: Mol. function=RNA-directed DNA polymerase activity; Cellular component=mitochondrion; Biological process=RNA-dependent DNA replication
  Homolog annotation: Hit_ID=UPI00004C1732; Match level="QueryCoverage =99%, HitCoverage=26%, E-value=1e-112, Identity=61%"; Hit description= UPI00004C1732 related cluster
MPGIPRDVAEHSLDIRAGARPVKQPLRRFDEEKRRVIGEEIHKLTAAGFIKEVFHPEWLANPVLVRKKGGNGGLTFRCLKAKGVKLNPEKCVFGVPRGMLLGFIVSERGIEANPEKIAAITSMGPIKDLKGVQRAEEALGNLKALLTKAPILVPPADGEALLVYVAATTQVVSAAIVVERQEGGHALLVQRPVYFVSEVLSETKIRYPQVQKLLYAVILTRRKLRHYFESHPVTVVSSFPLGEIIQCQEASGRIAKWAVEIMGETISFAPRKAIKSQVLADFVAEWVDT

SEQ ID NO: 48308 - protein, 120 aa, Zea mays
  Coding DNA Sequence Number=SeqID_6529
MLKKFGMKDVKPVKTPMETNRHLYLDIGGDLPLILLGNQMLIMTDISSFLVHNAKGEKLIGKSRRTAPLLFFVFQIGVVAFAKTLLIAKMRKTTYAKGENVFKGAFIWPKEKHFKKRENL

SEQ ID NO: 48309 - protein, 202 aa, Zea mays
  Coding DNA Sequence Number=SeqID_6530
  Subcellular localization annotation: CTP_CleavageSite=41; ConfidenceScore=5.20e-01
MGTSSEDLIKATDGSEVDLASASSRPSPWQRLPGHGPGSLTSSRLPSRSPWLFWEARRSLQQCVHVHLSRQHVRQVQLVDLFNCLQIYKCRRLTHVACCRFPGNVVGVNMPASSAPTATTLAPEDTGKMTKIAATIMSLLIMHIATNLPLSKYQDHYVPIVSGQLYYAATIFQRVGFSRAFDVTHVSILLITEVEKDMPRAG

SEQ ID NO: 48310 - protein, 323 aa, Zea mays
  Coding DNA Sequence Number=SeqID_6531
  Homolog annotation: Hit_ID=Q6K8R1; Match level="QueryCoverage=97%, HitCoverage=98%, E-value=2e-70, Identity=65%"; Hit description =Putative glycine-rich protein
MMSNFQATTCKPHSRIIVKKPIASLGSTCQYPLYSHALGFHTLQEKVYPRLVLISASHKRLTSVCALSGKGSSGTADDCGAALLANLVERRAGSRWVVVLVCAVSKLVQVNVYKSGDQLVDNLVKSTALPAGCYLEQISIQTKCSSSSTIFVQPLMESLKKAVADAKKPRSIQDLLKEQVAKLREQASGGGRGNGNRRGGSGGSGGPDDESFKETLDEVVQVILATVAFILVYIHIIRGEELYRLARDYTRYLVTGKRTARLKRAMQRWRNFSESFMQKAGSEDDQYERPAVSKPAWWQQPQKFVHFVEDLCRGNWRPHAQES

SEQ ID NO: 48311 - protein, 175 aa, Zea mays
  Coding DNA Sequence Number=SeqID_6532
  Gene Ontology: Mol. function=translation initiation factor activity; Cellular component=cytosol; Biological process=cell cycle
  Homolog annotation: Hit_ID=Q6K8R0; Match level="QueryCoverage=97%, HitCoverage=35%, E-value=5e-60, Identity=67%"; Hit description =Putative eukaryotic translation initiation factor 2A
  Pfam annotation: Domain name=eIF2A; Domain location=1-73; Score= -53.8; E_value=0.00013; Accession=PF08662.1; Description=Eukaryotic translation initiation factor eIF
MVFSAQAFWDYSEKKLVAKTKAECSVTSEWSPDGRHFMTATTAPRLQIDNCIKIFDHNGSLQFKKMFERLYQADWKPEAAERFTDIADLTTSLISAQGSKSAQTSSKAPAITAPKPTAYRPPHAKGSAELQDKLFGGLAPAGGEMSKNALRNKKRREKQKEKKAAEASGSPADES

SEQ ID NO: 48312 - protein, 589 aa, Zea mays
  Coding DNA Sequence Number=SeqID_6533
  Homolog annotation: Hit_ID=Q9ATQ1; Match level="QueryCoverage=46%, HitCoverage=93%, E-value=4e-48, Identity=52%"; Hit description=TAK14
  Pfam annotation: Domain name=Pkinase; Domain location=306-544; Score=- 90.1; E_value=0.0034; Accession=PF00069.15; Description=Protein kinase domain
  Pfam annotation: Domain name=Pkinase_Tyr; Domain location=399-544; Score=-130.0; E_value=0.00017; Accession=PF07714.7; Description =Protein tyrosine kinase
  Pfam module annotation: Pfam domain module=Pkinase::Pkinase_Tyr; Domain location=306-544::399-544
MAVEKTLLGASAGRTVLVTGGAGYIGSAGRRGSRAGLGSAGRGLRRGWRAGLGWGAKILAFMGGRGREAGAVYTPLLIVSREEILNIRKKGKKPRSHQQLKQRTSDRPFSRLGIEVDGRRWGCCTRSHCTYTYTYTHTHAQAVRLAFRLNWRWGDASCSWPRAPGVSLSPRRAATVQRIDGQRLTRRWAPPRGSDCGEKRSSGRDALRWGCDLASWLDRSHEKANAFFRCAAVFSPSSRISDKMLDGLTWSESRKEQRASPLVSVDKSLKGVRLETNSSATDTVGFASGGARSSAGSDLALPAAVTSAVRAVDAGGQGQCPHFSCGDLGNISNPFRRPGDPEECGVKAYELVCSNGKATIRINTGTFCHQHRLYQSFLLGCGRQFGYAQQLPSSSLGSVTCNMHVGYGSVYKGLLLAAGNMYVAVKMLGNSNCNGGEFILHHRNFVPKVSDFGLAKLYPRDKSFVPASAMRGTIGYIAPEMISRSFGAISSKSDVYSFAEQEAGEISVAADMHELERKLCIAGLRCIQMKPQDRPTMGEIIEMLECGTHGLGLQMPSRPFFCEDDDPNMPAADSYHFSSELTAISEEDG

SEQ ID NO: 48313 - protein, 261 aa, Zea mays
  Coding DNA Sequence Number=SeqID_6534
  Gene Ontology: Mol. function=zinc ion binding; Cellular component =intracellular
  Homolog annotation: Hit_ID=O82115; Match level="QueryCoverage=80%, HitCoverage=92%, E-value=2e-73, Identity=61%"; Hit description=Zinc finger protein
  Pfam annotation: Domain name=zf-B_box; Domain location=1-47; Score =42.9; E_value=1.1e-09; Accession=PF00643.14; Description=B-box zinc finger
  Pfam annotation: Domain name=zf-B_box; Domain location=52-99; Score =30.2; E_value=7.3e-06; Accession=PF00643.14; Description=B-box zinc finger
  Pfam module annotation: Pfam domain module=zf-B_box::zf-B_box; Domain location=1-47::52-99
MKIQCDACEGAAATVVCCADEAALCARCDVEIHAANKLASKHQRLPLEALSAKLPRCDVCQEKAAFIFCVEDRALFCQDCDEPIHVPGTLSGNHQRYLATGIRVGLASASACSDACDAHDSDHHAPPKATIEPPHAAVSAAVQQLHKEPTLGFKELEWFADIDLFHEQAPKASRTLADVPELFGYQAANDAAYYRPAKPPSAALGFARAKKGPDRGRRQQGLDRSNSCPSARLRRTSDSHDITPAGCPDLSGCHIGMYLGR

SEQ ID NO: 48314 - protein, 159 aa, Zea mays
  Coding DNA Sequence Number=SeqID_6535
MAALGPLTEARGRQQGLDGPDSCPSARLQHSSDGHDITHTRKDQGPLREGWPRGDEDETGARVRPLAPSPVWTLVTPYCKRTRPGRGTNTKAVGFPPLSRPSPATSLSPLRARPRLDPSGLGHAATLHSSAQGPPGLGTPTAGLGCYKALQASNPAGKY

SEQ ID NO: 48315 - protein, 32 aa, Zea mays
  Coding DNA Sequence Number=SeqID_6536
MRVSDDWSSSAIVALEADDEPDTSARLLQAKE

SEQ ID NO: 48316 - protein, 154 aa, Zea mays
  Coding DNA Sequence Number=SeqID_6537
MGPSNTMLADFMIRMQTFTLLLYTCADDLSHARSLLVDLQGILGTLNRSNPNLICTRRRLSQGCHLRPLYCAVSVHRLQSLASPPSPSPTPPYRPMPSSCIRGPSSRHECEGLFAIETSVFKKENVSLAGHEEDIKRRKEALKNGADPHSLHDG

SEQ ID NO: 48317 - protein, 172 aa, Zea mays
  Coding DNA Sequence Number=SeqID_6538
MPSQASRLIGACAMACEDAAPVAQRGRCYPAGRGGHPAPIAQAGPPAIGRRGAGLPLLRGRGPGCPTWSLVTGASGPSSPVGTRPQQGSSPRGVSLRDMFVEPLGLVTKYCNTYYRGLPDYGLMCCVCACADVAGGLILRGGLVGKSGTRLVIGASEWWAVGTSTGTTKHDT

SEQ ID NO: 48318 - protein, 117 aa, Zea mays
  Coding DNA Sequence Number=SeqID_6539
  Subcellular localization annotation: CTP_CleavageSite=44; ConfidenceScore=5.22e-01
MVTAGGGGRLGGRAAGTGCAKAMAAAAGTSVGGGGGLSRRRRQRGSDGGNTAEKRRRGCGNETARGVWFALKYLISDGYQFGRRTFIEHEPGSSFGSFSFSSSTARSAPQQPHPLYH

SEQ ID NO: 48319 - protein, 206 aa, Zea mays
  Coding DNA Sequence Number=SeqID_6540
  Subcellular localization annotation: CTP_CleavageSite=82; ConfidenceScore=5.01e-01
MTPAAAPLAIHLLGPRAHGAAGTGRASDERPRWATGATSSQERQACATTTYGRRPRLRDGGWVPATPCWVAAPTLGNRGRVLAGHGTGADQPRGLARHGHPLVSRHGRGRPCRGHSPPTPTLGAVGPRPTDLGSGEGPASTGASRAGAAGPGVGSAGPRETAVAGALPWLWLAGGARMRWALAAEALGALLEGILAAAGALPAGRR

SEQ ID NO: 48320 - protein, 122 aa, Zea mays
  Coding DNA Sequence Number=SeqID_6541
  Subcellular localization annotation: CTP_CleavageSite=72; ConfidenceScore=5.16e-01
MRLAVQLNPLTDAGAAVAMVVFYDRAGAGNAHKQRSSSNAFSLSACNKTMTIAESQRKHDGWCLARFLPLSPCSMSGGRHEGQLVRLACSFCGLHACMQWEGRRLACLHVACSGRVGACDVR

SEQ ID NO: 48321 - protein, 81 aa, Zea mays
  Coding DNA Sequence Number=SeqID_6542
MGVARMKATMMSRTPAGFCMQLLAYPRSSDVWQGDGHALMNGGGRDLVDVRPRLATWASGRAKAGGVFGRVDLHKRTREGF

SEQ ID NO: 48322 - protein, 82 aa, Zea mays
  Coding DNA Sequence Number=SeqID_6543
MSQPCRGKNLPSEKLNDKGTDAKIFGDITRLGSGTQRSPYLGMKCRKWEKLLTREYSEKGGILADMTTSRLKTKIENKLNRV

SEQ ID NO: 48323 - protein, 90 aa, Zea mays
  Coding DNA Sequence Number=SeqID_6544
MTSLHERLLPVCLPNVLRLGTDSLRVHRGSSLSQEPKSHLPAGTHQGGEIQGLSWGRQATQDVSRRRRAEESMVFKAVRRSKALDHRLDA

SEQ ID NO: 48324 - protein, 275 aa, Zea mays
  Coding DNA Sequence Number=SeqID_6545
MAVPVARVHLAMEHAALPPLLPAPPNCKMLPLLPTPPCVATIILPKPHANEPSRADSDERWDAHKTRPASAESTASSRPRSFSCGAAAGRRSTYRMNATSPPRPGLAADSAERWDAHKKAAATPASSSSGTSSLKGSTCTISRSRASSMERRDAHKKAASPSSSSTTTSSSSSGTSFLKGSPPCTISRSRASSTERWDAHKKAASPASSSSSCTPALLDDDGERSSTGSNDNIETEEEIVWKPRATAIYAEPCFISTAPEPSMLPMPTAFLFRVA

SEQ ID NO: 48325 - protein, 112 aa, Zea mays
  Coding DNA Sequence Number=SeqID_6546
  Gene Ontology: Mol. function=nucleic acid binding; Biological process= DNA integration
  Homolog annotation: Hit_ID=O24587; Match level="QueryCoverage=61%, HitCoverage=6%, E-value=1e-27, Identity=81%"; Hit description=Pol
MKNLHKLLKEEHVLGLTDVCFEKDRPCAACQTGKHVGTTHQSKNMMTTSRPLELLHIDLFGPVAYLSIGGRTQADTLANLSNTAVAIKLKSDGAKLEAKDAMEALIATPLSH

SEQ ID NO: 48326 - protein, 253 aa, Zea mays
  Coding DNA Sequence Number=SeqID_6547
  Homolog annotation: Hit_ID=Q9T0G5; Match level="QueryCoverage=27%, HitCoverage=9%, E-value=1e-06, Identity=45%"; Hit description =Putative DNA-directed RNA polymerase
  Pfam annotation: Domain name=KH_1; Domain location=154-206; Score =31.2; E_value=3.6e-06; Accession=PF00013.19; Description=KH domain
  Subcellular localization annotation: CTP_CleavageSite=5; ConfidenceScore=5.51e-01
MAIMRAKALAATPPTQQQLMASSYPFSLSPKGGVSLSFLIQQHQQQQSETQRMLLFLYQGMGPLSHNYLLRAAHLSNPIMVDIRVQAKRLKIQMEGKCIQKCDVCNLLNWHYCQLAISKAEQLIKEVLAEADAGSSGARSGGRKYNATQQGAETYQMKIANNKVGLIIRKGGETIKSMQTKSGARIQSSISDGGLSQDAKQCRNLKFLHTEGCLSITKASLRALVQYAKRLESLTLGSYPQIEQHAIFSLLMN

SEQ ID NO: 48327 - protein, 69 aa, Zea mays
  Coding DNA Sequence Number=SeqID_6548
MGAGVVESTGSRSSDVRGGIRRGVRGERAEDGRPLRVRALERGFRGGCGAGVRRTAGRCGRQLRVRKNA

SEQ ID NO: 48328 - protein, 281 aa, Zea mays
  Coding DNA Sequence Number=SeqID_6549
  Homolog annotation: Hit_ID=Q53QH2; Match level="QueryCoverage=82%, HitCoverage=64%, E-value=2e-42, Identity=44%"; Hit description=F-box domain, putative
MEASSPACDDAGTTIEDLPADVLALVLRRLDGASLAAVGPQPLPARLVSAVDLRHAGGCVLSCVVDTDAASDWFLGAPFRVAGACVLSCVVDTDAASDWFLGAPFRVDVDAPLHEGFASSPAAVAPVDLELSWVLVDPATGRALGAASRRAVSVDRKWLTWDTVARFAVVIGGGVALEAAVTCDVGQYGHVREVSLRVEDADGAGVSGRDGLAAVAAAMAAPRRGCRGAAEDAARARYEDFVRGRRARKEWKARRESILDLCCSGVGAAAFLGFLLMLTFR

SEQ ID NO: 48329 - protein, 911 aa, Zea mays
  Coding DNA Sequence Number=SeqID_6550
  Gene Ontology: Mol. function=protein binding; Cellular component =membrane; Biological process=defense response
  Homolog annotation: Hit_ID=Q2R8J6; Match level="QueryCoverage=99%, HitCoverage=96%, E-value=0.0, Identity=46%"; Hit description=NBS-LRR type disease resistance protein, putative, expressed
  Pfam annotation: Domain name=LRR_1; Domain location=575-596; Score =8.9; E_value=6.1; Accession=PF00560.23; Description=Leucine Rich Repeat
  Pfam annotation: Domain name=LRR_1; Domain location=598-619; Score =11.3; E_value=2.2; Accession=PF00560.23; Description=Leucine Rich Repeat
  Pfam annotation: Domain name=LRR_1; Domain location=621-642; Score =3.5; E_value=63; Accession=PF00560.23; Description=Leucine Rich Repeat
  Pfam annotation: Domain name=LRR_1; Domain location=780-806; Score =5.6; E_value=25; Accession=PF00560.23; Description=Leucine Rich Repeat
  Pfam annotation: Domain name=NB-ARC; Domain location=146-460; Score =152.3; E_value=1.3e-42; Accession=PF00931.13; Description=NB-ARC domain
  Pfam module annotation: Pfam domain module=LRR_1::LRR_1::LRR_1::LRR _1::NB-ARC; Domain location=575-596::598-619::621-642::780-806::146 -460
MAEAVVFALAKISVSLAGSAISGLREHASIIKELPGKVRRIEAQLSIINGALQQQDSAYLSDHAYMKWIAYIRTLAYQVEDIMDTYSHHAHQLENRGFMWKLTQEYLGPFRSISAEITKIEENLKHATELKQAWLENYGHHGQQIMEAELSQDYIPAEPSWDQDFVGMDGNTTLVTEWLRSASDSESTFMTLLGAGGLGNTTLAMDVYKREKDRFRVHSFIAVERDCTMDALMRKILLEIGSSMKQPPSESVDSIPANQLKEEARRRISKLRDGRCLIVLDNVRDPRIYFEMRDVMSNLPGVRIILTTRKTQVAAARDPSSSRFLQLQPLDHIDALRLFCRKAFFKTNDSKCPPNVEVFATSLVNMCKGLPLAIVAMGGMMSLKPPVEQIWNQACVRLQKELERNADHVQAVLNLSYHDMPGHLRNCLLYCSMFPEDYHMSRESLVRLWIAEGSVLAANSPTPETTAEAYFMELVRRNMLQVVDNDVVGRVSTCKMHDIVRKMVLVVAKEERFASATDYSTVSHTGKDVRHLALHGWKDTNTPPVKFPRLRRLVALGANSCLTKLLPAIFSGSSFLTVLVLQDSGISEVPASIGSLFNLRYISLRYTQVKSLPESVQRLAYLDTLDVRQTRVQRLPQGVGKARKLRHILADACCPDGSQQSEFRSFTALEPPKALTSFGELQTLETVQANKDMAMKLAKMMQLRSVSIDNISSALCGELFASVSELQFLTSLLLSATDEHEPLSFQNLVPKSSYLSRLTVRGSWLGKTLDYPVFKEHGRNLAYLSLSWCLVLGDPLQFLGSHCPHLQYLCLHRVQSANSLVLPERCFRELKNLVLERMPDVSQMKVGDGALQCVQAIHITALPNLDKVPQGMESLTTLKKLSLLDLHNDFIVDWEKKEMSRKMPLGLELRI

SEQ ID NO: 48330 - protein, 74 aa, Zea mays
  Coding DNA Sequence Number=SeqID_6551
  Gene Ontology: Mol. function=peptidase activity; Biological process =proteolysis
  Homolog annotation: Hit_ID=Q2QWY6; Match level="QueryCoverage=89%, HitCoverage=14%, E-value=2e-18, Identity=64%"; Hit description =Eukaryotic aspartyl protease family protein, expressed
MAPIAETLKGELSRTLEEVSGRSLPLYWKGQEPFKSVLDVIKEFKSLVLNFASGKKTLMEIPTENYLIVTVNIA

SEQ ID NO: 48331 - protein, 887 aa, Zea mays
  Coding DNA Sequence Number=SeqID_6552
  Homolog annotation: Hit_ID=Q38JB7; Match level="QueryCoverage=27%, HitCoverage=76%, E-value=1e-130, Identity=88%"; Hit description =Chloroplast lipocalin
  Pfam annotation: Domain name=AT_hook; Domain location=505-517; Score =15.8; E_value=0.042; Accession=PF02178.9; Description=AT hook motif
  Pfam annotation: Domain name=Lipocalin; Domain location=143-282; Score=-4.2; E_value=0.071; Accession=PF00061.13; Description =Lipocalin  cytosolic fatty-acid bind
  Pfam annotation: Domain name=Lipocalin_2; Domain location=137-280; Score=-22.3; E_value=9.8e-05; Accession=PF08212.2; Description =Lipocalin-like domain
  Pfam module annotation: Pfam domain module=AT_hook::Lipocalin::Lipocal in_2; Domain location=505-517::143-282::137-280
MGRLGGATSPGWLEGGGRFGEGERTTGEITTRGERTAQGDRMTALQLPGTGECQRYGCFSLLMPVGWVRLRRVFHTESVGFGLAGEDAAPPDRKWSGLCQIATVAAIDSASVPLKFDNPSDDVSTGMMMRGMTAKNFDPVRYSGRWFEGVYSFDEKARSIQVDTFCVHGGPDGYITGIRGRVQCLSEEDIASAETDLERQEMVRGKCFLRFPTLPFIPKEPYDVLATDYDNYAIVSGAKDTSFIQIYSRTPNPGPEFIDKYKSYVANFGYDPSKIKDTPQDCEYMSSDQIALMMSMPGMNEALTNQFPDLKLKAPVALNPFTSVFDTLKKLLELYFKTGNAKAAGFTPSHVHGSNRRRVGNLFVGNRTNEQVERKLTMAILCPERPAARRHQHHPQPVLEAITSTPARGREHVRSIGQLNGVPTVGWSPTLLELGRRHTRSQSRPGLHRYRGPPNTWPTSEEAWASILKATSAGSTKLVKMASEGNKDVPHEALTVDHSSISGSKRKRGRPRKYEYPVNELPQKVQPIQSAPPLLHCTQDGSSLASHASGGGAHGNWSAQPRNSANASLQGNSGKDDFLGKHFVGKLTKKVPGFSLITVKVKDNQVLKGWVPDEINLRPITPKDDLAPELPMLRPSQVRKRASAIHMQPALPVPMHLENVTLAKPLQMRRPVEKTIAKHAVPLASRPYISSGVVAAIPISVAPINPEMRTSARQDAELVIPQSSVSAVPIKFVCPASVPCKQLANQNEFTGNKSVDEVQKDSESPNVTKESPVKAEKPNIALVDVVAKDSLGEGQQLNDQVTDVVRDFSGQTQNVDVTMSDEIKIASGARDKPNSANCEQQSSKEPSDITEQSEQLKTETDVQKGVDASGLLGCGAGILAWTNALGV

SEQ ID NO: 48332 - protein, 80 aa, Zea mays
  Coding DNA Sequence Number=SeqID_6553
MAPLLTFLRLQLPPASATHEAEREKSRCFGRPVYDCAWCRRFRAIERRRKGAVDEQVIEDPREQQIEVAEQELIEGKLCP

SEQ ID NO: 48333 - protein, 341 aa, Zea mays
  Coding DNA Sequence Number=SeqID_6554
  Homolog annotation: Hit_ID=Q6ESB6; Match level="QueryCoverage=75%, HitCoverage=75%, E-value=1e-118, Identity=86%"; Hit description=Seed maturation-like protein
  Subcellular localization annotation: CTP_CleavageSite=45; ConfidenceScore=5.67e-01
MSPSLLLLHSSATPCRGLLPPPSSCFATFSRASSPLRPRHRIRLVCAAEQPNGAASPGSGSGGDATANPTNNGLPKNRRVILLEYVKNVQPEFMELFIKRAPAQVVEAMRQTVTNMMGTLPPQFFAVTVSTVAENLAQLMYSVLMTGYMFRNAQYRLELQQSLEQIALPEPKEEKDYAPGTQKKVTGEVIRWNKATGPEKIDAVKYIELLEAEIDELSRQVARKTSQGSNELLEYLKSLEPQNLKADKGKLLQELTSTAGEDVVFAMNAFIKRLLAVSDSEQMKTAVSETSASQLANLLFWLMIVGYSMRNIEVRLDMERVLGAPPKVAELPPPPSGGENI

SEQ ID NO: 48334 - protein, 603 aa, Zea mays
  Coding DNA Sequence Number=SeqID_6555
  Gene Ontology: Mol. function=molecular_function; Cellular component =endoplasmic reticulum; Biological process=vesicle docking during exocytosis
  Homolog annotation: Hit_ID=Q851W1; Match level="QueryCoverage=97%, HitCoverage=98%, E-value=0.0, Identity=66%"; Hit description=SEC1 -family transport protein SLY1
  Pfam annotation: Domain name=Sec1; Domain location=38-578; Score =296.5; E_value=5.1e-86; Accession=PF00995.13; Description=Sec1 family
MAALSLRQRQLDLIVRMLHLNKPPPPPGTAAEQEEEVYKILVLDSFCLSLLSPLLRVADLRKHGVTLYFPIDKPRQQVADAPAVYFLRPTQANADRVAADAAASLYASFHLNFSSALPRPLLDRLAAATAASGSAHRVARLADQYLDFVSLEDNLFSLAHPRSYVALNDPKAADADIEALVDAIALGLFCAAATLGTVPVIRCPRGGPAEMVAAALDARLRHHLLAKPNLFTEASASASVASFQRPVLCLFDRNLDLSVGIQHDWSYRPLVHDVLGLKLNKLKMPAGQIESQLAKYKQDVDEVNQRTGGNKDGIEFDGTDLIGNTQHLMNAVNSLPELTERKKMIDKHTNIATALLGHIKERSLDGYCDCGNDMLTKGTVDRSTLLGLLRGKGTKADKLRLAVTYLLCFETPELEQVEAALRESEVDMSAFQYVKRIKSLNTQFSASSSSSATRSNIVDWAEKLYGQSISAVTAGVKNLLSSGRQLALTRTVEALMEGKPNPEVDNYLLFDPRAPRSGSGGQFKGPFREAIVFMIGGGNYIEYRSLMELAECSQPPSSKHVIYGATEIVNGVEFIEQLAELGQKAGAGSGWWKQPSTTVITNK

SEQ ID NO: 48335 - protein, 103 aa, Zea mays
  Coding DNA Sequence Number=SeqID_6556
MDKASGIRISMGDAEEDSSLSEAMDLGLRAREWPDCSSRRVHNCIDSAALQRRRTHLVGLRAFLVGVGPDEGSKAYTDISKRPLRLYHPTSQMGLYNRFRPAP

SEQ ID NO: 48336 - protein, 91 aa, Zea mays
  Coding DNA Sequence Number=SeqID_6557
MAPLLTFLRLQLPPASATHEAEREKSRRLGRPVYDCAWCRRFRAIERRRKGAVGASWRDWVTREGSRSEAIGCALGVTLGKKKVAWPLDHW

SEQ ID NO: 48337 - protein, 137 aa, Zea mays
  Coding DNA Sequence Number=SeqID_6558
MAHRSFSCSPETFSPLFSPLCPWIHGLFPSIEFAVEPSSPLPYSGDPGATLAHACLNSGDLTAAERSGAACSRLFSSGLIPSVRFRSNGSDRGIPLRSRASDTPWPACQRRPQPLILPGGDAGNMDDFEEFQEYDDF

SEQ ID NO: 48338 - protein, 65 aa, Zea mays
  Coding DNA Sequence Number=SeqID_6559
MAGRSWGERHTGKRSSWANRYLGEDQQELEKGQGVEEEQQGRPQQEGDQVRLGCDSISGFKTSLY

SEQ ID NO: 48339 - protein, 87 aa, Zea mays
  Coding DNA Sequence Number=SeqID_6560
MSRAFDDYYIKDCGVILAPEVTQRRTDSASLTAEQQVSKARSASKHQANSKASAIKAQGIAEVLLILEADIAARRRTTYRSPVLDES

SEQ ID NO: 48340 - protein, 53 aa, Zea mays
  Coding DNA Sequence Number=SeqID_6561
MGRSYGGNAQWRGGKRWHAPLSIERGALHYNSPDCPVNQPSNVSLLANGHLLR

SEQ ID NO: 48341 - protein, 259 aa, Zea mays
  Coding DNA Sequence Number=SeqID_6562
MDAPKVGSSTFKSAEDANEVPVDPTDSAKRVHIEVTLSVFCVQPHTQGYPRGAFGRPSPLSWYIHCVYVAGLTAPENLRESGRYTQWVPCYAKRRQAPYSFLGVSHGWREKGKKGHHPADGKRKRPPSPPLEDFGDSEYSEEVSSEYDRSPAPASPVVSSDDSDDSMGLSAAERVYIQFVECVGLGRSDDSEEAEDTSDSKEGSTTRAMAAVAIAAMAAAVAVKAATAARAAATVTATKAAAGAAAGMTLVAECYRLKY

SEQ ID NO: 48342 - protein, 84 aa, Zea mays
  Coding DNA Sequence Number=SeqID_6563
  Subcellular localization annotation: CTP_CleavageSite=74; ConfidenceScore=5.90e-01
MAPAPPGSAASAQSAARALAMACSRSAPSSPVLSSCPHGPRAWSSAGVPSARPWRPRAACPSPRRGPASPLFARCGATRPTRPS

SEQ ID NO: 48343 - protein, 492 aa, Zea mays
  Coding DNA Sequence Number=SeqID_6564
  Gene Ontology: Mol. function=pepsin A activity; Cellular component =endoplasmic reticulum; Biological process=proteolysis
  Homolog annotation: Hit_ID=Q5Z4D7; Match level="QueryCoverage=84%, HitCoverage=86%, E-value=3e-81, Identity=43%"; Hit description =Putative nucleoid DNA-binding protein cnd41
  Pfam annotation: Domain name=Asp; Domain location=148-490; Score= -187.1; E_value=0.015; Accession=PF00026.14; Description=Eukaryotic aspartyl protease
  Subcellular localization annotation: CTP_CleavageSite=52; ConfidenceScore=5.50e-01
MAPSSIASLLFLCMLLLLPAQHGASSSHASYKVGSSQTFFKTRSKSSGNSKKAASATPTATTCSSIATGLGNNKLPIVHRQSPCSPLHGLPSLTAADVLRRDTSRIRRRFASQSSSVVASLASALAPAPAPAATIIPIDGSPDAGALDYTVNVGYGTPEQQFPMFLDTIFGVSLVLCKPCAPGSTSCDPAFDTSQSTTFTHVPCDSPDCPSTANCSAGSVCPFNLFFVEGTFSQDVLTVAPSVAVQDFTFVCLDAGASDGMPEVGTLDLSRDRNSLPSRLAGSASAAFSYCMPQYPDSPGFLSLGDDATVRGDNCTAHAPLLSSDDPDLANMYFIDVVGMSLGDVDLPIPSGTFGNNASTIVEAGTTFTMLAPDAYTPLRDAFRQAMAQYNRSVPGFYDFDTCYNFTGLQELTVPLVEFKFGNGDSLLIDGDQMLYYDIPSEGPFTVTCLAFSTLDVDDDDVSAVIGAYSLATTEVVYDVAGGTVGFIPESC

SEQ ID NO: 48344 - protein, 509 aa, Zea mays
  Coding DNA Sequence Number=SeqID_6565
  Gene Ontology: Mol. function=nucleic acid binding
  Homolog annotation: Hit_ID=Q2QLR6; Match level="QueryCoverage=99%, HitCoverage=100%, E-value=0.0, Identity=80%"; Hit description=Zinc finger family protein, putative, expressed
  Pfam annotation: Domain name=IBR; Domain location=261-332; Score =34.4; E_value=3.9e-07; Accession=PF01485.11; Description=IBR domain
  Pfam annotation: Domain name=zf-C3HC4; Domain location=194-242; Score= 14.7; E_value=0.0047; Accession=PF00097.15; Description=Zinc finger, C3HC4 type (RING finger)
  Pfam module annotation: Pfam domain module=IBR::zf-C3HC4; Domain location=261-332::194-242
MEERPSSEAGAGNSRAEDDFRSCCGDEEEWEDTEESFTAGVTKGELDEASVRLFFKGVSSPEAEGKKLSGIGVVMERSPGVPVLKVQKKLDFYVEELVADHLALMDGLLVALQNGIRKIFAFTNSEKLYFQIAEAEILEDQLLVALGHRILELVDKLEDFDLILLPSFELERPLQLAKEAIGIRYLSPYEVGTCPICREEKLGSQMIKAGCSHTYCYNCLTGYVEEKLLTSKLPIRCPQLRCKYIISASECNSFLPVSSYDSLERAFAEAGTSGMERFYCPFPNCSVLLDLSQHFSRASSSSQSDLSCVECPECHRDICINCGVPWHIMMGCDEYQSLPAEERDAGDLSLHRLAQNNRWRRCQRCRRMIELTQGCFHMTCWCGHEFCYSCGADYASGVQTCQCVFWDDEAMEPSSAARSTQAASEIWAWDTFDCMPTAVEGYSEQERAQLALIQRFLAGGFSLGENPCQSPPRCADSYIVDTMKDLHQLPWLERFVSVISDTYNDDYMQ

SEQ ID NO: 48345 - protein, 117 aa, Zea mays
  Coding DNA Sequence Number=SeqID_6566
MAWANFGDGGGGSNGEKSEKEKGESSVLHQLGHDFRHKAVYPHFVLLAINRREKPGTSRRGSKGASSCEVWARQRDYDVQKRVRHGGDWVVAAGFCARRRSGAEEWSWVFTVSRYGC

SEQ ID NO: 48346 - protein, 62 aa, Zea mays
  Coding DNA Sequence Number=SeqID_6567
  Subcellular localization annotation: CTP_CleavageSite=45; ConfidenceScore=5.01e-01
MTPTACAHSQPYSSHHRWRSTPRRDCQKPLDLTRPSTGPLPPPVLAKENPRGHGAKLFVLNL

SEQ ID NO: 48347 - protein, 53 aa, Zea mays
  Coding DNA Sequence Number=SeqID_6568
MQQPLDMDINVALNILEGVPLEGPKKSHISRRSLQGRKSSSSTFSGDSNVGSS

SEQ ID NO: 48348 - protein, 151 aa, Zea mays
  Coding DNA Sequence Number=SeqID_6569
  Gene Ontology: Mol. function=catalytic activity; Biological process =cellular metabolic process
  Homolog annotation: Hit_ID=O24563; Match level="QueryCoverage=82%, HitCoverage=33%, E-value=2e-50, Identity=80%"; Hit description =Cinnamoyl CoA reductase
MQSYHNTPLRETFLGVCAVKVNWYCYGKAVAEQAAWETARRRGVDLVVVNPVLVVGPLLQATVNASIAHILKYLDGSARTFANAVQAYVDVRDVADAHLRVFESPRASGRHLCAERVLHREDVVRILAKLFPEYPVPARSDFIVLIACLLA

SEQ ID NO: 48349 - protein, 56 aa, Zea mays
  Coding DNA Sequence Number=SeqID_6570
MSMDEEAIGTPSGYHHVLRKKVPAYKNSYVTVPSATLLSSSSKWTSEQPICGRCLV

SEQ ID NO: 48350 - protein, 132 aa, Zea mays
  Coding DNA Sequence Number=SeqID_6571
  Subcellular localization annotation: CTP_CleavageSite=64; ConfidenceScore=5.05e-01
MADGDAKGGMLVPKQGLGPLLPDGVPPGSEVQALSANSVTPAHAWTVRHVSQEPEPCSRSRTVRASVESTSIQVTGGLFGRGHRTVWCHTLDCPVHQETVAQWLVPGGIVEECIRLFGAKADEREIESNLFL

SEQ ID NO: 48351 - protein, 79 aa, Zea mays
  Coding DNA Sequence Number=SeqID_6572
MPPSPDLAHRWVWRLSREGGGVGNGDLHGRARAAVIRRATRGGVLAQVDGGWGTVPLLQIGGNLRVRGSLRARRIAQGG

SEQ ID NO: 48352 - protein, 188 aa, Zea mays
  Coding DNA Sequence Number=SeqID_6573
MTTEATESLTKPPRLSNALRENPAHSSGKEPPTSIHTQARTWGMRWGRGQGRRLRWAPWIPHRGAIDGARLRDAGMGRAMRCGDGEDEGGGVDPAAWLRDAGMEWAARCEDGREGEGEGGGVDPATPWMGRGCDMRAGCEMGGGKRGWMTPLVTAARCGDGLGADRPRDSGRGKGGAAVKRWTPSLPS

SEQ ID NO: 48353 - protein, 237 aa, Zea mays
  Coding DNA Sequence Number=SeqID_6574
  Gene Ontology: Mol. function=catalytic activity; Cellular component =integral to membrane; Biological process=cellular metabolic process
  Homolog annotation: Hit_ID=O24563; Match level="QueryCoverage=89%, HitCoverage=47%, E-value=4e-79, Identity=73%"; Hit description =Cinnamoyl CoA reductase
  Pfam annotation: Domain name=3Beta_HSD; Domain location=32-236; Score= -150.0; E_value=0.067; Accession=PF01073.9; Description=3-beta hydroxysteroid dehydrogenaseisomerase family
  Pfam annotation: Domain name=Epimerase; Domain location=31-236; Score= -67.0; E_value=0.093; Accession=PF01370.11; Description=NAD dependent epimerasedehydratase family
  Pfam annotation: Domain name=KR; Domain location=30-207; Score=-90.9; E_value=0.044; Accession=PF08659.1; Description=KR domain
  Pfam annotation: Domain name=NAD_binding_4; Domain location=33-235; Score=-80.3; E_value=0.002; Accession=PF07993.2; Description=Male sterility protein
  Pfam annotation: Domain name=adh_short; Domain location=29-218; Score= -50.6; E_value=0.012; Accession=PF00106.15; Description=short chain dehydrogenase
  Pfam module annotation: Pfam domain module=3Beta_HSD::Epimerase::KR::N AD_binding_4::adh_short; Domain location=32-236::31-236::30-207::33 -235::29-218
MTVVDAVVSSTDAGAPAAAATAVPAGNGQTVCVTGAAGYIASWLVKLLLEKGYTVKGTVRNPGMHASCLLLYISSLLCRPARAWQQMERLTCLYMFMAADDPKNAHLKALDGAAERLILCKADLLDYDAICRAVQGCQGVFHTASPVTDDPEQMVEPAVRGTEYVINAAAEAGTVRRVVFTSSIGAVTMDPKRGPDVVVDESCWSDLEFCEKTRVGVLACSLLFDRSSPSIHHLIYY

SEQ ID NO: 48354 - protein, 93 aa, Zea mays
  Coding DNA Sequence Number=SeqID_6575
MAALQEQQEEDRDEGEGGKDDDEESEDDGVGCKAPSARRRGDGANGESGRPRAPSRFLLLPCRALPRRGERSSVGRLFAQLPLPFPPNRLDPP

SEQ ID NO: 48355 - protein, 291 aa, Zea mays
  Coding DNA Sequence Number=SeqID_6576
MALAVVRKNATAALLLLLLLSSTVSEARHKIWHGPIIYASPPPPPPSHHRDLYLPYIAEQKTLAAPSPEDATGGTSTAGSSNKFRHAILRNLLLRLSNKDGAASPSWSSAMSLRERRDAVRHAADAALAAARGAAPRWSRALAAELSSQSQSQQHGRWHWHDDDAPHLLVAGADARPSGHQTCLPCGTAAAVAAAGCRKTVPRRRRLRVRARPKSGATTAWSAGAVARVVARRRARAGALRRMVPGGRGMADECTLLGETLDYAVSLRAQVDAMQLLLRTLQPPGHANNNP

SEQ ID NO: 48356 - protein, 72 aa, Zea mays
  Coding DNA Sequence Number=SeqID_6577
  Subcellular localization annotation: CTP_CleavageSite=13; ConfidenceScore=5.03e-01
MADARRDPRAPFSSSEKSGNTVEFAIDRRYSPTFASFVLPPEFMWKRVNQKSKLRSVLITALVPSRKASSGI

SEQ ID NO: 48357 - protein, 51 aa, Zea mays
  Coding DNA Sequence Number=SeqID_6578
MANRSSSTQWNIWKKRCKRVFQQQAKTYHHLALRIREDVLNYELALQEVGE

SEQ ID NO: 48358 - protein, 544 aa, Zea mays
  Coding DNA Sequence Number=SeqID_6579
  Pfam annotation: Domain name=DUF573; Domain location=80-176; Score =33.7; E_value=1.3e-07; Accession=PF04504.5; Description=Protein of unknown function, DUF573
  Subcellular localization annotation: CTP_CleavageSite=65; ConfidenceScore=5.82e-01
MASDQQALPVPVPVPVPPNPNPTAPADLTPPSASAARKLPIKRRSPRPSSSPPSSSSPASSDPLRAPGGGGGSDQQQPPFKFQRIWSESDELRFLQGLLGCGTQGLVFPRDLNVFYDRFSESMPQPYTRAQLSEKLRRLKNKFRSMSARVAGGIDPARLAPHDRDVLHLCSRLWDPANAATSPFAASAGTSGNKRRRSNPRGTPPDASGDSNSHDYNGISSSAPGLFPDGSNGEDTFYLEQESGQLGNHEGAALVADSKFDVVVQEQPEAVVTLPNGNNGIGSEMSAECKTVVPCSNEHRMANAVLDVFEECLREAKSNGIINGGNVESELSKRWRAQRMDELDVLSRRLRLLVEGPECIHASIPTRPPAAPAFPPGSTELYQRTMELLGLADRSGGIAHFLLSRWQHVGASSKEVTVSSSRCYQGWSPPCRLYKVLGVWALVSPRPWPSESMEKQEQTEAVVALLNWNNGIGNEINHKCGLQNGGTMQQWHQMANDVLDAWTCLRSECLRKRMDDLDVTGGCGCSSRMDGLDVLSRMLRLLVF

SEQ ID NO: 48359 - protein, 81 aa, Zea mays
  Coding DNA Sequence Number=SeqID_6580
MVVVTYKIEDELEIRSTNQKRGDEALIEPVTVMFWVALEDERTERNSSPELSLELGRNSNFNEQAVTTYGCELSWRRAIMA

SEQ ID NO: 48360 - protein, 315 aa, Zea mays
  Coding DNA Sequence Number=SeqID_6581
  Gene Ontology: Mol. function=nucleic acid binding; Cellular component= intracellular
  Homolog annotation: Hit_ID=Q207T2; Match level="QueryCoverage=99%, HitCoverage=99%, E-value=3e-61, Identity=41%"; Hit description=RNA -binding protein
  Pfam annotation: Domain name=zf-LYAR; Domain location=30-57; Score =59.3; E_value=1.3e-14; Accession=PF08790.1; Description=LYAR-type C2HC zinc finger
MVWFQCEDCGENLKKPKLAGHFRSCSAYKLSCIDCGELFSHDTVQGHTQCISEAEKYGPKGQTKPSNGAQGKADKPKPNADVDINVGLSTRPPWFCRSLFRYLGTVYLSWFLKRLCKTTTTSKQTLLLHADGKKHRAKAKAFHVSQKQKDGAEQTPDVKEAGVVPTKESAQVNGGVSGDHERNEDKDAGKRKRMDDMTIEPGNTKRQLTQSGDEKSENKAKSKADELASGTDCKSVQKQKIKWKKIITKTLKANADGVMKLKKLQKLVSKELQECGVSKDKEELRATLMDKIASSSRFYVDGKNVRLVAKNEEES

SEQ ID NO: 48361 - protein, 753 aa, Zea mays
  Coding DNA Sequence Number=SeqID_6582
  Pfam annotation: Domain name=Extensin_2; Domain location=364-676; Score=-134.1; E_value=0.046; Accession=PF04554.4; Description =Extensin-like region
MDAQVTNPSAATDHAAPTTSVSAPAHYAYANDNACPGGPKVWVLVLLFALLLLPFLPSAMRRGGGMHWAGGEGGYRRGGITFKSGWDVVNLCLVLFAILCGLLGRRGGGGSGDGESSSAATSTPAKDGHREVASAPATAAATTTSADLEEEEEEGYDSMSAIYATLPRTNHHAHASGGIRRMKSSSSLRLGSDGVWAPEATCRFYDDAELYRARRPERTWDVDLHGRTATTEVKTIPVDTFVERGRASQPREPRRRRRSVQRLDEVDEERPPRGEALAPARLRRWNSEVVDVMPEHGAPPATSRMWDSKVVDVMPEQDAARLRRWNSESLDMVLEQEAQVAPARNRRWTSEAVDVITERQAAVAPARIIRWNSVDVIPEQEAPVAPSRSRRWSSVAVDMVPEHKVPVVMVPAAPPPPSPPPPPALPRRRRHSVEKLPRPQELEQEIVVVEEVRNLLPPPSPSMFAPGTPPPPPPLPLPPRSTVSRSKKKRSGSVGGAKDLASAIATFYQKKRKSITMKAKRRPHQHHHSDGHYSSPSSDASASPDSTVRTTNAPPPPPPPPRPPPSSIFSNLFKNKKGGNKSRRIHSVAPPQPPPPPPPTRRTKKPPPPASRLAPPAPAVRTRQPRAPVHAPTHQPPLYYTYYPLPPLPPPPPPPLVSEGEDDSPSITASPAPAYCASPDVNTKADRFIESFREGLKLEKLNSYREKWQRQIQENAAAVDIEEEGEFMVIGSLFGDDDISLPQTPATAVAVGF

SEQ ID NO: 48362 - protein, 472 aa, Zea mays
  Coding DNA Sequence Number=SeqID_6583
  Gene Ontology: Mol. function=motor activity; Cellular component =myosin complex; Biological process=signal transduction
  Homolog annotation: Hit_ID=Q5ZB07; Match level="QueryCoverage=98%, HitCoverage=69%, E-value=0.0, Identity=68%"; Hit description=Myosin heavy chain-like
  Pfam annotation: Domain name=DIL; Domain location=298-394; Score =118.5; E_value=1.9e-32; Accession=PF01843.9; Description=DIL domain
MSETFAAKKALSEAELRNEKLARLLGVEEVKNKRLQDTLKRMEEKASSLDEENRMLRQAVASNPAIVRSPSGENHEAPGIQAAPDNEKSRNGTVKPIAVDREANVHEKGAEQPSSNGQEAGKQQQELLIKCLSEDLGFSVGRPIAAYLIYRCLVHWRSFEEERSVVFDRIIQKITAALEARDNNDALAYWLSNSCALLVLLQRTLKINGVAALARQRRRTSSPLKVPQENQDPAPDGQLICGLAQVYQVEAKYPAIAFKQQLTALLEKVYGMIRHNLKKELSPLLGLCIQVPPFLICKMFTQVFSFINVQLFNSNGEYVKAGLDELEHWCFWLTEEYAGSAWDELKHIRQAVTLLILDDKHSRSLAEITDDFCPVLSMQQLYRISTMYCDDKFGTLGIPSEVVSSMRTKMIEGSSSSPSAHDDINSFLLDDDFSIPFSVDDFTKLIVHVDVADMDLPPLIQESSGGGSKMGH

SEQ ID NO: 48363 - protein, 960 aa, Zea mays
  Coding DNA Sequence Number=SeqID_6584
  Gene Ontology: Mol. function=ionotropic glutamate receptor activity; Cellular component=membrane; Biological process=ion transport
  Homolog annotation: Hit_ID=Q9SW97; Match level="QueryCoverage=94%, HitCoverage=93%, E-value=0.0, Identity=49%"; Hit description =Glutamate receptor 3.5 precursor
  Pfam annotation: Domain name=ANF_receptor; Domain location=51-420; Score=283.2; E_value=5.1e-82; Accession=PF01094.18; Description =Receptor family ligand binding region
  Pfam annotation: Domain name=Lig_chan; Domain location=606-870; Score= 310.6; E_value=2.9e-90; Accession=PF00060.17; Description=Ligand -gated ion channel
  Pfam annotation: Domain name=SBP_bac_3; Domain location=486-828; Score=-7.2; E_value=1.4e-07; Accession=PF00497.10; Description =Bacterial extracellular solute-binding proteins, family 3
  Pfam module annotation: Pfam domain module=ANF_receptor::Lig _chan::SBP_bac_3; Domain location=51-420::606-870::486-828
  Subcellular localization annotation: CTP_CleavageSite=24; ConfidenceScore=5.24e-01
MASSAATTTTTLLRLLCLCTVLLVAMQAAAARPPNVTIGSLFAFDSVIGRSARSAIQLAVDDVNRDPTVLNGTTLTVVFQDTKCSGFAGTIQAGLELMEKEVVAVVGPQSSVIAHVVSHVANQLRVPLLSFAATDPALASTQYPYFVRTVHDDRFQMAAIADVVSHFGWREVTAVYVDDDYGRGGVIALADALEATRARVSYRAAFPLGADRATLADILQRANFMESRVFIVHASPDSGLNVFAAARGLGMMVSGYTWIATDWLATAAIDAAGAASNSSNIQGVLTLRQYTPDSDAKASLLSRLAAADPTSNNATASVNTYGLFAYDSVWMAAYAIDQFLGDAGGGNVSFSADPTIRDANGSALGLSALRVFDQGEQLLGKVMLSNFTGVTGHVEFQFDAGVNSSGTLVNPAYEILNVGGTGVRRVAYWSNYTRLSVDAPKQLGDGVPPPNSTSTTAQQQMSNVIWPGGTTATPRGWVFADNGKPLTIGVPYRTSYKEFVSKDETSPDGVSGYCVDVFKAAVALLPYPVPVSFVLFGDGVENPSYNELVQKVADGYFDAAVGDISIVTNRTRVVDFTQPYIDSGLMIVSTVKSSSSDEWAFLKPFTPELWATVVAFCIFVGAVVWILEHRHNDEFRGPLKKQMVTIFWFSFSSMFFTQREDTVSVPGRFVVIMWLFVVLIITQSYTASLTSILTVQQLSTGIQGLSDLLASNDPIGYQVGSFAGSYMNKELGVAATRLRELDPDDYADSLQRGPRGGGVAAIVDELPYMELFLSSNCQFQTVGQEFTKSGWGFAFPLDSPLAVDLSTAILTLSENGDLQRIHDNWLNTGTCDSQNNGVGGAERLSLRNFGGLFLICGVACVIALLIHFVRILFQFCQYRRHGAADGAQEEDENDGDDDRDGDSDKEKSQRRPARQTSIRDLMSFVDMEEAEVKRAIRSRSGKSMGRSRSDTSDAPSSSPV

SEQ ID NO: 48364 - protein, 165 aa, Zea mays
  Coding DNA Sequence Number=SeqID_6585
MASDSSTPMLESCPFETRSTVEGTGRGGHREVDRAYSPRNTTNVQRPRRRMDLWWRWNDDVKFVGSQCTTAPAQATNTNPGCCAGPPTVSRCPTTAPRGPRRRAHFLPPLHALYLSRWGSVMGSGTERRGRQIEKRAQGCPSFIPQLQERSAPNFPVMRGGCGGS

SEQ ID NO: 48365 - protein, 182 aa, Zea mays
  Coding DNA Sequence Number=SeqID_6586
MPNRRSNPNPWSEMDGSGSFFFLPRIQAATAPWPACTVPGTGRGGHREVDRAYSPRNTTNVQRPRRRMDLWWRWNDDVKFVGSQCTTAPTQATNTNPGCCAGPPTVSRCPTTAPRGPRRRAHFLPPVHALYLSWWGSVMGSGTERRGRQIEKRAQGCPSFIPQLQERSASIFPVMRGGCGGS

SEQ ID NO: 48366 - protein, 375 aa, Zea mays
  Coding DNA Sequence Number=SeqID_6587
  Gene Ontology: Mol. function=oxidoreductase activity; Cellular component=cytoplasm; Biological process=gibberellin metabolic process
  Homolog annotation: Hit_ID=Q8LGZ9; Match level="QueryCoverage=92%, HitCoverage=99%, E-value=1e-108, Identity=61%"; Hit description =Putative 1-aminocyclopropane-1-carboxylate oxidase 1
  Pfam annotation: Domain name=2OG-FeII_Oxy; Domain location=223-324; Score=147.0; E_value=4.9e-41; Accession=PF03171.10; Description=2OG -Fe(II) oxygenase superfamily
MAKDKRTLIWSSSMQQSSAASMAMEEDDDYEPPLMATYKHLLDSHPHRQLGAGAAQDDEDCFLLPVIDLSSLLPPVHHRKQSSSAAAAEQCRASIVRAASEWGFFQVTNHGVPQVLLDELHQAQAGVFRRPFQLKAHQPLLDFSPESYRWGTPTATCLEQLSWSEAYHIPTTTTTTGNDDKTRLVVEEVSTAMSKLAQRLAGILVAELGEDSAAAVVSRCTRSTCFLRLNRYPPCAAAASGVVYGLCPHSDSDFLTILHQDGVGGLQLVKDGQWVAVKPSPGALIVNVGDLLQAWSNDRYRSVEHRVMASATRERFSAAFFLCPSYDTLIRPRCGAGGPPPRYESFTFGEYRNQIREDVRLTGRKLGLQRFRKAE

SEQ ID NO: 48367 - protein, 341 aa, Zea mays
  Coding DNA Sequence Number=SeqID_6588
  Gene Ontology: Mol. function=protein serine/threonine kinase activity
  Homolog annotation: Hit_ID=Q337P5; Match level="QueryCoverage=70%, HitCoverage=27%, E-value=1e-40, Identity=40%"; Hit description =Pleckstriny domain-containing protein, putative, expressed
  Pfam annotation: Domain name=DUF1336; Domain location=92-334; Score =233.2; E_value=5.6e-67; Accession=PF07059.3; Description=Protein of unknown function (DUF1336)
MAGAALVVGSVRRGWGDAKRTRLRLMAAGSSGIGMDPMKLTRCGLLRWVKKLVNELPSWKASLNLAGRTAMVRFVLSAIPVYLLIAMNVPKWVIKAFDKVRRAFLWKGRKEVVGGDPLLELLAVDWFKVNERFDSVALHPKSLVQSEAAKKLPFILVINLQVPAKPNYNLVMYYAAERPVNKDSLLGRFIDGTDAYRDARFKLIPSIVEGYWMVKRAVGTKACLLGKAVTCNYLRQDNFLEIDVDIGSSSVARSIIGLVLGYVTSIVVDLAILIEQGNDLYIALHFTSMKRVNSCILSLELAEHVFVTALSVQAKEEKELPEYILGTVRLNRVNPDSAVSI

SEQ ID NO: 48368 - protein, 544 aa, Zea mays
  Coding DNA Sequence Number=SeqID_6589
  Homolog annotation: Hit_ID=Q9LUA7; Match level="QueryCoverage=37%, HitCoverage=56%, E-value=1e-12, Identity=28%"; Hit description =Arabidopsis thaliana genomic DNA, chromosome 5, P1 clone:MIF21
  Pfam annotation: Domain name=DUF868; Domain location=160-474; Score =76.4; E_value=9.1e-20; Accession=PF05910.3; Description=Plant protein of unknown function (DUF868)
MALSSGSSGSPTSSLHVPVDLASILVTIVIMLEFLVAATHGGYGDLECIDTVGEAADDERGGGEAKKGSSANEAGGGGEGEGGGCRVGRGTGRWRVTRMSSQRHRQEGMGRLQNGEIILGLGHGGLRPKRHASTAAPSLAMPSPIAACFRCAAAPSSGAGAAGPSLTTSVYETHLGLVALSWSRTSLGLSLRAVLRLSPPPSPGFSSASGAGYLDDDADEETLAFRVRPWLLWRWRGSKRFRADDRIVDLAWDLSRARFPGSGSPEPSSGFFVAVIIDGEMVLAVGDLSDAAYRRTRARRPSGPRPVLLSRREHVSLRDAGAGRGRSHTTCVTVQGKEREISVDLVARGLGTDRVAAGREKAKDRADVGMSVSVDGERVLHVRRLRWKFRGSERVDLGGGNGVQVSWDLHNWLFRPREPGPAEASTHAHAHAVFVFRFDVSSGGEDLGKDPCPDNATGRNTDVVWGGYLARWRQRDWSETGSNAERRKGRGRRLAKESSSSSASVASSTASWASGSTVMDWGSPEEAEMQRGDGLTLLIYAWKS

SEQ ID NO: 48369 - protein, 319 aa, Zea mays
  Coding DNA Sequence Number=SeqID_6590
  Gene Ontology: Mol. function=ubiquitin binding; Cellular component =nucleus; Biological process=protein neddylation
  Homolog annotation: Hit_ID=Q5RHX5; Match level="QueryCoverage=53%, HitCoverage=77%, E-value=8e-24, Identity=36%"; Hit description=Novel protein
  Pfam annotation: Domain name=DUF298; Domain location=219-315; Score =51.4; E_value=3.1e-12; Accession=PF03556.6; Description=Domain of unknown function (DUF298)
  Subcellular localization annotation: CTP_CleavageSite=74; ConfidenceScore=5.89e-01
MRRASKKSLSSAATASAGTAPTAGPLPSSLSSLIALTSSQAVRMGSCFSRLDAGVISSGRSVLERTRLVNISIVEFGIWELCIVFFVIGRVWRFVFVVKRMQSAGLFFANLGAEQVNEKQNRKRKGVSTNLTSRKAQRGPTKAVSKEVERIDQFFYTYADNSSVMIDPEGIETLCSHLEVPHTDVRILMLAWKMGCEKQGYFTLDEWRAGLKALRADSISKLKKAFPELVQECNLAYHFHVFYKSRLQGRQISRISTYMHFVIASQYQNDYKVINMDQWMGFMRFCNEINFPSLDNYDSDLAWPLILDNFVEWLRENKS

SEQ ID NO: 48370 - protein, 44 aa, Zea mays
  Coding DNA Sequence Number=SeqID_6591
MPPYSLRLLFLSLAGSLRRSYHELSVSRPSQLLQQMLIRESDNL

SEQ ID NO: 48371 - protein, 92 aa, Zea mays
  Coding DNA Sequence Number=SeqID_6592
MDDEYGGVIVNSEINSLLDPMDQDCNLCHCHLHFHVLDQAKNFYHPMVSCDDSESREDQFSVMNLEHYEDARAYCIFIVLFGSRLPTTMSHM

SEQ ID NO: 48372 - protein, 202 aa, Zea mays
  Coding DNA Sequence Number=SeqID_6593
  Homolog annotation: Hit_ID=Q6K990; Match level="QueryCoverage=41%, HitCoverage=9%, E-value=5e-28, Identity=77%"; Hit description =Putative phragmoplast-associated kinesin
MAKTGRRADEGGGATEHPVEVIGRIRNLASGVSSALEFAWGGTAVRVRGDAGGCRDFTLDGVSVLEEEDLEGFYHRFVRSRIYGVPDALGNLHPPRRDDLGRPSSAPTRQPPARSPRCKPCQPTARSPRRHARISADRALRTRPSRVELRVSPPAIPPFVFPCPLYLSPIVPPTIRFRRKGTEDLDRSTRHPARASSQNKYP

SEQ ID NO: 48373 - protein, 131 aa, Zea mays
  Coding DNA Sequence Number=SeqID_6594
MATARNLDGQIDMVKVVEPQQAMVMGSPLEDARHLAQSYNGTCCDQDVGIKVLEPERVSVDMLQSMLRLELGGDTDRSAKLTERPCEVDCAYYIHTGSCDRDRAAPRGPVQPAILPEPYLRSVIDQKGSEA

SEQ ID NO: 48374 - protein, 69 aa, Zea mays
  Coding DNA Sequence Number=SeqID_6595
  Homolog annotation: Hit_ID=Q75LL1; Match level="QueryCoverage=51%, HitCoverage=9%, E-value=1e-08, Identity=77%"; Hit description =Expressed protein
MEALWKQASRLKNQVARQYVVNLSFVFDKTKILDLPAAMGKRGVKLGKASYQELIGVKKPKLDEQGMLH

SEQ ID NO: 48375 - protein, 81 aa, Zea mays
  Coding DNA Sequence Number=SeqID_6596
MRVGRGRKWLQLAEQGLCVIDSELEGYWAAVQNSMNEGLQGAAFFDMKKQTHTSNEGVEYWATIPFYLRNLTKGLGTWPYL

SEQ ID NO: 48376 - protein, 113 aa, Zea mays
  Coding DNA Sequence Number=SeqID_6597
  Subcellular localization annotation: CTP_CleavageSite=47; ConfidenceScore=5.03e-01
MSSSSSSSSAAVASWTVPSSEKTISDPATVVELQHGHTVEFGTSRIYSDRVMEMQRLGYFRNGVGRALRAEDVPKPEGELIVFEAFFVAGLRLPVEIFLTALRQSNNALKTLL

SEQ ID NO: 48377 - protein, 70 aa, Zea mays
  Coding DNA Sequence Number=SeqID_6598
MAWSPTFTVDLRGRGVAAFVREVESDAIKIVGKYVPKTEMIKSWNIVTPGFGSGLALFGVKVKQLLLVDQ

SEQ ID NO: 48378 - protein, 2568 aa, Zea mays
  Coding DNA Sequence Number=SeqID_6599
  Gene Ontology: Mol. function=zinc ion binding; Cellular component =nucleus; Biological process=regulation of Rab GTPase activity
  Homolog annotation: Hit_ID=Q7XCX5; Match level="QueryCoverage=94%, HitCoverage=80%, E-value=0.0, Identity=42%"; Hit description=Plus-3 domain containing protein, expressed
  Pfam annotation: Domain name=C1_3; Domain location=147-172; Score =6.0; E_value=0.1; Accession=PF07649.3; Description=C1-like domain
  Pfam annotation: Domain name=GYF; Domain location=759-812; Score =34.3; E_value=4.4e-07; Accession=PF02213.6; Description=GYF domain
  Pfam annotation: Domain name=PHD; Domain location=102-155; Score =15.8; E_value=0.0015; Accession=PF00628.19; Description=PHD-finger
  Pfam annotation: Domain name=Plus-3; Domain location=498-603; Score =122.8; E_value=9.7e-34; Accession=PF03126.8; Description=Plus-3 domain
  Pfam annotation: Domain name=SWIB; Domain location=360-435; Score =84.9; E_value=2.4e-22; Accession=PF02201.9; Description=SWIBMDM2 domain
  Pfam module annotation: Pfam domain module=C1_3::GYF::PHD::Plus -3::SWIB; Domain location=147-172::759-812::102-155::498-603::360-435
MEAAAPDGAAQASPPPAEADRPPEPRPPPLPAAGTHDPHFLSSIIGDAAPPPPPPPLGQKRKRGRPPKRKDGAAVAAGPVVPAPAPALARAARRRQDEEEVVCFICFDGGNLVVCDRRGCPKVYHPACIKRDEAFFQSRSKWNCGWHICSSCEKAVHYMCYTCTYSLCKVCIKQGKFFSVRGTKGFCDTCYGTILLIECKDESATKVDFDDILSWEYLFKLYWLDLKGKLSLTLEELTTAKNRWNVPSTSARKEKEESSDDLYDANNDDDAGSDCSSGKRRRTNSRKKGQKRRKVNRDCSILEKKVELPLRNTESIPVEVPNERVPYPVHTKVPNGRVPMPVDTKVPNEPVSLAANTKWASPELLEFIGHMRNGDQSFISQFDVQTLLLDYIKKNNLRDPQRKSQIICDSRLHFLFRKARVAHFEMLKLLEMHFLTNETSTVTNSSQVTINLNSAHVDTNGHNDTAAKVSPDKRRRIYRKMERDTQVNLEDYAAIDMHNINLIYMRRSLMEDLVDDVKFSDKIHGGFVRIKISDVCQKQDIYRLVKVIGTHKVPEKYSIGKKMTNVALEILNLNKKEIITMDTISNHDFTEGDILEKAKILQYWFENEKQRLGHLRDRASETGRRKEYPIDYTMLLNDSEERTRRIIEILELHVDSHMDPNYESAEETDEKGTVGKSVNQTRPDTTISRRISRYLSTVQNHPKKVSDSSHLPKSLSTESAICGSGARSLENSTANRTMYGAGPLSSSVVTMTNDTEPEKVWHYKDPSGNVQGPFTLLQLSNWTSYFPRDLRVWLTFESEERSLLLTEVLSKQQKDFTQAASHTSSKATLVGTGHTRNNPSVDQTNAFSPVGHSVVSSSGIPVQYNKYSVPERESVYSPDDSLSLSTSSVPPKDAYTVNSQAHCQNKHSVFIQSPGSSYGHTDLNHDGIQGGCSGESNHHHSSRALWSPTVAHVSCGRGNVESHQNQHVSWSESQHESKNGSQGGFVKDLNSRQDLSKNLPAQRIGKDVSSPLFAWSPAESRTASSQQEGSCLSSTTNPSFLDELHSSIASAKPKSCAPATPIEDRGSSSPSDMLSHEERVPICSPQSAPLASASDMCKMEEIMNQQRTLVVDTSNASVNQSPESRAFPVSSPDNQDIDREFPSPVPRSENKDIAVDSSELAPASPENITTNLPVSDTCKMEEVVSQQQVIGAVVSNSSDNHSPQSKVSPVSSNNEDTKHKYPSSTPRPENKNPAVDSLLSTSAAPENLTTTSTHDSDTCKMEVVNQPKTFEADASNAPLHQLPHSHSFLVPSDNQDIECECPGPTPRSDSEEALMNNSATTASASDTSKMEEFVNQQKTLEADSSNAPLNQSPHSHIFSVPSDKQDIERECPGPTQRSDTKEPLMNNSVLTSGPSEIQTTASAASDTCKMEESVDQPKALEADASNAPLNHHPHSHIFRVSSDNQDNQCEHPSPNPKSDSKEPLVDNSVLTSVVPGMLATTSASDKCKMEEFANQQKALEVDASNASFNQPHIFAVSSDNQDMERERPSPTPRSECKESLTENSVLTSLAPEILARSSASASDKCKTEEFVNQQKPIEADASNASLNQPHVFAVPSDNQDIERECPSPTPRSECKESFMENSVLTSAVPEIARSSVSASDTCKMEFVNQQRPIEADASNASLNQPRIFAISSDNKDIERECPNPTPRSECKESIMENSVLTSAAPEILAISSASASDTCKMEFVNQQRPIEADASNASLNQPHIFAISSDNKDIERECPSPTPRSECKESLMENSVLTPATPEILARSSASASDTCKMEEFVKQQRPNEADASNASLNQPHIFTVSSDNKDIERECPSPTPRSECKESLMENSVLTSAAPERSSASASDTCKMEFVNQQRPIEADAPNASLNQCRTFAVSSDTKDIERECPSPTPRSECKESLMENSVLTSAAPEILARSSASASDTCKMEEFVNQQRLIEADASNASLNQPHIFAVSSDNKDIERECPSPTPRSECKESLMENSVLTSAAPEILVRSSASASDTCKMEEFVNQQRPIEVDASNASLNQPPRCHIFTASSNNQDIERECPSSTPRSDSKEPFVDNLVLTSAVPGNLLTSSAVASDTCKMEILNKKITLEADASNAPLNQPPLSSVFASSSGDDQDNVCGRPSPNPRPEGEQPLMGNSGLISTVPRNLTSTSASASDICKMEILNEKRTLEANPSNGLITQSPQPKVFLVPSPDILECEFSSETPRHEFKEPVADSSGLTSAAHENLGTKPHVHSPDAFVPPKSGALTGELGDTKSDFKGEETIQKEQYFGSESIAATRENLLIDPSSGVESIDVSDVLDSLMEERSGTSYMPGSIEDFLAEEEPQYSSPIALSPWGEPSYYQGDAVDSALWGTQDLINDMWSLLSPRPMLQPSSGIGTEGKETFDINEVAVTHVSSDYFQKGSMFGEENVNQANLSAAADWMLPEQVPSIPNGMSTSSVDESTIVLGSQPSTNQSLDWGGTTWSIGQNASVYSNEKAEPSSKSYWEEPRKQETAKSSVSISGQAIGNNKGLDPRDNAANRGSRLSHHHRGSLYRLITV

SEQ ID NO: 48379 - protein, 372 aa, Zea mays
  Coding DNA Sequence Number=SeqID_6600
  Gene Ontology: Mol. function=DNA binding; Cellular component =mitochondrion; Biological process=DNA integration
  Homolog annotation: Hit_ID=UPI00004C1731; Match level="QueryCoverage =88%, HitCoverage=29%, E-value=1e-128, Identity=60%"; Hit description= UPI00004C1731 related cluster
  Pfam annotation: Domain name=rve; Domain location=94-243; Score=19.7; E_value=0.00013; Accession=PF00665.16; Description=Integrase core domain
MGAGAGLLFVSPLRKHLRYVLRLHFPASNNVAEYEALLVIDQVMKNSHCRDPKMEAYCDEVRRLEDKFYGLELNHIARRYNETADELAKIASGRTTVPPDVFSRDLHQPSVKTEDTPEPEAPLAPPEAPSAESKAPGGYTHLLVAIDKFSKWIEVRPLNSIRKFLDFCEDHHIRVDWAAVAHPMTNGQVERANSMILQGLKPRIYNDLNKFGKRWMKKLPSVVWSLRTTPSRATGFTPFFLVYGAEAILPTDLEYGSPRARAYTDQSNRANREDSLDQLEEARDMALLHSARYQQSLRCYHARGVRSRDLQVGDLVLRLRQDARGRHKLMPPWEGSFVIAKVLKPGTYKLANSQGEVYSNAWNIQQLRCFYP

SEQ ID NO: 48380 - protein, 110 aa, Zea mays
  Coding DNA Sequence Number=SeqID_6601
  Subcellular localization annotation: CTP_CleavageSite=50; ConfidenceScore=5.10e-01
MASSPAGSLAPCSLLPALRVACQQFSSLPALLSSQDAPISLLPHARILIARAAPWYSLAFLLLCSPHARNFPARWCLVLAPLRRAVSLRASSSLAEFALVASLCVLAAPV

SEQ ID NO: 48381 - protein, 242 aa, Zea mays
  Coding DNA Sequence Number=SeqID_6602
MDRDEKNMSTMEELMVARPSSQRQGPPACREATPEQGLRSRSTLPRRSCPCVQGVTRVPLGCLARVAGPWPRPCAGGRTLAGLVCWDGEPPGQGLRRGRGRWGRVHAGAGAARACTLVPPGELRPAPSLLGWGSCARAAWRSCPTLPLLGQGPRARAAASRAGRAQATHALLGESRWATSAQPPGGAPAQQCRARARLAKAVPLGSRLCLSAASLGSCPCLSAAPAAPEPPGPRATALACRG

SEQ ID NO: 48382 - protein, 298 aa, Zea mays
  Coding DNA Sequence Number=SeqID_6603
  Gene Ontology: Mol. function=protein binding; Biological process =protein modification process
  Homolog annotation: Hit_ID=Q7XDQ7; Match level="QueryCoverage=90%, HitCoverage=67%, E-value=8e-86, Identity=62%"; Hit description =Ubiquitin family protein, putative, expressed
  Pfam annotation: Domain name=LRR_1; Domain location=167-188; Score =14.1; E_value=0.52; Accession=PF00560.23; Description=Leucine Rich Repeat
  Pfam annotation: Domain name=LRR_1; Domain location=190-214; Score =5.5; E_value=26; Accession=PF00560.23; Description=Leucine Rich Repeat
  Pfam annotation: Domain name=LRR_1; Domain location=216-237; Score =12.0; E_value=1.6; Accession=PF00560.23; Description=Leucine Rich Repeat
  Pfam annotation: Domain name=LRR_1; Domain location=239-260; Score =8.6; E_value=6.9; Accession=PF00560.23; Description=Leucine Rich Repeat
  Pfam annotation: Domain name=LRR_1; Domain location=262-280; Score =3.3; E_value=70; Accession=PF00560.23; Description=Leucine Rich Repeat
  Pfam annotation: Domain name=ubiquitin; Domain location=13-96; Score =19.9; E_value=0.0025; Accession=PF00240.13; Description=Ubiquitin family
  Pfam module annotation: Pfam domain module=LRR_1::LRR_1::LRR_1::LRR _1::LRR_1::ubiquitin; Domain location=167-188::190-214::216-237::239 -260::262-280::13-96
MEAAPTTITVQVKFAGRTIPVEVPAAASGAELKRLLQPLTNVLPRGQRLICKGTDPQTLPTLDSLVVAGKVLQDAASLSSMQVVGGSKVMLIASQGLHQGDGPITNNSSSSATTVRRPSNVKENQTQKPEVVVTKSRSERWKLTGVVALQDCDLKVIPEEVWDCGTSIRILDISYNCIKEIPHKISALKSLNKLLLTENDIVDDSICWEGLSCLQKLLNLSLSENRLVSLPPTLGSLTSLRELCVAKNRLDNLPVEIGLLKHLQVLIANNNRLRGLKRTMSRWFSRSMSQELTLRLVC

SEQ ID NO: 48383 - protein, 223 aa, Zea mays
  Coding DNA Sequence Number=SeqID_6604
  Homolog annotation: Hit_ID=Q8SA97; Match level="QueryCoverage=27%, HitCoverage=11%, E-value=3e-08, Identity=58%"; Hit description =Ornithine carbamoyltransferase
MGRREAEREGGRKVAGDRRERGGNPAAFVFVPRPGRPESEPWVGRSGVRRLLGLSPSPSPGSGGAEFAVFRGLAQVRGALGRAERSSSSSGAEPKSEPWVGRSGVHRLPGLSPSPSPGSGGAEFAVFRGLARVRALGRAERSFLWCLRSGLTVCQPHSVKWHCSRCGAGGAVLLSGRSVERRSDCGLLLGEDRASGKPKLRADGGYQLRIRSFEGTPNYGPRQ

SEQ ID NO: 48384 - protein, 45 aa, Zea mays
  Coding DNA Sequence Number=SeqID_6605
MSRTFDDYYIKDCGVISAPELAPSSSLCNVSLGHRMMLAVAVYLE

SEQ ID NO: 48385 - protein, 406 aa, Zea mays
  Coding DNA Sequence Number=SeqID_6606
  Gene Ontology: Mol. function=aminocarboxymuconate-semialdehyde decarboxylase activity; Cellular component=cytoplasm; Biological process=nitrogen compound metabolic process
  Homolog annotation: Hit_ID=Q5MD07; Match level="QueryCoverage=79%, HitCoverage=53%, E-value=1e-157, Identity=87%"; Hit description =Glutamine synthetase
  Pfam annotation: Domain name=Gln-synt_C; Domain location=237-405; Score=-32.6; E_value=4.9e-09; Accession=PF00120.14; Description =Glutamine synthetase, catalytic domai
MHHLDFGYLSIQGLSSTRSAHRSLQQPQHSHPHDAVTVGVGDFNPSVPTYDFCSSLIVCGAPVATAGMLECAKRARDVVYRVLSAACEDGDLSIQEAIEAIEDIFRRNALNLYKLNVVNGSINHETAIVGKRVSLSSVEEDVLFVRIIWCDASGQHRCRVVPAGRFYEITRNKGVGLTFAAMGMTSFCDGPADGSNLTGVGEIRLVPDMPTLVRLPWSRHEEMVMADMQIRPGEGWEYCPRNTLRKVTKVLLDEFNVTMKAGFENEFFLRRKLVSNGVEMWIPYDNTNYCSTSAFDGASSILQEVYSSLKDSGIVVEQLHAEAGKGQFEIALKYILCTVAADKLIYARETIKSIARKHGLVATFLPKLQLLVFAWQASQASGSLDVHHGNLALWILKFRSHLQSLA

SEQ ID NO: 48386 - protein, 409 aa, Zea mays
  Coding DNA Sequence Number=SeqID_6607
  Gene Ontology: Mol. function=aminocarboxymuconate-semialdehyde decarboxylase activity; Biological process=nitrogen compound metabolic process
  Homolog annotation: Hit_ID=Q337P3; Match level="QueryCoverage=88%, HitCoverage=38%, E-value=1e-128, Identity=68%"; Hit description =Glutamine synthetase, putative, expressed
  Pfam annotation: Domain name=Amidohydro_2; Domain location=164-403; Score=15.0; E_value=6.4e-05; Accession=PF04909.4; Description =Amidohydrolase
MEARYEVLRRATEEVAAVDAHAHNLVEHGSAFPFLRCFSEAEGDALALAPHSLSFKQYIRNRDIDGSLQFAGFRARSCRLSFSLCGMRMAATLWGLPCHRAVERGGCIRSLRDIAALYNCEASLEKVEKFRSAEGLKSIGSKCFQAANISVILIDDGIAFDKMLDLESHKAFAPVVGRVLRIERLAETIINAFSYLYLIICFNYEYFFKSIAAYRSGLEINPNVSKTDAEDGLRKELTGPRPFRITNKNLIDYLFTCSLGIAVSLSLPVQIHTGFGDKDLDLRKCNPLHLRAVLEDERFAKCQIVLLHASYPFSKEASYLASVYSQVYLDFGLAIPKLSVHGMTSSLKELLELAPIKKTFFVMVVKSVRDWRGVSMGKNVDRGPLPTTEQEEGFFLLILAYFISHLLIT

SEQ ID NO: 48387 - protein, 205 aa, Zea mays
  Coding DNA Sequence Number=SeqID_6608
  Homolog annotation: Hit_ID=Q3S4H8; Match level="QueryCoverage=23%, HitCoverage=21%, E-value=8e-16, Identity=87%"; Hit description=Dual -specificity protein-like phosphatase 1
MGVGVAIPLRRRLFIEEIELGVLTSYLWIADVTFHRIVPVNYRNLAFVHVLLGAVPFPSDVLRLKTLGVCGVVTLNESYERLVPTSLYEISFAQALVCGMLVLLPGYEPLGLQFGQQAYGKEKAKDPSEFITHRAKDFVSSMKDIETRFMCIVEAGNKVSRMLETKKILLDICAKIPGTKYMVIQGEPRVVIRGKKFIAFASFVS

SEQ ID NO: 48388 - protein, 71 aa, Zea mays
  Coding DNA Sequence Number=SeqID_6609
MAYEQHLRTSPQHWRPPLVNPFRPPLASTDLRHATKESFSARGCRTIAIGPKLGDPLSPRGPKPEKEGEST

SEQ ID NO: 48389 - protein, 149 aa, Zea mays
  Coding DNA Sequence Number=SeqID_6610
MHMDCSLSSGAPDKHGSWSVMQEALILSVKAVVRFGVPEIVKQAQQNKKVPLGPKPEDKVSSGEIKISGDKHEHKEHSGESTSSTKSHKKKGGKKNRMKKVVYYETNSSVPSISDTESTSSKRNKCKRVTKFLSVTLTFQNTRNYFRSH

SEQ ID NO: 48390 - protein, 246 aa, Zea mays
  Coding DNA Sequence Number=SeqID_6611
  Gene Ontology: Mol. function=kinase activity; Cellular component =ornithine carbamoyltransferase complex; Biological process=amino acid metabolic process
  Homolog annotation: Hit_ID=Q6QP54; Match level="QueryCoverage=57%, HitCoverage=23%, E-value=1e-19, Identity=70%"; Hit description =Putative kinase
  Subcellular localization annotation: CTP_CleavageSite=76; ConfidenceScore=5.25e-01
MWRLLRGRGRVCLPWPWSSPSPWVGRGRDHRLRPGLSPSPGVGRSGVRRLLGLSPSPSPGSGGAEFTVFRGLARVRALGRAERSSSSSGAEPKSEPWVGRSGVRRLTGLSPSRSPGSGGAEFAVFRGLAQVRALGQAERSSSSSGDEPKSEPWVGRSGVRRLPGLSPSPSPGSGGAEFAVFRGLARVRALGRAERSFLWCLRSGLTACQPHFVKWHCSRCGAGGAVLLSGRSVERRSDCGHFGSVD

SEQ ID NO: 48391 - protein, 230 aa, Zea mays
  Coding DNA Sequence Number=SeqID_6612
  Homolog annotation: Hit_ID=Q10RW7; Match level="QueryCoverage=81%, HitCoverage=28%, E-value=2e-16, Identity=29%"; Hit description =Expressed protein
MLQDVVSIEVPISSACPSEHIDGSRSGGLNCSCDKPSPTSILDVSFEDSNLNGSESSRSIPCSNESWYLPDCPVDPALCDKLLDRKEEAAKSRERRSNQKLLFDYVNMAVVEIGHDTLLCAYPWRQACSMAWEETLSQALAEEVPHHMRDWLHGSGKFAGNENDNAGTLLERVMRQEVEGRGWVKSMRWELDEITEQIAGNVLDEIVVEALDGLGICSPWPEMAMAIPNL

SEQ ID NO: 48392 - protein, 364 aa, Zea mays
  Coding DNA Sequence Number=SeqID_6613
  Gene Ontology: Mol. function=sialyltransferase activity; Cellular component=integral to Golgi membrane; Biological process=protein amino acid glycosylation
  Homolog annotation: Hit_ID=Q4JEZ1; Match level="QueryCoverage=75%, HitCoverage=63%, E-value=1e-71, Identity=48%"; Hit description =Sialyltransferase-like protein
  Pfam annotation: Domain name=Glyco_transf_29; Domain location=58-352; Score=-4.3; E_value=7.1e-07; Accession=PF00777.9; Description =Glycosyltransferase family 29 (sialyltransferase)
MKRRWSHPSSVLLLLLLVAVFLLLTLLRCPLRHAQQACADDDAGSYAVDATLAELAAADPAASAVLRAAERLLEGNLTRAPPERRDAAVRGLREWLGRQRFEPQVMAELVDLIKRPLDRWHYGVGAGATDSDDGRRPYASCAVVGNSGILLAREHGALIDGHDLVIRLNNAPAGAGRYARQVGARTGLAFLNSNVLSRCTTAGCRHCRAYGDRVPILTYMCNAAHFVEHAVCSAGASAPVIVTDPRLDSLCARLAKYYSLRRFVRETGRPAEEWGTRHEEGMFHYSSGMQAVVAAAGVCGRVSVFGFGKDPGARHHYHTLQRGELDLHDYEAEYEFYRDLEARPEAIPFLRDSGFRLPPVVVYR

SEQ ID NO: 48393 - protein, 175 aa, Zea mays
  Coding DNA Sequence Number=SeqID_6614
  Subcellular localization annotation: CTP_CleavageSite=63; ConfidenceScore=5.48e-01
MDADPAHIAPPPHHAPARSSRHDCRPCSPAPVPAASASSHLPAPRIRAPSPMTQFSDGTSVLRDATHASPLGVELHARTENPSALCPTTSFSDLETPAFSFHDWSSPITREYAIGDRCDLAIRDRRRFDNAERIFQITPTSMHTKCAKAPRATTLVQRIVLCLPHPDEDAGTRTM

SEQ ID NO: 48394 - protein, 380 aa, Zea mays
  Coding DNA Sequence Number=SeqID_6615
  Gene Ontology: Mol. function=oxidoreductase activity; Cellular component=chloroplast thylakoid membrane; Biological process =proteolysis
  Homolog annotation: Hit_ID=Q8H4J8; Match level="QueryCoverage=91%, HitCoverage=91%, E-value=1e-167, Identity=83%"; Hit description =Aldo/keto reductase family-like protein
  Pfam annotation: Domain name=Aldo_ket_red; Domain location=52-368; Score=132.2; E_value=1.4e-36; Accession=PF00248.11; Description =Aldoketo reductase family
  Subcellular localization annotation: CTP_CleavageSite=36; ConfidenceScore=5.05e-01
MALQVTGGVGCCCPPGSARRLPQAAALCRPPRAVVSGATRVVEEDEGKVRLGGSGVAVTKLGIGAWSWGDTTYWNDSEWDDRRLREAQDAFDASIDNGMTFFDTAEVYDSVLKAHLYLTKNGSVLQLMGAVNSETLLGGFIKERQQKDQIEVSVATKFAALPWRFGRGSVLSALKKSLDRLGLAPGIWGNEGYLDGLADAYEQGLVKAVGVSNYNEKRLRDAHARLKKRGVPLAANQVNYSLIYRTPELNGVKAACDELGITLIAYSPIAQGVLTGKYTPENPPTGPRANTYTPEFLAKLQPLMNRIKEIGASYGKSPTQVSLNWLTCQGNVVPIPGAKNASQAKEFAGALGWSLTGDEVEELRTLAREIKGIRMPIEES

SEQ ID NO: 48395 - protein, 440 aa, Zea mays
  Coding DNA Sequence Number=SeqID_6616
  Homolog annotation: Hit_ID=Q10RW7; Match level="QueryCoverage=86%, HitCoverage=41%, E-value=5e-57, Identity=39%"; Hit description =Expressed protein
  Subcellular localization annotation: CTP_CleavageSite=94; ConfidenceScore=5.41e-01
MDLRLKVFRGSLAPFNLARTGSQNSKLKLPSCRSRQDAKRTVDPAKVYTNDKVGASNWSSSRNKSNVSPLNVALEKEMSKELESKKKSPSVVARLMGLEEDLPGQEPALPSTKRNLKKRHLNGNLVKTNNLHRHQEQYHSSMTTCDKHIGPKETVEFKDVYEVSEEPLRTYHFQDQTFPREMSSRSKRDIRMEIVRQKFMEAKRLATDEKLLHSKEFQEALEVLSSNRDLFLKFLEEPNSTFSKQLAGLHRSPSPPQTKRITVLKPTKFVESDCRREIRTHRINEGNEHVMRRTHWRSHSAEDTLSQPTRIVVLKPSPGKPSRTMARLTTEAAPAQFAEQIGFYGGLEGHNYPSDALHRRDESLLSSVYSNGYGGDESSFGRSEVDYIDEEDSNLSDSEIVSPVPPLHSWDHFKRYSSPHSGSTFSRTSRSPESSVITES

SEQ ID NO: 48396 - protein, 148 aa, Zea mays
  Coding DNA Sequence Number=SeqID_6617
  Gene Ontology: Mol. function=binding; Cellular component =cytoskeleton; Biological process=cell division
  Homolog annotation: Hit_ID=Q1SA51; Match level="QueryCoverage=97%, HitCoverage=14%, E-value=7e-54, Identity=64%"; Hit description=Mast C-terminus, putative
  Pfam annotation: Domain name=HEAT; Domain location=74-109; Score =21.1; E_value=0.0039; Accession=PF02985.12; Description=HEAT repeat
MRELALSLITEMLNYQISNEANQCLNVLLAKYNPFTCLAITVPLLVSDDEKMLVVCINCLTKLVGRLSQEELIVQLPTFLPALFDAFNNQSPDVRKTVVFCLVDIYIMLGKAFAPYLEGLSSTQLRLVTIYANRISQARSGKPIDSNQ

SEQ ID NO: 48397 - protein, 216 aa, Zea mays
  Coding DNA Sequence Number=SeqID_6618
MADPVVPAHFGRGRCGLALGLLKHRSPMPCARTNRFLHTKEPRHVTGFHRRHRKKIPLPPRYDLSPTIEAGARSLMLLWAALIVRQPNRGGFTQIGSVDGRIGRTPARAPPRPHLRHRALVQEVHKGSTQTNKKIEVRVQIQRSKGTECALVWSTGLSGVPLDSVRCTRTVQSQTLHSRVSPGALRSNSPDCSVHQWSNGYFAQMSTAKAKESDEQ

SEQ ID NO: 48398 - protein, 129 aa, Zea mays
  Coding DNA Sequence Number=SeqID_6619
  Subcellular localization annotation: CTP_CleavageSite=43; ConfidenceScore=5.82e-01
MPSRLRLGPAGIRGTTSNPSSCRANHRKHSRGGSRKRVPKRISAAPNRANWRPRPLLRARIGLRSRRAGRIRREVGEFGGEALAGMHSNGVSRGGGLEGKEQRKVAVWDSMCEWGDDRWGTRSGVAQWK

SEQ ID NO: 48399 - protein, 76 aa, Zea mays
  Coding DNA Sequence Number=SeqID_6620
MDLDRTLFLLRSYLLLEKAFWRAVTTGMTKSLAFSSRVDDVESPVLERVGMCPRRQRHRPANSSLQIQTALGVTNL

SEQ ID NO: 48400 - protein, 150 aa, Zea mays
  Coding DNA Sequence Number=SeqID_6621
MASSSTSSIHVQPQIWEAPRLRPWEGHRAPLSSEQRPSSPGHAATEVGSMDKRSAAASRNREEACGRRWRKWPVACGREAMVAGLKKWRRGNRVPAPRKKTGVGELLLPGMGRGVEEKGEHVLPFIEPSSGHGRLHQQVADLGCCTKYLP

SEQ ID NO: 48401 - protein, 160 aa, Zea mays
  Coding DNA Sequence Number=SeqID_6622
MESGLASVAQGMEGCVISNKETGAYGMPSATNNPDASGQSFSEALRSSRKHPLQYDASESADGGLGGKCAKKKTKKSKEHKIGGGGQCHAAAGTMRHDKGGKCHALCYGASRLSVSSSASCSILSSREQPSSARRNSAPSYATATIPMLPIQLLSGGRTS

SEQ ID NO: 48402 - protein, 185 aa, Zea mays
  Coding DNA Sequence Number=SeqID_6623
  Pfam annotation: Domain name=DUF179; Domain location=68-182; Score= -33.9; E_value=5.9e-06; Accession=PF02622.6; Description =Uncharacterized ACR, COG1678
MAYAQAAAASARGGARGWRRATAHQSRLASFRAQLYFKEQHGDPPVASSTQLPAVQTGSDRWAHPLMKPEKGCLLIATEKLDGSHIFERTVILLLSSLGPDGVILNRPSLMSIKEASGSICADDADIACAFAGRPLFFGWEGRLIVAGCVYGVAAMAGGRATTAVDAEGMGELGLLGGKGHARDR

SEQ ID NO: 48403 - protein, 158 aa, Zea mays
  Coding DNA Sequence Number=SeqID_6624
MSGACTKARQLRRGATVGHGREPHREEGINGGEMLDLVWEHGDKVCFGFTVHNEVTIVLPFMYWDKSLTLGEVPMQYTNTMNTYQSKFAHDNAQHNMVTEVKGVERMFDSNTASISLQEYEFFRRKAGEFSSDLARRMVTDCSTSPSTLPESRSLPSV

SEQ ID NO: 48404 - protein, 416 aa, Zea mays
  Coding DNA Sequence Number=SeqID_6625
  Gene Ontology: Mol. function=actin binding; Cellular component =phragmoplast; Biological process=actin cytoskeleton organization and biogenesis
  Homolog annotation: Hit_ID=Q8H8K7; Match level="QueryCoverage=96%, HitCoverage=46%, E-value=1e-160, Identity=75%"; Hit description =Putative formin-like protein
  Pfam annotation: Domain name=FH2; Domain location=9-365; Score=389.7; E_value=4.4e-114; Accession=PF02181.13; Description=Formin Homology 2 Domain
MIEVLFTNNAANAPPRDTLRKPGVPLCGAQEKVLDPKKAQNIAILLRALNVTLEEVTDALLDGNAECLGADLLETLAKMAPTKEEELKLRNFTGDISKLGSAERFLRALLDIPFCFKRVDAMLYRANFDGEINYLRKSFQTLEGACDDLKGSRLFLKLLEAVLQAGNRMNVGTNRGQARAFKLDTLLKLADVKGADGKTTLLHFVVQEMVRSEEDARTTSERAAEDEARKIARDETFRSKQGLKVVSGLSGELGNVRKAAAMDFDVLHGYVSKLQAGLGGVRSVLALEKQCAQLQAQGHHHRFFARMRGFLEEAGAEIGRVRRDEERALGRVKEITVYFHGDAAREEAHPLRIFVVVRDFLSTLDRVCREVSQQDRTVVGSARSFRMSAATAMANLRMYGQHARGDDDDEEESWSP

SEQ ID NO: 48405 - protein, 80 aa, Zea mays
  Coding DNA Sequence Number=SeqID_6626
MAAHRTVNRTCPVPHQTVRCKFQITPIHPPLGDFHASTSMTNGATSWQPLELEGSVAQVPPRWPQKLGRCAWPWDWGGGT

SEQ ID NO: 48406 - protein, 100 aa, Zea mays
  Coding DNA Sequence Number=SeqID_6627
MGQQLAICITKVRLKTSEVISHTRENSCVKFERILDSRVRTEPTSTTVSKRRGASLLDWSLVSLINMIIFFAIRFAVPRRGMVRVMVILLRKGEIKKDEI

SEQ ID NO: 48407 - protein, 156 aa, Zea mays
  Coding DNA Sequence Number=SeqID_6628
  Homolog annotation: Hit_ID=Q6QP51; Match level="QueryCoverage=94%, HitCoverage=75%, E-value=2e-33, Identity=49%"; Hit description =Putative growth-regulating factor 1
MMTASKKAGPSEGFDSRPEHSGFRLITDQRFEGWPLGRGRSDRSHFAPPLIDRTGKQRRLPCFDCCATHQGEADNSQVQPRRHRKLRLAQPWASASGEVSASPDPRARPLPRPQKMDSASPTPGLGLDLSLGGVSASPDLGLGPTTPQGGSSLLYP

SEQ ID NO: 48408 - protein, 519 aa, Zea mays
  Coding DNA Sequence Number=SeqID_6629
  Gene Ontology: Mol. function=nucleic acid binding; Cellular component= intracellular
  Homolog annotation: Hit_ID=Q337G3; Match level="QueryCoverage=99%, HitCoverage=92%, E-value=0.0, Identity=82%"; Hit description =Expressed protein
MVGKELVVQRNGPVDIREIAAKATLREVRQSGHTYVELRRVGKRVIFFCTICLTECFSDNVLFDHLKGNLHSRRYAEAKVTLFGPMPWPFNDGVLFFNNLREKDPLLLDSSSQSTRELALVPEPEVSGNDTEVTSRLRDGSTSSNGVKGARYGAKGRANGRTAAVSEDHMLSNHGTDGPVVIPGVLLKDVVSDLPVHLLGYGNISYRIYEASKNCRKISKIWCAWVGQGSHGFESCNTYEQSGFAIVNFSYTYDLGRKWSSEEQDLSVSAGSFFVIDDAGHRGKRMRKSFSDQEASSEESNGQNSSLQGSRQAIVTCSPVGTSNDLQVGLLSSKAARRELRKQKRIAAEKVCDLCGRPMLSGKDVATLLNCNTGKLACSSRNSSGAYHLFHTSCLLHWTILCQYEMLNDEIARKGKSNRGRKAKNAPKRSKITSIVCPECQGTGIHVNGDELEKPSISLSEVWSTYSLFCCQSLIFHSGNFLQITSIAAEHLNWLDMALADVSLQDESNRSSQSMAEET

SEQ ID NO: 48409 - protein, 177 aa, Zea mays
  Coding DNA Sequence Number=SeqID_6630
  Homolog annotation: Hit_ID=Q10N42; Match level="QueryCoverage=57%, HitCoverage=69%, E-value=2e-14, Identity=62%"; Hit description =Expressed protein
  Subcellular localization annotation: CTP_CleavageSite=40; ConfidenceScore=5.32e-01
MASQSSKTADTAAPPPEVAATGEAAPGAASSTPAQNPNAAATAVAGATDLEKKMRRAERFGMPVLMSEEEKRSSRAERFGTGSSSVKEEEKKKSRAERFGLASPSSSDEEAKKKARLERFGQSANVDKAEEEKRKARAARTQPLLPAQLDLSTLPWTRSQKYYLLGDFGEAIAFVHH

SEQ ID NO: 48410 - protein, 416 aa, Zea mays
  Coding DNA Sequence Number=SeqID_6631
  Gene Ontology: Mol. function=monooxygenase activity; Cellular component=membrane; Biological process=electron transport
  Homolog annotation: Hit_ID=Q109R8; Match level="QueryCoverage=99%, HitCoverage=91%, E-value=1e-120, Identity=56%"; Hit description =Cytochrome P450 family protein, expressed
  Pfam annotation: Domain name=p450; Domain location=59-415; Score= -71.3; E_value=1e-07; Accession=PF00067.12; Description=Cytochrome P450
MAADWAWWIGLLLGAVPLLVLAVWHSNDAGHCAAFALKRWRHHRGATRPRLPPGHMGLPFVGESLWLLWYYKFARRPGPGPDGFVDARRRRYYGGAARAGDVGVYRTHLFGSPTVLVCSPAANKFVLNSSQDGAFGIRWPAPELVGLSCLVNVEGRQHARLRGFVLAAINRPASLRAIAEVVQPRVVAALRSWADAKGTVSAATEIKKVTFENICKMFASMDPSPVTDMMDGWFAGLLAGLRAFPIDFPGTAYRHARACRRKLDAVFREEVQRRRRRREGTVDDATSRDLMSGLMEMEDEQGKKLCDDEVVDNIVSLIVAGYESTSNAMMWAVYHLAKSPHALHKLREENSVVSRDNKNGGFITLDDIPTMKYTAKKPPKPGTYQVFGGGPRVCAGNMLARLQLSIMLHHLAVGYK

SEQ ID NO: 48411 - protein, 666 aa, Zea mays
  Coding DNA Sequence Number=SeqID_6632
  Gene Ontology: Mol. function=methyltransferase activity; Cellular component=nucleus; Biological process=protein amino acid phosphorylation
  Homolog annotation: Hit_ID=Q8H8U1; Match level="QueryCoverage=89%, HitCoverage=100%, E-value=0.0, Identity=74%"; Hit description =Putative PPR repeat containing protein
  Pfam annotation: Domain name=PPR; Domain location=253-287; Score =23.6; E_value=0.0007; Accession=PF01535.11; Description=PPR repeat
  Pfam annotation: Domain name=PPR; Domain location=292-326; Score=2.2; E_value=4.1; Accession=PF01535.11; Description=PPR repeat
  Pfam annotation: Domain name=PPR; Domain location=327-361; Score =11.6; E_value=0.31; Accession=PF01535.11; Description=PPR repeat
  Pfam annotation: Domain name=PPR; Domain location=389-423; Score =29.3; E_value=1.4e-05; Accession=PF01535.11; Description=PPR repeat
  Pfam annotation: Domain name=PPR; Domain location=490-524; Score =33.7; E_value=6.2e-07; Accession=PF01535.11; Description=PPR repeat
  Pfam annotation: Domain name=PPR; Domain location=525-558; Score =11.1; E_value=0.36; Accession=PF01535.11; Description=PPR repeat
  Pfam annotation: Domain name=PPR; Domain location=561-595; Score=5.2; E_value=1.8; Accession=PF01535.11; Description=PPR repeat
  Pfam annotation: Domain name=PPR; Domain location=627-661; Score=5.3; E_value=1.7; Accession=PF01535.11; Description=PPR repeat
  Pfam annotation: Domain name=PPR; Domain location=86-120; Score=7.5; E_value=0.96; Accession=PF01535.11; Description=PPR repeat
  Pfam module annotation: Pfam domain module=PPR::PPR::PPR::PPR::PPR::PP R::PPR::PPR::PPR; Domain location=253-287::292-326::327-361::389 -423::490-524::525-558::561-595::627-661::86-120
MTWTATTWTTDANSYGTQCSVESKESFGPVAPRVDCRAGEEPGSRRALENGCGRRTSLIHCPAVKQVLEERMKLPAWLTAVPPDPRAYGHLIQLCADTGHLAAGRQLHARLVASSVTPSNFLASKLISLYSRGAHLDDARRVFDAIPRPSVFAWNAILIALSLHSADPSDAARLFAASGISPDEITLSALLKSLADSGPRLSALVAEVHAVAVQRGFGDDLFVSNGLITAYANAGDSRSARAVFDEMPRRDVVSWNSLISSYARAGWYRQCLELFQELASVHGAGGVRPNNVTVASVLHACAQLKAVDFGVRVHRLAAENGLDSDIAVWNSAVGFYAKCGRLKYARELFDGMAKKDAVSYSTMIAGYMNHGHVDMGLELFQRADVQGISIWNAVIAGLIQHGRQSDVLGLLNEMIGSGMLPNSATLSILIPSVHLFSTLLGVKQAHGYAIRNNYDQSIGVVTALIDAYSKAGFLDGSRRVFKLTDDRSEIVWTSIISAVAAHGEAAEALHLFNEMVNAGIRLDTIAFTAVLTACAHTGKVADARKIFNSMQAMFGINPVMEQYACMVSAFSRAGMLNDALELVNSMPFEPNAMVWGPLLNGAAEFCNVELGRFVFDQLFKIEPKNTGNYIVMANLYSNAGKWEEADIIRRRMWGVGLEKVPGCSWN

SEQ ID NO: 48412 - protein, 339 aa, Zea mays
  Coding DNA Sequence Number=SeqID_6633
MTKKRNRKRNVKRRKMRMRSRSPIRVMVIGGGGMRTVECLRGRLLAERVASKAAKEDADQLTKRVHPYIFISYLLQQHIPYCSTLFLVSIGSHTNRTIFSVDFDGRFGSQLDELEKKLAGEVRVRNRAERRLRRAIKKLESLKILDVELSEGSIGSLSSNGRSDHQAPEAEERNGPGSLTTRGSVLASGPSGDPDADADRESSEGSCTQVNSSSRDGSWCSVASEQSRPGSCMDLAGNTTNCGSEGSCGDHDSEREHLDASSGCGSAKSEEAFYESDDRLALSRGLVEPPPAAAGEGPRTQDNDTHAGEVRAMDHEEEEETNKLAIVLADPQPQSQGDV

SEQ ID NO: 48413 - protein, 84 aa, Zea mays
  Coding DNA Sequence Number=SeqID_6634
MACPWCSFFNVIFCAVLGWVVEEWRLRTVCVVVARFILVRSEPMFLIRGGGGYKVESKLSLGLTMGLRPPDPPFVCQNSGRGLN

SEQ ID NO: 48414 - protein, 69 aa, Zea mays
  Coding DNA Sequence Number=SeqID_6635
MDLTGRSPPRSVGVAQSPETVWDRILTLWSDCRSFGVGDRQRRRSGTGMWKVERSDRWLCSILSGFQHN

SEQ ID NO: 48415 - protein, 129 aa, Zea mays
  Coding DNA Sequence Number=SeqID_6636
  Subcellular localization annotation: CTP_CleavageSite=61; ConfidenceScore=5.66e-01
MQAAAAAAPWTTKTLPVFGNHLGNPTRFTGASSSFHSTPASFAKWRNKWDCHKISCCQNIVQSEKGARKASRERQPCQPRRAGLALLAKQEQTLKAQNNEAINKGIKHSEVCSARQSGEFSTLVLSCRN

SEQ ID NO: 48416 - protein, 195 aa, Zea mays
  Coding DNA Sequence Number=SeqID_6637
  Gene Ontology: Mol. function=carboxyl- and carbamoyltransferase activity; Cellular component=ornithine carbamoyltransferase complex; Biological process=amino acid metabolic process
  Homolog annotation: Hit_ID=Q8SA97; Match level="QueryCoverage=56%, HitCoverage=17%, E-value=2e-11, Identity=46%"; Hit description =Ornithine carbamoyltransferase
MERSLPLRRHIAWPGLQRRGLGRMCLCDVDDHLSDVEDLNNGYISEDLEIWEMVFEDQKAWTRAKPRKTANSAPPDPGLGLGLSPGRRRTPLCPTQGSDSGSAPEDGELRSARPRARTQAKPRKTANSAPPDPGLGLRLSTRRRRTPLRPTPGLGLRLGLCRTTSASPDPRTRARARPRRTDSTSASEEPPRRPT

SEQ ID NO: 48417 - protein, 248 aa, Zea mays
  Coding DNA Sequence Number=SeqID_6638
MAAKVKAELLRSWLVKSNGRAAGKMLTSYFSGSLALSWPSLLLLLIALKAELRELHLHLSRALDFVGARGSSLVERVDDVPRRVRGVVGLGVHWGATMALLIEELRTSYDLEGVIGPPSALPDNGLIEMLDHFDNTASHVVHRLYVDDIIHNTPDPAFPYSRTNLTMELVRSMMGIIVCTSLMPWPPHGPSMGDFNAAANVTLGAVFREGNNYAFVIPRFVFVHDFACDLAVMMMRMGSRPDSRLEGG

SEQ ID NO: 48418 - protein, 108 aa, Zea mays
  Coding DNA Sequence Number=SeqID_6639
MGNSRLEDPHWFDQEPNEVGVKPNEEEDPNELVDIDEPWTSEPLIHGVPDPETPIHEALALVAHALEAPILEDPSLEDPMLEHPFTHDIWRRVIHYISGLTLRFTCMF

SEQ ID NO: 48419 - protein, 134 aa, Zea mays
  Coding DNA Sequence Number=SeqID_6640
MAQRHISLSEGKLDSQGLPVCLLKHGVTPRPVLGDLEGVCEGSSLSCGSSDPHVQNLSMPVFGLRGSIGPVLEQGTIPRLAALLGKVGSKGLACSVPCHVDRANHMGICLETLAEGTPIMGYQQWPPGPPRERL

SEQ ID NO: 48420 - protein, 175 aa, Zea mays
  Coding DNA Sequence Number=SeqID_6641
MDMWSSQFKRQFAHLEENYSEKEKEVLHCKESMLLYQENLRTLIKSLNNWMPSNFYVGSWPELSEIGPGRHGVGAGVARQVRTAGKVTNCRSDGGRAALARNIKQQQGGGTHTRLEVEAMRRAPSTGWWLGSGRRSRTTPPDTVGASLMSSADGERSLATSPPPEVGYSLAKQQS

SEQ ID NO: 48421 - protein, 71 aa, Zea mays
  Coding DNA Sequence Number=SeqID_6642
  Homolog annotation: Hit_ID=Q1RVF4; Match level="QueryCoverage=93%, HitCoverage=35%, E-value=1e-13, Identity=47%"; Hit description =Dirigent-like protein
MAGVMEGASITTSFDGLHNLLAAKISLRHRGYRGSVSVLGGSHNTKPSVYPVVGGTGDFLYTEGFYTVNQL

SEQ ID NO: 48422 - protein, 166 aa, Zea mays
  Coding DNA Sequence Number=SeqID_6643
  Gene Ontology: Cellular component=nucleus; Biological process =regulation of progression through cell cycle
  Homolog annotation: Hit_ID=Q6AV38; Match level="QueryCoverage=73%, HitCoverage=34%, E-value=4e-16, Identity=41%"; Hit description =Putative Cyclin
MGERGAEEDGSGGSSLSLMCLEDGADLDAGGSAESADDGEPAVVAHSDAGEDQEEEYMDYLVSKESSFCCSPSSSPVSSDAGAETRPSSTASSSDEWFRCARHATVAWVLEPPDLQTRAYFGFSHRAAYLAVSYMDRFCLRRCMDVRHPYIPSQPRSISLTAPPIH

SEQ ID NO: 48423 - protein, 179 aa, Zea mays
  Coding DNA Sequence Number=SeqID_6644
  Gene Ontology: Mol. function=catalytic activity; Cellular component =peroxisome; Biological process=metabolic process
  Homolog annotation: Hit_ID=Q6YYZ2; Match level="QueryCoverage=66%, HitCoverage=20%, E-value=1e-51, Identity=82%"; Hit description =Putative 4-coumarate--CoA ligase 4CL2
MDATEQKPALGNWGMGARSCVRYLNHVDPCAINGGWLRTGDIAYFDFDGYLYIVGRLKEVIKYKGFQIAPADLEAVLIEHPGIVDVAVTSTEDEEAGEVPVAFVVRKSGSGLSCTQVMEYVAKQVSPYKKVRKVVFVESIPKSPAGKVLRRLLRESLAASAVAGPTSYSESNSMRHSRL

SEQ ID NO: 48424 - protein, 96 aa, Zea mays
  Coding DNA Sequence Number=SeqID_6645
  Subcellular localization annotation: CTP_CleavageSite=54; ConfidenceScore=5.39e-01
MEGWSARDGGARGGRSSARQLASWSGAKPARLRGARTQDRAPMPQFPSAGFCSVASMSAGTLPVCGIWLASGNGLWGWLARASGHHSRDLSAVLEA

SEQ ID NO: 48425 - protein, 465 aa, Zea mays
  Coding DNA Sequence Number=SeqID_6646
  Gene Ontology: Mol. function=catalytic activity; Cellular component =peroxisome; Biological process=metabolic process
  Homolog annotation: Hit_ID=Q9FRQ0; Match level="QueryCoverage=84%, HitCoverage=69%, E-value=1e-106, Identity=55%"; Hit description =Putative 4-coumarate CoA ligase
  Pfam annotation: Domain name=AMP-binding; Domain location=72-454; Score=158.8; E_value=1.4e-44; Accession=PF00501.18; Description=AMP -binding enzyme
  Subcellular localization annotation: CTP_CleavageSite=12; ConfidenceScore=5.10e-01
MQDAVATHGPANAAAGATFYCAAAGVYASTHPPVALPSDPSLSLVPHIFARLPAARPDAPALVDAATAEALSRADLRRLVSALAAGLRRRRGLREGDVVLLALPNSIAFPVAFLAVLAAGSIATTMSPFSAPAEIAARVRDTSPALVFATLDNVGKLPPLRVPVVLVPDAFHLADEGAPEFAPFRELLLLDSEPLPGPSVGQDDAAAILYSSGTGGRSKGVVLTHRNLIATVELFVHFEASQYAAPACDNVYLAALPMFHVYGLSLFAVGLLSLGSTVVVMKRFDAGEAVKTIRRFKVTHFPVVPPIMAALVHTTKPAAMPLECLVQVSTGAAPSSRRLIDDFVKAFPHVDLIQGYGMTESAAVGTRGFNTSKHKKYGSVGLLAPNMHARIVHVETGCSLPPGSCGELWLHGPAIMKATPLHCLPPLRATRGGILEGMRDRPTEWGYEFAKEFANQGLPGNNVLP

SEQ ID NO: 48426 - protein, 810 aa, Zea mays
  Coding DNA Sequence Number=SeqID_6647
  Gene Ontology: Mol. function=amylo-alpha-1,6-glucosidase activity; Cellular component=membrane; Biological process=carbohydrate metabolic process
  Homolog annotation: Hit_ID=Q5JLH8; Match level="QueryCoverage=88%, HitCoverage=92%, E-value=0.0, Identity=59%"; Hit description =Putative ERD4 protein
  Pfam annotation: Domain name=DUF221; Domain location=304-731; Score =612.6; E_value=3.4e-181; Accession=PF02714.6; Description=Domain of unknown function DUF221
MATLEDLGVSAFINILGAFVFLLLFAVLRIQPVNDRVYFPKLYLAHKRHQHDHAARSAFRRFVNLNLCTYVTFLSWVPGALRMSEPDLVAHAGLDSAVYLRIYTLGLKIFLPITTLALLVLIPVNVSGGTLLDLRKEVVFSDIDKLSISNVSPGSNRFFIHLLMAYVFTFWVCFMLYKEYSNVAFMRLHFLASQKRCADHFTVIVRNIPRVSSHSTSETVDEFFRRNHPDHYLGHQPVYNANRYAKLVKQKERLQNWLDYYELKFERHPERRPTRRTGCLGFCGREVDQIDYYRARISELERRMTSERQKILNDPKAVMPVSFVTFDSRWGAAVCAQTQQSKNPTQWLTDWAPEPRDVYWQNLAIPFFSLSIRRFLMSVAVFALVFFYMIPIAFVQSLANLEGLEKVAPFLKPVIEAHVVKSFLQGFLPGLALKIFLYILPTVLLIMSKVEGYVSLSSLERRTASKYYYFMLVNVFLGSIIAGTAFEQLYSFLHQPPTQIPRTIGVAIPMKATFFMTYVMVDGWAGIANEILRVKALVIYHLKNMFIVKTERDRDRAMDPGSIGLGENLPSLQLYFLLGLVYAVVTPLLLPFIIVFFAFAFLVYRHQIINVYNQEYESAAAFWPQVHSRIIASLLISHVTLFGLMSTKEAAYSTPLLIFLPLLTIWFHKYCKSRFEPAFRKYPLEEAMAKDTMEHASEPNLNLESFLANAYLHPIFRLFEEAGKEEETVEVRIDKAEKQQHRHEEDEAHARSSSQYREEETHFRSTHETHYHHEESHVSRSTQYHEGIHVRSDTDSPSPPHFVYHYDIQQ

SEQ ID NO: 48427 - protein, 75 aa, Zea mays
  Coding DNA Sequence Number=SeqID_6648
MGYIGLMLLLHLSVILAEGERTSELAATVECKLCRFVEALALLGQDAEMAPPRGEFRREPRRTPKSYAQSRTVGI

SEQ ID NO: 48428 - protein, 237 aa, Zea mays
  Coding DNA Sequence Number=SeqID_6649
MACCPTPSRGGAGETDRGAVHPAAAAVRNVRVGAGGRPRGCHGAAGEVAERHGVVVVESTLQTRYNDAVVEEALEPIAPAPGRSVVGPPAARYMNGEWRRQRVDVGGLQATWPRPTKGVRTWHLHDAVVGAHAKVVCGADSRTAPVVRSASLVAITRCQQSAVEKWDLRRSKNTGIGWRKQQTVVSVAIFSLQMPFPLAKTRLIYYLHLVWWVGATRSNRRLYTWLKLQINPITQLE

SEQ ID NO: 48429 - protein, 64 aa, Zea mays
  Coding DNA Sequence Number=SeqID_6650
NEEAIQLKERYRATVGKELEDIERRHCDMTSILHALGISVEGGELQIICTKSTAEIGGDNDTAM

SEQ ID NO: 48430 - protein, 293 aa, Zea mays
  Coding DNA Sequence Number=SeqID_6651
  Gene Ontology: Mol. function=sequence-specific DNA binding; Cellular component=nucleus; Biological process=regulation of transcription, DNA-dependent
  Homolog annotation: Hit_ID=Q7Y023; Match level="QueryCoverage=64%, HitCoverage=63%, E-value=4e-31, Identity=44%"; Hit description=MADS -box transcription factor 14
  Pfam annotation: Domain name=K-box; Domain location=30-128; Score =133.6; E_value=5.6e-37; Accession=PF01486.8; Description=K-box region
MSKTTSYAKAYLRPRPVRPLASAMRQRYIVKTMYLEKLERLTGNWCHEYRKLKAKVETIQKCQKHLMGEDLETLNLKELQQLEQQLESSLKHIRTRKSQLMVESISALQRKEKSLQEENKVLQKEVGRRCCNSTSPHPCSTGPLFSHEPNQIYRKRYSCMQLAEKQKDQRQQVQRDQTQQQTSSSSTSFMLREAAPTTNVSIFPVAAGGRVVEGAAAQPQARVGLPPWMLSHPELLKVNGGCAKACGKKSGMAIRIAEVRRQGDRFILVKLVLGDLVLNVISVYAPKVATMRV

SEQ ID NO: 48431 - protein, 236 aa, Zea mays
  Coding DNA Sequence Number=SeqID_6652
  Gene Ontology: Mol. function=sequence-specific DNA binding; Cellular component=nucleus; Biological process=regulation of transcription, DNA-dependent
  Homolog annotation: Hit_ID=Q5K6A7; Match level="QueryCoverage=23%, HitCoverage=37%, E-value=9e-23, Identity=96%"; Hit description=MADS box transcription factor
  Pfam annotation: Domain name=SRF-TF; Domain location=9-59; Score =107.8; E_value=3.2e-29; Accession=PF00319.9; Description=SRF-type transcription factor (DNA-binding and dimerisation domain)
MGRGKVQLKRIENKINRQVTFSKRRSGLLKKAHEISVLCDAEVALIIFSTKGKLYEDERLKPDENPSLPSLVVSDRQSTYLDAPGRRQRRCPHYGLATIASAVRCPLGCRIRSPGHRIQRPRLAPLPPSWMWRKKQDEGALPLSPCLSPKHGHWPSLLPPKQTTPLSPTQMTREHDPSPPYRLHHKNTRKSPAAIPASCMAMPTASNSSMPAWWEQLRGSGPCIYATHKRVCYVSF

SEQ ID NO: 48432 - protein, 236 aa, Zea mays
  Coding DNA Sequence Number=SeqID_6653
  Gene Ontology: Mol. function=protein binding
  Homolog annotation: Hit_ID=UPI000060F44B; Match level="QueryCoverage =77%, HitCoverage=70%, E-value=5e-17, Identity=32%"; Hit description =UPI000060F44B related cluster
  Pfam annotation: Domain name=Hep_59; Domain location=96-186; Score =132.7; E_value=1e-36; Accession=PF07052.2; Description =Hepatocellular carcinoma-associated anti
MPRNFRKRGIEQDTDDRSDDEDTRRIALEEIKYMQKLRERKLGIPADLAAASTNGSSARGLLGTGAAVAGEAEKEDLVLQDTFAQETAVTIEDPNMLRYVETELAKKRGKMVDVGHKEEMDHVDELYTVPDHLKVKKKNSEESSTQWTTGIAEVQLPIEYKLRNIEETEAAKKLLQEKRLARKPKPDANIPSSYSADYFHRGKEYDEKLRRGLLPAPFQDYFDEKLEGTLLIIHMI

SEQ ID NO: 48433 - protein, 269 aa, Zea mays
  Coding DNA Sequence Number=SeqID_6654
  Gene Ontology: Mol. function=hydrolase activity, hydrolyzing O -glycosyl compounds; Biological process=carbohydrate metabolic process
  Homolog annotation: Hit_ID=Q7Y157; Match level="QueryCoverage=51%, HitCoverage=30%, E-value=3e-29, Identity=61%"; Hit description =Putative glucanase
  Pfam annotation: Domain name=X8; Domain location=94-159; Score=25.9; E_value=8.9e-08; Accession=PF07983.3; Description=X8 domain
  Subcellular localization annotation: CTP_CleavageSite=75; ConfidenceScore=5.34e-01
PCVERLIAGPQFVRPVGGHDSRSSPVLAMLALGVSGVPVIRETSSPPTTSCSTTTTATTPTVTATRACSGDRWRRARSAWAAERGPAGCRPGSAGRAARPRRLPPSSQRRLLPAEQLPALASYAYNDYYQRMASTGATCSFNGTATTTTNDPSSGSCVFAGSSNSSVPVGASPPTSLSPPTGFTPPVGSSPPSSSEFGPPAAGTTPPAGGGLGPGFGTPPGSFNGTGSFGPSGTLNPYNGVSRGLPRAGLFTALSAAAVAVLLVSVDAM

SEQ ID NO: 48434 - protein, 254 aa, Zea mays
  Coding DNA Sequence Number=SeqID_6655
  Homolog annotation: Hit_ID=Q7XI49; Match level="QueryCoverage=29%, HitCoverage=34%, E-value=5e-22, Identity=62%"; Hit description =Putative SC35-like splicing factor SCL30a
  Pfam annotation: Domain name=RRM_1; Domain location=33-91; Score =39.6; E_value=1.1e-08; Accession=PF00076.12; Description=RNA recognition motif. (a.k.a. RRM, RBD, or
MALMYEQIEFVNIFTVLSSYSEGFVMHCALSYHLREPFGRFGRVKDIYLPKDYYTQQFRGFGFVEYVDLEDASNAKHYMDGQIVLGRKLRVVYAQDVRKSPSAMRLRAIERSGGGPSCVRRSRSRSPGYHDSPRGRSRSRSRSYSAAQHYSRYDLLPSYCPRLLDLERDRHQLTADQRVQAPVLAGLLPGRDLLLMASEENTGCIPYLWVTRLLLALEGTYFCKPLGSLISLVDTFKYGLRIFVESSFYGIMPF

SEQ ID NO: 48435 - protein, 197 aa, Zea mays
  Coding DNA Sequence Number=SeqID_6656
  Homolog annotation: Hit_ID=Q8LBJ2; Match level="QueryCoverage=28%, HitCoverage=14%, E-value=2e-11, Identity=48%"; Hit description =Contains similarity to regulatory protein RecX
MDCHHHFFPCCSKKARENNSKRDRPWECTAALTSTGLALFDLLSAGEDLSRGRGDGDMSRWCPVPQVNRKSSWVIAVSDSSAHRATAAGRTKVAGNPDNYAWLEAINTPVNINMHTGMYTGRIVQSEESGWRVLSLQLPDNGIGHSPVEPSVLKPPHHARTSALQGQALPTLPLFGRLSKQTIHGSFGRLIIVGTTI

SEQ ID NO: 48436 - protein, 154 aa, Zea mays
  Coding DNA Sequence Number=SeqID_6657
  Homolog annotation: Hit_ID=Q2QLK4; Match level="QueryCoverage=77%, HitCoverage=14%, E-value=4e-37, Identity=64%"; Hit description =Pentatricopeptide, putative, expressed
MVFYSDPFCAQGWQEAARSGYTVEEDGRRRFEVGWGRAIERVEESPTTMAKAARPWMTQRWMTPGTTVTALSTTLAWFHRQVLTLGTGPETIDIVTGWGRRSRVTASSLVRQSIQKLLNLFESPFFTTRGNTGCFVGCGEPLNKYPYVGRIHLL

SEQ ID NO: 48437 - protein, 374 aa, Zea mays
  Coding DNA Sequence Number=SeqID_6658
  Gene Ontology: Mol. function=cellulose synthase (UDP-forming) activity; Cellular component=membrane; Biological process=cellulose biosynthetic process
  Homolog annotation: Hit_ID=Q944E3; Match level="QueryCoverage=52%, HitCoverage=35%, E-value=3e-61, Identity=71%"; Hit description =Cellulose synthase-like protein OsCslE2
MEDLARATRLSSVMLSISYAVNCNVSPIVYAFKNCFDNALNATVSELNFKTIVDGLGVVLYQYPFNVPAYYALILRSLTILEDLALYADPDFKVLAASYPYFAKRLLTDPNPYLRDALIELVFKDGKFRQATKKIADAKLAKDFQAVLKEFQKAQRLATEREAAYAPFISQAVLPQRHGPYLTRTDSGSAQEMDRRLSPDLPLKVQPVSASLVESLQCGDTAVEWWNTQRMWLFRRITSYLLATIDTICRMLGVTESGFTLTAKVTDPQALERYKKGIMLFGSFSTMFVIITTVALLNLACMMLGVAKVLLCKGAVSLGAMFVQTVLCALIVAINFPVYEAMFVRKDSGRLPASVSVVSLCIVLPFCILLPTKL

SEQ ID NO: 48438 - protein, 127 aa, Zea mays
  Coding DNA Sequence Number=SeqID_6659
MGKGAMVDHHLSRHLCSGHSLSLGLATMMEEPRGLGAQAATTRLEGLPQVAGSSSATVEKSARMEVAIAAVAVVAMGSRSCRSGSTCYGASVRLPSSLASFCTRYVAGFCSHFLYPRAILHSSPSEP

SEQ ID NO: 48439 - protein, 464 aa, Zea mays
  Coding DNA Sequence Number=SeqID_6660
  Gene Ontology: Mol. function=guanyl-nucleotide exchange factor activity
  Homolog annotation: Hit_ID=Q93ZY2; Match level="QueryCoverage=63%, HitCoverage=68%, E-value=1e-35, Identity=44%"; Hit description=Rop guanine nucleotide exchange factor 1
  Pfam annotation: Domain name=DUF315; Domain location=25-408; Score =372.5; E_value=6.7e-109; Accession=PF03759.4; Description=Domain of unknown function (DUF315)
MKALACCRRRPQDLSIDMDQEPDRVMTYNGLETCIINCSAYDDDSGISATTCGDGCVTADSLDDEVSSCFSKDASGSSFSSHCLSKQEEHSLDELGTPIAIHLLPFKAKKPITYTLSASDIENMKKKFAKLLLGYDTSGGARGVCAALALSNGIINLSELWKLEPLCEDKKIRWRKEMDWLMSPTTYIVELVPRKQSGADGCTFEIMTPKARSDVHVNLPALQKLDTMLIEVMDSMIDTEFWYEESGSRADGPSGRASLGEDLYQAITTEYIPIEEIFVSLSLKTEHSVLETMNQLEGAMFAWNQRILEERSKRSPGRHSWSFMKDSSSELDKMSACIERVDTLVQLLKARYPNLPPTFIDVLKVQYNVDVGNAIVEAYSRVLVGVAFSILSRVAEILLEDDLVKRPNTPMASLKFDLSSDVYLAGITETPPGHVRRSLMDQISMVDGRFNAAVKKKGAKQLRW

SEQ ID NO: 48440 - protein, 34 aa, Zea mays
  Coding DNA Sequence Number=SeqID_6661
MARVHILESLFFSRVIVFVLLLMVLSAGGLGLLI

SEQ ID NO: 48441 - protein, 109 aa, Zea mays
  Coding DNA Sequence Number=SeqID_6662
MAGSKDNSHISSSNIIEPTMENLSAEEIQKLEDVRKKLLAEIDVKFLADFKVLKVQNKPIKTSMLGFKRKEQKKSKRTLVWRTRQCPVHHRTVSGAPPNSVRCTRVVQV

SEQ ID NO: 48442 - protein, 210 aa, Zea mays
  Coding DNA Sequence Number=SeqID_6663
MEIGAVAAMRYVKDGIKAAKEILPWPEKPPPELHEQWAPSHIVPGMEIAGDGHRKRERHQWQEMLTGKGSIAYASFPLSATARARGIRGLLGAARGIRGWGHRSVSVALMQQRARTARARGIRGWGAESEDGWAQRVVAFHRQSGCEISGHRGGCGRTGGAQRGLSGGDVAADASGGRGDAGRGENRGSEGARPGGGTVGGGRPRSAHMG

SEQ ID NO: 48443 - protein, 181 aa, Zea mays
  Coding DNA Sequence Number=SeqID_6664
MATGQPVRLVLDASLLLDPSSTREAAVVALRPGVEELLRRLRYSNLTVAICYAEGMPTNEVLYLSTLLLHASEVVSSKVHIDSICFLLPYLPIMAHGECWELIHFTGPANECSIEVPGVLNVQRLQQLLLTLATLIKRICGSVTSVTVAVYGDEDKPALIIFTEMWFCDCCRVLRLYFNRI

SEQ ID NO: 48444 - protein, 70 aa, Zea mays
  Coding DNA Sequence Number=SeqID_6665
  Gene Ontology: Mol. function=protein serine/threonine kinase activity; Cellular component=nucleus; Biological process=protein amino acid phosphorylation
  Homolog annotation: Hit_ID=Q40734; Match level="QueryCoverage=94%, HitCoverage=21%, E-value=6e-18, Identity=70%"; Hit description =Protein cdc2 kinase
MALKIADLGLSRAITVPVNKYTHEILTLWYRAPDVLLGATHYSTPVDICKSKGILAAQTSKSTELAAFLA

SEQ ID NO: 48445 - protein, 101 aa, Zea mays
  Coding DNA Sequence Number=SeqID_6666
  Gene Ontology: Mol. function=oxidoreductase activity; Cellular component=fatty acid synthase complex; Biological process=metabolic process
  Homolog annotation: Hit_ID=Q0S4E2; Match level="QueryCoverage=97%, HitCoverage=30%, E-value=6e-08, Identity=40%"; Hit description =Possible MaoC family dehydratase
MAGKAAILEVETLTCLEGSGEVLCMNRSTIYLRGAGGFSNSSQPFSYATYPSNEVSNVTFSDSTPFAVYEDRIQKSQALLCGLSGYFHPLHSDPTFAQAAG

SEQ ID NO: 48446 - protein, 132 aa, Zea mays
  Coding DNA Sequence Number=SeqID_6667
MEPAAVKGISCRFLHHVYPGETLVTEMWLEGQSRRVYYRTKAKERGRAVLSGYVQTASRSSSGTQDPYRALYCRGRVGRAVEVTAAAIACTSPCVMSARYGPGSHPEALHYTYCGGDWGSSLFSSAVREDGR

SEQ ID NO: 48447 - protein, 215 aa, Zea mays
  Coding DNA Sequence Number=SeqID_6668
  Homolog annotation: Hit_ID=Q8GW13; Match level="QueryCoverage=23%, HitCoverage=41%, E-value=1e-08, Identity=56%"; Hit description =Putative c-myc binding protein
MGCARFGRRGSALLVSFIGVAALRQLFGLDLGREPITRPSSEVPSISQRSSIFEICDWNHIRFRICVIKPIVQINKRSSKNEHNSHRNDLLSPWYRPLSRPLNPPHLPCSLLHLLSFLEAGCRDQDCHFVNDKPSSAVEFVQQKLGGPSISDYEKLKAEKLDLQLKYDKLLETHKETCRQIASPIIWVHIVIYVNYCRMGILVTQDPVVIQLPLL

SEQ ID NO: 48448 - protein, 807 aa, Zea mays
  Coding DNA Sequence Number=SeqID_6669
  Gene Ontology: Mol. function=solute:hydrogen antiporter activity; Cellular component=integral to membrane; Biological process =regulation of pH
  Homolog annotation: Hit_ID=Q6Z3I1; Match level="QueryCoverage=98%, HitCoverage=99%, E-value=0.0, Identity=52%"; Hit description =Putative kef-type K+ transport systems, membrane components
  Pfam annotation: Domain name=Na_H_Exchanger; Domain location=25-423; Score=44.8; E_value=3e-10; Accession=PF00999.11; Description =Sodiumhydrogen exchanger family
  Pfam annotation: Domain name=NnrU; Domain location=52-205; Score= -115.8; E_value=0.074; Accession=PF07298.2; Description=NnrU protein
  Pfam module annotation: Pfam domain module=Na_H_Exchanger::NnrU; Domain location=25-423::52-205
MARSIDCATDSSVKNVALDTLFLIVLQAAVVIALGKFIHLGLRRHNLPSATSQIIAGIVVGSLGLHDVIVHVDVENAEDTYGRYVSEARIFYMFYVGLEADVAALWNDMRRATIFTYASVATCLLLAAFVSGGMYGSMMHTPVRSPELLAAVLMLSIADSASVDVTRMASEMGLAATPSGRLVVATAIATNIICIVGEGVFSCMKLASSRTPDYSAPQRLGLGILALIKVGISVLLLRPLVAFINRRNAGRHRVGNWELVLLLVAVSWIGNFPQHVGFDGMPVSLLLGLAFPREGPVARSIIDTLAYPLHALALPFYFGAMGMRLNFSAMSGAILVPAILLTLLGLIGKCAGTIAAARFLKMPTADALRLGVLLNIKGHVNMIDMSFASSEGIWAEQALMAMVVGSMISTIIAGPVFAVVFRKEKEAYEGSHQALEHMATDQELRMIACVHGARGTPGMLSLLELLASKPRAQPTIHVLHFFDVAGKHDGPRLYHQSVQDSEHKHMSRRKDATTQVNWAVDVFTFATGLVIRQIDAGDRGSAVNAKAIRCWTEDVRAGILVIPYHKEQHYDGTMVCRREERRQLNLEVLERAPCTTAILADRPFRRSGTSFQLPTKISTSTEAAGSQGDEKVTTHVAAVFLGGPDDREAVALACRLAKNESVSLTVVRFVLRESTDDRVATTSADIDGEVSMVVDDPDEECVSEFQREYVAKERAAYAEKAVTGPMDVVEALRGMAGAYALVVAGRGGRQPAELVVGLEGWAECAEIGPVGEILASDESLEMGSVLVVHQKIVPPFHLDLPPPAPAN

SEQ ID NO: 48449 - protein, 269 aa, Zea mays
  Coding DNA Sequence Number=SeqID_6670
  Homolog annotation: Hit_ID=Q2RAS4; Match level="QueryCoverage=64%, HitCoverage=83%, E-value=8e-53, Identity=62%"; Hit description =Uncharacterised protein family containing protein, expressed
  Pfam annotation: Domain name=UPF0131; Domain location=16-129; Score= -8.9; E_value=0.017; Accession=PF03674.5; Description=Uncharacterised protein family (UPF0131)
  Subcellular localization annotation: CTP_CleavageSite=58; ConfidenceScore=5.40e-01
MAEATPTMVFVYGTLKRGFPNHSLLVASATPFVGAASTAGPASLIIGPYSVPFLLPTPASASSGRVVSGELYAPSPAALAELDALEASASPPHQTRCSLSTGLGTHIGVYERRPITVVVDGSGEVVQAEAYFAHPSYAEALWRRCGGEEAEIGEYTVDHAGEYVPKSERLADAAGLIDAIHRRMFWEAGRPGDGGKAKETGKYEMAAELERNPIMGAATAVCGGAVDGRRSQHRLSKSHLKKMKNRLFELENTIVTSVGIQWHRTLPEE

SEQ ID NO: 48450 - protein, 93 aa, Zea mays
  Coding DNA Sequence Number=SeqID_6671
  Pfam annotation: Domain name=SLR1-BP; Domain location=1-76; Score =0.7; E_value=0.0008; Accession=PF07333.3; Description=S locus -related glycoprotein 1 binding
MRTRHLLLVATPLLLLLAVSSDLTAKVSARCPDPESVTLYPGKPCNRQQCKTDCASKYHGGVGVCLNPKGCYCEYCLDRPSAHAASPLRPRHD

SEQ ID NO: 48451 - protein, 180 aa, Zea mays
  Coding DNA Sequence Number=SeqID_6672
MDLDRAGPAQFPALNTTPPPPGSTYTTATKTQQQPYHTTTIGKHVHNSHQDRAATTPHTTTGVEQKADDPDETCTVQTPLDPPQHGYQFDERHHHTMDQDIRNRADRWISRQNCELNGAVKFSMSYLLLFERSLAATQIKANPLDRPKCTPIAPVAPSELVSPCEAPEPPGSWQLVGEPA

SEQ ID NO: 48452 - protein, 280 aa, Zea mays
  Coding DNA Sequence Number=SeqID_6673
  Homolog annotation: Hit_ID=Q8S7W2; Match level="QueryCoverage=19%, HitCoverage=28%, E-value=1e-21, Identity=92%"; Hit description =Putative endonuclease
KTLSKASFAERQHSVKGLFAERLTLPSAALGKAFFAERAQVHVLPLAAGAPRIPPASPSPRQSRRSLSPAAISVSTAASSPSPATISASPAITVSVPSISPPPHNTPVSHAIRPRPSRLDLIGLALVAGAKGKGEEEPGGVRSSKMLQLLMAAAFSAAPLTLYVPPVRSLSLFVEAMEVVCRDCSPYSHDVVAHFRVGFSRVLAGLAQPISGRLRWIDLKATRLRYPNLSSYRRVHTVGFQDGTWILLNFLPMEMSGEGQIQGAAKSNEVDISEWRQSSK

SEQ ID NO: 48453 - protein, 293 aa, Zea mays
  Coding DNA Sequence Number=SeqID_6674
  Gene Ontology: Mol. function=microtubule motor activity; Cellular component=microtubule associated complex; Biological process =microtubule-based movement
  Homolog annotation: Hit_ID=Q6YZ52; Match level="QueryCoverage=85%, HitCoverage=47%, E-value=1e-112, Identity=82%"; Hit description =Kinesin motor protein 1-like
  Pfam annotation: Domain name=Kinesin; Domain location=80-288; Score =101.5; E_value=2.5e-27; Accession=PF00225.13; Description=Kinesin motor domain
  Subcellular localization annotation: CTP_CleavageSite=39; ConfidenceScore=5.43e-01
MASRPTSRQRKAGHASAAAGPKGLHHHQQLPPQSGSPTSTATTSSSRLTPELSLDGPASPLFAGLDEDPAPKENVTVTVRFRPLSPREIRQGEEVAWYADGDTVVRSEQNPSVAYAYDRVFAPTTTTRHVYDVAAQHVVSGAMEGVNGTIFAYGVTSSGKTHTMHGDQRSPGIIPLSVKDAFSIIQETPNREFLLRVSYLEIYNEVVNDLLNPAGQNLRIREDPQGTFVEGIKEEVVLSPAHALSLIAAGEGLNFHVKNGLTARHRTTESMALGKVSFQVPEKYKLLESSETD

SEQ ID NO: 48454 - protein, 507 aa, Zea mays
  Coding DNA Sequence Number=SeqID_6675
  Gene Ontology: Mol. function=microtubule motor activity; Cellular component=microtubule associated complex; Biological process =microtubule-based movement
  Homolog annotation: Hit_ID=Q9C7B9; Match level="QueryCoverage=85%, HitCoverage=48%, E-value=1e-117, Identity=54%"; Hit description =Kinesin heavy chain, putative; 55116-47986
  Pfam annotation: Domain name=Kinesin; Domain location=2-156; Score= -34.4; E_value=5.1e-12; Accession=PF00225.13; Description=Kinesin motor domain
MVLERGRGRLGRRGRQWQVRDEGEHRHVGSTNFNLLSSRSHTIFTLTIESSPCGESNEGEAVTFSQLNLIDLAGSESSRAETTGVRRKEGSYINKSLLTLGTVISKLTDGKATHIPYRDSKLTRLLQSSLSGQGRVSIIDEKSLIKKYQTEIRRLKEELEQLKMGIITGTPLKDTEEDNIILWKQKLEDGNVKLQSRLEQEEEAKAALLARIQRLTKLILVSTKATPASRFSPHPGPRRRHSFGEEELAYLPYRRRDIMIDNESNELLLPVEGFGVSLEDSSKEEKKNRKGLLNWFKLRKRDGASILTSSEGDKSSLTKSTAPSTPIGESVNFPAEPRISNSLAGENVSSDLFSIGHGEFPSGSIHGEETLSASGKTMDHVDLLREQLKILSGEVAFNTSALKRLTEEAGRSPKNEKIQMEMKKKTDEIKGKQQQIASLEREIAHATLGTQGKVDTLEHSPSYHELLEQLNEKSLELEQQQQLRLLSQASWGSLYVLAPPEVSVGYV

SEQ ID NO: 48455 - protein, 84 aa, Zea mays
  Coding DNA Sequence Number=SeqID_6676
MEWWGGGGAPGAGAVRQWALDGAVERRPAEARTAAGPGGGRPWGWGLGLGNCRRPARVGLGICGRHWRWEAAGLWVLIPLAEQG

SEQ ID NO: 48456 - protein, 261 aa, Zea mays
  Coding DNA Sequence Number=SeqID_6677
MKANDSRHIQLCQYCTAVVGLDRVGSNLSGTIIRGTLKTPNSQLSKSDRQSGLAKGATANSAPPDPRARTRAKTRKTANSAPPDPRARTRAKTRKTANSAPPDPRARTRAKTRKTANSAPPDPRARTRAKTRKTANSAPPDPRARTRAKTRKTANSAPPDPRARTRAKTRKTANSAPPDPRARTRAKTRKTTKLRLARPQGSDSALASAERLPTRPTPGLGLRPGLGRTTSASPDPLARARPRQQKADSTSASEETPRRPA

SEQ ID NO: 48457 - protein, 86 aa, Zea mays
  Coding DNA Sequence Number=SeqID_6678
MPPGRKGIRSIREPPPTGKYATGNAWLLVAKHFDQELNACGVLKFLRLAQTVNIESEKSHYVRVQTSSASVHKGGRLRSLQADANL

SEQ ID NO: 48458 - protein, 63 aa, Zea mays
  Coding DNA Sequence Number=SeqID_6679
METSLARALELGAMDWAWRPGAKRQGAARRAQGRGSGEHHGSSLQGRNAQIFLTPDFSEKWVE

SEQ ID NO: 48459 - protein, 207 aa, Zea mays
  Coding DNA Sequence Number=SeqID_6680
MQQQQEEEAAGGAGLQLQTRGKEEDEEEPVLATWDCGSPLYDSFEVASLHYVLEKHTMILPFPDAAAGSRSRRRTQQRRHHRGGHRAAMAPDVAKTGNRRVGAGAARRTWGWWGSKAAAAIFRAVTLLFACPVLALGKAWKTLDKASFAKCISMPSVPPSANEADCRILMWIYDTISSDLQQSLMMHRNTWCYLEDEFLGQESRALT

SEQ ID NO: 48460 - protein, 119 aa, Zea mays
  Coding DNA Sequence Number=SeqID_6681
MESPGGYFTSLLNHDGADVFGSDSNLEVDNEVIELAEAKAEFREKQGKAFFIFHVSMILRHEPKWAFRESKNKDQHKDPKLKDLVASKLKAPKRNSCDTKLKALGGNFIRMMQRWNRAA

SEQ ID NO: 48461 - protein, 146 aa, Zea mays
  Coding DNA Sequence Number=SeqID_6682
MGQSPEGESAVQWMGASVMWQCEGRRSSVWGARCSGGPSRSGATEGLLPTCVDRVVSAFGKGVAPTCGVTAVPGKGAASASGNTATPPCGMEQHNRVGMEQRWRVGDGKMRWDVGREVNGEVGRGICRAGRVKEIYTLEKSLDAQE

SEQ ID NO: 48462 - protein, 238 aa, Zea mays
  Coding DNA Sequence Number=SeqID_6683
MELRTFANNMGYNDDCTIFWGGKMTPLKCIPNTSEIHVVRTIMDNFGNAHAQTRATGLRMLDIIKCVAYTNIKGLVLLKELKEQGGLEDQSHNMDLSQFEKEVIEFHSDLEEKAGMLYALAKDFIESQKLVETLNKEKVETLMIVESKEKIIYELKAKTRNIMEENMEVVSKLKEQLVKEKERLAQEENKGTTLQEELNAMKSKLDLCYTLAFTSVPLVWSWCSFCHYIYNILSSTPS

SEQ ID NO: 48463 - protein, 570 aa, Zea mays
  Coding DNA Sequence Number=SeqID_6684
  Gene Ontology: Mol. function=binding; Cellular component =intracellular; Biological process=protein amino acid phosphorylation
  Homolog annotation: Hit_ID=Q9LT48; Match level="QueryCoverage=87%, HitCoverage=96%, E-value=1e-101, Identity=35%"; Hit description =Arabidopsis thaliana genomic DNA, chromosome 3, P1 clone: MOE17
  Pfam annotation: Domain name=PPR; Domain location=181-215; Score =39.2; E_value=1.4e-08; Accession=PF01535.11; Description=PPR repeat
  Pfam annotation: Domain name=PPR; Domain location=251-285; Score=7.5; E_value=0.97; Accession=PF01535.11; Description=PPR repeat
  Pfam annotation: Domain name=PPR; Domain location=384-418; Score =44.5; E_value=3.7e-10; Accession=PF01535.11; Description=PPR repeat
  Pfam annotation: Domain name=PPR; Domain location=419-452; Score =17.8; E_value=0.039; Accession=PF01535.11; Description=PPR repeat
  Pfam annotation: Domain name=PPR; Domain location=80-114; Score=41.6; E_value=2.6e-09; Accession=PF01535.11; Description=PPR repeat
  Pfam module annotation: Pfam domain module=PPR::PPR::PPR::PPR::PPR; Domain location=181-215::251-285::384-418::419-452::80-114
  Subcellular localization annotation: CTP_CleavageSite=86; ConfidenceScore=5.29e-01
MSLANAPKSAAALYSSLLQSSMGANAFRQGKSVHHRAIITSSASPPDLHLNTKLVIFYSHFGDVAAARRVFDGMPHRSVVSWTAMVSGYAKNSRPQEALDLFAFMLRSGARPNQFTFGSAVRACTGARCARSGEQIHACAAKGRFAGDMFVQSALMDMHLRCGSVGDARRLFAEMERKDLVSWNSLMRGFVEREHCNDALGLFDSMLRDGMLPDHFTFGSALKACGAISVLFNVELIHACIIKLGYWDENVAIASLIDSYAKCRSLSSARVIYDSMCEPDLVSSTALISGYSMDRNYSDDAMKLFCKIHRKGLRIDAILLSSLLGVCANVASIKFGTQIHAYMHKKQPMGDLALDNALVDMYAKSGEFLDSRRAFDEMPNRNVISWTSLITSCAQHGFGEDAVTLFARMEEDGVKPNDVTFLSLLSACSHSGMMNKGMEYFTSMMSKYGIDPRFKHYSSAVDLLARGGQLEDAWMLVQNTNTECKSSMYGTMLGACKNPIYGRMLREQENYWWRHPKEKKLVSVSYQDRLGAARVVEVQHRVGSSPQRIKVGNHEENGVDHKDEQVLNTA

SEQ ID NO: 48464 - protein, 118 aa, Zea mays
  Coding DNA Sequence Number=SeqID_6685
  Subcellular localization annotation: CTP_CleavageSite=59; ConfidenceScore=5.56e-01
MKIRVKLTSFVALSPSPDPADSLSQPPLPATSVSLPVCSLLALLTSPSYAGAAAQSYHRAARAVAPPRPYSCDRATVPLEPSCHCSCRRAVAPLEQTHRSKASRTPYVAGAPYRLGIT

SEQ ID NO: 48465 - protein, 160 aa, Zea mays
  Coding DNA Sequence Number=SeqID_6686
  Subcellular localization annotation: CTP_CleavageSite=84; ConfidenceScore=5.68e-01
MGAPASAPARSAPALGRTAPGHPALGRARPRTLGPVPCRPASPRPGSAVPAPPRPDPARSQLGSPRRARLPRLGRSGEPPPPSRAQPRPSAPPPAALARPPRLRRAPRRPGSAASRRARPSQTLWFTGGYETDGFGYDYGAGEDEAVEGDFQEFQDYDEF

SEQ ID NO: 48466 - protein, 212 aa, Zea mays
  Coding DNA Sequence Number=SeqID_6687
  Gene Ontology: Mol. function=receptor activity; Biological process =protein amino acid phosphorylation
  Homolog annotation: Hit_ID=Q5VRG4; Match level="QueryCoverage=84%, HitCoverage=26%, E-value=2e-61, Identity=63%"; Hit description =Receptor-like protein kinase-like
MMHLPCANFSFISSIYHTADRATSFAINCGGKQVEYSDLMPIMFSEDSTDLGGSGFHVNATSHWVVSHVGSDPFNESTGIVNTSDIFETNMQELYQTARTSTSSLWYYVVGLANGNYTVQLFFAEIVITHGPGKRLFDIDIQDQNIRKDFDITKEAGGSRKATNITYEVTVDNSILAIHLYWSGRGTCCIPYEGAYGPLVSAIKGKLKHVLD

SEQ ID NO: 48467 - protein, 142 aa, Zea mays
  Coding DNA Sequence Number=SeqID_6688
  Gene Ontology: Mol. function=receptor activity; Cellular component =integral to membrane; Biological process=protein amino acid phosphorylation
  Homolog annotation: Hit_ID=Q5VRG4; Match level="QueryCoverage=83%, HitCoverage=17%, E-value=9e-30, Identity=57%"; Hit description =Receptor-like protein kinase-like
  Pfam annotation: Domain name=LRR_1; Domain location=114-136; Score =9.8; E_value=4.2; Accession=PF00560.23; Description=Leucine Rich Repeat
  Pfam annotation: Domain name=LRR_1; Domain location=42-64; Score=9.6; E_value=4.6; Accession=PF00560.23; Description=Leucine Rich Repeat
  Pfam annotation: Domain name=LRR_1; Domain location=66-88; Score =15.2; E_value=0.25; Accession=PF00560.23; Description=Leucine Rich Repeat
  Pfam module annotation: Pfam domain module=LRR_1::LRR_1::LRR_1; Domain location=114-136::42-64::66-88
  Subcellular localization annotation: CTP_CleavageSite=20; ConfidenceScore=5.19e-01
MSSSASPFELLPSPVPSTPLARHFNNNPLSGGFPHELSLLRNLRSLWMFDNYIVGPFPAFIQNLTNLTDLRIYGTNLQGPIPKNFSNLSNLEVLMLGDLAGNHSYLNVIGAWANLSVLSLRKCGLTGQVPNTPPNLPKLKYL

SEQ ID NO: 48468 - protein, 325 aa, Zea mays
  Coding DNA Sequence Number=SeqID_6689
MRRGGTCEGRSKEEDARARDPAKRRTPTKGGSHGEQGTEQRGCSRPAPSRCVGNGAQLPSVMDPSLAGDQGEVAAVGSQLETAAAIGARGRALEPDGPERKQREEEQRLLWRKQGEEDGGVGFLRRGMTAKFTTSADAPASVRLSAAAQAAAIQPSSPRFFCSSLAGTNPTSPASPLPGAGREQNGVGEAGVREHGEGEREDEAGGEQREGAQSHARDRRRDADQLLCAQRREVARLQVHRRRRDAACVGRPGWFEEQRMNSMAARAAALAFAATATDLDRGWGVAAPGREGMSLPGGDGGWCGWRLGASVSAGGCGVERKETLL

SEQ ID NO: 48469 - protein, 369 aa, Zea mays
  Coding DNA Sequence Number=SeqID_6690
MAVVGGGGSETDATEKPSGGGAEKSCEVADAASPVSHPVEAGGYSAMASPFVWDDRGKLLANSLDCSSEFITVDGDANRHTRARIHLALGQETRRDDFVIAMDVEGVVQPANFGMCVSRIRDYLQNDLRLHVLSCSEHLFGLGIFEMGSILQKGRLISGDIFNIVDTLGALSDWIERKISEKSVNDMPRRIVLTQGEVSTGLGCSWAVPVYILTPKDNWRLGDIEALANHEDDVPPNGNPHPLLEEDNDEDFLQAEGDFIENVDNHNLGVFRVLLREALKQRQVVTKEIYQRQMPRQARHIVKKTRVPGGTFSTSTPFGIYLDINAITLQKVIVENCGVPLVEASLEVLLRPDPGVEGSIIPVGPLQKP

SEQ ID NO: 48470 - protein, 119 aa, Zea mays
  Coding DNA Sequence Number=SeqID_6691
  Gene Ontology: Mol. function=DNA binding; Cellular component=nucleus; Biological process=regulation of transcription, DNA-dependent
  Homolog annotation: Hit_ID=Q0NZY1; Match level="QueryCoverage=56%, HitCoverage=68%, E-value=7e-15, Identity=52%"; Hit description=AtRL1
MSQWSQKENKMFEEALAYYGEGTPNRWDKVSSAMGGIKSAEEVRCHYENLDYDVKMIESGNVPYPKYKTQGFWTRAEAAPLRTPRSPHDSTWDALRPQTPMADIDSSNRRRVEEKRRIW

SEQ ID NO: 48471 - protein, 217 aa, Zea mays
  Coding DNA Sequence Number=SeqID_6692
  Homolog annotation: Hit_ID=Q9ZRC5; Match level="QueryCoverage=66%, HitCoverage=63%, E-value=3e-21, Identity=32%"; Hit description=Plant IF-like protein
MTVGGGCLSYGAPDSPLAETKTRSIEEEVIKLQKCLQDKDEQLRSSTSSTEQYHHELDDLRTHLPFTQATGEVGEQLDLLQKDVQAREVSQMQLKDIVIRIETDIMDEVAKAFEIATLRGEIRILSTHWMNKTKNLKSQLKKHKRTDQELKKRVLKLEFCLRSCHPLILLCALVTTIENMNLGAWRGGAPTVAHLFLYVQFLEKATCTNSALGSVVG

SEQ ID NO: 48472 - protein, 86 aa, Zea mays
  Coding DNA Sequence Number=SeqID_6693
MGGGRRATWPLCRVARMELVPDLASTSQSGRGLQRATRDLALVRGGEDGAHPGPGEHVAERARIAEGGRGLRLADRGIRDGWAEGG

SEQ ID NO: 48473 - protein, 229 aa, Zea mays
  Coding DNA Sequence Number=SeqID_6694
MDWAQEEQRPNSASCAQTRDDHGKGAEKIVRTAGTETASTRAQKAGRAEDRELRRRNAIAGARAGRELGDGSAQGRSWLGEKLRAQGSELKGAEEDGRHGKRKKQLGTLRLGTDLRNGDWHGREEFADKEVPAGREAPRPPWGTSQSCARAQENRSAERTDRELQAPNCSRNQRHCEQVDLGGTSLAERAGREKQGEGAGKEEALGAGSWAPEQEASGCGAGTRAVKRT

SEQ ID NO: 48474 - protein, 148 aa, Zea mays
  Coding DNA Sequence Number=SeqID_6695
MDWAQEEQRPNSASCAQTRDDHGKGAEKIVRTAGTETASTRAQKAGRAEDRELRRRNAIAGARAGRELGDGSAQGRSWLGEKLRAQGSELKGAEEDGRHGKRKKQLGTLRLGTDLRNGDWHGREEFADLEVPAGREAPRPPWERATNL

SEQ ID NO: 48475 - protein, 191 aa, Zea mays
  Coding DNA Sequence Number=SeqID_6696
  Homolog annotation: Hit_ID=Q1SBG7; Match level="QueryCoverage=38%, HitCoverage=33%, E-value=2e-14, Identity=50%"; Hit description=Heavy metal-associated domain, putative
MTDDNIRVQPGSSWSSSSCYLEGSAALPGVCCPPVYKCLLLQLLLHHKPAAGCTCTAHRTHRHPARRPSSRPFIPYCSDLSFATTSAGPNPQRGSAMKQKIVIKVCMPCDKCRSKAMGLAAIEGVSKIGITGDGRDQLEVEGDDIDTVCLVNCLRKKVGRADIVKVKELKPEPRGEAARGEGETVLLWPHQ

SEQ ID NO: 48476 - protein, 136 aa, Zea mays
  Coding DNA Sequence Number=SeqID_6697
  Gene Ontology: Mol. function=metal ion binding; Biological process =metal ion transport
  Homolog annotation: Hit_ID=Q1SBG7; Match level="QueryCoverage=56%, HitCoverage=36%, E-value=2e-12, Identity=50%"; Hit description=Heavy metal-associated domain, putative
  Pfam annotation: Domain name=HMA; Domain location=5-72; Score=21.9; E_ value=0.0023; Accession=PF00403.16; Description=Heavy-metal -associated domain
MKQKIVIKVSMPCERSRTKAMTLAAGANGVISVAIAGEKLEVVGDDVDPVRLASCLRRKVGHADILQVEEVKDKKPSEDPKPPPAPPAPQPVVVHPPPPHWPHCYPGGYHHHHHHHHHPPPPPVVVCDEPSGCHIM

SEQ ID NO: 48477 - protein, 147 aa, Zea mays
  Coding DNA Sequence Number=SeqID_6698
  Gene Ontology: Mol. function=metal ion binding; Biological process =metal ion transport
  Homolog annotation: Hit_ID=Q1SBG7; Match level="QueryCoverage=59%, HitCoverage=38%, E-value=4e-12, Identity=45%"; Hit description=Heavy metal-associated domain, putative
  Pfam annotation: Domain name=HMA; Domain location=5-72; Score=32.0; E_ value=2.1e-06; Accession=PF00403.16; Description=Heavy-metal -associated domain
MKQRIVIKVQMTCDKCRKNALALACSTYGVQSVGIEGEERDHQLVVIGDGVDATCLASGLRKKVKAGRADIVKVEAVGDEKEATTKDDAAASSGSNPNPVAGWPPQWYPYHPGYYCPGPGVVHPYAGHCLVEDPCADDEAPWRCTIM

SEQ ID NO: 48478 - protein, 161 aa, Zea mays
  Coding DNA Sequence Number=SeqID_6699
MPATGWFLSGLLLSVNPGISFRLWKLRDEASEERQHTRHCVDACAPMETKAFLPENDLATNLRLIRRPGVGREGRTSLKLQIDTPPTAGAVRCSAGRGETGRRFKLTHMHEYDICGKIVNDAKQTIVNSGTQVTQHAMIRTPSGSDVACHVDIRFYKPDFI

SEQ ID NO: 48479 - protein, 112 aa, Zea mays
  Coding DNA Sequence Number=SeqID_6700
MRTDPANSDAESKARSRPGELYYADCFVVWTAVAMHTTSPSHDTTTTRLGHGRDDEQERRVARIPARDLQKNTRATPRTRARCNISSSKQRARLRGVAIGVAAIRLAEFAAA

SEQ ID NO: 48480 - protein, 76 aa, Zea mays
  Coding DNA Sequence Number=SeqID_6701
MASRAQQGNPWQRHGGELRHAVHAAPTVEVVVAPATSRRVPVGDPPWEGAWGSRRGDSQVPSATANWKQGQARKIA

SEQ ID NO: 48481 - protein, 134 aa, Zea mays
  Coding DNA Sequence Number=SeqID_6702
MRNAGKAVLADAGWSRFTHPNLPTNLATKSHIETPQVIAVVDLLAAGGLSSLATLTRLCPTRPAHRVRVMFMGLKASIGGSAVVFGTTWIGGTSLIAEIVGMASISGRVATGKIGGFDMTGMPETAIGAMGGGA

SEQ ID NO: 48482 - protein, 97 aa, Zea mays
  Coding DNA Sequence Number=SeqID_6703
MEEDMEDREDSPKRKNASSLPHMSNPVEARQMKEKLTKMKDPGTEVEKEGTQIGLDPDPYLGPVLYLDRYGPSDARQRQHEMRSHEVKAKELAHQKK

SEQ ID NO: 48483 - protein, 112 aa, Zea mays
  Coding DNA Sequence Number=SeqID_6704
MQVACNCTTGTHPFDFDASSKEAQAHMSCNRRARYCVRETAPPLAPMPRLLDCGTSAAIRGNPAHGPTVPTEHIGHGDRERGQFERDPSPRRKRAPSPPTDQGFEGWPLRRV

SEQ ID NO: 48484 - protein, 93 aa, Zea mays
  Coding DNA Sequence Number=SeqID_6705
MVEAALRADLVIRDLDRINGEKSLCYLNLAEQDLCAEERKKLIFLLTLQVLETSPCRGEKILVFLAAAGLPAPRRVATAPTRHSPTSLTPPTP

SEQ ID NO: 48485 - protein, 114 aa, Zea mays
  Coding DNA Sequence Number=SeqID_6706
MTAAAPSTTSPSFLHRPARTNLLRCDTIVGLRCKEIATLVVGASALSSWHDGSRGEPRPYFILESLAPPRGIGWVGFLADWQQIQDFDALQHTVFKDIAVHICGSESKTKTCKC

SEQ ID NO: 48486 - protein, 413 aa, Zea mays
  Coding DNA Sequence Number=SeqID_6707
  Homolog annotation: Hit_ID=Q2XSU1; Match level="QueryCoverage=13%, HitCoverage=28%, E-value=2e-20, Identity=84%"; Hit description=Rho
MTFGRRCPMVRAAGRKGRDTIHGMNNTREEALTAGQLANRTLFAVECGKGKVVVVLVGRVLLRKAEVGGGRLVEVDGSGAAVVVIDGDGMGGVQGLTRERCVGRVGRGSRSTSLVLSSLPGISDTRLLVLRLLRRKSVILIVVDRFSKYAHFIALSHPYMVVSDTHALHDFITSILSDRDPIFISHMWRPLEDGWHQASFEHINKVVYDRPLPPILLHVTKTTQTVAVDVVLCDRDTFLGEVREHLLKDQQYTKHYYDNCHQGARLHNVFHVGLLKPFRGDPPTTPYTCHRYMMAICCPSQSMCCAPNYDRADDTSLFSGVACLVTTPFGGRFSNLNLRDDKQFFVDHPGAVPISTAQGEELRKLIGAAAYIECSSKTQQNIKAVFDAAIKVVLQPPKQKKRKKKVQKGCTIL

SEQ ID NO: 48487 - protein, 242 aa, Zea mays
  Coding DNA Sequence Number=SeqID_6708
  Homolog annotation: Hit_ID=Q18DN4; Match level="QueryCoverage=57%, HitCoverage=1%, E-value=3e-09, Identity=30%"; Hit description =Halomucin precursor
MSSTEEKPSKEASNLRTVSRMLIYLSGTIIRGTLKTPNSQLSESDRQLGLAKGATANSAPPDPRARTRAKTRKTANSAPPDPRARTRAKTRKTANSAPPDPRARTRARTRKTANSAPPDPRARTRAKTRKTANSAPPDPRARTRAKTRKTANSAPPDPRARTRAKTRKTANSAPPDPRARTRAKTRKTANSAPPDPRARTQAKTRKTTKLRLARPQGSDSALASAGRLPPRPTPWLELGHGN

SEQ ID NO: 48488 - protein, 123 aa, Zea mays
  Coding DNA Sequence Number=SeqID_6709
  Homolog annotation: Hit_ID=Q6EP22; Match level="QueryCoverage=28%, HitCoverage=9%, E-value=6e-10, Identity=85%"; Hit description=Cell division inhibitor-like
  Pfam annotation: Domain name=DUF1731; Domain location=85-120; Score =25.2; E_value=1.3e-05; Accession=PF08338.1; Description=Domain of unknown function (DUF1731)
MGSAPARPRRTEGGTTWVVGLGGGTKAGAVGGVAKRRRAEEEQRRAGSCCLSSQPAECPQDLVGVAATTARVGGGPNGLGPYTCSTLTVLEGQKVVPAKAKDLGFSYRYPYVEDALKAIARDL

SEQ ID NO: 48489 - protein, 78 aa, Zea mays
  Coding DNA Sequence Number=SeqID_6710
MGTMGSRERDRTNDCVWGAVGPTPTCGARTGMIEEEWWGLGRKILASPCATETSPQRTAYICTARSRYYQNQIGLSQQ

SEQ ID NO: 48490 - protein, 549 aa, Zea mays
  Coding DNA Sequence Number=SeqID_6711
  Gene Ontology: Mol. function=oxidoreductase activity; Cellular component=integral to membrane; Biological process=electron transport
  Homolog annotation: Hit_ID=Q67UD7; Match level="QueryCoverage=90%, HitCoverage=98%, E-value=0.0, Identity=72%"; Hit description =Putative Cyt-P450 monooxygenase
  Pfam annotation: Domain name=p450; Domain location=85-539; Score =311.6; E_value=1.4e-90; Accession=PF00067.12; Description=Cytochrome P450
MNPPAASVACRVCFVKNPPCRHVVGWKIDGQISFCAFVHGVALVHWIRSPPTLLWLLYVSLASCLLYKLFSSSNTSSEKARRRAPGPAPLPLVGNILELRGEPHHALARLAETHGPVMSLRLGTTDAIVVSSAAAARDVLQRYDNVLAARSVTDAGRALGNHERSVIWLPATSQLWKRLRAVCTNHLFSARGLEATRATREEAVRQLVSCLGRRTGETLEVGRVVFSCVLNLVSGALFSEDVAGLSSDRARELETLVRDTVEEATKPNLSDLFPVLARLDLQGRRRRSAEFIGRFYDFFDPIIARRVKARGSGEHVGDDFLDVLLQLHSMDQLSLQTVKSFLLDLFAAGTDTNTIAVEWTMAELLRHPAVMSKVRAELRDALGSKPCPDESDVGRLPYLRAVVMESMRLHPPSPMLVPHLAMADGAEVGGFTVPAGTKVIINLWAIMRDPASWAEPEAFVPERFVGASDADFRGTDRLEFMPFGAGRRACPGAPMATRVVTLLLASMLHAFEWRLPEGMKPCDVDVRDWFGTSLNMVTPLKAVPVPSSR

SEQ ID NO: 48491 - protein, 102 aa, Zea mays
  Coding DNA Sequence Number=SeqID_6712
MGQKCCIQARTHCRCFGSDRTPGVAPQGALEVGIMSSILCFRAEFVIRPYLARWCNLFALRLIGHLMDVPWLVFTSLLSVRFCTSPAIFGFPLILTDISFLS

SEQ ID NO: 48492 - protein, 40 aa, Zea mays
  Coding DNA Sequence Number=SeqID_6713
MDFTVEGESHFYARPMEQMQINVPKGIKAEFLVCCPEMLP

SEQ ID NO: 48493 - protein, 129 aa, Zea mays
  Coding DNA Sequence Number=SeqID_6714
MGSGEAEFVVFRGRARVQALGRARLSSSSSGAEPETEPWVGRGGVRRLPGPSPSPSPGSGEAEFPMAPEAGLGRCQPHFVEWHSSRSDAGGAVFLSECRRRGEGLQRLFGGVSSAQQLPAMVLSDIKNK

SEQ ID NO: 48494 - protein, 97 aa, Zea mays
  Coding DNA Sequence Number=SeqID_6715
  Gene Ontology: Mol. function=RNA binding; Cellular component=nucleus; Biological process=rRNA processing
  Homolog annotation: Hit_ID=Q94AH9; Match level="QueryCoverage=92%, HitCoverage=28%, E-value=4e-09, Identity=57%"; Hit description=rRNA 2'-O-methyltransferase fibrillarin-2
MTMSLLTPDAEEARDGASARQCICAGNTTHFTVSDRMVRILTLNASYFLKNDGHFVISIKGNCIDSTLSVEVVFVVEVGEAQSTSIQACLAGDIGAL

SEQ ID NO: 48495 - protein, 720 aa, Zea mays
  Coding DNA Sequence Number=SeqID_6716
  Gene Ontology: Mol. function=potassium ion transporter activity; Cellular component=integral to membrane; Biological process =potassium ion transport
  Homolog annotation: Hit_ID=Q67UC7-2; Match level="QueryCoverage=92%, HitCoverage=98%, E-value=0.0, Identity=79%"; Hit description=Isoform 2 of Q67UC7
  Pfam annotation: Domain name=K_trans; Domain location=55-720; Score =785.2; E_value=3.9e-233; Accession=PF02705.7; Description=K+ potassium transporter
MADDGGSEADEASTGCTEGSRGLDSGHSQGARVGTAVVGARVPDPAGNDLRKDLALAYKTLGVVFGGLVTSPLYVYPSMNLSSPTKDDYMGLYSIMFWTLTLIGVVKYVGIALNADDHGEGGTFAMYSLLCRHADIGILPSKKVYLEEEPLLRNQSAAARRPSWLGKFFERSITARRALLFMSILGMCMLIGDGILTPAISVLSAIQGLRGPFPSVRNSVVEALSAVILIGLFLLQKYGTSKVSFLFSPIMAAWTFTTPIIGLYSIVHYYPGIFKAISPHYIVRFFLRNKKEGWRMLGGTVLCITGAEAMFADLGHFSKKGIQIAFLSSIYPSLVLTYAGQTAYLINNVNDFSDGFYKFVPRPVYWPMFIIATLAAIVASQSLISATFSVIKQSVVLDYFPRVKVVHTSQHKEGEVYSPETNYILMVLCVSVVLGFGAGNAIGNAFGVVVIMVMLITTVMLTLVMIIIWRTPPVLVALYFVPFVVMEGSYVSAVFTKIPEGGWLPFAVSIILAMVMFGWYYGRQRKTEYEIANKVTVERLGELLAKPEVQRVPGLCFFYSNIQDGLTPIVGHYIKNMSSLHAVTVFVTLRYLLVAKVDERERVLVARLGPDGVYGCTVQYGYADSLSGGDLTAQVTGSLRRHFGTAEAGAEEAARLEAARTNGVVHVRGKMRFYVGEDAGWFDKVMLGFYEFLHGICRSALPALGTPLQQRVEIGMLYKV

SEQ ID NO: 48496 - protein, 181 aa, Zea mays
  Coding DNA Sequence Number=SeqID_6717
MEDEAKYNAQAEAHKAEVEDLRRQLAEAKENYRQIWFPSVLLCAAPVVLPRAALAALPRAPGALPRGPLARFPRAPYCPLRVPARAPRGPLAVPLRVPLLGPSSAAPALSLARLCAPGVTRVVSQELGVVRFAVVPLMGLDVCDSLCQGGDEDDGFGYDYGTGEDEVVEEDFQEFQEYDEF

SEQ ID NO: 48497 - protein, 154 aa, Zea mays
  Coding DNA Sequence Number=SeqID_6718
MEYSAKTSLPLYSIGIIYPSPVQKGLTQTNKRSKLGFTSKGTECALVWRFGLYGVPPTVFGAPGSYNSKLATLGFQQAHSAIIHRTVRCATGLSGAPAEQRLFGATVGSKSADQRNSARTVRAESEAHRTLNNTCPMRHRTVRCHMRTKPPTVD

SEQ ID NO: 48498 - protein, 136 aa, Zea mays
  Coding DNA Sequence Number=SeqID_6719
MGHAMRWAGRAPNQPRAHAATHGPAARSHHVALEPLRARTTPVAGRWPRHGRTQGGSTERWPGDGRPLGMEEKMHGGGEEKKKGSPVEDGERLGCWTRGRARVAAKTSCAPRWGSAVALGRESRECAVLGEDWGKG

SEQ ID NO: 48499 - protein, 278 aa, Zea mays
  Coding DNA Sequence Number=SeqID_6720
MDLAALPIDELLQWVKGTVEKADYSVVVPMCPEQGYVSLSSFEIGFRKRRCTYWYGYYINSIKCRLAAEEKKKDEEKKWAHKKMLARDALEKARMAQARDGLPLEASPSKEEDNDDEEGMEVRMGFSPEVGLWSAPTSAGPSGSAAHPARGPTASLSGARASAEPTPIPASVEEAGTVEDEVDPSPGRRRGACSALDHRSTLGPCPGALIREGYRSVADVRDGASGSEELDAEACRRAPLRQQAPIPHTVLHSYQGGEARCGASTGASSHPRYAQETT

SEQ ID NO: 48500 - protein, 77 aa, Zea mays
  Coding DNA Sequence Number=SeqID_6721
MWLRVVKIVVWMNLSSCSLQPSCPATDDRVGITGVRRYPARLCASTLYRIANGDEIEVEEARTPPPPEEPQVIGVVC

SEQ ID NO: 48501 - protein, 109 aa, Zea mays
  Coding DNA Sequence Number=SeqID_6722
MKSQPNAIGPHQRDKTRHDQTTSEPRAWCQRVPVEHQMTFILGSLITFATLNFFATTISELSLATLNVPNAMGARPMHSAKSKAEKRRLKKHGTASKRHLNMHTRSKAA

SEQ ID NO: 48502 - protein, 182 aa, Zea mays
  Coding DNA Sequence Number=SeqID_6723
  Subcellular localization annotation: CTP_CleavageSite=56; ConfidenceScore=5.09e-01
MAHCPIPFGYVGHYGGSGAEVPLGTVRSPGSRSPAPPRLAGLLGGELVTRPASLACSAENWSFAPPYRLARWGLGRLPRLAGPLGGDLVVRPASLARSAGTWSFAPPRRLARRGLGCSPRLTVLLGKWAGERLWASPLGTPFLGTRQQPPPSCDFSESGGGFLAGDQSPWCAQAHQYDVAPE

SEQ ID NO: 48503 - protein, 324 aa, Zea mays
  Coding DNA Sequence Number=SeqID_6724
MEFLGSLVTKIQFMVMRLFGDKQPFVGVERIYGNTELYNILDQVDELLLLPDQKLGRPWCDTDLICEPILSWRLNGGSPSKCLLQLKTYIVRQWDPGISGIFSHRDTIQGHAVAWGQATFCEGGNVTSMNSNMSRALADKRATHPWDPGGRPDAGYKFQESLLAIGSPTGSVARSGKSCCSARAQNQYQKLRDLGEKLQKCAQDLDLKFWDLVAKLQQCAQNLNHMFWDFQAKFLQCTQSLPLYIHQGAAGQPPMRQCLIHPPQDPLQNSGMTLNKDHRRLMMHPRIHRRLMPSRMLLAPPLAINTDQLRRHRRLMHPRIPWCR

SEQ ID NO: 48504 - protein, 509 aa, Zea mays
  Coding DNA Sequence Number=SeqID_6725
MASLSPGNSFIEAVSTAVVAADLARWSGMMKGHYSMKCIARMSSGMRRHIMALTHMALLQHHAEAMDNQMQGKEKLAQSGDYYDERKVNIEPDINNLLIHVNDHFSMLVIGADSRRSDVVWDEDMLSDLDTHGGLLQLLACCKDDELNQDRDTPFLLGLGMDQVDEMLASPSSLGMNEDLPSVPETHGSLLQQVAWDRKHFAYEMCTLIAEMVLEDVLTDVGNLAFSIDSSMQISDQPSKYALVIDAYLLKTQYKKPYISISQWDPGIWCKGTMAHEQQQLEIYRMFEKQWDSVILKWFRNPFVLLQSCNGEDLNEQGTVPVNDIFDVLAAGQELNFGNVTLIIYGGCQGAMGLQVLFAELHPWHHNVFTSIELAIQSWRINGFSPGSCKLNRQSILVATNLQFNYKASKFVSFTDTYQIYKNTCICIGELEPASWRDTCWLPEISHANVSTLASEEIDNMLFQVGDFHPGESEQLELYMITLIQWDLGPVEFYKSNCRCPAAELIGWC

SEQ ID NO: 48505 - protein, 85 aa, Zea mays
  Coding DNA Sequence Number=SeqID_6726
MMVARESCISVRPRAHRHGSANQANSTIPIDENVTPGFGKAFAPRRTGLRGLWGSEWLNRSEVMRNPMIKLEKYLELHQKGKLCP

SEQ ID NO: 48506 - protein, 301 aa, Zea mays
  Coding DNA Sequence Number=SeqID_6727
  Gene Ontology: Mol. function=RNA-directed DNA polymerase activity; Biological process=RNA-dependent DNA replication
  Homolog annotation: Hit_ID=UPI00004C1732; Match level="QueryCoverage =65%, HitCoverage=13%, E-value=3e-42, Identity=45%"; Hit description =UPI00004C1732 related cluster
MPTIQQRTTRQEEPCRVRAYPETDPRGPATHYHARRQLRTRYRDWNVRQHLLGARPSPPGSGITFGSFDFLATAPGELRLASPGASGSGRKEPERSAKSEVERRRRERGPATPERSFRQPVGKAERQAGDTPSSGYTGEVSRRRAPGSKRRHEGQEVYTARPASPRHLQWSKSPITFDRSNHPGRVPHRGTYPLVVESIVGMKRLSKVLMDRGSDLNVLYIETLDRMGISRSALHPSTELIHGIAPRRGAHPLGRITLPVTFGDPSNFRTEPLRFEVVDIPGVYNTIFGRPCYVKFMAIPN

SEQ ID NO: 48507 - protein, 325 aa, Zea mays
  Coding DNA Sequence Number=SeqID_6728
MWQYTGDGDSDRHSAENLTKEELRARILAITAGVTSDFLDESGPLPFNQSRLSDLKKRARLARAEPRRSITPSTDTEDLTSTDAEASSNVQPQRVGDAAEAASPAALEDRRGRGPEAAGSSSSPTTTTVRDGLGEMGSPPPVAAATVERREEAEPTAVPPPAPSAPLVAMPRVRRAVVARTRSSRAYVQGKTVKSVALAAKGGTSTTQPSLVVAGVTALASSAPKGTLGASVVATGAPELLAPVPDVGRDLLLLTLPPSRPLRWTRRSSFLRPCRWLPLPLRLLLARPLRRTPRWSFFHPRRRFSCRRAPRRWRRAHLQSRHCQL

SEQ ID NO: 48508 - protein, 148 aa, Zea mays
  Coding DNA Sequence Number=SeqID_6729
MREARQETEKDKKDHDDRFFELEQDQFDKKIMETDTSIILSHTLGDALTVAIDENLPSFVFPGITMFFLHVNVILVLSYPCSAFVSRNWKYRFLSIQRDLGENLIESEDDVVVLLLHLEIVLVSSLDFSGSVSCKSNVRAGGASRHRR

SEQ ID NO: 48509 - protein, 175 aa, Zea mays
  Coding DNA Sequence Number=SeqID_6730
MQFGSCTFTPKTGKTGGEVLELVPCAKNKWDSWFKSWFYLDLGKGVSGVDQPAANVMVAHDFVAFPDFEVGEKDSDESARHRARVVSSGRDLVEDYVVYQVWPWSGCWTVSEITRRRMPLKSLFFHKDVVVVSPAFAVELGGREGVAFMSKVEEEAIRIVGKYSSKTELTKSLEI

SEQ ID NO: 48510 - protein, 117 aa, Zea mays
  Coding DNA Sequence Number=SeqID_6731
MSAKTTHRQRHPNRGLSADDEEEEGGNMYRHQQQEVCLIRASAIVAGMTQRDAQRKAKAAERRKRGTNKEYPHPTLPLFIQRPSGASKTVNHLSSKDELPYVVLQPQQPTVTNSKSN

SEQ ID NO: 48511 - protein, 253 aa, Zea mays
  Coding DNA Sequence Number=SeqID_6732
  Homolog annotation: Hit_ID=Q6QP54; Match level="QueryCoverage=41%, HitCoverage=44%, E-value=3e-12, Identity=54%"; Hit description =Putative kinase
MACYHINAIGQLSTVLGPDLQVHYHQYWEAKYPLSSVVALSRDISDHTPILLNTGEPVTAKSGLGRHRKLRLARPQGSAPVSAPEDDELRLARPQGSDLASAPEDDELRLARPQGSDLASALEDDELRLTRPQGSNLASAPKDDELRLARPQGSDSASEDRLDLGGVSASPDPRARTDHVTRRAIITLPLARSGYGGQDRRPIRLAPPKSAQSGSTGLSGGAPDSVRLLSTAPSCLGAIKGTPRRMEEDTKHS

SEQ ID NO: 48512 - protein, 151 aa, Zea mays
  Coding DNA Sequence Number=SeqID_6733
MAPMFCPRAGGVEANRNAETMARMLLAGKSQKTVLAVSPELLSVTGSKGGADIKLELSVGKIRTGEETARSNVLTGRRLAFGDAVMEQKETENSGIRTDSGAKYAVGKCGHGGGKDLSMNCSKHTPKVYFDGHIPFTADYRSPRKHPPKNN

SEQ ID NO: 48513 - protein, 73 aa, Zea mays
  Coding DNA Sequence Number=SeqID_6734
MVGWRSDLTKVASLRRLGLGRAGGQKLILFLATQTKKVGDVVLPPWAKGNARELIRKHGSEFRTGRFTNVLLT

SEQ ID NO: 48514 - protein, 120 aa, Zea mays
  Coding DNA Sequence Number=SeqID_6735
MDVDDDVDGTPEEQGEAPACAWCAAPRPQRQGQGRALICGHGHQGVICGVCGSGRAEINDGKLPAGAGNLYLQLIYKDLNLKNLCLGRSIFALLCLWTVVWWKYQWEDLSAGTATRVCKN

SEQ ID NO: 48515 - protein, 621 aa, Zea mays
  Coding DNA Sequence Number=SeqID_6736
  Gene Ontology: Mol. function=protein serine/threonine kinase activity; Cellular component=cytoplasm; Biological process=protein amino acid phosphorylation
  Homolog annotation: Hit_ID=Q84XZ4; Match level="QueryCoverage=93%, HitCoverage=87%, E-value=1e-108, Identity=61%"; Hit description =Mitogen-activated protein kinase
  Pfam annotation: Domain name=Pkinase; Domain location=3-248; Score =146.6; E_value=6.7e-41; Accession=PF00069.15; Description=Protein kinase domain
  Pfam annotation: Domain name=Pkinase_Tyr; Domain location=3-248; Score=-13.4; E_value=1.2e-11; Accession=PF07714.7; Description =Protein tyrosine kinase
  Pfam module annotation: Pfam domain module=Pkinase::Pkinase_Tyr; Domain location=3-248::3-248
MKSVYRGFDEERGVEVAWNQASLADVLRSPDAVQRMYSEVQLLSELRHDGIIGFHASWVDVPGRSFNFITELFSSGTLRSYRLRYPRVNLRAVRSWARQLLGGLAYLHARDPPVIHRDLKCDNIFVNGHQGHVKIGDLGLAAVLRRGGAAHSVIGTPEFMAPEMYDEEYDERVDVYAFGMCMLEMLTVEYPYSECTNPAQIYKKVTAGRLPDAFYRVDDDDARRFIGRCLVPAANRPSAAELLLDPFLLHHHHHAAAAAGTVPVPSPLPTTAVAAGAPPPSTCSSSAADDDVVSALDDDDEVDVPPRNDMTITGKLNAEEDTIFLKVQIADEASGHARNIYFPFDMASDTAAEVAQEMVKELDITDRHASEIAAMIQQEIGRLLPGRAQQHEYTYASRGGDYDDEERPPPFYYLSSSPASSHGSHCGVGPYAFGGFSGPCGSAWTKDHDWYALSDNDDDMSSVHSGKYSPVHYASGAGHEEAPASSSGSSKTRFGGGGSGSAAALARQLERQCSVSPQHAGRPRRREDDDDRAGRRRRMTRNRSMVDMRSQLLHRTLVEELNRRLFFNTVGAVENIGFRAPTTTAASSSSSARGGLDRGRRPGGGGKQRQLDDKEQQYFML

SEQ ID NO: 48516 - protein, 154 aa, Zea mays
  Coding DNA Sequence Number=SeqID_6737
  Gene Ontology: Mol. function=zinc ion binding
  Homolog annotation: Hit_ID=Q9LRB6; Match level="QueryCoverage=29%, HitCoverage=11%, E-value=9e-10, Identity=53%"; Hit description=RING finger 1
  Pfam annotation: Domain name=zf-C3HC4; Domain location=94-135; Score =33.4; E_value=8.1e-07; Accession=PF00097.15; Description=Zinc finger, C3HC4 type (RING finger)
  Pfam annotation: Domain name=zf-RING-like; Domain location=94-135; Score=4.4; E_value=0.046; Accession=PF08746.1; Description=RING-like domain
  Pfam module annotation: Pfam domain module=zf-C3HC4::zf-RING-like; Domain location=94-135::94-135
MGWGDLVGWIRWALVGATMLVVALLAVCMLVVAVGHVIYVLWRNIRGGGAKTPPPPLSIEEVLERIPDYDFPYQELPGGAAGDDYDDDDHRESCAICVAPYEPGEACGVLPGCGHVFHKLCVAEWLRQSTTCPLCRAAFDVTEGTRQAVVDNMV

SEQ ID NO: 48517 - protein, 291 aa, Zea mays
  Coding DNA Sequence Number=SeqID_6738
  Subcellular localization annotation: CTP_CleavageSite=39; ConfidenceScore=5.11e-01
MTLNVVVFLFQPSAIASAPPSLGDSSYPPRDDTHVLLPSAATVLHLATTLPTTLLRPPPPWPPADLCRASTLGVVPATPATPALHCAMASCPSCFSVEDARTSPCVAIASGAAADVRPTLEPPPRAAPPSAAASCCCSSRRICASSALVCSGATTSEHAGAGRRRRAGVQARAADAQVGVRCVHDPPSPAQAPSSTPRTLLCGHAGCCATARTCRQATAASRTCRQIAATSRARMQSGSAPASPGSPLTDRHERLYGSFAGQRLSFSGRNPPIMVSATYSVPAPMPINANL

SEQ ID NO: 48518 - protein, 115 aa, Zea mays
  Coding DNA Sequence Number=SeqID_6739
  Subcellular localization annotation: CTP_CleavageSite=20; ConfidenceScore=5.22e-01
MAAAAGKARAVSLAAAVRVVAATARPASSAAAAAGVGAMALIVQGEDTAFGSLEWWAYAGISCFLVLFAGIMSGLTLGLMSLGLVELEILQRSGTDVEKAQAGDQLVVPEDRPGA

SEQ ID NO: 48519 - protein, 70 aa, Zea mays
  Coding DNA Sequence Number=SeqID_6740
MEGGNCAALLQGVMWFTLVWVSRHLSVICGLPQHYVKKLQTKILILPYILLANEYTSRVQNSVIIDMIVI

SEQ ID NO: 48520 - protein, 130 aa, Zea mays
  Coding DNA Sequence Number=SeqID_6741
  Gene Ontology: Cellular component=integral to membrane
  Homolog annotation: Hit_ID=Q67XQ0; Match level="QueryCoverage=51%, HitCoverage=13%, E-value=2e-26, Identity=82%"; Hit description=MRNA, complete cds, clone: RAFL25-31-I24
  Pfam annotation: Domain name=DUF21; Domain location=17-123; Score= -53.9; E_value=0.0088; Accession=PF01595.10; Description=Domain of unknown function DUF21
MEHRRRRWNPRARRRRMMGEGRWRGAQPLEGGGGRGCWEVAVEDREALPIFLDRMFHPIVAVILSVTFVLAFGEVIPQAICTRYGLAVGANFVWLVRILMVICYPISYPIGKDRAFTSFFTNMPHTYFIK

SEQ ID NO: 48521 - protein, 47 aa, Zea mays
  Coding DNA Sequence Number=SeqID_6742
MAEAQGLDGATVAELRLREGCSSERGPDETERERAHRRASRAADRNF

SEQ ID NO: 48522 - protein, 186 aa, Zea mays
  Coding DNA Sequence Number=SeqID_6743
MGLPIRPLWNWISRCHWLGGWAMVHGVVGTTGAAVRYSDLVSKVSEMDLPANRGRWRRRSARSHLPLVVAVLVLLLPAYLLFSSAYSTTLRALFAFPFAPGGGEAPRCGGSVELEGQRFLWYAPHSGFSNQVGELRNAAVAAALLNRTLVVPPVLDHHAVVLGSCPKFGSPTLPRCAPLFGTNESS

SEQ ID NO: 48523 - protein, 535 aa, Zea mays
  Coding DNA Sequence Number=SeqID_6744
MQVSLAGRLGHGPWSRWYHGRCRLILRSRLQGVGDGLAGEPRPVAHAERPITPASRRGRPHAPSSGLSSHLIGLLTPLRALFAFPFAPGGGEAPRCGGSVELEGQRFLWYAPHSGFSNQVGELRNAAVAAALLNRTLVVPPVLDHHAVVLGSCPKFRVTDPSSLRAAVWDHTMQLLLDRRYVSMGDIVDLSPIEPMVRTIDFRVFVSLWCGVDMRKTCFSRLCCAVSGGSSRPDDYNKCRSLLSGLGGSEKGCVYHVHDDCRTTVWTYQQNDDGAFDQFQPDEELKRRKKISYVRRRRDMYKALGPGSQAEDATLLAFGTLFSGPYRGSESYFDIHESPKDQRVQRVLEKVEFLPFAPEIMAAGKEFAKNNIKEPFLCAQLRLLDGQFKNHWKATFSALKEKLEAIELEIRRNMTSGLIHMFVMTDLPPTNWTNTFLGDVATDERYKLYTLKESDDLVLQTAERLMAAEHGIRSGFLQKIIESTKKDCDPVQLPEILLYIEESVCSCASLGFVGTAGSTIAGSIETMRKNKVCKL

SEQ ID NO: 48524 - protein, 133 aa, Zea mays
  Coding DNA Sequence Number=SeqID_6745
MAPPVDVAVCALRRVTWGYSEPEVASTVPGHFKDRGQLSKTPSRMRIIRRAPHQAGRRATRRFQSRIQVDLVSEAPDRSSGKGDASGKGSEEAKGRFRIKFLRPVGRWREPQRSLRRRSLFFCNLCYCRPAPL

SEQ ID NO: 48525 - protein, 711 aa, Zea mays
  Coding DNA Sequence Number=SeqID_6746
  Gene Ontology: Mol. function=RNA-directed DNA polymerase activity; Cellular component=intracellular; Biological process=RNA-dependent DNA replication
  Homolog annotation: Hit_ID=UPI00004C1732; Match level="QueryCoverage =99%, HitCoverage=51%, E-value=0.0, Identity=81%"; Hit description =UPI00004C1732 related cluster
  Pfam annotation: Domain name=RnaseH; Domain location=364-489; Score= -22.2; E_value=0.0068; Accession=PF00075.14; Description=RNase H
  Pfam annotation: Domain name=rve; Domain location=530-689; Score =112.7; E_value=1.1e-30; Accession=PF00665.16; Description=Integrase core domain
  Pfam module annotation: Pfam domain module=RnaseH::rve; Domain location=364-489::530-689
MPGIPRDVAEHSLDIRAEARPVKQPLRRFDEEKRRVIGEEIHKLMAAGFIKEVFHPEWLANPMLVRKKGGKWWMCVDYTGATYQRCMNHVFGEHIGRTIEAYVDDIIVKTRKASDLLSDLETTFKCLKAKGVKLNPEKCVFGVPRGMLLGFIVSERGIKANPEKIVAITNMGPIKDMKGLQRVMGCLAALSRFISRLGERGLPLYRLLRKTERFTWTPEAKEALGNLKALLTSAPILVPPAAGEALLIYVAATTQVGPVYFISEVLSETKIRYPQIQKLLYVVILTRRKLRHYFESHPVTVVSSFPLGEIIQCREASGRIAKWAVEIMGETISFAPRKAIKSQVLADFVAEWVDTQLPAAPIQPELWTMFFDGSLMKTGAGAGLLFISPLRKHLRYVLRLHFPASNNVAEYEALVNGLHIAIELGVRCLDARGDSQLVINQVMKNSHCRDLKYISTEELPLDRAEARRLAWHAKSFVLLAPQALVRNAFRQGFYWPTAVADATRIVRTCQGCQFYAKQTHLPAQALQMIPITWPFAVWGLDLVGPLQKAPEGYTHRLVAIDKFSKWIEVRPLNSIRSEQAVAFFTNIIHRFGVPNSIITDNGTQFTGRKFLDFCEDHHIRVDWAAVAHPMTNGQVERANGMILQGLKPRIYNDLNKFGKRWMKELPSVVWSLRTTPSRATSFTPFFLVYGAEAILPTDLEYGSPRTRAYDD

SEQ ID NO: 48526 - protein, 63 aa, Zea mays
  Coding DNA Sequence Number=SeqID_6747
MLSFENLPVQGVLSKSFVDRLVFFAEVFLATTGTIDGVKQPSWIVQPIAEPVQPPTSLMILCL

SEQ ID NO: 48527 - protein, 317 aa, Zea mays
  Coding DNA Sequence Number=SeqID_6748
  Gene Ontology: Mol. function=protein binding; Biological process =proximal/distal pattern formation
  Homolog annotation: Hit_ID=Q2QXZ2; Match level="QueryCoverage=99%, HitCoverage=63%, E-value=6e-99, Identity=65%"; Hit description =Ankyrin repeat family protein, putative, expressed
  Pfam annotation: Domain name=Ank; Domain location=126-159; Score =14.9; E_value=0.22; Accession=PF00023.20; Description=Ankyrin repeat
  Pfam annotation: Domain name=Ank; Domain location=161-193; Score =38.8; E_value=1.9e-08; Accession=PF00023.20; Description=Ankyrin repeat
  Pfam module annotation: Pfam domain module=Ank::Ank; Domain location =126-159::161-193
  Subcellular localization annotation: CTP_CleavageSite=68; ConfidenceScore=5.34e-01
MVKEASVDDVMKVLMGRASSRCRSSGPPAPTWWRARASPPTSSQAPPHRRGRQDRGDPRQVPRRAPPPAGGAGPRSPFLTHHYLPINAASSAADREHRIRRMRRALDAADIELVKLMVMGEGLDLDDALAVHYAVQHCGRDVVKALLELGAADVNSRAGPAGKTALHLAAEMVSPDMVSVLLDHHADPNARTLDGVTPLDVLRSLTSEFLFKGAVPGLTHIEPNKLRLCLELVQSAVMVATRDDGGAHGDAGGGGSDGGSFPRGGDAADDSLVSLTMNSTLMYQGQEMAAALAGDARKGSGGGRGSPSSLYFPNGFA

SEQ ID NO: 48528 - protein, 180 aa, Zea mays
  Coding DNA Sequence Number=SeqID_6749
MAKRATVARNPASDSLSPARWSGRRRPGHEHRCLLNGGVKEGGDGGEHHPRSGLELDLLCCYVLRWWLLILAAVQRPKETSAPYVHDPSSLDWMNEGREGLYLCGHAPPQEAAGRELAAYSDVSVTVSSRVQVHREIHVEEGFLDAGTHGFLAPTVVVFVAVQDWDEACQHGPTRQWHGK

SEQ ID NO: 48529 - protein, 89 aa, Zea mays
  Coding DNA Sequence Number=SeqID_6750
MAIASLSSFQRCLLAQICSPLALSRLVTGVDFVESTIDGVTIWGFSALKAAGGVRELRIWFVDFHPQGLFGVPRLWVSAGIYFLTIEFV

SEQ ID NO: 48530 - protein, 1693 aa, Zea mays
  Coding DNA Sequence Number=SeqID_6751
  Gene Ontology: Mol. function=protein binding; Cellular component =membrane; Biological process=defense response
  Homolog annotation: Hit_ID=Q2R8Y8; Match level="QueryCoverage=88%, HitCoverage=98%, E-value=1e-134, Identity=30%"; Hit description =Leucine Rich Repeat family protein, expressed
  Pfam annotation: Domain name=LRR_1; Domain location=1022-1047; Score =2.5; E_value=98; Accession=PF00560.23; Description=Leucine Rich Repeat
  Pfam annotation: Domain name=LRR_1; Domain location=1208-1229; Score =2.4; E_value=1e+02; Accession=PF00560.23; Description=Leucine Rich Repeat
  Pfam annotation: Domain name=LRR_1; Domain location=1231-1253; Score =4.6; E_value=39; Accession=PF00560.23; Description=Leucine Rich Repeat
  Pfam annotation: Domain name=LRR_1; Domain location=1303-1332; Score =1.0; E_value=1.9e+02; Accession=PF00560.23; Description=Leucine Rich Repeat
  Pfam annotation: Domain name=LRR_1; Domain location=1372-1394; Score =1.6; E_value=1.4e+02; Accession=PF00560.23; Description=Leucine Rich Repeat
  Pfam annotation: Domain name=LRR_1; Domain location=1396-1418; Score =11.3; E_value=2.2; Accession=PF00560.23; Description=Leucine Rich Repeat
  Pfam annotation: Domain name=LRR_1; Domain location=1420-1441; Score =8.2; E_value=8.5; Accession=PF00560.23; Description=Leucine Rich Repeat
  Pfam annotation: Domain name=LRR_1; Domain location=1443-1465; Score =8.9; E_value=6.1; Accession=PF00560.23; Description=Leucine Rich Repeat
  Pfam annotation: Domain name=LRR_1; Domain location=1467-1488; Score =7.9; E_value=9.6; Accession=PF00560.23; Description=Leucine Rich Repeat
  Pfam annotation: Domain name=LRR_1; Domain location=262-278; Score =0.5; E_value=2.3e+02; Accession=PF00560.23; Description=Leucine Rich Repeat
  Pfam annotation: Domain name=LRR_1; Domain location=584-605; Score =2.7; E_value=91; Accession=PF00560.23; Description=Leucine Rich Repeat
  Pfam annotation: Domain name=LRR_1; Domain location=607-628; Score =13.1; E_value=0.99; Accession=PF00560.23; Description=Leucine Rich Repeat
  Pfam annotation: Domain name=LRR_1; Domain location=630-652; Score =13.8; E_value=0.65; Accession=PF00560.23; Description=Leucine Rich Repeat
  Pfam annotation: Domain name=LRR_1; Domain location=654-676; Score =11.1; E_value=2.4; Accession=PF00560.23; Description=Leucine Rich Repeat
  Pfam annotation: Domain name=LRR_1; Domain location=678-700; Score =16.4; E_value=0.1; Accession=PF00560.23; Description=Leucine Rich Repeat
  Pfam annotation: Domain name=LRR_1; Domain location=702-724; Score =15.7; E_value=0.17; Accession=PF00560.23; Description=Leucine Rich Repeat
  Pfam annotation: Domain name=LRR_1; Domain location=726-748; Score =9.2; E_value=5.4; Accession=PF00560.23; Description=Leucine Rich Repeat
  Pfam annotation: Domain name=LRR_1; Domain location=750-772; Score =10.6; E_value=3; Accession=PF00560.23; Description=Leucine Rich Repeat
  Pfam annotation: Domain name=LRR_1; Domain location=774-796; Score =10.9; E_value=2.7; Accession=PF00560.23; Description=Leucine Rich Repeat
  Pfam annotation: Domain name=LRR_1; Domain location=959-981; Score =7.3; E_value=12; Accession=PF00560.23; Description=Leucine Rich Repeat
  Pfam annotation: Domain name=NB-ARC; Domain location=152-450; Score =83.4; E_value=7.1e-22; Accession=PF00931.13; Description=NB-ARC domain
  Pfam module annotation: Pfam domain module=LRR_1::LRR_1::LRR_1::LRR _1::LRR_1::LRR_1::LRR_1::LRR_1::LRR_1::LRR_1::LRR_1::LRR_1::LRR _1::LRR_1::LRR_1::LRR_1::LRR_1::LRR_1::LRR_1::LRR_1::NB-ARC;
  Pfam module annotation: Domain location=1208-1229::1231-1253::1303 -1332::1372-1394::1396-1418::1420-1441::1443-1465::1467-1488::262 -278::584-605::607-628::630-652::654-676::678-700::702-724::726
MVHVGEMLASAVIKEVVRRLPALLQAPVKGPAKMIRSFREDLDEMKMTLESIKATMAEAEQRSINDETARLWLKRLKRAAYDISDMFDEFEHGSPPGKKLQGPSWFEIMFSRDMAKKMKKMNKRLKEIAEQWKNYGGIGRVSCEPKNDAAEEQETTSSSSSAVVVGRRAEKQAVINILLSSNNTYPQETISHCTVIHGLGGVGKSELATSVFNDERIKEAFPQRAWVWLGQNFREKDIGRAIISIVECGSCNLEILESIYQHLRKVLLGRCLIVLDNLWDSVHLAKLQGELGSNVSILVTSRREIQLNMPRSTLFRLDPLSERFSLDLVKEVASSYFPAGDIPETAMEEIVKMCGGVPLALKSVASQLRPERSVKELLSLIRAISPPKSDYGTTDIQDRVLASLKLTYHLMSPSLKLCFAYCAIFAKGDEIDREGLCHQWIALGLTEKMYAEDRVRDLLTMSFLRDPEPPAITRSSSGGSSKLKMHDLVHDLAMLVADDELLVINQECVVFKSDSPRYAMVFACKLENLHKNKLLAGLRALHIKDSDGLKFKWYNFSFVKCLRIMDISGLCTEKLPSSIGNMMQLRYLNASGIQCEVLPKAIGSLSKLQYLNLHGSRISALPDSVTKLGQLMHLDISDCVHLQTLPNSFCNLESLCFLSLKNCCRLSSLPDDLARLENLEKLNLSGCSCLDTLPKSLGELDSLKLLDLSGCMKLTMLPKSFISLTSLQYLNISSCSELDIPVDALNKLTKLNYIDMSCCPKLVGLPQEFCSLKHLHTLNLSDCSKLAYLPEKLGQMESIKFILLDGCTESVRKPILKHRLGAGLQSLPAFVVERKADSIRSNIFQLEQEKFSELELYRLENIHTVDEAKALKMPDRSGLRSLGLMWTLNVDRFVEDEALLQALEPHENLKKLTVQGYMGERFPKWKLELGSSRQGHLHEVGLMHFPMCSSLPQLGQLANLKKLYLSRMPKIRRLGRELSDNTGGLRNLQIFTLEYMENLEEWCTTMTSATGQQQQEEFMFPALQELTIYHCPLLTMRPCPPRSIDYWEVRASSGAAQLLLQKDGMMQSVADYMGLQCPFAYTSELHVSGSSSSSTLLPTDGWKFNGSLITLKDLTSDCCSLIDRLLAKGNSMQCLVNLEVSGIKNTNSLLEEVESVAYYTRSSLAKSWPDWFLQEQGINRASPHFIVTGYANCGVDGWIHKVTSFLGNLIRINMENLPMCDCLPPLGQLPMLQELRLKGMPKIRSIDRDFCGSGSGSQQSSHTLFFPRLTRFVLNDMPNLEDWVTKVSGASDPYGQEEFMFPKLVKLTIWNCPKLKLKPCPPRAMEWDINNSDQVIASNYDINSGGYLVTMLQVLLCKVPPSNWKLLHQLPGIQSLAIVSCHGMEALPDSIQYLSSLHSLTVSKCHGLKHLPDWLGDLTSLERLMVVSCPLEFLPGSLRRLPFLRSLTLSRCDRLAALPGWMGDLKSLVTITIEECKSLKSLPKLYHLEHLHIQCNDELERWCKSEVNQHKFSQTLRKGFFLESPMGTNSCILPARSLSILWGQDDRYWRLNSIPESRFALSMELIAVWWLEIEGWVPFEFLSTDTSYDIFLVYKLADEHDGLRWGESYVAVDGVHTTDGVVSFVDEDAVRVDRVAYPVTRSEGWMELWLGEFYNKYVDREVKVSVWEKTDTYAKIGLIIEGMEIRKKSGSIS

SEQ ID NO: 48531 - protein, 194 aa, Zea mays
  Coding DNA Sequence Number=SeqID_6752
  Gene Ontology: Mol. function=sugar binding; Biological process =ubiquitin cycle
  Homolog annotation: Hit_ID=Q6K3E9; Match level="QueryCoverage=73%, HitCoverage=54%, E-value=2e-25, Identity=43%"; Hit description=F-box family protein-like
MAGDGEGVAGVRRTVLPGANLGDREAWVARFIGGGFKLASSGIRGELHGFSTCAELLAVCWLDISGCMPCRMLSGDTRYAAYLVFKMADDCFGLDSPLQEASVSVGEGGTSTAHWIRLQSYHVGDEENGVTEEGAPPRLPHERPDGWMEVELGDWYNHGGDDDLVVRASVKEARFGGNWKKGLIVQGLEIRPKN

SEQ ID NO: 48532 - protein, 171 aa, Zea mays
  Coding DNA Sequence Number=SeqID_6753
MRDGGELGCERESSVVAVFIEEREEEERVTGCFMAINGGSNGRRNGRNEAPLTKKRTVGSLGLQARVVRPSGSRWTQNAQGLRSWSSVGSDAGVARSVRVGKAGLRRVVDVGLRGLRRCSVGRLPGVARGAERQGGGESRVEPARVGEKGERKGQSLAAAAASAGSRGRRG

SEQ ID NO: 48533 - protein, 497 aa, Zea mays
  Coding DNA Sequence Number=SeqID_6754
  Gene Ontology: Mol. function=protein serine/threonine kinase activity; Biological process=protein amino acid phosphorylation
  Homolog annotation: Hit_ID=Q2QXA8; Match level="QueryCoverage=57%, HitCoverage=57%, E-value=1e-100, Identity=62%"; Hit description =Protein kinase family protein, putative, expressed
  Pfam annotation: Domain name=ACT; Domain location=160-223; Score =31.3; E_value=3.5e-06; Accession=PF01842.15; Description=ACT domain
  Pfam annotation: Domain name=Pkinase; Domain location=240-475; Score=- 104.9; E_value=0.026; Accession=PF00069.15; Description=Protein kinase domain
  Pfam annotation: Domain name=Pkinase_Tyr; Domain location=240-465; Score=-131.1; E_value=0.0002; Accession=PF07714.7; Description =Protein tyrosine kinase
  Pfam module annotation: Pfam domain module=ACT::Pkinase::Pkinase_Tyr; Domain location=160-223::240-475::240-465
MAAVAGDGGGGPEEGVGESSSPPRNPVLAPAPAASGGSGSGGGGRGGGLRDICREVFERLVNDGHRAGSELLAQLEAHFNRLPISYKLDVNIDKAEDVLIHQKVLAEAQDPDRRPAFTVRFLRLEEVNVDETTNSDAHEEGADIGEALSTRSKTSYAHIHEILFSTKDKPKLLSQLSALLSDIGLNIKEAHVFSTTDGYSLDVFVVDGWPVEETDGLHKALEVSILRNEDFESDIDTRLLKLVNKIASGSCGDMFLGTYSGEEVAVKVLNPQNLNKNVWSEFKQEINMLREVDHPNIVRFIGSCTKPPQFYIITASIFSNIADDIATQAWDMLSVKELRLVNEQKIINFIALLVGTASSCTSPGECRSTSAPTQTSGNNGGFQLKKSGSSGTGGDNDMKSRRSSHHYDVTTASYGQHRSDPDVPSTDHSAPATGCASLFVPAPVLARVPPPVPRCPVTRSMIDTILRVHYRNLNITTPSPAPPLIPVNYPSGLANAN

SEQ ID NO: 48534 - protein, 230 aa, Zea mays
  Coding DNA Sequence Number=SeqID_6755
  Homolog annotation: Hit_ID=Q10P99; Match level="QueryCoverage=70%, HitCoverage=34%, E-value=5e-42, Identity=56%"; Hit description =Senescence-associated protein, expressed
MEREEVVHGVELDRCDIAGQRPLDGLLLGASVRPIAAEQAEEAATVVGLLVDQAREDGDRVVPLAEAHDGERASAEVDAAVGVDEVELRPGDSDDGLLCGGRWRCRVLFDRLGEEVLCELIGVDGGVEGVACGSADGGGGCGEESGVEIRVGLVHIRVEALLGIRGSESHGCVAVLDDEAVMRKQLHEAREQLVRQSSDKEINPMGQVPAIVDGRFKLFERLFFFTNSGQ

SEQ ID NO: 48535 - protein, 157 aa, Zea mays
  Coding DNA Sequence Number=SeqID_6756
  Gene Ontology: Mol. function=calcium ion binding; Cellular component =flagellin-based flagellum; Biological process=ciliary or flagellar motility
  Homolog annotation: Hit_ID=Q84MN0; Match level="QueryCoverage=99%, HitCoverage=92%, E-value=2e-57, Identity=66%"; Hit description =Putative calmodulin
  Pfam annotation: Domain name=efhand; Domain location=123-151; Score =42.0; E_value=2.1e-09; Accession=PF00036.22; Description=EF hand
  Pfam annotation: Domain name=efhand; Domain location=19-47; Score =36.3; E_value=1.1e-07; Accession=PF00036.22; Description=EF hand
  Pfam annotation: Domain name=efhand; Domain location=87-115; Score =37.1; E_value=6.2e-08; Accession=PF00036.22; Description=EF hand
  Pfam module annotation: Pfam domain module=efhand::efhand::efhand; Domain location=123-151::19-47::87-115
MEELAAVTRSLGLDPSDQELNDMMSEVDTDGNGIIDFQEFLSLIARKMKASLSLICLSRILPKLTIAVRKLTAHLLRCLQDGDGDEELKEAFEVLDKDQNGFISPVELRTVMTSLGEKMTDEEVEQMIREADTDGDGQVNYDEFVLMMKNAERKISG

SEQ ID NO: 48536 - protein, 88 aa, Zea mays
  Coding DNA Sequence Number=SeqID_6757
MAREDGRRDRDTVAVLVEEREGLLEREPLLVRQPVHATDSKALYGTNASCQVKGVLEYCNLISKDVIYMAQHRSLVTVAVTPYQTTLE

SEQ ID NO: 48537 - protein, 146 aa, Zea mays
  Coding DNA Sequence Number=SeqID_6758
  Homolog annotation: Hit_ID=Q6QP51; Match level="QueryCoverage=97%, HitCoverage=60%, E-value=3e-14, Identity=38%"; Hit description =Putative growth-regulating factor 1
MMYPLQRGRSEPKVGRGGDSSEVEVEAEPWGRARRRPSSEVEAEAEPWGRARRRLSSEVKAGAEPRGRARRRPVFRGRGGGEPRGQARRSFLWRLRLDSVAVSLTLAGGTTVGAGQAALFSCQVSQWRGEVTAVTSALPTEERMLG

SEQ ID NO: 48538 - protein, 192 aa, Zea mays
  Coding DNA Sequence Number=SeqID_6759
MARNREERLSCGGDADQPHKHSDSSTEQSTLNLAVATAVAAAAHLRPTVVAAAAHLRPFVGLVVGLKPAWSLSAYPTRVPGAAADPAPLLRSTASINEKELGEDDNTNVNASENVEANKEASGAANDLYHVICTKDWIRAERKDPYNVTSLLDDLSNIIDTVSDDNVDHDGDASDVVDHNVDDNDIVQVEED

SEQ ID NO: 48539 - protein, 45 aa, Zea mays
  Coding DNA Sequence Number=SeqID_6760
VWKARRTYAMHSYAYIEVKFADDVVIYSSEGSVIQPIVVVRGNEM

SEQ ID NO: 48540 - protein, 810 aa, Zea mays
  Coding DNA Sequence Number=SeqID_6761
  Homolog annotation: Hit_ID=Q10HH4; Match level="QueryCoverage=81%, HitCoverage=75%, E-value=1e-75, Identity=45%"; Hit description =Expressed protein
  Pfam annotation: Domain name=Frigida; Domain location=342-626; Score =24.2; E_value=4.4e-10; Accession=PF07899.2; Description=Frigida-like protein
MAQSTPDPPALVAMTLAELEAAIAALPGKWGALREAFDRLAACSPSPLPFAWEDLDGYISSLQSSVALRFRQVRALEAAGAVPAAAASLVTRGDGKGENQELEEDDELDEDVAVEVEEKVAVEVEEEADEEIQEADSDKICNDEKDGKEAREVEVEKEVAELEKADEDMQEANSDKFCNDEKDGNETREVEVEDEVAELEKKADLEMQEVDYDKICNDEKDEKGGKEEVVEEEGVEEASNIKIGNEIKYEKESREEEQASKVNEQDPDKEMQVVDKDKLNTKGAFKASQDKEKDQDTNMDETVTKMASSVQHKEGEEACDRKQKEAQKQDLHEKVEGTKNAKDQGNRALPRRSDDCTVACAYMDAKRLVKLVCTNTDLKSELHAAFRCAPDAAAVALHVVELFLHNKTFVRTNKVWANCVELVQMVPVFVTKPSADTTEQAKRMAKDWKEMIDSPESCYVLGSLASWGLLYFLISYNIVTEFDMKEIFRLFGNIPFKQKKKSAMLLKGLGLSNRIPELMDYLIGNGQQMDVLCLARVLNMVDKYPPLSLLKGYVEKAKQTAMEISQKNMTRQLRVVIIKELDDLRRAHFLVKKEITNTNLCTSIREEINILLGELEKKKRGLANPLTASTSNSQQRQTKINKKRKVMQKQEHHKGQEDRMQGQLSGLAEKPEKKQRKPQQEQQQEQENKPEEKKQKQEDGPEEKKPKHEYKPEEKKRKQEDKSEEKQQQKKQKHHKWLRQRTPMLPAQGYPAMWNAAMRSDLEPPPYAATHGVHHGYHHPVQPGWPGVHCASPFIGPSTPWYPPPQFYPR

SEQ ID NO: 48541 - protein, 633 aa, Zea mays
  Coding DNA Sequence Number=SeqID_6762
  Homolog annotation: Hit_ID=Q5W6K5; Match level="QueryCoverage=82%, HitCoverage=81%, E-value=9e-77, Identity=38%"; Hit description=ABI3 -interacting protein-related
  Pfam annotation: Domain name=Frigida; Domain location=207-498; Score =53.4; E_value=7.5e-13; Accession=PF07899.2; Description=Frigida-like protein
  Pfam annotation: Domain name=Vicilin_N; Domain location=461-588; Score=-74.0; E_value=0.094; Accession=PF04702.3; Description=Vicilin N terminal region
  Pfam module annotation: Pfam domain module=Frigida::Vicilin_N; Domain location=207-498::461-588
MATQDELQAAVAAVTEKKRRLREAFDRLVSCAPVPVPFRWEDVDAHLAAIFRHLGSTHADVIAIAGGPATAAHHFQFQHTVKEEQDQERRVGRGASEEGQGSNAEEGRSASSHQERGEEEGEVREASVARPDREADEAGNILGAEAVPEQLDDEKEDDMGTIVASPHQRNDGIEMVVEEEEEAVKGNADREGREDEAEEGEWRQQHPHAAGGGETSSALAKAVAAACANMDPSALVDSLRVSGRSSPRAFLPALLGAPDPHALLVRAVGGVLDMASAERDASKWWCANCVALVECAPRLPAPSPDALAHAKRLAGRWKEMVVAGPAGGGDTGGMAGWGLLTFIASYDIAPEFDADEIIRLFGDIASEVKDNCVELCKRLGLIGKMTDSVDHFIENGQPIDAIRLARTFGLTGKYTPLAIMNDYIENAKKDAEDILSKESYTPESRKQAMAKKVDALIFLWSAIDGYDMDSVQRSSIKAEITQLLHKYANKQQSLAGVPASISSSHQQQKFQEEYRQRPPVEQETQQRKAHELQQETEEKQHHQQRKAQETQHQHIQDQQETQKREMWQNRKRRRQNKNRKRKQRRQNLQQQSKRPRLPPYVRPGVGNQHGQPFSGGRFAACATTIPPYYWSMG

SEQ ID NO: 48542 - protein, 543 aa, Zea mays
  Coding DNA Sequence Number=SeqID_6763
  Gene Ontology: Mol. function=GTP binding; Cellular component =intracellular; Biological process=regulation of progression through cell cycle
  Homolog annotation: Hit_ID=Q5ZCV4; Match level="QueryCoverage=92%, HitCoverage=85%, E-value=0.0, Identity=82%"; Hit description =Putative nucleostemin
  Pfam annotation: Domain name=MMR_HSR1; Domain location=221-330; Score= 74.6; E_value=3.2e-19; Accession=PF01926.13; Description=GTPase of unknown function
MRVTHNNLLHLSGLACRLQWVSGVYQASGLVAWPKPFASLARKRKLGLLEDEEIANLASAASAQGSEFAAKDAAKDKAPLTVAKSNDHSERSFYKELVKVIEASDVILEVLDARDPLGTRCIDMEKMVRKADPSKRIVLLLNKIDLVPKEAVEKWLTYLREEMPTVAFKCNTQEQRTKLGWKSSKLDKTNIIPQSSDCLGAENLIRLLKNYSRSHELKLAITVGIVGLPNVGKSSLINSLKRSRVVNVGSTPGVTRSMQEVQLDKKVKLLDCPGVVMLKSSNSGVSVALRNCKRVEKMEDPVTPVKEILGICPHEKLLSMYKVPSFSSVDDFLQKVSTVRGKLKKGGVVDVEAAARIVLHDWNEGKIPYFTLPPKRDAVEDSDVVIISEDGKEFNIDEIYKAESSYIGGLKSIEEFHHIEIPPNAPPAIDEEMLEDGSKPSEPAQENREEQMSDANDPQGSKPATASTQNDKLYTAEGILDPRKRKAEKKRRKANRFSVLNDMDADYDFKVDYQMEDAADGEDEDAGDEAKEDNEPMTGVDDS

SEQ ID NO: 48543 - protein, 136 aa, Zea mays
  Coding DNA Sequence Number=SeqID_6764
  Gene Ontology: Biological process=regulation of transcription
  Homolog annotation: Hit_ID=Q9LWU9; Match level="QueryCoverage=57%, HitCoverage=13%, E-value=5e-24, Identity=66%"; Hit description =Putative gibberellin response modulator
  Subcellular localization annotation: CTP_CleavageSite=56; ConfidenceScore=5.65e-01
MSVAAAGQSVAVAKKEEFSKSPSNSPASSGGTNGGSSAVPWPNQLHAQNNTPAPVQAMELVVALTTCADSVATCNHDTANYYLTRLGEMASPAGPTPMHRVATYFAEVLTLHVVRMWPSRDLVIRFNSLWYWWRVA

SEQ ID NO: 48544 - protein, 307 aa, Zea mays
  Coding DNA Sequence Number=SeqID_6765
  Homolog annotation: Hit_ID=Q6QP54; Match level="QueryCoverage=22%, HitCoverage=37%, E-value=5e-14, Identity=52%"; Hit description =Putative kinase
MALPVDVAGLCPRSGDVEAPTKPGSSLSSVAEAEPEPLGRARRRSFGRGQGGVRALGSGEAEFVVFWGKEDYLLVEIGDAQIDYSLFLTSMHHAGDMSNTLMSVIVEYFNSISGALFDTVSRPSTISKYDICPFLLEKVKKGCNFKVKDSLLKTLEETQKRDMIMLPILDGSHWQLLANFIELLKIHKCMKFDVNSFEKIKASEIVACRMKLTHMLIKSKQNSADPCNVVKKLDVNIKKYSVSSRKVITSKNLTMLMGLIDQEIEEINAKKRKRSGHPAGQPELKDDDGQLRANAVKARDAELGCEM

SEQ ID NO: 48545 - protein, 860 aa, Zea mays
  Coding DNA Sequence Number=SeqID_6766
MAMQQQPPPPPGNPWPPHHGAGQHPPPTYPPPPPGQAWTNHSWAQNHGYQGHDNEEDWATKAKAWVAAKSVMGNHQIQQHAISTSRTEGHHNGYHDQYQQPAGLPTEVTEALHPPVPQSSIDHVPFPMTGQQRETNHLLDRGPMVSPAKNFGSFSSTYEQEVSYNYSSAPGTGNNMLQYPNSQAQPFPTTAAVQGGFSQGCLSMPVPLTEQPLFGHERQPIDPSDQPLEFNSRKAPDLAVHINVNSNIPAPQTLAPNHDVAATSTHSWTPSATVGYLPRAPVPPQTAQMDPSVHAAPLFGAASSSSYVSPAAFGVGNVTEVFPTDPNTPFSVADKSKKPPVPNWLREELLKKKSEPLSASAQNSENLNPMEANEAVQTIGRPDQSDSRSNDSAKSTEDDDDDEDEIEAARMAAINKEIKRVLTEVLLKVTDELFDEIATKVLNEDDSAESNEATGVFGSKETGLGRSRAKASAKVVLPAKSTNSSDHKDSTGLSSPKGALLGLASYDSDDDDDADTDSKDKMPISNLSSKDNAGAVNTEGDKSTLGKRNGNHNEQNSSLGSSPSGEDLKSNNQNFQRNANAEPEQMHIRDTENGEFRFKAKTRTEPKGAFDRMDEKAHTYAEVDIQNRKTSFGNNAEKHNDLESSHRHSEKSSKEDFVNELKADHTKELEYSRAEKYNNDDKYSMYGNIDKRGSCKEGKGSDSAAKHESDTREPHYRGNSKLDGAKGDWKDLPKDRERNRDDRRGKGKDEKDDRLRQMTSHNSRSSRSRSPRGRSRTRKENSHVRGSVSSDEPSDSVKKRKHYSHKTSMSPSPPKSRNRRISRSPHSKHSHRRHSPYSSAGRFRMQTRLAINLSVADYGN

SEQ ID NO: 48546 - protein, 225 aa, Zea mays
  Coding DNA Sequence Number=SeqID_6767
  Homolog annotation: Hit_ID=Q1S393; Match level="QueryCoverage=29%, HitCoverage=44%, E-value=4e-11, Identity=57%"; Hit description=Auxin responsive SAUR protein
MPRSSGRASPRARRSATTGPQEWEENEAEEVTRRRTSRKRSSSQGSATGPGAAGKPYSSSACRSSSRNAGWLRCASRTTNRLGAAAVPCTDTATCPAGTAASEEDDAASAARDRHRRSARRSQTSDGIVNATLHMMLGGLELELLERPGCWVVLLLFAVEARSCAVEAVDLVVDIYIYIERERQVVSLQKCTKELVPTDVIKRMEGVSLTRLESATPCFCFQIIG

SEQ ID NO: 48547 - protein, 65 aa, Zea mays
  Coding DNA Sequence Number=SeqID_6768
MEIYKELVQSLQPLLTEKKNQLHSLDLPAELRVAGLFYKGINFKVKDANQGQRKIIALFEKLWNM

SEQ ID NO: 48548 - protein, 203 aa, Zea mays
  Coding DNA Sequence Number=SeqID_6769
MRMIANTSNSGRRHGPTVARSVVLEAVNVDPGSSELPAFVAQILQSVLGTINAQSTGTPTSSDTGSLDPSQSSIPNTIRVELDQQQAPLLFQSEPAHESSQPNVIPDALTTMSQYINFMRDSFRREGFSLNGQTEGNVENRTAEPESASVLGLHNASLLAENMHSTRQIIVEQAGALLSASSQAGRGAQAPLNGAGQQGVQKL

SEQ ID NO: 48549 - protein, 184 aa, Zea mays
  Coding DNA Sequence Number=SeqID_6770
  Homolog annotation: Hit_ID=Q1S393; Match level="QueryCoverage=27%, HitCoverage=35%, E-value=1e-08, Identity=57%"; Hit description=Auxin responsive SAUR protein
MAAAEHLHAIELVPATCKSCRNPSPSPIGSGPDSPRAHRRVARPQQEEEEEEAAADVDTRWRTSRKWSSSQGSAMGPGAAGKPYSSSACRSISRNDGWMRCATRTTNRLVEPDPAAAAAASTHTATCPAGTEVQGGGRRRRRRCSRAVRTYDVYSALYRDTLKVTPASGGAMRSAAVALLCWYC

SEQ ID NO: 48550 - protein, 424 aa, Zea mays
  Coding DNA Sequence Number=SeqID_6771
  Gene Ontology: Mol. function=protein binding; Cellular component =protein complex; Biological process=protein catabolic process
  Homolog annotation: Hit_ID=Q8W424; Match level="QueryCoverage=57%, HitCoverage=92%, E-value=1e-128, Identity=83%"; Hit description=26S proteasome regulatory particle non-ATPase subunit8
  Pfam annotation: Domain name=Mov34; Domain location=12-125; Score =170.8; E_value=3.5e-48; Accession=PF01398.11; Description =Mov34MPNPAD-1 family
MDVVKAAQLSGRTLERVVVHPLVLLSIVDHYNRVARDTRKRVVGVLLGTSSRGSVDVTNSYAVPFEEDDKDPRIWFLDHNYHESMFSMFKRINAKEHVVGWYSTGPKLRENDLDVHALFNSYVPNPVLVIIDVQPKELGIPTKAYYAVEEVKENATQKSQKVFVHVPSEIAAHEVEEIGVEHLLRDVKDTTISTLATEDVFNLLPNLNVNELIKAFAVKTNDMMLVIYLSSLIRSVIALHNLINNKAPASVEPYASVEATPEKKPYPPATVAEEVRLAGARTRYHIPLAVADVPVQDFGLLCLLSILKSSTDWEQLQRYSLKQGSIVESHEEDASRRVTTDETESQEDGQDQFERAKTQNMETAISEVILLLSAMLNFASQSGGQFSRTIRLLNDGVRQVFDKMQWLLLLNIDSVLESCSAPYW

SEQ ID NO: 48551 - protein, 124 aa, Zea mays
  Coding DNA Sequence Number=SeqID_6772
MQAPPSAAGCGRLSSAPQPGPPHSGTSTQQPDDGEGHGPPGPSVLEPKPERVNGGQWAVCSPDVNTIIRLVVYRNHCDQPSDSFNVYSFPFFLQEEENGWEDHSATSPLESLVNCWRWCKALGK

SEQ ID NO: 48552 - protein, 142 aa, Zea mays
  Coding DNA Sequence Number=SeqID_6773
  Homolog annotation: Hit_ID=Q1S393; Match level="QueryCoverage=56%, HitCoverage=54%, E-value=6e-10, Identity=45%"; Hit description=Auxin responsive SAUR protein
  Pfam annotation: Domain name=Auxin_inducible; Domain location=4-98; Score=95.7; E_value=1.4e-25; Accession=PF02519.5; Description=Auxin responsive protein
MAKCSSKIRYIVWLRQTLRRWRSRAAARAAVPAGHVAVCVGGAARRFVVRAAHLNHPVFRELLRQAEEEYGFPSGACAGPIALPCDEGLFEHVLRHLSSPSKSARFVTLEDLESGALSCCCVAAAGDSLPLLRGISADKAVW

SEQ ID NO: 48553 - protein, 174 aa, Zea mays
  Coding DNA Sequence Number=SeqID_6774
MSERMLSMFQTIQDRQDTLQQQLLANRAENRAFMTLMLQHTSVQIPPVQSAPPPALQAAIVPAIQAGPPLPLLGPSSSLLRSVTLVFSSSVISSVSAPPPVPLAPAVTTAAVAVSVTSSAPAVPVAWPMSESVPAPASIADPGSETDSDPQLAFALLPRPRPDAPSPPPSSSGL

SEQ ID NO: 48554 - protein, 81 aa, Zea mays
  Coding DNA Sequence Number=SeqID_6775
  Subcellular localization annotation: CTP_CleavageSite=18; ConfidenceScore=5.09e-01
MKLWKETSRSSKTTTSSRCGLAATPSRLPVKAAVIYVSFPHFDLLETGSLQLLAPLLLTGGKGADLVIRGNIVLNRLNTGL

SEQ ID NO: 48555 - protein, 74 aa, Zea mays
  Coding DNA Sequence Number=SeqID_6776
MADQIAGDGDGVSSVANHGRRAQPHVEDLASEKNYPIPAPEVEGNWATAQCDMAAALQLRPPVSTIGSLDLNPN

SEQ ID NO: 48556 - protein, 244 aa, Zea mays
  Coding DNA Sequence Number=SeqID_6777
MCALREHGLGFSCTSGVSECVMREAVRMANFGCERDSTTTNRCCAMRKGASGCAGGCASHAGRSQASRRTSRRARVAARYGCAYKLNGRVARSSRAQRGARPCLGRRGAYRGGKGGSAMAGRPHGEGGRGPERRKGGGEERQKGSSAEVMANGFGHQRHSRKRRRRQRFFADRAPCDLCEGARRLETQLRMVRSNGQGSKVVGGFLSWTRSARAVGEEANRLGSQWVCGGCAGACLHTSVLHGP

SEQ ID NO: 48557 - protein, 165 aa, Zea mays
  Coding DNA Sequence Number=SeqID_6778
MNVCELTLVVLTSPPGQGQAPLDEALEGCGDEFASGLGRHLPVNFVLLDRCCCMISCSESLEASSGREKQSRLDRPTSGRNAVTTRLRLTSDRSAETLLGSLDGPPDDLPIKACPRAVTRLDELDPERQIRDDRVMHRRNVDTLGREVEHTRKARYSEITRVKDN

SEQ ID NO: 48558 - protein, 734 aa, Zea mays
  Coding DNA Sequence Number=SeqID_6779
  Gene Ontology: Mol. function=protein serine/threonine kinase activity; Cellular component=cytoplasm; Biological process=protein amino acid phosphorylation
  Homolog annotation: Hit_ID=Q5I6E9; Match level="QueryCoverage=61%, HitCoverage=60%, E-value=1e-160, Identity=63%"; Hit description =AvrPto-dependent Pto-interacting protein 3
  Pfam annotation: Domain name=Pkinase; Domain location=311-647; Score =227.6; E_value=2.7e-65; Accession=PF00069.15; Description=Protein kinase domain
  Pfam annotation: Domain name=Pkinase_Tyr; Domain location=311-641; Score=-1.9; E_value=2.4e-12; Accession=PF07714.7; Description =Protein tyrosine kinase
  Pfam module annotation: Pfam domain module=Pkinase::Pkinase_Tyr; Domain location=311-647::311-641
MLLLRPTILVTLTPLSRPIVLFERLRLDPEAHCLEEELDQFGVRSMLLRVVPPASFHGRVLEDPLNVEQVDMEEPCNGEILAAADTRFSFKPACGPTDLIAKGAELEAPLDPGSDPEYRDFQFRFIPEVFELQMGGGVRNGDGKVTAEKVLGFEFDKVRISIASSDDEVDGEAPPRSSFSGASHPPEPVDEIDTVFVAVDGREKPVQKPIISWDASPPPSGAASPHSSIDSSGAAATTVTITSLAPSCTVTSRSAKTSVSSSAASDGSGWSNGTGTGAGGSAGKPHKGGDPRWKAILAARARDGPLAMGSFRLLRRLGCGDIGTVYLSELSGGGAGNGGAARPCWFAMKVMDKASLESRRKLSRAQTEREILQLLDHPFLPTLYAHFETDRFACLVMEFCPGGDLHALRQRQPGKHFPEHAARFYAAEVLLALEYLHMLGVVYRDLKPENVLVREDGHIMISDFDLSLRCAVSPTLVRSSLNSDSRNAQAACIQPTCFMPKLFGQRSKKSSSAKKSKSKGGEPRQQQAPTGLPELVVEPTGARSMSFVGTHEYLAPEIIKGEGHGSAVDWWTFGIFLHELMYGKTPFKGQTNRATLFNVVGQQLRFPDCPGTSNASRDLIRGLLAKEPQSRLGVKRGAAEIKQHPFFEGVNWALIRCSTPPGVPRAVEPVALAPPAPAKPAPVERAEINSSSNSKRMEINSSSNSKRMEINSSSKRMAGTGSESGGKFLDFEFF

SEQ ID NO: 48559 - protein, 68 aa, Zea mays
  Coding DNA Sequence Number=SeqID_6780
MALCDGNMMFSVLRCGSVQMVEIPPRLLWGNNRIIAWHNRENRGIINGDPMATSPARGATTSLCQCPS

SEQ ID NO: 48560 - protein, 181 aa, Zea mays
  Coding DNA Sequence Number=SeqID_6781
MPRHNQEVGPNGGATSLVPLPRLPQETDEIIEGDKILENARINRLTDDTIVGLGKLHPQQLGFGLGGILCRVRGVVAPREHLRGRGRDVELVCDATLGSMLTIQLWGERVYQSQAKRGVGKPKGRILPWLVNSGALHPDEPKVRLPTRSKASSKDMPRVYNRRTIADIYKEGRGAPTPPWG

SEQ ID NO: 48561 - protein, 306 aa, Zea mays
  Coding DNA Sequence Number=SeqID_6782
  Subcellular localization annotation: CTP_CleavageSite=50; ConfidenceScore=5.14e-01
MASVQVEANHGHGAAGSPPWKLYHNPHYTPRGRGTHLSSSCCSPSPCQVRRSPEPPPMIIALDDEEVDQGYGYGAMSSELELCVARIRDLRAELEFERRMRRKAEALSEALAAELADERRRSEAAEAECRALREEAGAARAEAERALEGVEEERRMLRVAELWREERVQMKLADARAALDEKLREIDDAVAQLQATADANKSSCCSSPNGSKSASQHGGQQSPQHGKPHRREPGGGGENPHIRRGIKGFVEFPRAARLRLRPRPREERVDLVSNLECQRAQLRVLMRHRSPAAGMGLIGAAENLVV

SEQ ID NO: 48562 - protein, 348 aa, Zea mays
  Coding DNA Sequence Number=SeqID_6783
  Homolog annotation: Hit_ID=Q9FGR6; Match level="QueryCoverage=73%, HitCoverage=74%, E-value=3e-69, Identity=47%"; Hit description =Arabidopsis thaliana genomic DNA, chromosome 5, TAC clone:K6A12
MAPPRRYLAALLALLCACTTTMPPAGSVVAAANVPITTCRSFCGNITVDYPFALHPGCGHAGLRDLLFCINGALMLHLPSGSYRVVDVDYAYRGLTLHDPAMSDCRALDLAPAGRGNGFVLEPWREPYLSPDPDNVFLLLGCRATSPLFQGFPDRHLPCRNVSGMGCGDYLGCLAWDDYYAGGGGRRGPSSGDAAGQPPECCALPWGAIRAVNVSRLECEGYSSAYSLAPVRAEGAAAGWAYGIRVSWTLPESNRGFCGACRATGGACGHDTESHADLCLCGDWNSTSNCDSSADAARSVAATLPAVAALRWAILASAKISKKPRRNNNNNTNNKQQFTSHKLLQENE

SEQ ID NO: 48563 - protein, 143 aa, Zea mays
  Coding DNA Sequence Number=SeqID_6784
MPKWKRGVAGIEHLQRALGPDGRRDGVRNGDGKVTAEKVLGFEFDKVRISIASSDDEADGDAPPRSSFSGASHPPEPVDEIDTVFVAVDGREKPVPKPIISWDASPLPSGAASPHSSIDSSGAAVTTVTSLAPSCTVTRKKET

SEQ ID NO: 48564 - protein, 123 aa, Zea mays
  Coding DNA Sequence Number=SeqID_6785
  Gene Ontology: Mol. function=protein-tyrosine kinase activity; Biological process=protein amino acid phosphorylation
  Homolog annotation: Hit_ID=Q9LDG0; Match level="QueryCoverage=69%, HitCoverage=13%, E-value=3e-14, Identity=53%"; Hit description =Putative receptor-like kinase
  Pfam annotation: Domain name=LRR_1; Domain location=49-72; Score=1.8; E_value=1.3e+02; Accession=PF00560.23; Description=Leucine Rich Repeat
  Pfam annotation: Domain name=LRR_1; Domain location=74-96; Score =12.2; E_value=1.5; Accession=PF00560.23; Description=Leucine Rich Repeat
  Pfam annotation: Domain name=LRR_1; Domain location=98-120; Score =8.3; E_value=7.9; Accession=PF00560.23; Description=Leucine Rich Repeat
  Pfam module annotation: Pfam domain module=LRR_1::LRR_1::LRR_1; Domain location=49-72::74-96::98-120
  Subcellular localization annotation: CTP_CleavageSite=9; ConfidenceScore=5.34e-01
RRRQPCRCRCRRAWCRSYSTSASTSPTSPASPPPNPGWTGVTCSPNCARVVALHLPGLGLSGAVQPGTLGRLTALQLLSLCSNNLSGPLPADLLRLPALTGLHLHRNDFSGALPAGLTRLAAL

SEQ ID NO: 48565 - protein, 94 aa, Zea mays
  Coding DNA Sequence Number=SeqID_6786
  Subcellular localization annotation: CTP_CleavageSite=65; ConfidenceScore=5.47e-01
MARPTEPRDSYAFGIRIPHSSPSVKSNSRSGSGIGGAPPSASFPPSTESGPTPDGDPSGRISTPKEDASSALGLSWPGSPQRFRPEQTPQLAVP

SEQ ID NO: 48566 - protein, 82 aa, Zea mays
  Coding DNA Sequence Number=SeqID_6787
MAGGRRAGELPRQGSSAGMGVCRGEGAARASHDAVPGTRPRLSALRATAGDAHGNSTLCTGWPCEGERGMERDRPWGRRRGG

SEQ ID NO: 48567 - protein, 66 aa, Zea mays
  Coding DNA Sequence Number=SeqID_6788
MADVAPQFVDSVAIRDLDSIPASEFIPKLIYLCLKIPDRIIAPTAAILMPWGKLVTRHTDWPERLR

SEQ ID NO: 48568 - protein, 58 aa, Zea mays
  Coding DNA Sequence Number=SeqID_6789
  Subcellular localization annotation: CTP_CleavageSite=22; ConfidenceScore=5.73e-01
MASVASNSAPTHSTSLMATPTSASTSARSCNVNLNTLMNMFNVLGAGGGLGGRNASNG

SEQ ID NO: 48569 - protein, 68 aa, Zea mays
  Coding DNA Sequence Number=SeqID_6790
MVAMSSWAVLVAVVLMQCCNVIVAARPLPMETPAVATADGGWLEMIMQVLQGPGSNNHNCQAPNGSCP

SEQ ID NO: 48570 - protein, 202 aa, Zea mays
  Coding DNA Sequence Number=SeqID_6791
MAVARISPSPPRPSPSSDGRRLRGHGEFGVVRASTETSVIEILGIKMGCISPVSHLFELVLRRWPKWGRRWRPRRHYLPDGVAFPITVFHERKPGPSQTGGGGVPGVTTFLMASLLNLVSATPPPLVDAFASRRPVLNPISFKNGSIPFFFLIEMQCSYHYIKKKTRRRMDLDGWHELAWNGTDVRVLEEERQGGGGAAVPR

SEQ ID NO: 48571 - protein, 83 aa, Zea mays
  Coding DNA Sequence Number=SeqID_6792
  Subcellular localization annotation: CTP_CleavageSite=36; ConfidenceScore=5.29e-01
MTAFDESRTLGTGIHSTKISFPSIKHSAKGGARQTVASRRVKLTAVISAESRVLALGKGFAECFPAFAECFRYSAKRTIPVVI

SEQ ID NO: 48572 - protein, 62 aa, Zea mays
  Coding DNA Sequence Number=SeqID_6793
MSWAVLVAVVLMMQCCNVVVAARPLLMEAPAVATAHGGWLEMIMQDAIDAHRESGHMEVLRH

SEQ ID NO: 48573 - protein, 57 aa, Zea mays
  Coding DNA Sequence Number=SeqID_6794
MEVVHRFKYAQIHIVAALATTRMLVLHLLHRSHSGQQQWEDTVEKELGADLWHVTAT

SEQ ID NO: 48574 - protein, 811 aa, Zea mays
  Coding DNA Sequence Number=SeqID_6795
  Gene Ontology: Mol. function=RNA-directed DNA polymerase activity; Biological process=RNA-dependent DNA replication
  Homolog annotation: Hit_ID=Q8S472; Match level="QueryCoverage=99%, HitCoverage=77%, E-value=0.0, Identity=82%"; Hit description =Putative gypsy-type retrotransposon RIRE2
  Pfam annotation: Domain name=Retrotrans_gag; Domain location=328-419; Score=76.3; E_value=9.4e-20; Accession=PF03732.7; Description =Retrotransposon gag protein
MRDFMTACDYCLSDCSDGSRSLDDEDCGPSRECFHVDLGDPSEGNHLGMPEDGDLPRPVPRADIPRELAVVPVPAGGHDPQLEQVRGAQASLDEGAGALEPIRRDVGQAWAGQPPAGEIRHLPQGLQHRVANDVRVRPPPASSGVGQNLAAAAMLLRAMPEPSTTEGRRIQGELKNLLEGAAVRRAESSASRRQGYPSEPHAATSRFMREASVYTGRTRNTAPAAPGHLGNEHHHRDRRAHLDERVRRGYHPRRGGRYDSGEDRSPSPEPPGPQTFSRAIRRASFPTGFRPPTTITKYSGETRPELWLADYRLACQLGGTDDDNLIIRNLPLFLSDTARAWLEHLPPGQISNWDDLVQAFAGNFQGTYVRPGNSWDLRSCRQQPGESLRDYIRRFSKQRTELPNITDSDVIGAFLAGTTCRDLVSKLGRKTPTRASELMDIATKFASGQEAVEAIFRKDKQPQGRPSEDAPEASTPRGAKKKGKKKSQAKRDAADADLVAAAEYKNPRKPPGGANLFDKMLKEPCPYHQGPVKHTLEECVMLWRHFHRAGPPTEGGRARDDDKKEDHQAGEFPEVRDCFMIYGGHAANASARHRKQERREVCSMKVAAPVYLDWSDKPITFDQADHPDHVPSPGKYPLVVDPIVGDVRLTKALRPSMGNIPGKRVQPLGRLDLPVCFGTPSNFRRETLTFEVVGFRGTYHAVLGRPCYAKFMAVPNYTYLKLKMPGPNGVITIGPTYKHVFECDVECVEYAEALAESEALIADLESLSKEVPDVKRHAGNFEPVETVKAAPLDPSGDASKQIWIGSGLDPK

SEQ ID NO: 48575 - protein, 87 aa, Zea mays
  Coding DNA Sequence Number=SeqID_6796
MAQGHISLSGIKCATVRACARRSQSRRQKAHRIVYRTYPVHHRTVRWPHKSELQRGEFEGPPLMAIKVVFDRTSHKKDGIHYSANSQ

SEQ ID NO: 48576 - protein, 306 aa, Zea mays
  Coding DNA Sequence Number=SeqID_6797
  Homolog annotation: Hit_ID=Q1SV83; Match level="QueryCoverage=70%, HitCoverage=49%, E-value=8e-65, Identity=53%"; Hit description=IMP dehydrogenase/GMP reductase
  Subcellular localization annotation: CTP_CleavageSite=49; ConfidenceScore=5.04e-01
MAPRSVLHDGPGTDSFSSPSLSLFATLVWAPTVVMGACAAFGRIYDICSCPHARYRLAQSRPNKVHGAWLPPWLATHYARYMEVVSGHWNYHGKPVVQNVLHKASEKSAHAKKWAEPHIETAKMKWIPVKEKLVVLKKNAEPYVQKVSTRSVEFYESSRDAVTPHVVKVKEFAHPYYQEAKKFSKPYIDQIAEITKPHVEKVRTTLKPYTKRAVHAYGSFLASATTYHRQAQATIMDYLHQHGVPKSLATKELVWFLASALLALPVFVIYRLVVETFCTKKNRRPRGGNGNGNHGQKRHKRRYADK

SEQ ID NO: 48577 - protein, 241 aa, Zea mays
  Coding DNA Sequence Number=SeqID_6798
  Gene Ontology: Mol. function=oxidoreductase activity; Biological process=metabolic process
  Homolog annotation: Hit_ID=Q7XCH4; Match level="QueryCoverage=69%, HitCoverage=77%, E-value=9e-34, Identity=74%"; Hit description=NAD dependent epimerase/dehydratase family protein, expressed
  Pfam annotation: Domain name=adh_short; Domain location=30-184; Score= -32.3; E_value=0.00073; Accession=PF00106.15; Description=short chain dehydrogenase
MRWFYRKGSSGFSSASTAEDVTAGVDGQGLVAVITGASSGIGLETARVLALRGVHVVMAVRNVSAGLKAREAIVAKIPVARIDVLELDLSSIASVRRFASNFDSLNLPLSILILNDFVAYGQSKLANILHSNELSRILKEDGVNISANAVHPGVIMTNLFRNRTIVSGRPGPAAAVTLLRLPLAQLSYHLRSIDEESTAEAEAPKSFVLPRLPRPKLSVKERKELASYAHGLGKKLKSQQV

SEQ ID NO: 48578 - protein, 470 aa, Zea mays
  Coding DNA Sequence Number=SeqID_6799
  Gene Ontology: Mol. function=exonuclease activity; Cellular component= intracellular
  Homolog annotation: Hit_ID=Q948H6; Match level="QueryCoverage=93%, HitCoverage=93%, E-value=2e-74, Identity=40%"; Hit description =Putative exonuclease
  Pfam annotation: Domain name=Exonuc_X-T; Domain location=15-169; Score=86.3; E_value=9.4e-23; Accession=PF00929.14; Description =Exonuclease
MASASAAPAPDREEIVFLDVETSTPPCVLLEFGAVVVCSRRLVDVSSFATLVRPANLDALPDPTARSNGITRGTLADAPPFRDVADMVYDVLHGHNIVHFDSMIIMDAFAEIGRPPPQPKAMIDTLPLLTQCFGPRAGDMKLASLANYFGLGKQRHRSLDDVKMNIDVFKNCATVLFLEESLRGVRVPTVQNMSSGGATIRTQGITSDPAPNRDNPNESLLVGSSTVHVEEMMLDTTVTVQTDTRSSGAFSGFVELDDVSTESIKISAPLFLRPFGPRAIVQHKGSPLQLICPGLEVLWVNTKGFPNSPHRPKVGIKVDIPENLSKVLGFCDDLAQSSSSSPGPGAICSNSRWKSLIERDADRRPTVWLKIPTFGSGDTAACRTHVYEKECDGVVPRLVSERVDPSELASMLQGNKVVDAFVSVETFDHYQSAGIRLVANRLDSTMSNIFADFTPNSMADETGQQQHMPR

SEQ ID NO: 48579 - protein, 84 aa, Zea mays
  Coding DNA Sequence Number=SeqID_6800
MGPPFLTVIVIVAFLATTAQAADPFAFFDWVVSYITASPLGVPQQTLKVEAYASNIFCEATCKLFEQKHNRDLFCIGCDRISPG

SEQ ID NO: 48580 - protein, 677 aa, Zea mays
  Coding DNA Sequence Number=SeqID_6801
  Gene Ontology: Mol. function=protein kinase activity; Cellular component=integral to membrane; Biological process=protein amino acid phosphorylation
  Homolog annotation: Hit_ID=Q7XD42; Match level="QueryCoverage=90%, HitCoverage=89%, E-value=0.0, Identity=62%"; Hit description=Protein kinase domain containing protein, expressed
  Pfam annotation: Domain name=LRRNT_2; Domain location=42-84; Score =15.3; E_value=0.021; Accession=PF08263.3; Description=Leucine rich repeat N-terminal domain
  Pfam annotation: Domain name=LRR_1; Domain location=113-134; Score =10.4; E_value=3.3; Accession=PF00560.23; Description=Leucine Rich Repeat
  Pfam annotation: Domain name=LRR_1; Domain location=136-159; Score =11.9; E_value=1.7; Accession=PF00560.23; Description=Leucine Rich Repeat
  Pfam annotation: Domain name=LRR_1; Domain location=161-182; Score =7.8; E_value=9.7; Accession=PF00560.23; Description=Leucine Rich Repeat
  Pfam annotation: Domain name=LRR_1; Domain location=183-204; Score =5.3; E_value=29; Accession=PF00560.23; Description=Leucine Rich Repeat
  Pfam annotation: Domain name=LRR_1; Domain location=88-111; Score =2.7; E_value=89; Accession=PF00560.23; Description=Leucine Rich Repeat
  Pfam annotation: Domain name=Pkinase; Domain location=389-663; Score=- 20.6; E_value=2.5e-07; Accession=PF00069.15; Description=Protein kinase domain
  Pfam annotation: Domain name=Pkinase_Tyr; Domain location=388-663; Score=-35.9; E_value=2.9e-10; Accession=PF07714.7; Description =Protein tyrosine kinase
  Pfam module annotation: Pfam domain module=LRRNT_2::LRR_1::LRR_1::LRR_ 1::LRR_1::LRR_1::Pkinase::Pkinase_Tyr; Domain location=42-84::113 -134::136-159::161-182::183-204::88-111::389-663::388-663
MNGSKCDRCKWRPWRWLVASWVLAVILERGGAEVTELDLEERRNERRDLLVLRDTLRSALDLHSNWTGPPCHGERSRWHGVSCDGDGRVVGVSLDGAQLTGTLPRSALRGVSRLEALSLRGNALHGALPGLDGLSRLRAVDLSSNRFSGPIPRGYATSLWELARLELQDNLLNGTLPAFEQHGLVVFNVSYNFLQGEVPGTRALRRFPASAFDHNLRLCGEVVNADCRDQEGLPSSGAPAYGSSSPVVRPAGDGGRAARKHLRFRLAAWSVVAICLIAALVPFAAVFIFLHHKKKSQEVRLGGRASGSATGDNSDHFLTPLSSATAFSFVTETLVLYNAKVTAAEDIKDKVEVEQGRGSGSRSTESGKGAELQLFRADGASFDLDELFRSTAEMLGKGRLGITYRVALQAGPVVVVKRLRNMSHVPRRDFTHTMQLLGKLRHENVVDLVACFYSKEEKLVVYEHVPGCSLFQLLHGNRGEGRTPLPWPARLSVAQGMVRGLAYLHKSLPYFHRPPHGNLKSSNVLVFFSAPNGKQQKQAVPKLTDHGFHPLLPHHAHRLAAAKCPEFARRGGRRLSSRADVYCLGLVLLELVTGKVPVEEDGDLAEWARVALSHEWSTDILDVEILGDRGRHGDMLRLTEVALLCAAVEPDRRPKLQDVIRMIDDIAGGDGSELDRR

SEQ ID NO: 48581 - protein, 230 aa, Zea mays
  Coding DNA Sequence Number=SeqID_6802
  Gene Ontology: Mol. function=hydrolase activity
  Subcellular localization annotation: CTP_CleavageSite=55; ConfidenceScore=5.45e-01
MTPHLPAVSSSSTTTTSRAAAAAHHLLDAAAAPPSSPHQYRRRRRRRVLGCLRPRAASVRCCAAAARAAEATTRVFVVSDLHTDYPENMEWVRRLPAQVGAGEGRGVDALVVAGDVAETRDNFARTMEVLRERFAAVFYVPGNHDLWLRREGGLYSFDKEKDVNSVRVPSLEMACKDFHACQWPSDLTNDDEALALYFDKLNDKNHDAIEEFWVCLTELLVELQLVIAAK

SEQ ID NO: 48582 - protein, 116 aa, Zea mays
  Coding DNA Sequence Number=SeqID_6803
  Gene Ontology: Mol. function=identical protein binding; Biological process=negative regulation of enzyme activity
  Homolog annotation: Hit_ID=Q8RVC2; Match level="QueryCoverage=65%, HitCoverage=10%, E-value=6e-14, Identity=55%"; Hit description =Putative serine protease
MDIITRLDSVAKNDVDMLSFSIDAYLGTQFNYNPIAIMTFKAMEHDIFVSCATGNTGLKLGTTGNGALWMLTVVAGSSMAVWQINKSQRSPTVQARHVGPRATLPARPRCSSESEI

SEQ ID NO: 48583 - protein, 467 aa, Zea mays
  Coding DNA Sequence Number=SeqID_6804
  Gene Ontology: Mol. function=DNA binding; Cellular component=nucleus; Biological process=DNA unwinding during replication
  Homolog annotation: Hit_ID=Q54J55; Match level="QueryCoverage=77%, HitCoverage=65%, E-value=6e-11, Identity=20%"; Hit description=Myb domain-containing protein
MGSSKRVPPYLLLVLLAVGAAAVSVGILHKMRERRVLAVLLQERDQQLISFQVLLEKEKEINKEMRRKVDELEAKTSVLSIERAELKNKLMDSETTTTYLTNTQKELEAALVEKESHINQIKENAVASNPDQTITIKELLQQKEAEPDLDKSENSSDPIPATVEDNSNNTTISESSHNDESIVVGANTENATSETVVDKSENSNDSMPAPEKENSSNTNASDSSHQNENIIVEAKEDNETSDLVVLDKSESTNGSVPVTAEEQNSYNTTAWESNQQDNSSSQEQFLKLTTNIEDGQFQQNKGDANEQSDDASEGSHLDRSELQRGNQKLIDNQEASKEEPDGTRQVEDPQGEASNHGRESKVLEKENEKERNPEGTSSVDTLSEANQNKTQAVEPVVDPTDVNPSTSTNNEERRETRKRRRRRRSRSRRNRKAAVEGAITLRACLPIRARPRPCCTRASLPPAASIL

SEQ ID NO: 48584 - protein, 237 aa, Zea mays
  Coding DNA Sequence Number=SeqID_6805
  Homolog annotation: Hit_ID=O24591; Match level="QueryCoverage=31%, HitCoverage=24%, E-value=2e-32, Identity=92%"; Hit description =Histone deacetylase 2a
MHPPHLAYIDGENQDAINLFWGIFNHKMENQLFYWPLPSDDASLIPLEASFSGSLVHLRCEAGGRAGAACKDRMGPGCVEHDWASGRCTLKHNANNLVFRKILWMPSLRACFGALFDDDPKKWRMYAYFIVSAGSIFELITTLYQVTSFHFTIGNLAKGALGESKKSDNALMNVKIDDQKLAIGTLSVDKNPHIQFDLVFDKEFELSHTSKTTSVFFTGYKVEQPFEEDGYPFLALN

SEQ ID NO: 48585 - protein, 681 aa, Zea mays
  Coding DNA Sequence Number=SeqID_6806
  Gene Ontology: Mol. function=nucleic acid binding; Cellular component= heterogeneous nuclear ribonucleoprotein complex; Biological process =regulation of transcription, DNA-dependent
  Homolog annotation: Hit_ID=Q4RFS1; Match level="QueryCoverage=62%, HitCoverage=67%, E-value=1e-70, Identity=38%"; Hit description =Chromosome 16 SCAF15113, whole genome shotgun sequence
  Pfam annotation: Domain name=SPRY; Domain location=77-214; Score =30.3; E_value=6.8e-06; Accession=PF00622.18; Description=SPRY domain
MASPDDESAQPPSKRPRRDAEPEVDAAEPSPRVVLNPADCDLDFDVGGGGLRGSALHEGGFAYCWSGARATVGARGGGRYCFGCRIVAEQPVEMDPTTSGERHLCRIGVSRGDDPVGALGESQHSFGFGGTGKFSHQRRFVNYGVKFGVGDTVVCAVDLDSKPMASIGFARNGEWLGIARHFDAGEKGLGLVDAPLRPMRWGSALFPHVLLKNVIVEMQFSREDGLLPVDGYEPWASAFSQRNSVFGPSFEQNKCEVMMMVGLPASGKSTWAEKWVKEHQEKRYILLGTNLVLEQMKVPGLLRKNNYGERFERLMDYATWIFNKLLTRAANTPRNFIIDQTNVYKNARIRKLRPFANYRKTAVVMFPTPSELKSRAAKRFNEMGKEIPAEAVNEMTANFVLPLSKDMPHSKEPFDEVIFTELSRDEAQRTLDDMQRVLPRNVTPSYGNSGNQKHYSSTYAGTAAPLDPSARSSMPGFYPPTANSYGVGDLRSSAATFSTGVHTEGNTTHGQTPCSVRSFRSPTGNQHGIHSSYPSAPNQYQMPSSYLSNSNQYEVRASYRSTPLPGYGQSTYASRRNPSPYNSEMHQGIQAPMSSRNLYRAPGSAEAYVAPCYAAGNLIGRPHQVLSPSTFPAHGPQPAAQWVPNQGCMSLGFCQNLTIIDAPFYDRALSTILLNMEAIFC

SEQ ID NO: 48586 - protein, 680 aa, Zea mays
  Coding DNA Sequence Number=SeqID_6807
  Gene Ontology: Mol. function=manganese ion binding; Cellular component=nucleus; Biological process=double-strand break repair
  Homolog annotation: Hit_ID=Q4GX57; Match level="QueryCoverage=82%, HitCoverage=86%, E-value=0.0, Identity=79%"; Hit description=Meiotic recombination 11
  Pfam annotation: Domain name=Metallophos; Domain location=35-279; Score=81.0; E_value=3.7e-21; Accession=PF00149.18; Description =Calcineurin-like phosphoesterase
  Pfam annotation: Domain name=Mre11_DNA_bind; Domain location=280-457; Score=269.0; E_value=9.6e-78; Accession=PF04152.5; Description=Mre11 DNA-binding presumed domain
  Pfam module annotation: Pfam domain module=Metallophos::Mre11_DNA _bind; Domain location=35-279::280-457
ALDLQQRIGLANTLSSGSMSEPAQPSGGEGDVNTLRILVATDCHLGYMEKDEIRRFDSFQAFEEICALADKNKVDFILLGGDLFHENKPSRSTLVKTIEILRRYCLNDQPVKFQVVSDQTVNFPNRFGKVNYEDPNFNVGLPVFTIHGNHDDPAGVDNLSAIDILSACNLVNYFGKMDLGGSGVGQIAVYPVLVKKGMTSVALYGLGNIRDERLNRMFQTPHSVQWMRPGTQDGESASDWFNILVLHQNRIKTNPKSAINEHFLPRFLDFIVWGHEHECLIDPQEVPGMGFHITQPGSSVATSLIDGEAKPKHVLLLEIKVVLKDEADVNSNDQDSVLEHLDKIVRNLIEKSSQPTASRSEPKLPLVRIKVDYSGFSTINPQRFGQKYVGKVANPQDILIFSKSAKKRQTTGDHIDDSEKLRPEELNQQTIEALVAESNLKMEILPVDDLDIALHDFVNKDDKMAFYSCLQRNLEETRNKLSSEADKSKFEEEDIIVKVGECMQDTGGKSFTAQSNQNSFSDDEDTREMLLGARSTDVGRKSSGFTRPSKDTADVAKRGTSKRGRGRGTSSMKQTTLSFSQSRSATVIRSEDVASSEEEADANEVVENSEEESAQQVGRKRAAPRGRGRGRGGGSTAKRGRKTDIASMQNMMSKDDDDSEDEPPKKTPRVTRNYGAVRRR

SEQ ID NO: 48587 - protein, 294 aa, Zea mays
  Coding DNA Sequence Number=SeqID_6808
  Homolog annotation: Hit_ID=Q2QSH6; Match level="QueryCoverage=38%, HitCoverage=11%, E-value=3e-41, Identity=77%"; Hit description=E3 ubiquitin protein ligase UPL1, putative, expressed
MKELRLYENSEKALLSSTSANGTAILRVVQALSSLVSTLQDRKDPEQPAEKDHSDAVSQISEINTALDALWLELSNCISKIESSSEYASNLTPASASAATLTAGVAPPLPAGTQNRRTQGLLGRSGICRRGAAGFGVGDGAEVARANLPEGAVVEQLCTASHDDGEHRVDPLLPSAFQPQEPHFHLPSSSVEDPTATMGKQICVLEQHFRRGGGRGGSEGTRGAVLREEEGGLAAVWGGRGRGEGRGAMDRGTAGNVAGEGNAWGHEIAWATPTIGRGWRCEDGGAACGARMAA

SEQ ID NO: 48588 - protein, 704 aa, Zea mays
  Coding DNA Sequence Number=SeqID_6809
  Gene Ontology: Mol. function=diacylglycerol kinase activity; Biological process=protein kinase C activation
  Homolog annotation: Hit_ID=Q9C5E5; Match level="QueryCoverage=56%, HitCoverage=93%, E-value=1e-134, Identity=65%"; Hit description =Putative diacylglycerol kinase
  Pfam annotation: Domain name=DAGK_acc; Domain location=263-416; Score= -11.0; E_value=2.9e-06; Accession=PF00609.10; Description =Diacylglycerol kinase accessory domai
  Pfam annotation: Domain name=DAGK_cat; Domain location=127-257; Score= 89.9; E_value=7.6e-24; Accession=PF00781.14; Description =Diacylglycerol kinase catalytic domai
  Pfam module annotation: Pfam domain module=DAGK_acc::DAGK_cat; Domain location=263-416::127-257
  Subcellular localization annotation: CTP_CleavageSite=60; ConfidenceScore=5.50e-01
MDQGAPEADNNAMPAPSDGNSNGGPFLLSRLLPPSLVVLASPPSALPINTCLLTTRSCPRGAESTRTTPEDAGDAPDSSDSRMELHRNSTNGSCLSACGPLTDYYIPDYILKPAYEPVTVDNVPCCPVVVFINSRSGGQLGSSLIKTYRELLNEAQVFDLSEESPDKVLHRLYSNFERLKSSGIFEIQVAGGDGTASWLLGVVSDLKLSHPPPVATVPLGTGNNLPFSFGWGKKNPATDQAAVKSFLDQLAYHHEDANSTGRPMRDTTHSVEDSGIILAWGTYAKLGFKHSLNHLSSRNISQLAKVKIMKRPGSQWEELKIPRSIQSVICLNLPSFSGGLNPWGTPGTRKAQDRDLTAPYVDDGLIEVVGFRDAWHGLILLAPNGHGTRLAQAHRIRFEFHKGAAEHTFMRIDGEPWKQPLPKEDDTVVVEISNLRQVAMLANDPCRSKSVNEPSSPSCHGHEDDDSNSLEDEDEDEWEDGRKKFGAAATFKIPDEKLTTAVGETARYDPPLFCKFSSFSSHESRKQQILNHVICQRRSRHVTNDGSASGVRCVRPSARRCLIGVLPHPHPVPGQTAFPTRPPESRGGSIKGPRAPLRTPRQSNPGHKVAVSNCKAMSLRYMSRVGARVVRESTGRSVKAQAQAASMARSGGSRAPAAGSVESGRASAVAAAAAARRKAEEEKRRRAEQALRTVMFLSVWGPNT

SEQ ID NO: 48589 - protein, 561 aa, Zea mays
  Coding DNA Sequence Number=SeqID_6810
  Gene Ontology: Mol. function=binding; Cellular component =mitochondrion; Biological process=translation
  Homolog annotation: Hit_ID=Q6ZHK7; Match level="QueryCoverage=91%, HitCoverage=84%, E-value=0.0, Identity=61%"; Hit description =Putative fertility restorer homologue
  Pfam annotation: Domain name=PPR; Domain location=100-134; Score =11.1; E_value=0.36; Accession=PF01535.11; Description=PPR repeat
  Pfam annotation: Domain name=PPR; Domain location=135-169; Score =18.8; E_value=0.02; Accession=PF01535.11; Description=PPR repeat
  Pfam annotation: Domain name=PPR; Domain location=171-205; Score =27.5; E_value=4.6e-05; Accession=PF01535.11; Description=PPR repeat
  Pfam annotation: Domain name=PPR; Domain location=207-241; Score =10.0; E_value=0.49; Accession=PF01535.11; Description=PPR repeat
  Pfam annotation: Domain name=PPR; Domain location=244-278; Score =31.0; E_value=4.2e-06; Accession=PF01535.11; Description=PPR repeat
  Pfam annotation: Domain name=PPR; Domain location=279-313; Score =37.8; E_value=3.8e-08; Accession=PF01535.11; Description=PPR repeat
  Pfam annotation: Domain name=PPR; Domain location=314-348; Score =34.8; E_value=3.1e-07; Accession=PF01535.11; Description=PPR repeat
  Pfam annotation: Domain name=PPR; Domain location=349-383; Score =51.9; E_value=2.2e-12; Accession=PF01535.11; Description=PPR repeat
  Pfam annotation: Domain name=PPR; Domain location=384-418; Score =36.9; E_value=7.1e-08; Accession=PF01535.11; Description=PPR repeat
  Pfam annotation: Domain name=PPR; Domain location=419-453; Score =39.3; E_value=1.4e-08; Accession=PF01535.11; Description=PPR repeat
  Pfam annotation: Domain name=PPR; Domain location=454-488; Score =14.1; E_value=0.16; Accession=PF01535.11; Description=PPR repeat
  Pfam module annotation: Pfam domain module=PPR::PPR::PPR::PPR::PPR::PP R::PPR::PPR::PPR::PPR::PPR; Domain location=100-134::135-169::171 -205::207-241::244-278::279-313::314-348::349-383::384-418::419
  Subcellular localization annotation: CTP_CleavageSite=20; ConfidenceScore=5.07e-01
MKTRVTIVRTFLLRLSPAFVAAALRSPQLAPHPLPSLHFFRSLPNATDLRAHPQHLLSCYVSLLHSFARSRETDAAGQARQLVAELRAHGDAVLSHLTPASSASLIRSLAAFGLSEELLWAWQAMRLAGVEPSRLTYNCLLDGLVNADLLDTAINVFDAMSTEHRVRPDVVSYNILIKGYCRAGRTQDAMARLADMREHAELAPDKVTYLTLMQRHYSEATFPQCIALFQEMEERGMGKEIPQHAYVLVIGALSKDGKPFEALAVFERMSKRGCPANAAMYTALIDSMGKFGREKEAMALFERMKATGIELDAVTYGVVVNCLCRFGNLEEALACFRSCVEKGVAVNAIFYTSLIDGFGKTGMVDQAKELFEEMVAKGFVPDSYCYNVLIDALVKAGRTDDACAFYKRMEDDGCDQTVYTYTILIDGLFKEHKNEEALKFWDSMIDKGITPTAAAFRALSNGLCLSGKFSRAWRILDELAPMGVIPETAHEDMINVLCKTGRFKQACKLADGIVQKGREIPGRGGTDGTVANHVNEMVELDEETGGKHQEDEENKKRKAIS

SEQ ID NO: 48590 - protein, 124 aa, Zea mays
  Coding DNA Sequence Number=SeqID_6811
MGKSKKGGSSSHHSGDKRKREPTPPSEDFGDSEYSEEEFSSESEGSPAPASPPASSDDSDDSQGIAAKGSDESEYSSDKEDSSDSSEEGSGGDDGDGDDDGDDGGSDSGKGGDGSGKGSNKASG

SEQ ID NO: 48591 - protein, 158 aa, Zea mays
  Coding DNA Sequence Number=SeqID_6812
  Gene Ontology: Mol. function=phosphoinositide binding; Biological process=cell communication
MAVLVEVNATDAGDEVGDVGGRGFRDERGGGRLSFNRRVRDGEEGVLGGRHRVDLGDAEEDERGGGRLSFNHWVGDGEEGVLGGRHCVDLGDAEEDEETEDGEENARRDRGQGDGARGGDDARLEGGRERRAYARLAGDREQSGCGPSSTPFHERRGG

SEQ ID NO: 48592 - protein, 189 aa, Zea mays
  Coding DNA Sequence Number=SeqID_6813
  Subcellular localization annotation: CTP_CleavageSite=59; ConfidenceScore=5.73e-01
MASVSTAPRAPLPAAASSSLSARQVDPNPSGSHFLDGRRLRVVRRLAGAAPSRRAPLVCCSARSPDADAGDERRRRGWDAMLHDAFKGAVRRWSEYVSNYWPPPTSVKEAGTGKRVGRSHEEEVMNGDEEERKVGEEEGKWSWARWKRHFALIEESGRLVDELQKISVANTLVFATGFLVLLVVLLGGA

SEQ ID NO: 48593 - protein, 123 aa, Zea mays
  Coding DNA Sequence Number=SeqID_6814
MAGGAMAAARGGPRGGGWRGRSGPPRCSERSSDAVRREAARERQSGAKGSTQINKKIKLGFKIKEQKETEENPGLAHQTVSGVPGPYDFKLATFGFQKPRSAIIHQTVWCTSGATASQRNGRL

SEQ ID NO: 48594 - protein, 315 aa, Zea mays
  Coding DNA Sequence Number=SeqID_6815
MGGFCISMFISPNRRRWVLDRNVCHVDSWQGPQVFKPPCALVPHYPLKQRSKATTWLVGAWHKPLDGSNPATRIQCERLRRLCLNASCVGGTIMSNCRLGQSARVICINTAARQHGPSEEEGPQHHLSPLFGMMGTPGRALSVARELLRNPKLSGLTWGNEALTQGISLHALTLCEDSWTKDLQEELDRRRAGEDANISMERALNFIDAYLHAVRQEPREMLHAMRQEPREMLRSFISCFTKGSGKEKKKKNRSGEKPLSAYLIYVRELEKDFDALELQHVPHDNSMADELRARASTWASVLEDVFETRLLRPST

SEQ ID NO: 48595 - protein, 239 aa, Zea mays
  Coding DNA Sequence Number=SeqID_6816
MHILIDTGTTHNILDINFARLANLAERCISTTILVPELCVVATAILGGTTCTSLVHEPSMLMNHKYPQGIISSATVFFDDASYHFLAGNDIYIDTTNDLGNSRHSLDDFNWGFILPTSTRYIALRDLPRLCRFSPLTPPYTADPFHRLPHPWTNLCHWNFIVDRFQDNMILAYVICDCLIVRIQAIPFGGPLPSNDINKWTMIQREDTLNGGGGGGGIIGLNVDCRIGSSGPKEAQHQA

SEQ ID NO: 48596 - protein, 133 aa, Zea mays
  Coding DNA Sequence Number=SeqID_6817
MEESSKDRSSSSKESDPTWAYRSPAAIAARAGRSIHHRRDSSVVRHRPYIRKNFSKPRRGALLRDLDEEDEVDSRKLQMERKLQQEDGDAVQQPPTTKDDELQSVTKDNELEVGDGVKKSPATKEPRRLPWTK

SEQ ID NO: 48597 - protein, 151 aa, Zea mays
  Coding DNA Sequence Number=SeqID_6818
MCLGVPFIDPRQLGAVGGQTCLLSGGAPDSPVHHRTVTVAVRCAISFHIWRIRPLVLGVGWCTGHCPVHTGQSGVPNRPLLRATRRPRIAQLTVGADGRWLTGQSGTPPDSPLDESVGHEWEADRRPHYGSVPGVVNATSYGESVCGKARD

SEQ ID NO: 48598 - protein, 59 aa, Zea mays
  Coding DNA Sequence Number=SeqID_6819
  Subcellular localization annotation: CTP_CleavageSite=17; ConfidenceScore=5.26e-01
MVPRSSQQQFQSEANVAAGASSAQSSRQSYLRRCGDSDASLSDMASAQSLPGEHEEMVV

SEQ ID NO: 48599 - protein, 907 aa, Zea mays
  Coding DNA Sequence Number=SeqID_6820
  Gene Ontology: Mol. function=heat shock protein binding; Cellular component=integral to membrane; Biological process=protein folding
  Homolog annotation: Hit_ID=Q2QMA0; Match level="QueryCoverage=56%, HitCoverage=100%, E-value=0.0, Identity=70%"; Hit description=DNAJ heat shock N-terminal domain-containing protein, putative, expressed
  Pfam annotation: Domain name=DnaJ; Domain location=684-741; Score =61.3; E_value=3.1e-15; Accession=PF00226.21; Description=DnaJ domain
  Pfam annotation: Domain name=MTS; Domain location=170-366; Score= -86.9; E_value=0.028; Accession=PF05175.4; Description=Methyltransfera se small domain
  Pfam module annotation: Pfam domain module=DnaJ::MTS; Domain location= 684-741::170-366
  Subcellular localization annotation: CTP_CleavageSite=47; ConfidenceScore=5.28e-01
MAMLALSSRPLSSSSFLRSKPRALHLHRHLLPKPLGSASPLTPPTPRADPAPAPDADPTPLFLRPASHRFPTRRPRRVPPPRGRARPAHRGAPPPPPTLALADATGDPSAATTSSSEGPALLRAPLEDLEALWLRHVRERTPFQYVVGNEHWRDLVVAVREGVLIPRPETEAIIDMVRAVEDFADGWWADLGTGSGAIAVALARELAGQGRVFATDVSEVAIDVARLNVQRYGVQVSPAFKLAAQRCSADQIDAESMPKDAHIHLEVDDKVEIRHGSWFEPLEDLKGKLMGVISNPPYIPTDDLPGLQPEVGWHEPKLALDGGKDGLEHLLHLCEGLSSVLKPGGFFVFEVSAACSPPLKDGAFLRLPGVGGNGALAVSGLSISLLEFDISCGLQSMEDLGLWKQAWMWVLSQKHILAWAHTAACGSRERLAFLVDRHWPAVSRACATSSRLALAALRQWRGCTARGVLAVASLGPAAVFVILWSFFVCMTSPACALYALLSLGAAAAVVHYMGYTPGLFIVGLFGILIMWMYGYFWITGMLLVAGGCMCSLKHARYVIPVLTSYGVYSVAVRVGWLGVFLTLNLSFLTNDLLNKLVQGYEGSTEESQFEDMKDSDPVMDEFYRSCEFPSVPDSEPETVSCAKPYCSAPIQDVLHVQKEEPPSKVVKSDSTSLDEIKRIMDGSNHYEVLGVPRNRSIDQKTLKKEYHRMVLLVHPDKNMGNQLACESFKKLQTAYEASEYSALSVVISIYGYAPREAKQGHDSVRAVISFIKPRMEMDGLKPDFRPPSSNVLPFSLQMEIPRAFVCAESKIFDVSEWATCQGMECKPNTHGPTFMVNMVGADRMPQRSYSSRYPFSLDAEMIPEDEFELWLQQALASGVFADSPKRRKSWSPFKLPQKGIKSWRRSS

SEQ ID NO: 48600 - protein, 218 aa, Zea mays
  Coding DNA Sequence Number=SeqID_6821
MGAWRGGNNNHLMKIGNMRDSKQAPKNRAHIAPPQHQQQPRLHQFPTARAHGGCGVECGSHAHGGGCGASVDRGGLEVDAEELEVAGILSDLSRLIRSWDRLERQRERRERRRPLSVQRDSNPSPEPAPAAASSAVPSPDTPLAYPQSGEDDAAPPKDKGEPVAAAVRPRAQVPRARDPPSASAPLLPPPRPKKERTNKRKRSSDGLRRQLTCSFHRS

SEQ ID NO: 48601 - protein, 361 aa, Zea mays
  Coding DNA Sequence Number=SeqID_6822
  Gene Ontology: Mol. function=oxidoreductase activity; Cellular component=vacuole; Biological process=response to oxidative stress
  Homolog annotation: Hit_ID=Q8W5H7; Match level="QueryCoverage=97%, HitCoverage=99%, E-value=2e-86, Identity=52%"; Hit description =Putative peroxidase
  Pfam annotation: Domain name=peroxidase; Domain location=42-317; Score=262.4; E_value=8.8e-76; Accession=PF00141.13; Description =Peroxidase
MGAGIRVLAALLAALAAATAGVTAQLRQDYYAAVCPDLESIVRAAVSKKVQAQPVAVGATIRLFFHDCFVEVRASSSSSSTTACVSDGPGRLAMLQLPACMQGCDASVILVSTGNNTAEKDHPSNLSLAGDGFDTVIQAKAAVDAVPACANQVSCADILALATRDVIELAGGPSYAVELGRLDGLVSMSTNVDGKLPPPSFNLDQLTSIFALNNLSQADMIALSGEQITTAPHVLGPDPAAVGGPDDERDVRGGPAGGVPGRGVDPNIALQLDPVTPQAFDNQYFANLVDGRGLFASDQVLFSDARSQPTVVAWAQNAHRLRAGLRRRHHQARPRRRQDRPVAGGRPPRLRLPQLKKDDKR

SEQ ID NO: 48602 - protein, 311 aa, Zea mays
  Coding DNA Sequence Number=SeqID_6823
  Gene Ontology: Cellular component=nucleus
  Homolog annotation: Hit_ID=Q2QN39; Match level="QueryCoverage=90%, HitCoverage=92%, E-value=4e-39, Identity=35%"; Hit description =Expressed protein
MARVDVAELKQRLVKRLGRERAAKYFAHLTRLLNLKLTKVEFDRLCFATIGKDNIALHNALIRGIIGNALSGVPPPSRQAVTGQSGTTTAPSGQCVGVALPVVGNVGAVVDSGDGELARELGAPVGKVVSVEDGEEVEQIRSVPCVQSRSPITQPLGISVAGGSGTRVRRRLDDPLVSCYDCGHLLDTGSLCEDLHRRLHSTGTGVTVQAVDALNRGLDELLRRLIKPCMDLSRVRASSRRISKVNEKVAGRVNSLQQLNQGQRTTMQDFAVAVQSDPHLLGPNWPTQIEKHIWSSSKIASVVLGTNVSVE

SEQ ID NO: 48603 - protein, 332 aa, Zea mays
  Coding DNA Sequence Number=SeqID_6824
  Gene Ontology: Mol. function=peroxidase activity; Cellular component =vacuole; Biological process=response to oxidative stress
  Homolog annotation: Hit_ID=Q10ET8; Match level="QueryCoverage=92%, HitCoverage=91%, E-value=1e-128, Identity=73%"; Hit description =Peroxidase 51, putative, expressed
  Pfam annotation: Domain name=peroxidase; Domain location=48-296; Score=415.7; E_value=6.7e-122; Accession=PF00141.13; Description =Peroxidase
MALPSAGKALPLVVVLAVAVVASLAQPGAADLRPNYYASSCPNVEAIVRGVVQQRLQATIRTVGSTVRLFFHDCFVEGCDGSVLIESTPRNQAEKDAPDNRSLAPEGFDTVRSAKAAVEAACPDTVSCADVLALATRDAIFMSGGPFFQVELGRLDGLSSTASSVPGQLPEPNQSMDQLLAVFNAHGLGMSDLVALSAAHSVGLAHCSKFASRLYSFRPGQPTDPTLNPRYASFLASKCPNGGGADSLVLMDQATPSRFDNQYYRNLQDGGGLLASDQLLYADGRTRPAVDSLANSTAAFHRAFADAIVRLGRVGAKSSARGNIRKRCDVFN

SEQ ID NO: 48604 - protein, 141 aa, Zea mays
  Coding DNA Sequence Number=SeqID_6825
MLAWDTGRWVAVPGRLPARGLERWSAVRELPALGRGAWGGCPRAAWSVGRGRGLRGLGRRDVRGARRDVGGAAPGSGGRPGAAALGATDAHRRERRPRGGRRAGEMGGRPAAGGLHQSQFRKGTSFDFLRLNKNEIQPRRN

SEQ ID NO: 48605 - protein, 130 aa, Zea mays
  Coding DNA Sequence Number=SeqID_6826
MDDVVAGAAQNGDDVDTLGLRRSDRTRDVEIAGLLLLKGSTRTTLRRFHDHATTSRPAETAQRPAQQGRRRWLDNGNVQGGLMEQRCRGVEAAGDVWGKTIETVSPLKSEWRRTTSKRPYIERRYVTSKI

SEQ ID NO: 48606 - protein, 829 aa, Zea mays
  Coding DNA Sequence Number=SeqID_6827
  Gene Ontology: Mol. function=identical protein binding; Cellular component=cytoplasm; Biological process=negative regulation of enzyme activity
  Homolog annotation: Hit_ID=O49607; Match level="QueryCoverage=90%, HitCoverage=95%, E-value=0.0, Identity=58%"; Hit description =Subtilisin proteinase-like
  Pfam annotation: Domain name=PA; Domain location=384-482; Score =102.7; E_value=1.1e-27; Accession=PF02225.12; Description=PA domain
  Pfam annotation: Domain name=Peptidase_S8; Domain location=124-624; Score=61.8; E_value=2.3e-15; Accession=PF00082.12; Description =Subtilase family
  Pfam annotation: Domain name=Subtilisin_N; Domain location=41-121; Score=74.5; E_value=3.4e-19; Accession=PF05922.7; Description =Subtilisin N-terminal Region
  Pfam module annotation: Pfam domain module=PA::Peptidase _S8::Subtilisin_N; Domain location=384-482::124-624::41-121
MASPPRYPFPVLLLGLALVALMAPALLRADGGAEEEEEARKTYIFRVDHSAKPSVFPTHAHWYASAAFASAAPGATPLRPLHVYGTVFHGFSASVPASRAEELRRHPAVLAAFEDRARPLHTTRSPQFMGLRARLGLWSLADYGSDVIVGVLDTGVWPERRSLSDRNLPPVPARWRGGCDAGPGFPASSCNRKLVGARFFSQGHAARFGASAAASNGSVEFMSPRDADGHGTHTATTAAGSVAYGASMEGYAPGVAKGVAPKARVAAYKVCWKGAGCMDSDILAGFDRAVADGVDVISVSIGGGSGVTAPFYLDPIAIGAYGAVSRGVFVATSAGNEGPASMSVTNLAPWLATVGAGTIDRNFPAEIVLGDGRRLSGVSLYSGKPLTNSSLPLYYPGRTGGLSASLCMENSIDPSLVKGKIVVCDRGSSPRVAKGMVVKEAGGAAMVLTNGEANGEGLVGDAHVLPACAVGEKEGDAVKAYAANASSPMATISFGGTVVGVKPAPVVASFSARGPNGLVPEILKPDFIAPGVNILAAWTGATGPTGLEGDTRRTEFNILSGTSMACPHASGAAALLRSAHPGWSPAAIRSALMTTAIVTDNRGGPVGDEAEPGRGATPFDYGAGHITLGKALDPGLVYDAGEDDYVAFMCSIGYEPNAIEVVTHKPVACPATASGAKASGSPSGSDLNYPSISVVLRGGNQSRTVTRTVTNVGAQASATYTARVQMASSGGVTVSVKPQQLVFSPGAKKQSFAVTVTAPSAQDAAAPVYGFLVWSDGGGHDVRSPIVESRRSGQWASNGNSTCLPLADRTQEQRKEMEQQDKAMKNEYC

SEQ ID NO: 48607 - protein, 97 aa, Zea mays
  Coding DNA Sequence Number=SeqID_6828
  Subcellular localization annotation: CTP_CleavageSite=14; ConfidenceScore=5.03e-01
MAIPMCGFAFATTRAGTSGPELSWPQTTKDKRGLGICAALTWASVLNPIRERRRERALANQGKNMMKKLGVKSKPSPDAPFGSVRPVPDVYKNTPDL

SEQ ID NO: 48608 - protein, 598 aa, Zea mays
  Coding DNA Sequence Number=SeqID_6829
  Gene Ontology: Mol. function=RNA-directed DNA polymerase activity; Cellular component=intracellular; Biological process=RNA-dependent DNA replication
  Homolog annotation: Hit_ID=UPI00004C1733; Match level="QueryCoverage =95%, HitCoverage=42%, E-value=0.0, Identity=92%"; Hit description =UPI00004C1733 related cluster
  Pfam annotation: Domain name=RVT_1; Domain location=12-181; Score =145.7; E_value=1.3e-40; Accession=PF00078.17; Description=Reverse transcriptase (RNA-dependent
  Pfam annotation: Domain name=RnaseH; Domain location=411-538; Score =4.2; E_value=2.3e-05; Accession=PF00075.14; Description=RNase H
  Pfam module annotation: Pfam domain module=RVT_1::RnaseH; Domain location=12-181::411-538
MAAGFIKEVFHPEWLANPVLVRKKGGKWRMCVDYTGLNKACLKVPYPLPRIDQIVDSTAGCETLSFLDAYSGYHQIRMKESDQLATSFITPFGMYCYVTMSFGLRNAGATYQRCMNHVFGEHIGRTVEAYVDDIVVKTRKASDLLSDLEATFRCLKAKGVKLNPEKCVFGVPRGMLLGFIVSERGIEANPEKIAAITSMGPIKDLKGVQRVTGCLAALSRFISRLGERGLPLYRLLRKAECFTWTLEAKEALGNLKALLTNAPILVPPAAGEALLIYVAATTQVVSAAIVVGRREEGHALPVQRPVYFISEVLSETKIRYPQIQKLLYAVILTRRKLRHYFESHPVTVVSSFPLGEIIQCREASGRIAKWAVETMGETISFAPRKAIKSQVLADFVAEWVDTQLPTAPIQPELWTMFFDGSLMKTGAGAGLLFISPLGKHLCYVLCLHFPASNNVAEYEALVNGLRIAIELGVRRLDARGDSQLVIDQVMKNYHCRDPKMEAYCDEVRRLEDQFYRLELNHVARRYNETADELAKIASGRTTVPLDVISRDLHQPSVKTDDTPEPVKASAQPETPLAQSEAPSAQSEAPSAQSEAPSA

SEQ ID NO: 48609 - protein, 172 aa, Zea mays
  Coding DNA Sequence Number=SeqID_6830
  Subcellular localization annotation: CTP_CleavageSite=75; ConfidenceScore=5.25e-01
MTNNHTGSNKKTSPGTEGQDDYLFNIRLLKQRSTSSQAPLSRFRPDFYLHGSTPSSRFNALNSGEDSPDWPRRKPAASPPGTIILLLPCECGNRESGKPNDRREVGTAVGLGRHVGRTGWPDGVPGGLGLGCDRAHPDPPMGPPLSVGMREDSETTSNSHNEHFTSCNLQSK

SEQ ID NO: 48610 - protein, 258 aa, Zea mays
  Coding DNA Sequence Number=SeqID_6831
  Homolog annotation: Hit_ID=Q850Z8; Match level="QueryCoverage=20%, HitCoverage=13%, E-value=7e-19, Identity=76%"; Hit description =Putative 5'-phosphoribosyl-5-aminoimidazole synthetase
MAIDASLDDSVLVGDVISMDYSDEFSIEQATVGRLEIRSNIIQIRDMRLSNIINKGRAPGDARIRVPDHQGVKENGLLEQDRSYYTAVQMSESAFMDKFICPYKEAAPSLALDYAAACRGENWLLYIRCEPWLLPGLDLSLLSVIQADQVFQFHLSLYGMDLVVLYWIILNLAKPATYSKALSAGDALEIISKGGVKGLAHITGGGFTDNIPRVFPSGCGANFFTGSWEIPPIFSWLQQARTNDFQTSPLIFNSNCYK

SEQ ID NO: 48611 - protein, 134 aa, Zea mays
  Coding DNA Sequence Number=SeqID_6832
  Subcellular localization annotation: CTP_CleavageSite=37; ConfidenceScore=5.12e-01
MAAPPRTLGGARRRGCQSARWSPQTPIGRMLRRAEMMANVVTGYLPAVGSSSWLATDGDAGREQRRGRTERRPLGREIGPGFYRVSPADPGRRTATDSARHDPQLRPRTLTEDELIGNATRGGDYGSSVMPDAE

SEQ ID NO: 48612 - protein, 140 aa, Zea mays
  Coding DNA Sequence Number=SeqID_6833
  Gene Ontology: Mol. function=protein serine/threonine kinase activity; Cellular component=phragmoplast; Biological process =protein amino acid phosphorylation
  Homolog annotation: Hit_ID=Q5SNF8; Match level="QueryCoverage=92%, HitCoverage=24%, E-value=4e-69, Identity=91%"; Hit description =Putative serine/threonine kinase 38
MLKDKNGHMKLSDFGLCKPIDCSKLSTLSEDEPMGDDNMRESMDIDSSLSNTANGRRWRSQHEQLQHWQMNRRKLAFSTVGTPDYIAPEVLLKKGCEMECDWWSLGAIMYEMLVGYPPFYADDPITTCRKLSVLIGLSSK

SEQ ID NO: 48613 - protein, 57 aa, Zea mays
  Coding DNA Sequence Number=SeqID_6834
MKSQQKRRANSGVHHPHIFPPWRCRTDSQGGRFWRIELYGLRRRLSSTVGQDLAMGS

SEQ ID NO: 48614 - protein, 57 aa, Zea mays
  Coding DNA Sequence Number=SeqID_6835
MRRVKSATTQLIDEMRGKGAAVRYLVEEAGRRRRMCPSGGGELSIHGHISLVYDHVI

SEQ ID NO: 48615 - protein, 134 aa, Zea mays
  Coding DNA Sequence Number=SeqID_6836
MAPLCRGRSEPGVGRGRGSSEVEAESGPEGRARRRPSSEVEVESEPWGRARRRPPFPESRLSPSPGVGRGRDRRPRFRWSPSPGVRRGEDRLPGGEVESEPWGRARRRSSSNVEVEPELWVGRGGASYGARGWT

SEQ ID NO: 48616 - protein, 363 aa, Zea mays
  Coding DNA Sequence Number=SeqID_6837
  Subcellular localization annotation: CTP_CleavageSite=33; ConfidenceScore=5.58e-01
FSFTPSCPFPYSISFLRRPAYNAAARYRRHRPAASRPPPGFPRVRRRDFPPYPRRTVPAPGSPAFAPAPTSPPESSRPGRALVRRAPRRPDAWAGSLADPANRASARRKATRAPRAGPAPEPRQLAPKPDRHLRGAPPLGSAGRGGPASSRGAASPARPSAPAPGSAARLPASSPPRFNRLRAPARPPVLALGLVRPYPRSPALAFPGVLARSPRRALLASCRPSAWPRARPSVPSARGLELGQRTASTRARLVRSTLSVALRVRVFAQRSGVARRARDTIVYPLTPVYPPPSPICANHVVYINKPSCRQWGSVYAARSARVDLSLGEECGGYEIDGFGYDYDAGEDEAVEGDFQEFQDYDEF

SEQ ID NO: 48617 - protein, 204 aa, Zea mays
  Coding DNA Sequence Number=SeqID_6838
  Homolog annotation: Hit_ID=Q6QP54; Match level="QueryCoverage=34%, HitCoverage=25%, E-value=1e-07, Identity=50%"; Hit description =Putative kinase
MYHSEAEAHQRLSASQAGECQQMVDLALAPPSNGKNTNVLQPHVPRVIGPQVGARPCQRHHRKLRPTQGSDSGSAPEDGELRSARPRARTRAQPRKTANSAPPDPGLGLGLSPGRQRTPLRPTQGSDSGSAPEDGELRSARPRARTRAKTWETTNSASPDPRARTPPWPLPMTSASPDPGARARPRPWKTDSTLASEEPPRRPT

SEQ ID NO: 48618 - protein, 159 aa, Zea mays
  Coding DNA Sequence Number=SeqID_6839
  Subcellular localization annotation: CTP_CleavageSite=31; ConfidenceScore=5.12e-01
MSSTFPKVNIVSDRVACTGTGSCQNRAPRPRAGGRGHEKGLRRGYGRATPGPRRGHAGARAAQGRDRAGAGAGGYVVEGGHAGDTARGRGTAPRGQRARGRSRTEGHRARGRGHAGEGMSGPGRGVAPLGELGTRQVPRATEAGQAGAAPGARGRRAGG

SEQ ID NO: 48619 - protein, 82 aa, Zea mays
  Coding DNA Sequence Number=SeqID_6840
MAIVTPGVLHNNSLTADSAPGAALDVLDVYAGVCCRAECTATAPGAGRLVARAQGGTYKDTEPRHVGPETNGRKQLMPVTPG

SEQ ID NO: 48620 - protein, 475 aa, Zea mays
  Coding DNA Sequence Number=SeqID_6841
  Gene Ontology: Mol. function=triose-phosphate isomerase activity; Cellular component=nucleus; Biological process=regulation of transcription
  Homolog annotation: Hit_ID=Q6F2H1; Match level="QueryCoverage=92%, HitCoverage=90%, E-value=4e-74, Identity=40%"; Hit description =Putative Myb-like DNA-binding protein
  Pfam annotation: Domain name=Myb_DNA-binding; Domain location=43-90; Score=39.1; E_value=1.5e-08; Accession=PF00249.21; Description=Myb -like DNA-binding domain
MERSRPGAAPTPSPEEEVAAEGHAHGDDVTGQEEEATPVVLKKGPWTASEDAMLMDHVRHHGEGNWNAVQRMTGLLRCGKSCRLRWTNHLRPNLKKGSFSPRRGAPHSPAPRAARQQVGAHGRALRSFLCRLLVGCIGWLGARPQLPGRTDNEIKNYWNTRTKRRQRAGLPVYPPEVQLHLALSKRCHYDDYDFPPLASSPQLSATTTTDVQALGAGPGYASSRPAPLDLARSQLAATTTQQTAQFLSPPPFSAPSSPWAKPFARNAQYFQLAHSSPVSPSTPTGPVHPAMPDLSLGGHGARAAAAADQSRLPPLSPSPGPRVELPSNQYGQPAPPTSAAAVAAGLALPDHQNAASLEQMLQELHDVIKVEPQALVPASGGGAALERHDCGVSVPESRISGLQRRGDDMDTLFGLVHPALGAPETAPAAAASNHSGSTSRHSTADQNPSTVGNSSPDQDWGLDGVCQWSNVSRIC

SEQ ID NO: 48621 - protein, 47 aa, Zea mays
  Coding DNA Sequence Number=SeqID_6842
MTADSLTVDSIVDKGWMILPEAESDWCSGRRTVSQAHQEAPQVGMDT

SEQ ID NO: 48622 - protein, 121 aa, Zea mays
  Coding DNA Sequence Number=SeqID_6843
FLGALKAFEGPYSSLDAVATFGTLQGPQGPLGAIGTSRALWVYWRHKSYWDIGGLRVLQGASGSPGTQGPSMEVRAIEGCLAPFSAVETVKMFETIGGHHGIRGYGPQHGTTDDTNTRRSF

SEQ ID NO: 48623 - protein, 578 aa, Zea mays
  Coding DNA Sequence Number=SeqID_6844
  Gene Ontology: Mol. function=RNA-directed DNA polymerase activity; Cellular component=mitochondrion; Biological process=RNA-dependent DNA replication
  Homolog annotation: Hit_ID=UPI00004C1733; Match level="QueryCoverage =99%, HitCoverage=48%, E-value=0.0, Identity=75%"; Hit description =UPI00004C1733 related cluster
  Pfam annotation: Domain name=RnaseH; Domain location=261-388; Score =10.8; E_value=5.7e-06; Accession=PF00075.14; Description=RNase H
  Pfam annotation: Domain name=rve; Domain location=475-578; Score =20.0; E_value=0.00013; Accession=PF00665.16; Description=Integrase core domain
  Pfam module annotation: Pfam domain module=RnaseH::rve; Domain location=261-388::475-578
MKESDQLATSFITPFGMYCYVTMPFGLRNAGATYQRCMNHVFGEHIGRTVEAYVDDIVVKTRKASDLLSNLETTFRCLKAKGVKLNPEKCVFGVPRGMLLGFIVSERGIEANPEKIAAITNMGPIKDLKGVQRVVSAAIVVERQEEGHALPVQRSVYFISEVLSETKISYPQIQKLLYAVILTRRKLRHYFESHPVTVVSSFPLGEIIQCREASGRIAKWAVEIMGETISFAPQKAIKSQVLADFVAEWVDTQLPAAPIQPELWTMFFDGSLMKTGAGAGLLFISPLGKHLRYVLRLHFPASNNVAEYEALVNGLRIAIELRVRRLDARGDSQLVIDQVMKNSHCHDPKMEAYCDEVRRLEDKFYGLELNHIARRYNETADELAKIASGQTTIPPDVFSRDLHQPSVKTDDTPELEKASAQPEAPSAQPEALSAPEGFYWPTAVVDATRIVHTCPGCQFYARQTHLPAQALQTIPITWPFAVWGLDLVGPLQKAPRGYTHLLVAIDKFSKWIEVRPLNSIRSEQAVAFFTNIIHRFGVPNSIITDNDTQFTGRKFLDFCEDHHIRVDWAAVAHPMMNG

SEQ ID NO: 48624 - protein, 223 aa, Zea mays
  Coding DNA Sequence Number=SeqID_6845
MKTMCSISTNKIRVVQRKHSQSQLKKVVDNLRTNLVVLANLFLNLGGEIPVKGRAPISSPRFPLHNCLSPVHPNAKETGPHSTMARPRCSVFKPPAVQLHSSPGVALAAKLRVAMPGEGYARDSPSSSSSQGEKYRAWPSLLFSLPRPSCGNGDPSSFALPRRSRLSRPRSLCCVVVRLPSQPLPTTPFAAMADRTASLGTTAQPACCQAQRPGQSPCAPNRH

SEQ ID NO: 48625 - protein, 44 aa, Zea mays
  Coding DNA Sequence Number=SeqID_6846
MADRTASLGTTAQPACCQAQRPGQSPCAPNRHLIKNDLPIKPNV

SEQ ID NO: 48626 - protein, 217 aa, Zea mays
  Coding DNA Sequence Number=SeqID_6847
  Homolog annotation: Hit_ID=Q53RQ4; Match level="QueryCoverage=21%, HitCoverage=46%, E-value=6e-07, Identity=46%"; Hit description =Protease inhibitor/seed storage/LTP family, putative
  Pfam annotation: Domain name=Tryp_alpha_amyl; Domain location=25-89; Score=20.2; E_value=0.00085; Accession=PF00234.12; Description =Protease inhibitorseed storageLTP f
  Subcellular localization annotation: CTP_CleavageSite=47; ConfidenceScore=5.11e-01
MALALLCAVLLAATADDAAAAASSCNPSALSACAPALFGRAVTLGCCASLRAQQPCLCQYKRDPANRAYVNGPAAQRFTRACGLTQMKRAAGRSARDRRGWDRGWEPARRAPPEAQPRRGYERATIAREDNRATDASEEDLAAAREGRGGSWRNHDEEAKMLGHSHRPIAAGRLLPLGGAEAGGGTQVTEKGAALPEEKGWPQATPRKKGNAPLLLE

SEQ ID NO: 48627 - protein, 60 aa, Zea mays
  Coding DNA Sequence Number=SeqID_6848
MARPRCSVFKPPAVQLHSSPGVALAAKLRVAMPGEGYARDSPSSSSSQVIKNDLPIKPNV

SEQ ID NO: 48628 - protein, 801 aa, Zea mays
  Coding DNA Sequence Number=SeqID_6849
  Gene Ontology: Mol. function=protein binding
  Homolog annotation: Hit_ID=Q6YXX5; Match level="QueryCoverage=45%, HitCoverage=56%, E-value=1e-129, Identity=62%"; Hit description =Putative extensin
  Pfam annotation: Domain name=Collagen; Domain location=599-657; Score= -38.4; E_value=0.031; Accession=PF01391.8; Description=Collagen triple helix repeat (20 copies)
  Pfam annotation: Domain name=LRRNT_2; Domain location=46-86; Score =10.2; E_value=0.074; Accession=PF08263.3; Description=Leucine rich repeat N-terminal domain
  Pfam annotation: Domain name=LRR_1; Domain location=120-142; Score =8.3; E_value=8; Accession=PF00560.23; Description=Leucine Rich Repeat
  Pfam annotation: Domain name=LRR_1; Domain location=144-166; Score =9.3; E_value=5.2; Accession=PF00560.23; Description=Leucine Rich Repeat
  Pfam annotation: Domain name=LRR_1; Domain location=168-187; Score =13.3; E_value=0.87; Accession=PF00560.23; Description=Leucine Rich Repeat
  Pfam annotation: Domain name=LRR_1; Domain location=191-213; Score =2.4; E_value=1e+02; Accession=PF00560.23; Description=Leucine Rich Repeat
  Pfam annotation: Domain name=LRR_1; Domain location=214-236; Score =3.7; E_value=59; Accession=PF00560.23; Description=Leucine Rich Repeat
  Pfam annotation: Domain name=LRR_1; Domain location=263-285; Score =13.4; E_value=0.82; Accession=PF00560.23; Description=Leucine Rich Repeat
  Pfam annotation: Domain name=LRR_1; Domain location=287-309; Score =5.6; E_value=25; Accession=PF00560.23; Description=Leucine Rich Repeat
  Pfam module annotation: Pfam domain module=Collagen::LRRNT_2::LRR _1::LRR_1::LRR_1::LRR_1::LRR_1::LRR_1::LRR_1; Domain location=599 -657::46-86::120-142::144-166::168-187::191-213::214-236::263 -285::287-309
  Subcellular localization annotation: CTP_CleavageSite=6; ConfidenceScore=5.16e-01
MIPAPPASSAGGSITSGWRNLLLLLLLLTLTLARPAAAQPPTSPALQAAYAALQAWKRTAIFSDPSNFTSNWAGPNVCAYNGIYCAPRPSDGALAVAGIDLNHADIAGHIPADLPLGVPDLALLHLNSNRFCGVLPDTLLHLRLLHELDLSNNRFVGAFPAVVLALPSLRYLDLRFNDFEGPIPPPLFDRPLDAILLNSNRLRGPIPANLGNSPASVLVLAHNRLGGCIPPSIGRMAATLNEIVLIDDDLTGCVPPQVGLLTKLTVFDVSGNHLQGPLPPAVGGMAALQQLNVAGNLLRGPVPPAVCGLQGTLRNFTYEDNFFTSRPGCAVATADGRWNCIPGAPAQRPPPQCAAAAAPFDCRTAQCQPPPTSGPPGSGPGGPSQPLSPPGSSNTPSHPSPPGSSNTPSYPSPPGSSNTPAYPSPPGSSTTPSHPSPPGSSTTPSPPGSSTTPSHPSPPGSSTTPSPPGSSTTPSHPSPPGSSNTPSYPSPPGSSNTPAYPSPPGSSTTPSHPSPPGSSTTPSPPGSSTTPSHPSPPGSSTTPSHPSPPGSSTTPSYPSPPADGNSPKPSMPPSSHGGSAPPSGYQPPPWSQWAPSGQPVGVPPPTEHPGGVWPPHTPTAPGTPGSAYPPGTPGSPSTPTTPGTPGSTFPPTTPGAPGSLPSTPTTPGTPGSTFPPTTPGAPGSLPPTPTTPGSTFPPTTPGAPGSLPPTPGYHPPSPGDHGSSQEHTPPSAPGSSGGVLPFPPVHGVAYSSPPPPPSDPAAGNPPSFSPVHGVSYSSPPPPLPPVYPVSYASPPPPYKSN

SEQ ID NO: 48629 - protein, 313 aa, Zea mays
  Coding DNA Sequence Number=SeqID_6850
  Homolog annotation: Hit_ID=Q60CZ4; Match level="QueryCoverage=28%, HitCoverage=24%, E-value=2e-19, Identity=52%"; Hit description =Uncharacterized plant-specific domain TIGR01589 family protein
MASEEVLHKAGFGWNTKGLDRHLEEFVYAYFDGLVQNLIERCLQMYMNKKEVVDALSHHSRIEPCITELVWQQLEQQNPLFFKAYDMRLMLKNQIMVFNRLLQDQFEIMNKEFSSGIPSMSLPNDSNSNLLKQDSCFLPETAPGNAMPDGIMHNGSSSGIINDTPSGDQLLNASKDLHGLHSQIDASTSLQSDQNATAVLYGVDNETSATIKTESCYSSNADFAFCGNTFLESCQSIGDASGGGSFSSSELNGQPLNDSILDMESSSFSFLNQMPQSFMFSDLADDFNQNAEITPFLTPETNFSDSTGGDHTG

SEQ ID NO: 48630 - protein, 86 aa, Zea mays
  Coding DNA Sequence Number=SeqID_6851
MARYFKLSLLLYLPPCIPVFGVPGADYHKTVVPESSSNMNQDLQNEESATTSDVKSVLPKFSQINLLHNDLGLPDDDKSAGTSIAN

SEQ ID NO: 48631 - protein, 176 aa, Zea mays
  Coding DNA Sequence Number=SeqID_6852
  Subcellular localization annotation: CTP_CleavageSite=78; ConfidenceScore=5.19e-01
MALGVRPACCRLADPYRVSLPARVPRRAATAGHKSRISHTACASATGNPNPNALSSLPPASPCGGRGSLSRGVGDSVSGAALGCSLLPVLPARLLPHLVIPVVPGWLAPSLLGCSIHPTLPAPSIPPPPGAPWSLGPSAGGGFPAPSVPPPGAPCSLGPSSGGGFPAQPAKGNRKR

SEQ ID NO: 48632 - protein, 162 aa, Zea mays
  Coding DNA Sequence Number=SeqID_6853
  Gene Ontology: Mol. function=protein serine/threonine kinase activity; Biological process=protein amino acid phosphorylation
  Homolog annotation: Hit_ID=Q1EPK4; Match level="QueryCoverage=96%, HitCoverage=47%, E-value=1e-20, Identity=54%"; Hit description =Protein kinase family protein
MERTVLGLTLWVWIAIGVVALLVAILLMICIWVASRLRTKRTMDSLRQTQIPIYSKEIPIDRVGGRSLAQTMHEREQPSLPPPDKYANREPAGAAVGHLALSKSSDHDNMSQGSSVCNADRAGTGSMHSGGRQKKNSEWKLRLLAMSDIRIWFGCWDIVLRA

SEQ ID NO: 48633 - protein, 114 aa, Zea mays
  Coding DNA Sequence Number=SeqID_6854
  Subcellular localization annotation: CTP_CleavageSite=47; ConfidenceScore=5.18e-01
MAGAGSRIKSKVREWMRKRMAPRRKTAAAAAATGSGDNSGGVGGSASASAPAQSSPRRKLLAAALPSALRWRKPRGNVLAALFQRAAYHLLWLVESVVVVAQLCFFFVRFGFRL

SEQ ID NO: 48634 - protein, 311 aa, Zea mays
  Coding DNA Sequence Number=SeqID_6855
  Homolog annotation: Hit_ID=P00055; Match level="QueryCoverage=28%, HitCoverage=79%, E-value=5e-37, Identity=78%"; Hit description =Cytochrome c
  Pfam annotation: Domain name=Cytochrom_C; Domain location=215-311; Score=63.6; E_value=6.5e-16; Accession=PF00034.11; Description =Cytochrome c
  Subcellular localization annotation: CTP_CleavageSite=41; ConfidenceScore=5.70e-01
MPSPPCHVFSPDMIGPAQIRFTASFESGQTRARFWTTRVLLATSVPSRSSMMVDVVMVPSRRTSPEREGMVDEVEEEVHAMVVQEPEVKDVLVTKVVEALEVTKVHPVLESEPRVDEVLVVNETPVVPEIQEPEVKGVGATVVLKEQETNSGNVVVKDSDEALPSQEVAGVHTTDRGSCQAALFGALVIIFKNGTIEEGLIDRMNSIDDRMNSRAASTPPARTKCAQCHTVERGGAHRQGPNLHDLFGRQSGTTIGYAYSTANKNMAVVWEKGTMYDYLFNPKKYIPGTKMVFPRLKKPKERTDLIAYLTY

SEQ ID NO: 48635 - protein, 234 aa, Zea mays
  Coding DNA Sequence Number=SeqID_6856
MSNSQADALAARAKSVRLSSELEKLKAKSTEGYRHFEPLGYIDNDFDRSVYNIEVDHMVGFSVDMLLDRMWGPHDRRDWKQRLAGWMTQTRSPTYWGAMAGAGAAAQASSSKAPESSHRSADVSKDLEQVRVTSGWGKFLLRTFAERARELQLTNFLGACTSSNVRAYMGGSPSNGDVSMESKSIVREFFINPADNVCLQEDEIRHLFFSEELELLFFDYRELVLLPKRECWDY

SEQ ID NO: 48636 - protein, 172 aa, Zea mays
  Coding DNA Sequence Number=SeqID_6857
MNELEYGSYPEDVEEGEEEDSSTTARRKEVIEGGEDRVCLKWKSLPTEDKMRIRAKGARSPDGAETTSEDLVGLNAETTKFAKDLVETMCEATSPVSLVASHETEPGVTSSIEDMSVYDYFAKDGGMSLVAKPRSEPPKAIVGAAEDPKCGKSVIELTYGGGSSVRLTKENG

SEQ ID NO: 48637 - protein, 104 aa, Zea mays
  Coding DNA Sequence Number=SeqID_6858
MALRPAVGLGAEAVWGGGARDKGGGVSRWRLGQGRRRLSGRRSGRGGLGAVLGQGQHSEAGAGAAALGHGGSLSERRRRNEPSRARPGSKTCNPRRPEYGADGN

SEQ ID NO: 48638 - protein, 172 aa, Zea mays
  Coding DNA Sequence Number=SeqID_6859
MSLSWLSRNQTDPKTEGRTSSISLSPAYDFVPISIATNCRRASAPRRGQPVPINVAGGEKVASEEDYYEEFDEVCPLNPGVTAMQCNEEDSGGQVNLEFSDEDLLSSQELSELAKSVGVNLQGSQESGNENSKTGDTGDGAIVSQLGSGAPRPGRKTNVTSLLYNRSSVQTK

SEQ ID NO: 48639 - protein, 89 aa, Zea mays
  Coding DNA Sequence Number=SeqID_6860
MAQFAHVSGVYNSFDRFVNCLSTITLDSAPRKEKAEIPFKLISRHKPFRTLTNPKQDRLGFLRLGLTYWDEKDPTPSATMPTVTPGFRR

SEQ ID NO: 48640 - protein, 122 aa, Zea mays
  Coding DNA Sequence Number=SeqID_6861
  Subcellular localization annotation: CTP_CleavageSite=47; ConfidenceScore=5.68e-01
MSPTHVTGPRDPHVIRCFAPTLNRPLTAFAGPRNRLSTALLRLTVTRAGFVSAFLSALANPLRAPRAIRKLRESVEVRLDLGIKPPLDTPEFFLPSPCAETTHRPCSHSHLPPPRGRKWPPP

SEQ ID NO: 48641 - protein, 128 aa, Zea mays
  Coding DNA Sequence Number=SeqID_6862
MTFPEPIRDLGAKVPPSSLASSSHRKILESQCTAPIAIRAGAGARAAALVPLLLFFPVSAVKKLGFANGRWLRALVFRHSGVIGVMKISHRAPPPPRYRLSSWPASAQPPSSVSTFPIASYNRSLRVA

SEQ ID NO: 48642 - protein, 71 aa, Zea mays
  Coding DNA Sequence Number=SeqID_6863
MAARSARGFYAGRGQEKLGGVHGRFYPQVKTDFNRFPELTDCARSSRRVRKRGEERADKAGSRDNETEERS

SEQ ID NO: 48643 - protein, 193 aa, Zea mays
  Coding DNA Sequence Number=SeqID_6864
  Gene Ontology: Mol. function=ATPase activity, coupled to transmembrane movement of substances; Cellular component=integral to membrane; Biological process=transport
  Homolog annotation: Hit_ID=Q69RG8; Match level="QueryCoverage=46%, HitCoverage=13%, E-value=6e-39, Identity=92%"; Hit description =Putative ATP-binding cassette, sub-family B, member 10
  Pfam annotation: Domain name=ABC_tran; Domain location=60-193; Score =16.4; E_value=6e-09; Accession=PF00005.17; Description=ABC transporter
MADGSLGRARMGLHGGGHTWFCRIEHRWLVPSSDVASVFLPASSATVPVASTSPLPAPIVVSPLFQPTFIIQISRHSCASLDPVLFSVSVGENIAYGLPDDVVSKDEIIKAAKAANAHEFIISLPQGYDTLVGERGSLLSGGQRQRIAIARALLKNAPILILDEVTQNYEHIDLGKKGQKHEYMRCLFNHLQD

SEQ ID NO: 48644 - protein, 79 aa, Zea mays
  Coding DNA Sequence Number=SeqID_6865
MASVLDAIIESVKASTPASAPAAEGETLKKSSKATIAQTTAEARPSVPRRKQNLRRLLKKGLILSKALKAKKKVEDESC

SEQ ID NO: 48645 - protein, 62 aa, Zea mays
  Coding DNA Sequence Number=SeqID_6866
MPRVDVDGDRVVHGRLGVGQRGVGSRGLCLVAGKEKRLEEKVADHVGGGANDAFSPTILGEV

SEQ ID NO: 48646 - protein, 314 aa, Zea mays
  Coding DNA Sequence Number=SeqID_6867
  Gene Ontology: Mol. function=ATPase activity, coupled to transmembrane movement of substances; Cellular component=integral to membrane; Biological process=transport
  Homolog annotation: Hit_ID=Q69RG8; Match level="QueryCoverage=94%, HitCoverage=44%, E-value=1e-81, Identity=57%"; Hit description =Putative ATP-binding cassette, sub-family B, member 10
  Pfam annotation: Domain name=ABC_membrane; Domain location=104-313; Score=-18.6; E_value=0.0073; Accession=PF00664.13; Description=ABC transporter transmembrane region
  Subcellular localization annotation: CTP_CleavageSite=75; ConfidenceScore=5.65e-01
MAISTWSARLLLTPASSRATLSPPRPPTTNPLSSFFPRNRLHFVRPRPRPPCAYISAPAPGPEAAYAPPSLDATAAAADVAAAISSSDAVTWAGVWALLSRHRARIAVCIAALVACTTCTLSMPLFSGRFFETLIGRGNEPLWRLLSKIAILYTLEPIFTIIFVINITIIWEQVMARLRSQIFRRILIQKMLFFDRHKVGELTGLLTSDLGSLKSVIIGTLCILFTLSTELAPVLGLLMVSVSVLVAIFKRSTVPTFKSYGIVQARISDCASETFSAIRTVRSFGGEKRQISLFDNLVRHELLSTSSIFLFDVG

SEQ ID NO: 48647 - protein, 110 aa, Zea mays
  Coding DNA Sequence Number=SeqID_6868
  Subcellular localization annotation: CTP_CleavageSite=62; ConfidenceScore=5.09e-01
MGGETRRRNRKLYMLCTRSPNSGNQAQKSTHSRWTDIRMCAAVTASNPPSPCMPSVGAPYSRSAYGAELTQLGAIGYGAEIFRLCRIQIYFSSRFISSAWKELVAETPTM

SEQ ID NO: 48648 - protein, 142 aa, Zea mays
  Coding DNA Sequence Number=SeqID_6869
  Subcellular localization annotation: CTP_CleavageSite=50; ConfidenceScore=5.73e-01
MAPPVFLWPSAVALVVGAACRAPVQFSTSSLSSPLPKYGRLCSLLSVRLVASHRRPCHGAGCRSTCVLASPVRLGPTMELAQLLSHLYSSLSISVRAAARWGRHMSATLAKCSMKYRSELHLDLCSPNPRRHNTLVSAVLFV

SEQ ID NO: 48649 - protein, 88 aa, Zea mays
  Coding DNA Sequence Number=SeqID_6870
MGGAGGGHGKHQGDSVLASGVGADAQVPRYRRGAMGGAGGGHGKHQGDSVLASGVGADAQVPRWRGQRLLDKAIALENKRVEFGEKGY

SEQ ID NO: 48650 - protein, 237 aa, Zea mays
  Coding DNA Sequence Number=SeqID_6871
  Gene Ontology: Mol. function=ATPase activity, coupled to transmembrane movement of substances; Cellular component=integral to membrane; Biological process=transport
  Homolog annotation: Hit_ID=Q69RG8; Match level="QueryCoverage=57%, HitCoverage=26%, E-value=7e-52, Identity=65%"; Hit description =Putative ATP-binding cassette, sub-family B, member 10
AEAEYRTVANGVAVASWMRQLLHELHSPLQRANLVYCDNVLSFPTTLQFADIFTKGPLLGDKQMLERGQMSCPTTRVTAKRSTDEGETDRVNESLWTRGRKGKLSVGTMVSFIGYTFTLTFAVQGAVNTLGDLRGTLASVERINSILSAKDIDDSLAYGLAKELDGKEFDDSNGVSNVEILNGLDLTIECGKVTALVGPSGAGKSTVPTQGSITVAGEDIRVFDKREWSRVVSLVNQ

SEQ ID NO: 48651 - protein, 81 aa, Zea mays
  Coding DNA Sequence Number=SeqID_6872
  Homolog annotation: Hit_ID=Q69RG8; Match level="QueryCoverage=52%, HitCoverage=6%, E-value=5e-13, Identity=88%"; Hit description =Putative ATP-binding cassette, sub-family B, member 10
AHAYQNNGTKLGVLKSANESLTRVVVYVSLMALYILGGRKVNAIHEVSVQEASKASRGAPHDFAKAPPPSWIVLSQNLGED

SEQ ID NO: 48652 - protein, 182 aa, Zea mays
  Coding DNA Sequence Number=SeqID_6873
  Subcellular localization annotation: CTP_CleavageSite=67; ConfidenceScore=5.13e-01
MAVPMLRPADHSSPFVSPSLGDWAHLTTCKSVPTFGAHRSCYDKNKPARVPKKTTSKATTSLDDAAKATLVEKKGKATLVGEVPQVAPENDGAVKTSVLTQRTHPPRRHRSHVQLYGPLSEPSARFYPSESDDIMEDGEVLGISAEDQLKLRALRIKNNHMQKQKEILATKRHGINMQAKVR

SEQ ID NO: 48653 - protein, 58 aa, Zea mays
  Coding DNA Sequence Number=SeqID_6874
MAAAMAPSGEWKGEGGWGQLGEVEVSSPAMGTDHGAGAAERCRPNLQTCQGAAAPYGR

SEQ ID NO: 48654 - protein, 372 aa, Zea mays
  Coding DNA Sequence Number=SeqID_6875
  Gene Ontology: Mol. function=RNA-directed DNA polymerase activity; Cellular component=membrane; Biological process=intracellular protein transport
  Homolog annotation: Hit_ID=Q5VRF6; Match level="QueryCoverage=80%, HitCoverage=82%, E-value=4e-57, Identity=44%"; Hit description =Putative syntaxin-related protein Nt-syr1
  Pfam annotation: Domain name=SNARE; Domain location=264-310; Score =13.8; E_value=0.017; Accession=PF05739.9; Description=SNARE domain
  Pfam annotation: Domain name=Syntaxin; Domain location=35-134; Score =36.8; E_value=7.3e-08; Accession=PF00804.15; Description=Syntaxin
  Pfam module annotation: Pfam domain module=SNARE::Syntaxin; Domain location=264-310::35-134
MNNLLSDSFERDEKPESERDIEMGNRNPKDNSDYGLKDFFEQVKEIEVLLDKMSNIVHKLQEANEESKSVTKASAMKVIKERMEKDIDGVLKIARNVKVKLEQMDRNVWTLSLTMSSACDSLHPMLARAHYSPLRFAESREQTEAGVWEGHQRRPIKDVHDHVRSSCIYYANAKVIQQNVNFDCSALKKKLKERMNDFQNLRQTIQEEYREVVERRIFTVTGTKPSEEVIDRLIETGSSEQIFERAIQGTGRGQILDTVEEIQERHDAVMEIEKRLLELQMIFADMAALVDAQREDLDNIENLCYWKTQSSSKADPLPPSGSKCCKPCGVWYRGATHREEPAEEVEKVHVDCDYHSAGNCRHSRAFDLKALG

SEQ ID NO: 48655 - protein, 151 aa, Zea mays
  Coding DNA Sequence Number=SeqID_6876
MRRRTGASGNGSGSGARITALQHHADGRPRSLDGPHFSHAHTGWAEVAGLLEESLQENTADDKETEVGVYQHTVHTEFRDKETDAKMRRTCWVLGSLGVDWSLEDRSTSEAVRKLSKATKTTPDAGSRRAEAVNASTESTSIPPSSASPLL

SEQ ID NO: 48656 - protein, 107 aa, Zea mays
  Coding DNA Sequence Number=SeqID_6877
GQALAIPPFQLLVILGNVIFAVGRPPAHTVHHRFRGPTQNPRHGESARYSAAACGPPGGTRPGTVAARHEHGPARLEPCPGQPGTSTVPCLGSSAGPAVQARARHGK

SEQ ID NO: 48657 - protein, 88 aa, Zea mays
  Coding DNA Sequence Number=SeqID_6878
MARQAATRELGKREAAREEESAAWLLGEHRQGSLASGEKRRAAAGGWHTAWGAATTWGAAPSRAWWPRAGQWPKGGKLVLMLPKYCPN

SEQ ID NO: 48658 - protein, 215 aa, Zea mays
  Coding DNA Sequence Number=SeqID_6879
  Gene Ontology: Mol. function=phosphoric diester hydrolase activity; Cellular component=nucleus; Biological process=DNA repair
  Homolog annotation: Hit_ID=Q7XHY3; Match level="QueryCoverage=72%, HitCoverage=23%, E-value=1e-56, Identity=71%"; Hit description =Putative tyrosyl-DNA phosphodiesterase
  Subcellular localization annotation: CTP_CleavageSite=72; ConfidenceScore=5.25e-01
PTAQICALLSLSPCLLDATAATAWAPPPASDAANRSTSRHLHNAVGRASSLRRTGELRRSQVRLGTLVPLTKDNAGSSNGSVSSIPIFQGPNVVGRDHLVVVDKRISRKHLSLHASTDGSIEVVVEGPNPIIVRSKGQRRKVCAKETAKIAHGDVLELIPGDYFVKYVDMGDEHVPMHLSDLMKGKRYSEEHGAAVKRIRQIMEDEALAKTLQVS

SEQ ID NO: 48659 - protein, 132 aa, Zea mays
  Coding DNA Sequence Number=SeqID_6880
MAGARPPCSASLPRKEDGIARRDAVGACGAQRLGARPQRRLPRHKENEEGCARLLTSRHSLTERARGCLLVKLRHAVLNDGLADDNLRCLRPMDAILEDLLDLWVRTHTRFRCATSILSVDVDRIVVIGVIG

SEQ ID NO: 48660 - protein, 108 aa, Zea mays
  Coding DNA Sequence Number=SeqID_6881
MAGARPPCSASLPRKEDGIARRDAVGACGAQRLGARPQRRLPRHKENEEGCARLLTSRHSLTERARGCLLVKLRHAVLNDGLADDNFAVGTNTGRAAFRWCYNADEGR

SEQ ID NO: 48661 - protein, 161 aa, Zea mays
  Coding DNA Sequence Number=SeqID_6882
MGVPHRGRRYRRGRERGEEGVMGIERRESLTLATTSRHDGRRWGTTPVRVQRAWRTVGRSSVRRRFPRRGRGTFVALGEGRGRERAVPPFGRHGHVVFGVESEGWLKMNSGKGGANARATAAWRCPCRVRTTAGYTGPACAQVVQGEWAAHGERALNGRSW

SEQ ID NO: 48662 - protein, 131 aa, Zea mays
  Coding DNA Sequence Number=SeqID_6883
MEEASSNNVDGGGDVRSVELQATPVMPFSKPYPTNPSNSKAIGFALGAPGCNWTSPSARLAVAAEVPMLHATAMDIKRREEALKNGADPHLFLHNCCHSSTNCISWEIINVMGNHVGVTVGGANGHYCFLC

SEQ ID NO: 48663 - protein, 172 aa, Zea mays
  Coding DNA Sequence Number=SeqID_6884
MLEVFAAGQDTAIPPVHVIPEHRVQVQIVHFCVLHGWTAVVPLPVECGLPTASPSPPVPVGDAESSTPAPWTSIWRHHRLLHPLQRQLDVVHQLRRSHAKKEMVTGDEPATSHGKAPSGESDNKKREESPPRVKSHRSGDKKKKMKKVVYYETDSSSPSTSGSDTPSSPASR

SEQ ID NO: 48664 - protein, 140 aa, Zea mays
  Coding DNA Sequence Number=SeqID_6885
MWKQLGNNDEIANLEDNIPPNGNPHPFPEDDNDEDFLQAMGDFMENLVNQNLGGVQEAQGNPHISNLFLGPVTFPSLQNLLDCDGIYMDIVVSTLQKVDVDRCGVPPVEAVVEVLLHPGSGEEDSTIATRHLKWSRTRCC

SEQ ID NO: 48665 - protein, 307 aa, Zea mays
  Coding DNA Sequence Number=SeqID_6886
  Gene Ontology: Mol. function=hydrolase activity, acting on ester bonds; Biological process=lipid metabolic process
  Homolog annotation: Hit_ID=Q6Z8Z9; Match level="QueryCoverage=66%, HitCoverage=71%, E-value=2e-50, Identity=68%"; Hit description =Putative GDSL-motif lipase/hydrolase protein
  Pfam annotation: Domain name=Lipase_GDSL; Domain location=110-298; Score=54.8; E_value=2.8e-13; Accession=PF00657.12; Description=GDSL -like LipaseAcylhydrolase
MRGFQLLLIIVALLAGELHCARAASAADAPEAAPQSPEAPTADEQTPPQAPGPTSPPPPPRRRGSPHRRPPAPTDQQDPAPPRLVVPPQEPPAPAPPGMTINRTTGCTTLLVLGDSTVDPGNNNHLPTTARANFLPYGLNFYGRRPTGRFTNGRLATDMLAEKLGISRIIPGFFDPNLRLAQLRRGVSFASGGSGYDDSTANRINVVSFSEQVHNLFRYKLLIRTLLGPRRAERLVNRAAFVISTGLTEVSRGCCGSGVIEVGQTCRGRRTCGDPSKYLYWDAVHPTERTNQVIANMMMDSIGELYS

SEQ ID NO: 48666 - protein, 221 aa, Zea mays
  Coding DNA Sequence Number=SeqID_6887
  Homolog annotation: Hit_ID=Q5JML8; Match level="QueryCoverage=22%, HitCoverage=36%, E-value=5e-15, Identity=76%"; Hit description=DNA -binding protein-related-like
MALCLRRLLQQVYKEIKLEDFSAGCAAHLKKIASKRFNKFVFKPSRRDSGGTKIPEAIIFRFENYWIAHRGFLDVVQSPWSREICKIVQSMPTDKAPGYRSRFLLGIDADVTAYRSLVGALQYPTFTRPDCTNHGDFSITYLHGIYETSLMFMFFLLVDLLKPDTTVIFRNAKIDMFKGTMRLAVDKWGRIEVTDSSVFKVNEDNNMSLVEYELVDVDEEE

SEQ ID NO: 48667 - protein, 106 aa, Zea mays
  Coding DNA Sequence Number=SeqID_6888
  Subcellular localization annotation: CTP_CleavageSite=29; ConfidenceScore=5.17e-01
MTTPPFSLLLKHLRARATLLCRSLACCCCSAHLRSSSSSTSCVGALVVACPCSYYALRIPVALLLVVTPSTRHAEHHRRSFAESLCYTAPKLCSPSPPLGLRDSTV

SEQ ID NO: 48668 - protein, 146 aa, Zea mays
  Coding DNA Sequence Number=SeqID_6889
MPKMCEKDASNVEPGLVRLRYNYKFEDEFGEPSDGWLDYIESKCNEIHGFKEEEEEDETKEKDTAGTTLVLKSTTPLAADETGPSSPRLEQVTTTVTSSTIMVAEDKGSSKPALVEDKGKVLLNLKRPRRQSKMIHRLVKDLSTKT

SEQ ID NO: 48669 - protein, 72 aa, Zea mays
  Coding DNA Sequence Number=SeqID_6890
MSASKKCEREGRARLGRSKGSSDFIGRGHRVIEEKRRPTIDGIHGASMREVVGQRRWAVDEDKEVEGEEEHL

SEQ ID NO: 48670 - protein, 166 aa, Zea mays
  Coding DNA Sequence Number=SeqID_6891
  Gene Ontology: Mol. function=nucleic acid binding; Cellular component= intracellular; Biological process=DNA integration
  Homolog annotation: Hit_ID=Q8H6I0; Match level="QueryCoverage=99%, HitCoverage=11%, E-value=2e-62, Identity=64%"; Hit description =Putative gag-pol polyprotein
MSGDHTKKEMVTGEKPATSHGKAPSGESRNKGKEKESPSHKSRRSGDKKKKMRKVVYYETDSSSPSNSGSDTPSVTSKRHERKKFSKIPLRYPHISKHTPLLSVPLGKPPTFDGEDYARWSDMMRYHLTSLHKSIWDVVEFGVQVPSVGDDDYDEDEVAQVVHLNS

SEQ ID NO: 48671 - protein, 694 aa, Zea mays
  Coding DNA Sequence Number=SeqID_6892
  Gene Ontology: Mol. function=DNA helicase activity; Biological process=DNA replication, synthesis of RNA primer
  Homolog annotation: Hit_ID=Q016M7; Match level="QueryCoverage=76%, HitCoverage=84%, E-value=1e-142, Identity=46%"; Hit description =Homology to unknown gene
  Pfam annotation: Domain name=Toprim; Domain location=284-362; Score =21.7; E_value=0.0012; Accession=PF01751.12; Description=Toprim domain
  Subcellular localization annotation: CTP_CleavageSite=37; ConfidenceScore=5.32e-01
MPPRPSLHSLLLMAASAAAASGDSGPLLAARRRLAATAAAGGHRIRLLHSFSPGRVPRRPEVYIKRTLSGFGLGAKHPGKYVLSAKNYSTASEERLGKIIQKLKNEGINPKQWRLGNFQRMLCPQCNGGSSEELSLSVYIRKDGINATWNCFRSKCGWRGFVQADGVTNISQGKSGIESETDQEVEAKKAANKVYRKISDEDLNLEPLCDELVEYFATRMISAETLRRNKVMQRNWNNKISIAFTYRRDGALVGCKYRAVDKTFSQEANTEKIFYGLDDIKRAHDVIIVEGEIDKLSMDEAGYRNCVSVPDGAPPKVSSKIPDQEQASRIILATDNDRPGQALAEELARRLGKERCWRVNWPKKNDTDTCKDANEVLMFLGPQALRKVIEDAELYPIRGLFSFEQFFPEIDNYFLGIHGDELGIHTGWKSMDDLYKVKEHARKLLEKHIQKPFFNARYGGSAQRMTPDEFEAGKQWLNKTFHLIRCEDDSLPSINWVLDLAKAAVLRHGVRGLVIDPYNELDHQRPSNQTETEYVSQILTKIKRFAQHHSCHVWFVAHPRQLQNWNGGPPNIYDISGSAHFINKCDNGIVIHRNRDPNAGPLDTVQVCVRKVRNKVVGQIGDAFLTYDRVTGEFKDAGKATTAPSAKAAKQSRKEAYKMPFQHAAEDGTNAFNVAVFFKKDAFNVTQLRIQLEQ

SEQ ID NO: 48672 - protein, 90 aa, Zea mays
  Coding DNA Sequence Number=SeqID_6893
  Gene Ontology: Mol. function=receptor activity; Cellular component =thylakoid; Biological process=photosynthesis
  Homolog annotation: Hit_ID=Q32Y70; Match level="QueryCoverage=96%, HitCoverage=12%, E-value=6e-27, Identity=71%"; Hit description =Peroxisomal targeting signal 1 receptor short form
  Subcellular localization annotation: CTP_CleavageSite=51; ConfidenceScore=5.54e-01
MALRHLVTGQNNCAPDGASSSNPLNALANAFLGQSSKAQSIKELPGSVSVPSTSGFSAPAPLSNIPGSENEFKQDQRPFVQEQPFSRHWM

SEQ ID NO: 48673 - protein, 1020 aa, Zea mays
  Coding DNA Sequence Number=SeqID_6894
  Gene Ontology: Mol. function=hydrolase activity, acting on acid anhydrides, catalyzing transmembrane movement of substances; Cellular component=integral to membrane; Biological process=calcium ion transport
  Homolog annotation: Hit_ID=Q2QMX9; Match level="QueryCoverage=98%, HitCoverage=98%, E-value=0.0, Identity=76%"; Hit description=Calcium- transporting ATPase 1, plasma membrane-type (EC 3.6.3.8) (Ca(2+) -ATPase isoform 1)
  Pfam annotation: Domain name=Cation_ATPase_C; Domain location=876 -1020; Score=32.1; E_value=8.7e-07; Accession=PF00689.11; Description= Cation transporting ATPase, C-terminus
  Pfam annotation: Domain name=Cation_ATPase_N; Domain location=110 -192; Score=52.1; E_value=1.9e-12; Accession=PF00690.16; Description =Cation transporterATPase, N-terminus
  Pfam annotation: Domain name=E1-E2_ATPase; Domain location=206-447; Score=225.9; E_value=8.7e-65; Accession=PF00122.10; Description=E1 -E2 ATPase
  Pfam annotation: Domain name=Hydrolase; Domain location=451-780; Score=61.7; E_value=2.4e-15; Accession=PF00702.16; Description =haloacid dehalogenase-like hydrolase
  Pfam module annotation: Pfam domain module=Cation_ATPase_C::Cation _ATPase_N::E1-E2_ATPase::Hydrolase; Domain location=876-1020::110 -192::206-447::451-780
MESYLNENFGGVKAKHSSEEALGRWRSVVGVVKNPTRRFRFTANLGKRSEAAAMKRSNQEKLRVAVLVSKAALQFIHGLPSQGDYAVPADVKAAGFGVCAEELGAIVETHDVKKLKSHGGVDGLVSRLSTSASDGLDDSNEPMTAARQELFGVNRFAEAEPRSFWVFVWEALQDMTLMILAACALVSLVVGIATEGWPHGAHDGLGIVASILLVVFVTATSDYRQSLQFKDLDKEKKKIAVQVTRRGYRQRLSIYDLLAGDIVHLSIGDQVPADGLFVSGFSMLIDESSLTGESEPVAVSAENPFLLSGTKVQDGACKMLVTTVGMRTQWGKLMATLSEGGDDETPLQVKLNGVATIIGKIGLAFAVVTFAVLTQSLFWRKLADGSWLSWTGDDALELLEFFAIAVTIVVVAVPEGLPLAVTLSLAFAMKKMMNDRALVRHLAACETMGSATTICSDKTGTLTTNHMTVVKACICGKVRDVNSSVETKTLPSDLPASVVAMLLQSAFNNTGGDIVLDQDGRREILGTPTEAAILEFGLSLGGDFAAVRKASTLLKVEPFNSARKRMGVVIQLPGGALRAHCKGASEIVLASCTRYLDERGSAVALDGATADRLRATIDSFANEALRTLCLAYVDVGDGFSPSEQIPTDGYTCICVVGIKDPVRPGVKESVAICRSAGITVRMVTGDNINTAKAIARECGILTDGGVAIEGPDFRVKTEEELQELIPKIQVMARSSPLDKHTLVKHLRTTFDEVVAVTGDGTNDAPALHEADIGLAMGIAGTEVAKESADVIILDDNFSTIVTVAKWGRSVYINIQKFVQFQLTVNVVALVVNFSSACLIGSAPLTAVQLLWVNMIMDTLGALALATEPPNDELMKRTPVGRKGNFISNVMWRNIMGQALYQFLVIWSLQSRGKSLFGIERRADSDLVLNTIIFNCFVFCQVFNEVSSREMERVNVLRGILDNNVFAMVLGSTVVFQFVIVQCLGSFANTTPLSVAQWGACVAIGFVGMPVAVAVKMVPVE

SEQ ID NO: 48674 - protein, 686 aa, Zea mays
  Coding DNA Sequence Number=SeqID_6895
  Gene Ontology: Mol. function=unfolded protein binding; Cellular component=phagocytic vesicle; Biological process=protein folding
  Homolog annotation: Hit_ID=P55737; Match level="QueryCoverage=94%, HitCoverage=99%, E-value=0.0, Identity=72%"; Hit description=Heat shock protein 81-2
  Pfam annotation: Domain name=HATPase_c; Domain location=64-169; Score= 13.6; E_value=0.0027; Accession=PF02518.16; Description=Histidine kinase-, DNA gyrase B-, and HSP90-like ATPase
  Pfam annotation: Domain name=HSP90; Domain location=172-686; Score =1306.8; E_value=0; Accession=PF00183.9; Description=Hsp90 protein
  Pfam module annotation: Pfam domain module=HATPase_c::HSP90; Domain location=64-169::172-686
  Subcellular localization annotation: CTP_CleavageSite=19; ConfidenceScore=5.17e-01
MAERWSRRNSGPIGRQSPLAAAYRSRSPRVREGRFAMASETETFAFQAEINQLLSLIINTFYSNKEIFLRELISNSSDALDKIRFESLTDKTKLDAQPELFIHIVPDKANNTLTIIDSGIERVVVTTKHNDDEQYVWESQAGGSFTVARDTSGEQLGRGTKMTLYLKDDQLEYLEERRLKDLIKKHSEFISYPISLWIEKTTEKEISDDEDEEDKKDEEGKVEDVDDEKEEKEKKKKKIKEVSHEWQLVNKQKPIWMRKPEEITKEEYAAFYKSLTNDWEEHLAVKHFSVEGQLEFKAVLFVPKRAPFDLFDTRKKQNNIKLYVRRVFIMDNCEELIPEWLSFVKGIVDSEDLPLNISRETLQQNKILKVIRKNLVKKCVELFFEIAENKEDYNKFYEAFSKNLKLGIHEDSTNRTKIAELLRYHSTKSGDELTSLKDYVTRMKEGQNDIFYITGESKKAVENSPFLEKLKKRGYEVLFMVDAIDEYSIGQLKEFEGKKLVSATKEGLKLDESEDEKKRKEELKEKFEGLCKVIKEVLGDKVEKVVVSDRVVDSPCCLVTGEYGWTANMERIMKAQALRDSSMSGYMSSKKTMEINPENAIMEELRKRAEADKNDKSVKDLVMLLFETALLTSGFSLDDPNTFGSRIHRMLKLGLSIDEDEEAPEADTDMPPLEDDAGESKMEEVD

SEQ ID NO: 48675 - protein, 152 aa, Zea mays
  Coding DNA Sequence Number=SeqID_6896
MGKNNKRKREPTPPSEEFGDSEYSEEEFSSESEGSPAPIPLRESSDDSDDSQGLAAEVWTYIRAIECSGLEGSDESEYSSDEEDSDGGGEDEDDDDDDDGGDGDGDGSGKGGGSGGGSKDGDGGGSRGSNQGGSSRGSTRGGSGGGSSSASG

SEQ ID NO: 48676 - protein, 98 aa, Zea mays
  Coding DNA Sequence Number=SeqID_6897
MAGTQGGLGLMVNELRLHGEKAGERGLAKLRGWEQTRGCLALLARRWSSPRQWTRQKLNGGHGTTVDHSGAPWVCAQCERERESEGVRLRAQLSEGSE

SEQ ID NO: 48677 - protein, 124 aa, Zea mays
  Coding DNA Sequence Number=SeqID_6898
  Subcellular localization annotation: CTP_CleavageSite=50; ConfidenceScore=5.34e-01
MAARRLRPAPAPPSLRLGRARPSPARLPCPDAAPSPGVPALAHPRSRPWRAAGARPWRPWRVAVARPAPFPAARALAPPGLDAPLSNSLAPAAARGGPARVLAPPILVPARRPLVTGGRLEGDY

SEQ ID NO: 48678 - protein, 445 aa, Zea mays
  Coding DNA Sequence Number=SeqID_6899
  Gene Ontology: Mol. function=pectate lyase activity; Cellular component=anchored to membrane
  Homolog annotation: Hit_ID=Q6H8B0; Match level="QueryCoverage=92%, HitCoverage=92%, E-value=1e-163, Identity=65%"; Hit description =Putative pectate lyase
  Pfam annotation: Domain name=Pec_lyase_C; Domain location=165-350; Score=300.2; E_value=3.8e-87; Accession=PF00544.9; Description =Pectate lyase
  Pfam annotation: Domain name=Pec_lyase_N; Domain location=32-68; Score=3.5; E_value=0.0036; Accession=PF04431.4; Description=Pectate lyase, N terminus
  Pfam module annotation: Pfam domain module=Pec_lyase_C::Pec_lyase_N; Domain location=165-350::32-68
METTTKLRWSRPGSFLLVAAAFLASAAASGVNVGQFDDHLQKRKELAEASAREAYRPDPAVSSSRREMRERPRKHKKRGPCRATNPIDKCWRCRRDWATDRQRLARCARGFGHATTGGLGGKIYVVTDPTDLDVVNPRPGTLRWGVIQPGPLWIIFARSMIIQLSQELLMSSDKTIDGRGAQVHIANGAGITVQLAQNVIIHNLHVHDVKHTMGGLMRDSPTHIGSRTRADGDGISLFSATNVWIDHISMSNCEDGLIDVVQSSTGITISNCHFTNHNDVMLFGASDSWPQDQIMQITVAFNHFGRGLVQRMPRCRWGFFHVVNNDYTHWLMYAIGGGDAPTIISQGNRYIAPPNIAAKVPCHAMPSHPLPFEQITKHYAEEGVWKNWVWHTEDDLFMNGAIFNPSGGAPKQVDTNEWVKPKPGTYVTRLTRFSGTLSCCTGKPC

SEQ ID NO: 48679 - protein, 161 aa, Zea mays
  Coding DNA Sequence Number=SeqID_6900
MGATQASGHWRLGKGWHPGGAQPWPVGAAPATRECSPYTHERGPGPGGSCPGAGGLATAAPGRFPGSARRPPSSTARCAVPGGAHRQIRSRRLGRGGLGPGVSRPGGCGRGSQPWGRPGRAPAAVQARVHGAASLASRARCPDAHAGESPGGAGGQSAALW

SEQ ID NO: 48680 - protein, 130 aa, Zea mays
  Coding DNA Sequence Number=SeqID_6901
  Homolog annotation: Hit_ID=Q9AUK0; Match level="QueryCoverage=30%, HitCoverage=5%, E-value=3e-08, Identity=72%"; Hit description =Putative ubiquitin protein ligase
MDITTPYSVDRPGAQCSILEASLIESQIIISPQSANTGAAECKIRLLSTNCTSACRYQQVHSDVKVAPTSDFKGSSKSETWRMMMLYDGVHTDNTFGSSIGGQEVDHLSFASTCYNTLKLPTYKRSSTLS

SEQ ID NO: 48681 - protein, 75 aa, Zea mays
  Coding DNA Sequence Number=SeqID_6902
  Homolog annotation: Hit_ID=Q9S703; Match level="QueryCoverage=43%, HitCoverage=26%, E-value=2e-08, Identity=78%"; Hit description=Ae1 protein precursor
MNAKRLTPILLAVLMMTCLVSAANCEDVLARVSQSQATLIHPIYEAHRRDALHRSQRVLMRKDLASNSLARSDNL

SEQ ID NO: 48682 - protein, 301 aa, Zea mays
  Coding DNA Sequence Number=SeqID_6903
  Homolog annotation: Hit_ID=Q9S703; Match level="QueryCoverage=30%, HitCoverage=75%, E-value=5e-11, Identity=40%"; Hit description=Ae1 protein precursor
MSSTPILLTILLAYLAFSANCNGERGNDEDTPAAGGHRRWQPNGDKTISGGSSDDEAATCVSSECEGSTCYCCPTMPTSPCFLDLDACLRVCHGRRRRRRPAAPLPEDETPVPSIAAAVNRHSQEVCSLPADPQPSDTNNSQLHNFIANITMPPEPPLIQTLPHNNLPNTANAIWVSPQQHINRPGQASTSGKRYSVRLAAKKKLMLGRSRDSISKAQDILVAKLYNSTTKNNLGSLASCSSNEVNHFEQIARLFARPLTKIQMEEIMELANHGKGKKINNKKGRKVAPFLAPVAPLALEG

SEQ ID NO: 48683 - protein, 118 aa, Zea mays
  Coding DNA Sequence Number=SeqID_6904
MDPEGKGMMINDKEEKETLYVDEPKGDKPTDFGLNNKRKDGKKKRCIKKIIYYDSDSSSSSPRDDNDEVSLSKKKTDFRTHVVEGEETTEFATSIPRLPQSRRKKLSKLIEGVYLPVV

SEQ ID NO: 48684 - protein, 47 aa, Zea mays
  Coding DNA Sequence Number=SeqID_6905
MTSLVEDDQVILVASFLRPSGHHSRTVLAYPELSNLSARTIQRMQYM

SEQ ID NO: 48685 - protein, 101 aa, Zea mays
  Coding DNA Sequence Number=SeqID_6906
MTSWRPTVGPSSHLMAYAPGLGPTRWGKRTVHGADRERAAGSMTEGDDAVDAAAGAREPFILEEAKFHEAGRPTPILVTARASPLLPRARHRHVLLPGRSQ

SEQ ID NO: 48686 - protein, 571 aa, Zea mays
  Coding DNA Sequence Number=SeqID_6907
  Gene Ontology: Mol. function=voltage-gated potassium channel activity; Cellular component=integral to membrane; Biological process=potassium ion transport
  Homolog annotation: Hit_ID=O65816; Match level="QueryCoverage=76%, HitCoverage=62%, E-value=0.0, Identity=72%"; Hit description =Putative calmodulin binding transporter protein
  Pfam annotation: Domain name=cNMP_binding; Domain location=360-460; Score=38.9; E_value=1.7e-08; Accession=PF00027.19; Description =Cyclic nucleotide-binding domain
MPIPIHQIPFPHSPSPIPGFSEPHHTAYPSQQNSPNQHHHNLPFPTFDDKEDPVGRLSRRESFFYNQGTPEVDKVWMATYYLMGTARLCTAPLPASSPNPRTTALKRRGPEPRPSHHHSYLLRSRSSNKGFGALWYILSIQREDTCWRQACINQTGCDPTSLYCGYHSLANNSFLQNACPTNSTANPDPIFGIFLPALQNVSQSTSFFEKLFYCFWWGLQNLSSLGQNMKTSTNTLENLFAVFVSTSGLVLFALLIGNVQTYLQSASVRIEEMRVKRRDTEQWMAHRLLPENLKDRIMRHEQYRWQETRGVDEEGLLKNLPKDLRREIKRHLCLSLLMKVPMFENMDEQLLDAMCDRLKPMLYTEGSCIIREGDPVNEMLFIMRGTLESTTTNGGQTGFFNSNVLKGGDFCGEELLTWALDPTSASNLPGSTRTVKTLSEVEAFALRADDLKFVATQFRRLHSKQLQHTFRFYSQQWRTWAACFIQAAWHRYCRKKLEEALYEKEKRLQAAIVSDGTTSLSLGAALYASRFAGNMMRILRRNATRKARLQERVPARLLQKPAEPNFFAEDS

SEQ ID NO: 48687 - protein, 91 aa, Zea mays
  Coding DNA Sequence Number=SeqID_6908
  Homolog annotation: Hit_ID=O65816; Match level="QueryCoverage=33%, HitCoverage=4%, E-value=3e-09, Identity=96%"; Hit description =Putative calmodulin binding transporter protein
MAVVRSTRAIVMVSIFCSSAALAELVAAADATSLVLSSLPGISDTRLLELQLLRRAYMTGKHINYKVESSTSPCCLCKYASRSCDLKDLGA

SEQ ID NO: 48688 - protein, 350 aa, Zea mays
  Coding DNA Sequence Number=SeqID_6909
  Homolog annotation: Hit_ID=Q6QP51; Match level="QueryCoverage=38%, HitCoverage=55%, E-value=7e-24, Identity=48%"; Hit description =Putative growth-regulating factor 1
MQAACNCTKGTHPFDFDVSSMGPRPTRHGRRHLWQAKRATLHLRHDDHVKKGTGKGDTLKGILLSEGSGPRALLLIRDSKAGPSEGFDSRLRALRLRAHYWSEVRRLAPRKGLTAASGHSGSAPTTDQGFVGWPPKGSTAASEHAERGMTLGMSDTWPRLGLRSRGQGSVPSRDTISPRPSPASGKDSQPRRIHVSLEGAIGSSASPDPRARTQPRPRTTDSASPDPRARTQPRPWTTDSASPDPRARTQPRPRTTDSASPDPRARTQPRPRTTDFASPDPRARTQPRPRATVPASPDPRARTQSRPWATVSASPDPRARTQPRPRRSLRLARPWARTDHVTGGPSLPYP

SEQ ID NO: 48689 - protein, 243 aa, Zea mays
  Coding DNA Sequence Number=SeqID_6910
  Gene Ontology: Mol. function=catalytic activity; Cellular component =cellular_component; Biological process=metabolic process
  Homolog annotation: Hit_ID=Q6BE25; Match level="QueryCoverage=98%, HitCoverage=31%, E-value=1e-90, Identity=63%"; Hit description =Cycloartenol synthase
MAEMEPWRKAESGYWIMEEPHLRQHGEKFWLTVLGVYDWSGVNPVPPEFWLLPYYLPFHPGRMSCYCRMVYLPMSYIYGRRFVGPITPLVMELRKELYTDAYDEIDWNKARTECAKEDMYNPHSLVLGISWTILHKFEPIMFHWPWRKLRNKALAFIMRHIHYEDESTHYINLGAVSKALSMLACWIEDPDSEAFKCHIARVPDYLWIAKDGMKTQIYDGSQVWDDAGFMIEALLATGLVKEL

SEQ ID NO: 48690 - protein, 198 aa, Zea mays
  Coding DNA Sequence Number=SeqID_6911
MAPGCSLSVYYLVLNCHKVPCYSQILSLGPASPRPCSSYAELLGSEQMLSSSGPCNSYTDTNEPLRSGNAGSSPNREMRSTEQERAPYLDLAEFRGEGVGEGDDAEEHDDATNSGEGVGNSARAFPPFVSRRKGVGWGLRRASCGRGRDAYDGAGRGWGHGSPGFPARWRGLGIALSIEFERSELEDGGAAEADTEDP

SEQ ID NO: 48691 - protein, 134 aa, Zea mays
  Coding DNA Sequence Number=SeqID_6912
  Gene Ontology: Mol. function=protein serine/threonine kinase activity; Cellular component=integral to membrane; Biological process=protein amino acid phosphorylation
  Homolog annotation: Hit_ID=Q53JE9; Match level="QueryCoverage=69%, HitCoverage=23%, E-value=4e-44, Identity=91%"; Hit description =Protein kinase domain, putative
MAAVSCIEDPPPPPLPCVFRRGDWFPSLRTHPNRSDSVLPWETRVKILRDCASVLRFLHTHPDGCIVHRDIKLTNILLTENNVPRLADFGLAKMLQMEETKVFTDVRGTIGYMDPEYITHSKLTCASCRVEMAD

SEQ ID NO: 48692 - protein, 284 aa, Zea mays
  Coding DNA Sequence Number=SeqID_6913
  Gene Ontology: Mol. function=hydrogen ion transporting ATP synthase activity, rotational mechanism; Cellular component=proton -transporting two-sector ATPase complex; Biological process=ATP synthesis coupled proton transport
  Homolog annotation: Hit_ID=Q2RBL8; Match level="QueryCoverage=96%, HitCoverage=56%, E-value=1e-123, Identity=77%"; Hit description =Expressed protein
  Pfam annotation: Domain name=DUF231; Domain location=126-278; Score =110.9; E_value=3.7e-30; Accession=PF03005.6; Description=Arabidopsis proteins of unknown function
MGGVPFGPQGRFDAIRLLEKLRNKRLVFVGDSLNRNQWVSLVCMVEISIPDSRHKMHTFNGSLISFKALEYNATIDLYWSPLLLESNSDDPLVHRVEHRIIRADRIEKHASAWRDANIIIFNSYVWWRKHKADMRMKVMYGSFESGDARLDEVEMIDGFEIALKKLTEWLGENIDKNKTRIFFAGSSPSHSWASNWGGENSNKCLNETEPIYKVGYKAATTDYSMMEKAKSYFGTLEEKGIHIQILNITELSEYRKDGHPTVFRKQFAPSQLCGLHALVPPGCS

SEQ ID NO: 48693 - protein, 82 aa, Zea mays
  Coding DNA Sequence Number=SeqID_6914
MSVLSFALHCLPVVLAFSEVQDILKTGISTPLQPTRRVLHSTAILSSSRREYVVDKGEERATDVATHTEDVLASPAAEEDGS

SEQ ID NO: 48694 - protein, 248 aa, Zea mays
  Coding DNA Sequence Number=SeqID_6915
  Homolog annotation: Hit_ID=Q5N724; Match level="QueryCoverage=39%, HitCoverage=19%, E-value=6e-41, Identity=81%"; Hit description =Putative ceramide glucosyltransferase
MTLEFALDFVPEFDLHWIMYSIQILKICVDTTLIITEQMHERKGTMKRQAMMGKDTGNLLRPWMETPYQLIFLYNLCSLTRKGVIKNMRRNIVDGNSFAFLCDNIDELEHSVQENLPRVSVVMPLKGFGEHNLQNWRTQITSLYGGPLEFLFIVESKYDPAYHVVSRLITEYKMWHFNGRVAYSLTNNNILHIHYRADVPSFHTKFSERRYEQALEVIRTLKLEVIRTLKLGIRGLNSLAVLLLTALM

SEQ ID NO: 48695 - protein, 155 aa, Zea mays
  Coding DNA Sequence Number=SeqID_6916
  Homolog annotation: Hit_ID=Q2QYU1; Match level="QueryCoverage=66%, HitCoverage=16%, E-value=4e-30, Identity=65%"; Hit description =Nodulin-like family protein, expressed
  Pfam annotation: Domain name=Nodulin-like; Domain location=36-148; Score=-42.5; E_value=2.6e-08; Accession=PF06813.4; Description =Nodulin-like
MVAQPAGGGGAEEEVVVDGGGGRHGRRSGDEEAWRRWAVLVATVWIQAVTGTNFDFSAYSSALKSSLGVSQEALNYLATASDLGKAVGWSSGLALLHMPLHAVLAASAAMGLAAYAVQYYCLIAAASSMAAAVPYPLGLKFSPCHIECLNAKFEY

SEQ ID NO: 48696 - protein, 1308 aa, Zea mays
  Coding DNA Sequence Number=SeqID_6917
  Gene Ontology: Mol. function=phosphopantetheinyltransferase activity; Biological process=macromolecule biosynthetic process
  Homolog annotation: Hit_ID=Q5W7C5; Match level="QueryCoverage=84%, HitCoverage=99%, E-value=0.0, Identity=62%"; Hit description=Unknow protein
MAIVRTGGGVRLPRLDGGAEASLEATEDEDEEEEGSRATPSHESDADGFSAEEENGGGGGDDEPEAEEEEEEFEEEEDEGDSGMGSDELDVAELGEPSTEMCQVGDQSMAVPLELYDLDGLGDVLSLHAWNDLLSDDERLRLAAFLPDMDQETFARTLVELLAGQNFHFGSPLADFLKRLKGGLCDPRVNLYRRGIRFVERRKHYYWLQSYHNSMVRRLREIKDCWKGREGYSLDERLRMLDTMKAKQQHQQQQQRKALDFTRRAGSETDSESRGSGEQVLARPKHDKSRQKKAGKLAKEKSKGLLRVGTPKGVDEDDMGGSGRDAVVALSELSRRGYDSGTHRGKLHRSIDGLYSESEDLGYERDSSRPRFPRPLPKPVKKELSTSCDVNLYANNYSDNHTASPYYYSRNLSANQGVTLAAAYDPPYFDTRRNARYLERDWVQGGKGVHINALMGDEMNLPAGNHTGNSDDWQKGQSAGDYRSRKDQAGYGLKVKSYKSIEKEVNDARVGSDPRSKISQAKVAGKSSRQLDRTGQKHWSNAVYGQSDETESDSSEKFEDGREAHYLERKPERHHSGYHRPAHGAKKSNKLAKVAKMNYPTADADLEPSQSKGFKGKVSETGYLRDVDVMMTGQISDVMKPLAASGERKRKGVANLDMRVYDNSDLHEVNEDANDSFRLAEYERLASRSGHAVQDSNGGYGGTERTSSSSKKAKGRVEVPSLDEHGEHLSSGPKVVENTGGSKKKSKKKPESSTTDAVILAEPAVAVPENNVIAAEPEKVEKPKKKYVPITPTIHTGFSFSVVHLLTAVKKAMVTPAEDTPPATATQPDGEEGKKWFNSGERSKTPHQEQSATDQTEQVLEGANASAVEQTVPINTPALTVQEIVNRIRANPGDPRILETQEPLQDLVRGVLKVLSSRTAPLGAKGWKALVAYEKSNKSWFWVGPAPSVSSYDDPDEETSAEAWSIPHKMLVKLVDAFSNWLKSGQETLKQIGSLPPPPPPNPANLDLKERFKELKAQKSLNTISPSSDEARTYFQREEFLRYSIPDRAFCYTAADGEKSIVAPLRRGGGKPTAKARGHPMLLPDRPPHVTILCLVRDAASRLPARTGTRADVCTLLRDSQYLNHEEANKEAAINQVVSGALDRLHYERDPCVLYDNDKKLWTYLHRGREEEDFEDDGTSSTKKWKRPRRDVSDAAEPGAANDDIDDDGAGTPPSNNVKKQKTTLSGEAANDEGNHPTQNPASGGLEGDSDLNAVPSSKFFEEPCGDAYIDARPDDGGPNSVDAKPGSTADDNTALPGNTGMDATTPP

SEQ ID NO: 48697 - protein, 373 aa, Zea mays
  Coding DNA Sequence Number=SeqID_6918
  Gene Ontology: Mol. function=DNA binding; Cellular component=integral to membrane; Biological process=response to tellurium ion
  Homolog annotation: Hit_ID=Q60F47; Match level="QueryCoverage=89%, HitCoverage=88%, E-value=1e-101, Identity=59%"; Hit description =Putative transmembrane protein
  Pfam annotation: Domain name=TerC; Domain location=113-218; Score =13.3; E_value=1.1e-05; Accession=PF03741.6; Description=Integral membrane protein TerC family
  Subcellular localization annotation: CTP_CleavageSite=41; ConfidenceScore=5.36e-01
MASAVGASTATRFLPRLPDPWRPRRARAALPPLTWRPPAVTVAAASPRPGEAEEKETLNSTPRAQTNKDAEPEPVSSTTGKGSAIRRVTLVVLAAVLFGVSIALRDGAEKASEYFAGYLLEQSLSVDNLFVFVLVFKYFKVPKEYQKFEAVNLLLAVILLFTSYKCIPSIKLGQWGKTAPTLFAEEEQESDLSDNFIVKTCQKFIPVTVELIPMFLLSEYYDDDRFFTNQDGLWKATPLLLTLAVIELSDIAFAVGSFPSYFHVQWFNFYFIQIDSIPAVFGVTRDPLIILSSNIFAISGLRPLYVLISESMSELEYLQPAIGIVLGFIGTKMIFDFFGYHIPTEASLAVVTTCLSGGVILSLRKASKVEGDK

SEQ ID NO: 48698 - protein, 117 aa, Zea mays
  Coding DNA Sequence Number=SeqID_6919
  Homolog annotation: Hit_ID=Q94KM3; Match level="QueryCoverage=57%, HitCoverage=32%, E-value=2e-22, Identity=70%"; Hit description=MURB -like protein hMURB17
  Pfam annotation: Domain name=Zea_mays_MuDR; Domain location=1-116; Score=37.9; E_value=1e-08; Accession=PF05928.2; Description=Zea mays MURB-like protein (MuDR)
MQYVAIAVEKVEAVKISTTLDDVDFKGKIGKIVGHLDHVCKMLENTSIVCEQDLENKKSSWDLYDNPSNVDDHPLDVDELLDAYNTEDPELRQMARSFLEASDRSFAYDEITLSSSP

SEQ ID NO: 48699 - protein, 171 aa, Zea mays
  Coding DNA Sequence Number=SeqID_6920
MTSKIASNGSWLRDMVPVGEKKGREPTPKWDPIPAYEEHAPLLVDVDGWDIEAASESDDDLTEGEDDLQFLVDGELDSDTSTNWPWTFDGESSNVESFDDDDDPISRHWMGIDSSNKENDDDENDDGSSDDNNDDSDGSGNDDDDDDGGASQICDEMPYNKRCRLHHSLFW

SEQ ID NO: 48700 - protein, 232 aa, Zea mays
  Coding DNA Sequence Number=SeqID_6921
  Gene Ontology: Mol. function=protein binding; Cellular component =cytoskeleton; Biological process=protein modification process
  Homolog annotation: Hit_ID=Q8L5R5; Match level="QueryCoverage=92%, HitCoverage=94%, E-value=1e-70, Identity=58%"; Hit description =Tubulin folding cofactor B
  Pfam annotation: Domain name=CAP_GLY; Domain location=147-214; Score =108.0; E_value=2.7e-29; Accession=PF01302.15; Description=CAP-Gly domain
MASSKLQLPADDSVLLLITHSNLTTFAADIRVSQQTTVEALKDKLWRKTGTAVASMRLQLRDDSGTKIADLDDDAAPLAAYAPYNGYRIHVVDLDPSSLTSGGWLEDTSLVDKYTMSDETYDKLDTNFRKFKEKMVPKNSPSEDKEVGDRCEVEPGAKRGTVKFVGRAEALGRGFWVGVQYDEPLGKHDGMVKGIRFFECPQGHGAIVRPEKVKVGDFPERDPFEDEDDDEI

SEQ ID NO: 48701 - protein, 184 aa, Zea mays
  Coding DNA Sequence Number=SeqID_6922
MAVSILNRASTQSVEARTPFNSREIKRINRHLQEGKGVRMSDLRELTYYLSIKGAWRCRGGGLALERRRGATLERRRGRAERRAAERAAALPLVAGDCSDWRSGVVERTEEAARQEAARQEARRLEQWSLERSCGGWRLELGLGFGAGRDGGPLVGRECRPGLQPRQYGVMAITEAMSGGFVIL

SEQ ID NO: 48702 - protein, 415 aa, Zea mays
  Coding DNA Sequence Number=SeqID_6923
  Gene Ontology: Mol. function=RNA-directed DNA polymerase activity; Cellular component=mitochondrion; Biological process=RNA-dependent DNA replication
  Homolog annotation: Hit_ID=UPI00004C1731; Match level="QueryCoverage =99%, HitCoverage=41%, E-value=1e-99, Identity=89%"; Hit description =UPI00004C1731 related cluster
  Pfam annotation: Domain name=rve; Domain location=208-364; Score =86.9; E_value=6.2e-23; Accession=PF00665.16; Description=Integrase core domain
MGCLAALSRFISRLGERGLPLYRLLRKVECFTWTPEAEEALRNLKALLTNAPILVPPAAGEALLIYVAATTQVVSAAIVVERREEGHALPVQRSVYFISDELAKIASGRTTVPPDVFSRDLHQPSVKTDDTPEPEKASAQPEAPSAQPEGETLRVEEERSGVTPNRNWQTPYLQYLHRGELPLDRAEARRLARRAKSFVLLGDGKELYHRSPSGILQRCISTKAPGGYTHLLVAIDKFSKWIKVRPLNCIRSEQAVAFFTNIIHRFGVPNSIITDNGTQFTGKKFLDFCEDHHIRVDWAAVAHPMMNGQVERANDMILQGLKPRIYNELNKFGKRWMKELPSVVWSLRTTPSRAMGFTPFFLVFGAEAILPTDLEYCSPRARAYDDQSNRTNREDSLDQLEEARDMALLHTTRYQ

SEQ ID NO: 48703 - protein, 191 aa, Zea mays
  Coding DNA Sequence Number=SeqID_6924
  Subcellular localization annotation: CTP_CleavageSite=84; ConfidenceScore=5.25e-01
MARPHEGTTRPVEASRKALRPHWSQTTPPRPRGLHPAASGTTGSSASPDLRPRPRKEVFALGLGLNLGLGRRSPPRPTPGLGLNLGLEGGLRLARPQGSPPVTSNDGSPACVHDDGGSQPPTEARRRQQDPSSTDNCASTGLRDFSDGHVIASVLVGGQAPSRSFTTPWTQGLFAIIFGEIYFQSFIATST

SEQ ID NO: 48704 - protein, 50 aa, Zea mays
  Coding DNA Sequence Number=SeqID_6925
MAMLVETVGQKEDEEKQVKFEKVKTLALGVGHEIMTMVDEPIGHPFEAKG

SEQ ID NO: 48705 - protein, 78 aa, Zea mays
  Coding DNA Sequence Number=SeqID_6926
MTELACVVSWSWPDVCDGDFLGLPLLRESLSLGAKARSFLDMRRWHPRCQYLPEGVAFEVLLVHDITLRLLLSLLYVW

SEQ ID NO: 48706 - protein, 199 aa, Zea mays
  Coding DNA Sequence Number=SeqID_6927
MTANSAPFVAEEKRGLTHGPHQTVRESATTRAEARTVTCEWARCARDTTARATHGLGARPPRRFRSHAGLDAQALCLLVCGLTVGKELGVAVAVKAVAWRWFWIRGSGVTTSVQLQLASAAVQLQLVWSLASAAELRGIGSVEAPTELGHGAVVGVHGLLGNVVGVGEGRLRLRERSGALAAWFCVPDRRMWCLTQLYD

SEQ ID NO: 48707 - protein, 142 aa, Zea mays
  Coding DNA Sequence Number=SeqID_6928
  Gene Ontology: Mol. function=long-chain-fatty-acid-CoA ligase activity; Cellular component=peroxisome; Biological process=fatty acid metabolic process
  Homolog annotation: Hit_ID=O22898; Match level="QueryCoverage=42%, HitCoverage=9%, E-value=3e-19, Identity=67%"; Hit description =Putative acyl-CoA synthetase
MPIFTGRKDNLQQKDTKGRPSNGLSSEIHLKAKIVPTSKAWDKIKDKADPQPKHKKILEHSDGPDKMLLLCLVHTVPGSLVKIYGENCPLWIVVMQACNGYSLICVPLYDTVGAGDVNYIIDHAEIDVVFIQDKKIKEFCQL

SEQ ID NO: 48708 - protein, 112 aa, Zea mays
  Coding DNA Sequence Number=SeqID_6929
  Gene Ontology: Mol. function=Rab GTPase activator activity; Cellular component=intracellular; Biological process=regulation of Rab GTPase activity
  Homolog annotation: Hit_ID=Q69IL7; Match level="QueryCoverage=70%, HitCoverage=25%, E-value=3e-33, Identity=92%"; Hit description =Putative tbc1 domain family protein
PVSKHIEEQGLEFLQFAFRWFNCLLIREWSGQTAEAGFSREGDVPAAPPHEDLGAPRAGDGPLEGIHVAHDVQKLSQPPRRLGPTQVHHASRHRPCLPGMVMAFYCHEQVLS

SEQ ID NO: 48709 - protein, 99 aa, Zea mays
  Coding DNA Sequence Number=SeqID_6930
  Subcellular localization annotation: CTP_CleavageSite=55; ConfidenceScore=5.47e-01
MAAAARAHRMPTSRNAHGRAEGPTRPSMGTRRPHPASPCPRRAALPHRPSPRDPAARMPAPSPPFPPAVPALPHPVHQMPPASVRWTRYAIPAPAPQSF

SEQ ID NO: 48710 - protein, 398 aa, Zea mays
  Coding DNA Sequence Number=SeqID_6931
  Gene Ontology: Mol. function=protein binding; Cellular component =nucleus; Biological process=actin cytoskeleton organization and biogenesis
  Homolog annotation: Hit_ID=Q6K699; Match level="QueryCoverage=86%, HitCoverage=82%, E-value=1e-141, Identity=72%"; Hit description =Putative Arp2/3 complex 41kD subunit
  Pfam annotation: Domain name=WD40; Domain location=1-38; Score=1.9; E_ value=22; Accession=PF00400.22; Description=WD domain, G-beta repeat
  Pfam annotation: Domain name=WD40; Domain location=134-172; Score =23.7; E_value=0.00064; Accession=PF00400.22; Description=WD domain, G-beta repeat
  Pfam annotation: Domain name=WD40; Domain location=231-269; Score =11.2; E_value=1.8; Accession=PF00400.22; Description=WD domain, G -beta repeat
  Pfam annotation: Domain name=WD40; Domain location=44-82; Score=28.9; E_value=1.8e-05; Accession=PF00400.22; Description=WD domain, G-beta repeat
  Pfam annotation: Domain name=WD40; Domain location=88-126; Score=6.3; E_value=6.7; Accession=PF00400.22; Description=WD domain, G-beta repeat
  Pfam module annotation: Pfam domain module=WD40::WD40::WD40::WD40::WD4 0; Domain location=1-38::134-172::231-269::44-82::88-126
MAAVAIHQFAECITCHAWSPDQSMIAFCPNNHEVHIYKFFTDKWEKLHVLSKHDQMVSGIDWSKSSNKIVTVSHDRNSYVWTQEGSDWVPTLVILKLNRAALCVQWSPKENKFAVGSGAKSVCICYYEQENNWWISKVIRKKHESSVTSLAWHPNNIYLATSSTDGMFYPLKPAFTTSSHVNFSLLLFLFPLLSCLKIHAMVSLEVFVGHVQTISIGVGHTFLQSVLPLAYHQIAQLDLSSTWVFGVRWSPSGKTLAYAGHNSMIYFIDEVESSPVAQNLALRDLPLRDVLFVSERTLIGVGFDCNPMIFAADDTGLWTFIRFLDERKAAPSASKASQDWMHWGSLHFRFQDRKNRPTRRLKAVTTRWSGGGGMKPSPANMWTCPVGGSPDANPALAP

SEQ ID NO: 48711 - protein, 126 aa, Zea mays
  Coding DNA Sequence Number=SeqID_6932
  Subcellular localization annotation: CTP_CleavageSite=60; ConfidenceScore=5.29e-01
MTKEITSAMIVSSRKNPLARGTTCDVGSTLAPPPVAASPRLLPRSLDTTTTSHCVHRPPRCHIERMKCLTFTRWVFDEINCLDAASWNSLITAYDERRRDLEEDEWEEDESGNQEMCLDSEMCGGE

SEQ ID NO: 48712 - protein, 89 aa, Zea mays
  Coding DNA Sequence Number=SeqID_6933
MGKSKKGGSSSHHSGDKRKREPTPPSEDFGDSEYSEEEFSSESEGSPVYTSPSASSDDSDHSQGIAAELWTYIRAVERSGLEGSDESDK

SEQ ID NO: 48713 - protein, 37 aa, Zea mays
  Coding DNA Sequence Number=SeqID_6934
MAVVSLPFSGIPAKVRSGFALASPTCARDVCLQYPVF

SEQ ID NO: 48714 - protein, 393 aa, Zea mays
  Coding DNA Sequence Number=SeqID_6935
  Gene Ontology: Mol. function=zinc ion binding; Cellular component =intracellular
  Homolog annotation: Hit_ID=Q6H517; Match level="QueryCoverage=32%, HitCoverage=51%, E-value=2e-18, Identity=37%"; Hit description =Putative zinc-binding protein
  Pfam annotation: Domain name=PLATZ; Domain location=200-314; Score =72.3; E_value=1.5e-18; Accession=PF04640.4; Description=PLATZ transcription factor
GADTGGPSVRGGIGQAQVRIRTEHARGVAQLVEIAAQEAERLLGRKKTTRTQSVTCGTRLTERAVEEKHGRKRMTARWDPQVGAELRGGGWAARCSDGKETVVEVHGAVAEEKQQVRNGEETAAEDDSGGSDPDSDSESDLDSESDWDSYSEEEEERQQQRKKKEKPKNKKKKKKQRRRQQQQQPAWLITLLRTRFWEPCKEHVSKNRAEQCMFCLKCCKVTCPRCTHDLPGHRLLKIRRYVYRSVVHASDMQALGVDVSRIQAYVVNAKKVLHLRPMSRSKHFRPQAGTPRCVTCRTWLRSAPNLFCSLACQGNVDVAQDDFSGPEAEVRYRSLQVQMAEPSGAAADELPGPEAAHEVPAQVPPPPPPAANQNASLRRRPRKQAAPERAPFF

SEQ ID NO: 48715 - protein, 202 aa, Zea mays
  Coding DNA Sequence Number=SeqID_6936
  Subcellular localization annotation: CTP_CleavageSite=59; ConfidenceScore=5.20e-01
SGLPNNQAKPWSNVVIWFSDTRSRTPGGGSQAHACGSGPLRLAQRRIPRDGTKILQRLSNTKLWALKKAKLLYMLFGPKMVRIRTTAKVITLTSSEVRQGTLPISKSMRDPSSSKPAPKMPKDKPSKPSYIEIGHSTLREKDLQSMKRLGYFTSKVNVGLPRDEETPMPGKDEVVRDRRDADAFCMVHDLHYQTKAKGQKIK

SEQ ID NO: 48716 - protein, 67 aa, Zea mays
  Coding DNA Sequence Number=SeqID_6937
MGTPRQHTRDLDRAMRVSIASLVNRHAAISKALIITEHGDVLGKDQVLRDKDLPGNPPDQKLQFLQG

SEQ ID NO: 48717 - protein, 134 aa, Zea mays
  Coding DNA Sequence Number=SeqID_6938
  Gene Ontology: Mol. function=DNA binding
MLRIPVVRATIAGNSRGKAWENGACNHAVEVAMADHTLTSTLFHVIYKLGITPTERPSSDGCPVDWRGLCHARGSFPRDNLANKDPAAPTGKVYITAIMAVGGNAAVKASYFHVALTGLARTGLMNLTLGSIYS

SEQ ID NO: 48718 - protein, 152 aa, Zea mays
  Coding DNA Sequence Number=SeqID_6939
  Gene Ontology: Mol. function=DNA binding
MTVYATTYARAFTRMLIRLGEILAGQEICTIVKHHDSSFGDFPMGEEATSSMPRGSYRLAAGTAAAHAAQQHTQGQASRTPSRATPGVVLLAARELLSHPLSSTASPGPWGSGVKMLIVSSVWTRPLLAQPELGHDYPNVNARHRHPYTHPQ

SEQ ID NO: 48719 - protein, 318 aa, Zea mays
  Coding DNA Sequence Number=SeqID_6940
MASRLKCRDLIRAANNKINDADLRNDWACLRLLSTVHRQINDTWVIFHPAPTSHGGAPNLRRRRPPENPQPTTSARKLSTVWPTPMGPKLNRSQGYLPMVGAAAYCDHERKWHRPTVRNSRHLGPRFPPRRGIKPSQRFGGLPQNFADDPVQRLAVVWPRRGNANLAAQILSTPSRQTVMVEKVKGGEERNKPRSTTHFTDARVAGAQQPSRDNGAAITVTSRMQSAEKGEATRSRTPLGRGAASRAECARVRSPPVGFSRDLVESGWSTTEYSGEVVSSARELTVEEMTTASLTRWPHQQRPARVVSRTGPMRAAVN

SEQ ID NO: 48720 - protein, 104 aa, Zea mays
  Coding DNA Sequence Number=SeqID_6941
MTTMVKLGSGGQNRGGQTTEEDLGQTGDHSNEQYPPRGDVKRRRGRGVGERGTTVDFRCAELRQSSPWSRRWQRPDDDCGMIGQWKGRRCELGESEGRERANEM

SEQ ID NO: 48721 - protein, 104 aa, Zea mays
  Coding DNA Sequence Number=SeqID_6942
MADMPVNYRETLLNKASAIYDLQRNRSNLESLFCYDKSVPEENIGKPSGLDLEKKDVGDNPPCSSCEAKGAVLCATCAGSGLYVDSILESQGIIVKVRCLGKLA

SEQ ID NO: 48722 - protein, 198 aa, Zea mays
  Coding DNA Sequence Number=SeqID_6943
MTIGTATDAWRSHPDGIIYEPILIIGDKQSRSTDSSNVTGSSTLRRAPPCCAAGKSPNHGFVRRWEIRKNGGQIQSWKKQPSRGVGGETGSYGFGRRGVEACHMVGVKNKEDLFYVVAAPGYFIGGEGNGDRPPWLLAAATFRWHRLSPSLVIVGDIKKKWIDDMNEAEGDWMDGRVLGSRFRFRFGYSTSVPALAQQ

SEQ ID NO: 48723 - protein, 242 aa, Zea mays
  Coding DNA Sequence Number=SeqID_6944
  Gene Ontology: Mol. function=ATPase activity, coupled to transmembrane movement of ions, phosphorylative mechanism; Cellular component=integral to membrane; Biological process=proton transport
  Homolog annotation: Hit_ID=Q7XPY2; Match level="QueryCoverage=73%, HitCoverage=7%, E-value=6e-20, Identity=80%"; Hit description=Plasma membrane ATPase
MDGMLADPKEAMTGIREIHFLPFNPIDNRTALTYIDADGNYTVSARVLLNSKINRSNPIVEMKPPKIMRNQSFDLCSPIATSDGATPVASMGARKDGQLGNLLRLRSCLDTSTKTSRTENQDTFDTAMDGMLADPKEAMTGIREIHFLPFNPIDNRTALTYIDADGNYTVSARVLLNSKINRSNPIAEMKPPKIMRNQSFDLCSPIATSDGATPVASMGARKDGQLGNLLKALKLLDTSTKS

SEQ ID NO: 48724 - protein, 135 aa, Zea mays
  Coding DNA Sequence Number=SeqID_6945
  Gene Ontology: Mol. function=protein phosphatase type 2C activity
  Homolog annotation: Hit_ID=Q8LD08; Match level="QueryCoverage=41%, HitCoverage=15%, E-value=3e-08, Identity=50%"; Hit description =Protein phosphatase-like
MASTDDSWNNPRVADVGNDHEVPLLDDGQRGTAALDRVQAAAALELVIHSGSCDHVGLLPEVELAVVKLLLVVDERRQPRRGLYVGMRMGMGFAGSGNGKGRTKNGLCGEEGMGKIEQEMKNSRTQNGRLLLQPE

SEQ ID NO: 48725 - protein, 62 aa, Zea mays
  Coding DNA Sequence Number=SeqID_6946
MKHIVNFGPKIQKRKLLVGVAQLREQFQRSSLSLFLSKGFTSNGNKDEGDLQRTEDNLSNVR

SEQ ID NO: 48726 - protein, 65 aa, Zea mays
  Coding DNA Sequence Number=SeqID_6947
  Pfam annotation: Domain name=PBD; Domain location=2-48; Score=19.0; E_ value=0.00092; Accession=PF00786.18; Description=P21-Rho-binding domain
MEIGYPTDVKHVAHIGLGTSDTSPRWTAEFKGTDDSSAGSVRSTAAQSRQTSWTSAARVIVCAYD

SEQ ID NO: 48727 - protein, 98 aa, Zea mays
  Coding DNA Sequence Number=SeqID_6948
MSDDSDDSQGIAAEVWTYIWAVERSELEGSDESEISSDEENSSNSSEEESGGDGHDEGDDDDGGDGDGDGDDDKGDGDGGDGKSGSGSSKASGKAPLA

SEQ ID NO: 48728 - protein, 317 aa, Zea mays
  Coding DNA Sequence Number=SeqID_6949
MPHRTPATASSLRMREPPAQPAATPTHAAVPTPAAKPPPRPLHESRARIPPCDAATAHPPATTSPITLAPLNLIEVSKASKRKAAATAESGGKAVVEFLLSSSATVAANKVANDIAALKLSGCTCTGVLTSHPFSHDIHGTSDAVRQYLWLFEQHNVMEILIIAGSTCSSSQCQSARLYSARDSVGCMSNQESGLADKIATRGISIAMSHSQRFGFLGPNGLGKTTLINMREILILWQELKQTQKPLKQNKRCKINRSNPIAEMKPPKIMRNQSFDLCSPIATSDGATPVASMGARKDGQLGNLLKAPKLLDTSTKS

SEQ ID NO: 48729 - protein, 117 aa, Zea mays
  Coding DNA Sequence Number=SeqID_6950
  Gene Ontology: Mol. function=signal peptidase activity; Cellular component=signal peptidase complex; Biological process=signal peptide processing
  Homolog annotation: Hit_ID=Q2QS62; Match level="QueryCoverage=72%, HitCoverage=56%, E-value=1e-25, Identity=66%"; Hit description =Microsomal signal peptidase 12 kDa subunit family protein
  Pfam annotation: Domain name=SPC12; Domain location=2-70; Score=91.8; E_value=2.1e-24; Accession=PF06645.4; Description=Microsomal signal peptidase 12 kDa subunit (
MLMQVLLVASAVVAFLVGYVRADFQLMLLVYAGGVVLTALVTVPNWPFYNRNPLKWLDAAEAERHPRPQVSAAPAAGARSSDGDGKGEDRRWWRKDVLGFVLVLALVGVGATVLYIR

SEQ ID NO: 48730 - protein, 250 aa, Zea mays
  Coding DNA Sequence Number=SeqID_6951
  Gene Ontology: Cellular component=mitochondrion
  Homolog annotation: Hit_ID=Q7ZVG4; Match level="QueryCoverage=72%, HitCoverage=85%, E-value=1e-10, Identity=26%"; Hit description =Chromosome 20 open reading frame 45
  Pfam annotation: Domain name=MSF1; Domain location=69-241; Score =125.9; E_value=1.1e-34; Accession=PF04707.4; Description=MSF1-like conserved region
MGECFRYGEVRGGDSRWAQEAVGEARERHRRRSLQQRCKPDEESQESRRNLGIRLLPSYAEHVYRHPWDRVTAAAWRKFTDPASCTALSHVADVHTLHRRLDSDTGRLQAARSITVRSPPLPFVLRRLLPSAAASPNGAALCHCVETSLVDAQRRAMDVVVRNVSLRGLIEVEERASYRPHPDRPDDWTQFRQETTIRCRPLAALAAVAEKVETRCAERFLQNSAKGREVVERICRYLEAESAGAAPSVT

SEQ ID NO: 48731 - protein, 199 aa, Zea mays
  Coding DNA Sequence Number=SeqID_6952
  Homolog annotation: Hit_ID=Q9LTX0; Match level="QueryCoverage=74%, HitCoverage=65%, E-value=2e-14, Identity=33%"; Hit description =Arabidopsis thaliana genomic DNA, chromosome 3, P1 clone: MBK21
MSLALWGREDRGRAVRQPLDCGGRQPEPAGERVPTLVQRFPCDATQGAPSAPASPDEMRHQEIEGPTVERDTSPLADETRRELDALRRTVQRLSGSLALLGGAHLAAGAWISYGAPPLGVGSAAAVQGVAAFAFPFAVALVLRRAIKPIAFFQKMEANARLQVLTLCLQATKNVNLMLLRTRVMAISCALGVSVASVAA

SEQ ID NO: 48732 - protein, 90 aa, Zea mays
  Coding DNA Sequence Number=SeqID_6953
MAGATAEEPLVGDGAGASAASATVAEAATRTAQAIFFISIPGCGGLLATVETAAAGWDGGEEGPTHVADREEGIRSACSSSFRQTRIVAA

SEQ ID NO: 48733 - protein, 142 aa, Zea mays
  Coding DNA Sequence Number=SeqID_6954
  Gene Ontology: Mol. function=phosphopantetheinyltransferase activity; Biological process=macromolecule biosynthetic process
  Homolog annotation: Hit_ID=Q2RAV1; Match level="QueryCoverage=94%, HitCoverage=72%, E-value=5e-28, Identity=64%"; Hit description=4' -phosphopantetheinyl transferase superfamily protein
MELQQNNCSAFPNFNFSTSHHGDYVGFASEPLCLVGLDIVSVSEPHGETAAEFISNFSSCLTDHEWNCIVRAGTPRDVLTEFYSQWKLQASIAKGDPEDAINTFKKTLSNVIIAENQLSSALDSPEEAFTLQTVEELTQSQG

SEQ ID NO: 48734 - protein, 163 aa, Zea mays
  Coding DNA Sequence Number=SeqID_6955
  Homolog annotation: Hit_ID=Q338D7; Match level="QueryCoverage=42%, HitCoverage=11%, E-value=4e-12, Identity=85%"; Hit description =Calmodulin-binding family protein, putative, expressed
MKLDILAQTRSGGSWESLGLARRDQLTTVIRRLLYIADSTQPQFRRKVNFPDWTADCEIQSNPTTESNPIQSEKKKDGERLMYVWHHILPSGKMGLSISYPPDDYLPAVEDDMGRLFIWSLSFDDMEAAADSPSYSPSALPPRLWLREADHGGLPGLLRKKRN

SEQ ID NO: 48735 - protein, 118 aa, Zea mays
  Coding DNA Sequence Number=SeqID_6956
  Gene Ontology: Mol. function=structural constituent of ribosome; Cellular component=intracellular; Biological process=translation
  Homolog annotation: Hit_ID=Q6Z3T3; Match level="QueryCoverage=77%, HitCoverage=75%, E-value=1e-31, Identity=73%"; Hit description =Putative 60S ribosomal protein L31
  Pfam annotation: Domain name=Ribosomal_L31e; Domain location=7-100; Score=143.5; E_value=5.7e-40; Accession=PF01198.9; Description =Ribosomal protein L31e
MSLIVTHVASTCCQCVPFECYMHIADTFKKKAPNAIKEIRKFAQKTMGTTDVRIDVKLNKHVWSSGIRSVPRRVRVRIARKRNDEEDAKEGQYSLVTVAEIPPEGLKGLGTKVVEDED

SEQ ID NO: 48736 - protein, 79 aa, Zea mays
  Coding DNA Sequence Number=SeqID_6957
MKNESSSSSSTRPLARSIRSFMPLAAQMLSGSTVGIFPSTYDLWDSLFEKWSPIAYGLLEKFMNTPATEFKVIFQNNHI

SEQ ID NO: 48737 - protein, 173 aa, Zea mays
  Coding DNA Sequence Number=SeqID_6958
MGTVADVASMSNDEQEAVAPALPKVRGHIGSAYGEEDAREAGSSSLFGGDGSSDDTHPSSGSGHRSSVASSQKSLDEFEFGVTWDGDGLQEDEVEQGKIFLGVSRLFRGSVVTSAEFAEKQRTPASLALGTKRLRLSYPFLELASFGRLEGQQQENEEIGTLVWGDTDLSDPQ

SEQ ID NO: 48738 - protein, 82 aa, Zea mays
  Coding DNA Sequence Number=SeqID_6959
  Subcellular localization annotation: CTP_CleavageSite=39; ConfidenceScore=5.03e-01
MASRAAALLVAVAVAAVLFAAASAQETDLGVPPAPAPVTGAAAGAAASALDVACSVVLSVLVAGGLMQPRSDVLYRCVGDQK

SEQ ID NO: 48739 - protein, 133 aa, Zea mays
  Coding DNA Sequence Number=SeqID_6960
  Gene Ontology: Mol. function=RNA-directed DNA polymerase activity; Cellular component=riboflavin synthase complex; Biological process =RNA-dependent DNA replication
  Homolog annotation: Hit_ID=UPI00004C1732; Match level="QueryCoverage =99%, HitCoverage=11%, E-value=1e-59, Identity=70%"; Hit description =UPI00004C1732 related cluster
MPGIPRDVAEHSLDIRPGARPVKQHLRRFDEEKRSAICEEVHKLVAAGFVKEVFHPEWFAYPVLVKKKGATYQRCMNHVFGEHIGRTVEAYVDDIVVKTRKASDLLSDLEVTFGCLRAKGVKLNPEKCVFGVP

SEQ ID NO: 48740 - protein, 298 aa, Zea mays
  Coding DNA Sequence Number=SeqID_6961
  Homolog annotation: Hit_ID=Q2RAV1; Match level="QueryCoverage=24%, HitCoverage=27%, E-value=3e-25, Identity=72%"; Hit description=4' -phosphopantetheinyl transferase superfamily protein
FPNFNFSTSHHGDYVGFASEPLCLVGLDIVSVSEPHGETAAEFISNFSSCLTDHEWNCIVRAGTPRDVLTEFYREPVIFCARQSRRSFHSADSGRAYTISGVTGQQCSAAKAAEREVHYQATRKKNMELQARCVCVVAMLLVASFAGLDTAHGAGECGRVPVDQAVLKLAPCAAATQNLRAAVPPSCCAPSGASPSACVSSCCPAPGRGAPSSAQRRAEKTVGPGSSNQSAMEHRAEDRGEGALGERRSAQESRRTRRTPARAPIRSKKRDSEMDCRNSDCGSAKSHPDSKIPKLKGL

SEQ ID NO: 48741 - protein, 856 aa, Zea mays
  Coding DNA Sequence Number=SeqID_6962
  Gene Ontology: Mol. function=amylo-alpha-1,6-glucosidase activity; Cellular component=membrane; Biological process=carbohydrate metabolic process
  Homolog annotation: Hit_ID=Q5TKG1; Match level="QueryCoverage=88%, HitCoverage=98%, E-value=0.0, Identity=79%"; Hit description =Putative early-responsive to dehydration stress protein
  Pfam annotation: Domain name=DUF221; Domain location=303-726; Score =617.9; E_value=9.1e-183; Accession=PF02714.6; Description=Domain of unknown function DUF221
MASLGDIGLAAGLNVLTAVAFLLAFAFLRLQPINDRVYFPKWYLRGMRDNPIVSGAAVQKFVNLDARSYLKFLNWMPAALKMPQDELINHAGLDSVVYLRIYVTGLKIFVPITVLAFLVLVPVNWTNDTLGRINVVYSPIDKLSISNVPNGSKRFIAHLGMAYAITFWTCYVLLKEYEIISNMRLRFLASEKRRPDQFTVLVRNIPPDPDESISELVEHFFLVNHPDHYLQHQVVYNANKLADLVEKKKKMRNWLDYYLLKYERNSSLRPTTKTGFLGCFGSKVDAIDYYKSEIEKIGKQEAEERKNVMKDPKSVVPAAFVSFRSRWGAAVCAQTQQTSNPTLWLTEWAPEPRDVYWNNLSIPFVSLTIRRLIVAVAFFFLNFFYVIPITFVQSLANLEGIEKALPFLKPLIDLPFIKSFIQGFLPGIALKIFLIVLPTILMFMSKFEGLISQSSLERRSASKYYIFLFFNVFLGSVIAGSALEQLKTYLHTSANDIPRIIGDSIPMKATFFITYVMVDGWTGIAGEILRLKPLIFFHLKNFFLVKTEKDREEAMDPGSICFDSTEPRIQLYFLLGLVYAAVTPFLLPFILVFFGFAYVVFRHQIINVYNQQYESAAQFWPSVHGRIITALIVSQLLLLGLMSTNDFEQTTPVLLVLPVLTFGFYKYCKNRFEPAFVRNPLQEAMKKDTLERAREPNLDLKAYLANSYLHPVFKGDEGDDRYSVMDDDGWMEEELEFSTTAVTYITWPACSPYHSGNRRTSKQEENKECYAQTSKFLPDQQLDMAMSLYIARASYRLKQTELQDRSPEERHVGISGNPRLHAAAPSDMTVKTCASVYFNCSGLHDPIPLVGCESCT

SEQ ID NO: 48742 - protein, 113 aa, Zea mays
  Coding DNA Sequence Number=SeqID_6963
MPVHAHLPWVVVTLSDRNPGAGRDHSRGLTVGSRENWSGGGVDSTATKSRDPRSPPHPRTAAPSPKKVLGSFSTRGRVQSRSTPVSIRNGGDRWLWRLLTVPDGKKGKARGVD

SEQ ID NO: 48743 - protein, 71 aa, Zea mays
  Coding DNA Sequence Number=SeqID_6964
MASGILHRRERDAEPRGVTALGQRVGEEGPVAAAGHFAPRCSVSGRKKGSLSFDREWMRGIRSGEGITVGH

SEQ ID NO: 48744 - protein, 421 aa, Zea mays
  Coding DNA Sequence Number=SeqID_6965
  Gene Ontology: Mol. function=DNA binding; Cellular component =mitochondrion; Biological process=DNA integration
  Homolog annotation: Hit_ID=UPI00004C1731; Match level="QueryCoverage =99%, HitCoverage=30%, E-value=1e-172, Identity=72%"; Hit description= UPI00004C1731 related cluster
  Pfam annotation: Domain name=RnaseH; Domain location=1-123; Score= -5.7; E_value=0.0002; Accession=PF00075.14; Description=RNase H
  Pfam annotation: Domain name=rve; Domain location=174-332; Score =92.9; E_value=9.9e-25; Accession=PF00665.16; Description=Integrase core domain
  Pfam module annotation: Pfam domain module=RnaseH::rve; Domain location=1-123::174-332
MFFDGSLMKTGAGAGLLFISPLGKHLRCVLRLHFPASNNVAEYEALVNGLRIAIELGVRRLDARGDSQIVIDQVMKNSHCRDPKMEAYCDEVRRLEDKFYGLKLNHIVRRHNETADELAKIASGRTTVPPDVFSRDLHQPSVKTDDTPEPEKASAQPEAPSAQPEAPSARPEAPSAPEGEALRVEEGRSGKAPGGYTHLLVTIDKFSKWIEVRPLNNIRSEQAVAFFTNIIHRFGVPNSIITDNGTQFTGTKFLDFCKDHHIRVDWAAVAHPMTNGQVERANDMILQGLKPRIYNDLHKFDRRWMKELPSVVWSLRTTPSRATGFTPFFLVYGAETVLPTDLEYGSPRTRAYDDRRNQTDREDSMDHLEEARDMALLHSARYQQSLRRYHARGVRSRDLQAGDLVLRLRQDARGRHKLTPP

SEQ ID NO: 48745 - protein, 271 aa, Zea mays
  Coding DNA Sequence Number=SeqID_6966
  Homolog annotation: Hit_ID=Q6QP51; Match level="QueryCoverage=22%, HitCoverage=27%, E-value=1e-08, Identity=58%"; Hit description =Putative growth-regulating factor 1
  Subcellular localization annotation: CTP_CleavageSite=89; ConfidenceScore=5.11e-01
MTTVGVSTPGGPWTDELGALAVGGYKCPRGGRARDSTRRPVLPRGQPSRKRALDLPFIGVRRGSRSRSCPSPRSGEAEFVVFWGRARVRALGSGEVEFVVFRGRARVRALGSGEAEFVVFRDRARVRALGLGEAEFVVFRGRARVRALGSGEAEFVIFRDRARVRALGSGEVEFPMAPEAGLGCCQPHSVEWHSSQSDAGGAVFLSGRSVERRSDCGHFRLCRLKGAGHDKMLGHPCIKCSCDSVGWCGDLAKVASWRRLGLGRAEGVYVA

SEQ ID NO: 48746 - protein, 108 aa, Zea mays
  Coding DNA Sequence Number=SeqID_6967
MASGSRGAGILIVPRDEAEVGISVNGCNGHGKHDAGGVLESRAMGRHSVATAALGKGEPDEWGSPDSDSRKKMADSGGPPVNERIGAWRKADDRARASARAAGIYFRI

SEQ ID NO: 48747 - protein, 389 aa, Zea mays
  Coding DNA Sequence Number=SeqID_6968
  Gene Ontology: Mol. function=zinc ion binding; Cellular component =nucleus; Biological process=ubiquitin-dependent protein catabolic process
  Homolog annotation: Hit_ID=Q60EU0; Match level="QueryCoverage=99%, HitCoverage=100%, E-value=1e-133, Identity=63%"; Hit description =Putative ubiquitin ligase SINAT5
  Pfam annotation: Domain name=Sina; Domain location=184-369; Score =358.9; E_value=8.4e-105; Accession=PF03145.7; Description=Seven in absentia protein family
MDMDRDSVECLSLPDAAMDVDNVDGHPHHGHLGLPLHPAHLPSSGAGRAFPKVNAGGGGAGPAVAGAAGAAGAGGGPPATSVHELLECPVCTNSMFPPIHQLSPLSPVVKKYAELMKGLSCENLKKKADEIGRLVLLPAAWARQECAATIQTRPESTGQAGSVKMDILCVRHARPGCTTGALHADKSLVISGCPEIFPYYSKIKHEAQCSFRPYNCPYAGSECAVAGDIPFLVAHLRDDHKVDMHSGCTFNHRYVKSNPREVENATWMLTVFHCFGQYFCLHFEAFQLGMAPVYMAFLRFMGDENEARNYTYSLEVGGNGRKMVWEGTPRSIRDSHRKVRDSHDGLIIQRNMALFFSGGDRKELKLRVTGRIWKEQTNPDGACIPNLCS

SEQ ID NO: 48748 - protein, 309 aa, Zea mays
  Coding DNA Sequence Number=SeqID_6969
  Gene Ontology: Mol. function=protein binding; Cellular component =nucleus; Biological process=regulation of progression through cell cycle
  Homolog annotation: Hit_ID=Q9SSZ6; Match level="QueryCoverage=89%, HitCoverage=59%, E-value=1e-54, Identity=46%"; Hit description=Cyclin
  Pfam annotation: Domain name=Cyclin_N; Domain location=191-307; Score= 97.6; E_value=3.9e-26; Accession=PF00134.13; Description=Cyclin, N -terminal domain
MAENTGARGAKEAVVTSGKRVALGNLTNVFRGSWGSGAANSASDAKLSSTKPDDVKKGSYACLRNVNTERGSSRRLASEQFDQAVSLLQKNTSLPSVPDVVSTGCSSPGLSQDCSVSMEDAMSTCNSTESSDVEYLNNNDDPSMTSSSHWWASDRPHFSDSMDVAEFNWRKHSPNHYTYKDPRLSTTLACEIYESLREAETRKMPPTNFLETTQTDMSKTMRAILIDWLVEVTEEYRLVPETLYLTVNYIDRYLSVKEISRHRLQLVGVACLLIAAYMGVEQENLKGNEGEERMLPYPYHGKSVDIIEK

SEQ ID NO: 48749 - protein, 530 aa, Zea mays
  Coding DNA Sequence Number=SeqID_6970
  Gene Ontology: Mol. function=protein serine/threonine kinase activity; Cellular component=cytoplasm; Biological process=protein amino acid phosphorylation
  Homolog annotation: Hit_ID=Q9M728; Match level="QueryCoverage=88%, HitCoverage=99%, E-value=1e-170, Identity=67%"; Hit description =Viroid symptom modulation protein
  Pfam annotation: Domain name=Pkinase; Domain location=128-465; Score =254.1; E_value=3e-73; Accession=PF00069.15; Description=Protein kinase domain
  Pfam annotation: Domain name=Pkinase_Tyr; Domain location=128-459; Score=-22.7; E_value=4.5e-11; Accession=PF07714.7; Description =Protein tyrosine kinase
  Pfam module annotation: Pfam domain module=Pkinase::Pkinase_Tyr; Domain location=128-465::128-459
MDFSPQRKSAERNRGSFEHDDSDDDIRAESTASNKPSAHSHDSTKSKPKTSHGGSTRSSSEPTAGNNNADATSLDSGGARRSNSMESSSTASGTTPANVRRHTGGDSRWDAIQLATTSQDAPLNLAHFRLLKRLGYGDIGSVYLAELRASRAFFAMKVMDKASIVSRNKVARAQTEREILGLLDHPFLPTLYTHFETDKFYCLVMEYCSGGNLHSLRQKQPGKHFSEPAARFYVAEVLLAMEYLHMLGIVYRDLKPENVLVREDGHIMLSDFDLSLRCSVCPTLVKSSSSVHSTGTGRGVDVADGDVITANQGCIQPSSFFPRILPRRTRKPSKSDLGLSGPIAVEFNAEPTDVRSMSFVGTHEYLAPEIIRGEGHGSAVDWWTLGIFLYELLHGSTPFKGAGNRATLCNVIEQPLRFPSSDGAPGAPAVSSVARDLIRGLLVKDPQKRIAFTRGATEIKQHPFFEGVNWALVRSMTPPLVPDPVDFLQYGAAKEKKASDSSTTAAVEAAPAGPVGSQNSGESYTDFEYF

SEQ ID NO: 48750 - protein, 446 aa, Zea mays
  Coding DNA Sequence Number=SeqID_6971
  Gene Ontology: Mol. function=oxidoreductase activity; Cellular component=cytoplasm; Biological process=gibberellin metabolic process
  Homolog annotation: Hit_ID=Q9LWE4; Match level="QueryCoverage=70%, HitCoverage=99%, E-value=6e-95, Identity=59%"; Hit description =Putative GA 2-oxidase 5
  Pfam annotation: Domain name=2OG-FeII_Oxy; Domain location=316-417; Score=97.3; E_value=4.6e-26; Accession=PF03171.10; Description=2OG -Fe(II) oxygenase superfamily
MVDGNEEEVWMAMGQVLDGWSKNPPMIAPVMPVPEDVRVRAVHRNRAPKYLGPPNIRRTASDLGQRCLIVRPELPHHAAVRTEDFPARHCSARVRVYTKAVALGTLAVALCAQTTFFPSLPSASLLRSSAMVVLAKGELEQIALPAAEPPPADVRSVDLSAPAGPAREAAARALVAACEEHGFFRVTGHGVPARLVRAAEAAAAGFFARPQGEKEEEGPTLGYGSKRIGGNGDLGWVEYLLLGGTPAAAPSSALLPCAAAPSPSAPAGPLRDLLDEYTVAVRRMACAVLELMAEGLGIAGGAGDAVLARLVARADSDCMLRVNHYPPRPALNPSLTGFGEHTDPQIISVLRANGTSGLEIALRDGAWASVPPDGDAFFVNVGDTLQVLTNGRFRSVRHRVVVNSEKSRLLGDGGRSRYRDFTWSEFKTSGCRTRLAEDRLSRFEKK

SEQ ID NO: 48751 - protein, 48 aa, Zea mays
  Coding DNA Sequence Number=SeqID_6972
MVARRHDIPGGSGVLPSASAGESWLYTCEGVYPKGFLLVGQPQPGQEA

SEQ ID NO: 48752 - protein, 93 aa, Zea mays
  Coding DNA Sequence Number=SeqID_6973
MQIGCGVQRVSLSGDPSHWDENGRRCSLQRDVNGPSISVKGVSQFAMYMVEARTLQLLRPDEGVDLTLTILWNGQGRLQLWNMRFPFDEYLLC

SEQ ID NO: 48753 - protein, 112 aa, Zea mays
  Coding DNA Sequence Number=SeqID_6974
  Homolog annotation: Hit_ID=Q9FW80; Match level="QueryCoverage=37%, HitCoverage=8%, E-value=2e-13, Identity=78%"; Hit description =Putative cytochrome P450
  Subcellular localization annotation: CTP_CleavageSite=19; ConfidenceScore=5.35e-01
MSFLLLSASSDSFTLGKITTSALSSSHREIASLCRRRAEYSLPRHSRRPGLATIQDAPPPEPIQTTPAHFVLPHKAAEEMEIGGYLIPKATTVNFMVGEMVRDEQEWDCGRT

SEQ ID NO: 48754 - protein, 242 aa, Zea mays
  Coding DNA Sequence Number=SeqID_6975
  Gene Ontology: Mol. function=protein serine/threonine kinase activity; Cellular component=cytosol; Biological process=protein amino acid phosphorylation
  Homolog annotation: Hit_ID=Q2HVK6; Match level="QueryCoverage=90%, HitCoverage=93%, E-value=2e-35, Identity=37%"; Hit description=Short- chain dehydrogenase/reductase SDR
  Pfam annotation: Domain name=KR; Domain location=12-101; Score=-96.0; E_value=0.085; Accession=PF08659.1; Description=KR domain
  Pfam annotation: Domain name=adh_short; Domain location=11-140; Score= -17.9; E_value=8.3e-05; Accession=PF00106.15; Description=short chain dehydrogenase
  Pfam module annotation: Pfam domain module=KR::adh_short; Domain location=12-101::11-140
MTIVTQPYMFRVAVVTGGNKGIGLEVCRQLASRGVAVILTARDEKKGTEAVATLRGSGLPDVQFHRLDVSNPTGTARLAEFIKEKFGRLDILALILRWNGTTIFVIQFFVFVFQHFSGEDLKQELNDIDNLTVERLDEMPELFLKDYRSGQLKSHGWPADSEYLAYKVSKALTNGYTRILAKAHPELRINCVHPGFCKTDINFDTGEYTAEDGASCIVAVALLPEGGPTGVFFFRREEVPFV

SEQ ID NO: 48755 - protein, 300 aa, Zea mays
  Coding DNA Sequence Number=SeqID_6976
  Gene Ontology: Mol. function=oxidoreductase activity; Cellular component=microsome; Biological process=metabolic process
  Homolog annotation: Hit_ID=Q6H7C9; Match level="QueryCoverage=77%, HitCoverage=72%, E-value=2e-51, Identity=49%"; Hit description=Short- chain dehydrogenase/reductase protein-like
  Subcellular localization annotation: CTP_CleavageSite=32; ConfidenceScore=5.06e-01
MSTSSQCTLMEGAISLPRNTRVHLTQNYNNTRLSAVVVGALAELPWLPARTEARFGKFGYPGKSSSFRRLESLTVNNAAVAGVVYSQDHLDDLEPREEKLKLAAFNCSFNLMDRDQRLEWLWRNCRETYHAAKECLQTNYYGTKHVIEALLPLLKASDDGRIVNISSDFGLLRHFRNEDLKQVLNDVGNLTEERLDELLDQFLRDFKVGTAEARGWPVAFAAYKVSKAAVNAYSRMLAAKQPALRVNCAHPGYVKTDITLHSGLLAPEEGASNVVKVALLPDGGVTGAFFEEGNELASFV

SEQ ID NO: 48756 - protein, 240 aa, Zea mays
  Coding DNA Sequence Number=SeqID_6977
  Gene Ontology: Mol. function=oxidoreductase activity; Biological process=metabolic process
  Homolog annotation: Hit_ID=Q6H7C9; Match level="QueryCoverage=40%, HitCoverage=30%, E-value=1e-26, Identity=65%"; Hit description=Short- chain dehydrogenase/reductase protein-like
  Pfam annotation: Domain name=KR; Domain location=103-235; Score= -75.6; E_value=0.0056; Accession=PF08659.1; Description=KR domain
  Pfam annotation: Domain name=adh_short; Domain location=103-240; Score=-5.8; E_value=1.3e-05; Accession=PF00106.15; Description=short chain dehydrogenase
  Pfam module annotation: Pfam domain module=KR::adh_short; Domain location=103-235::103-240
  Subcellular localization annotation: CTP_CleavageSite=22; ConfidenceScore=5.09e-01
MGGAGPARDESGQVPGWGQLAAAMAAASRATAVGRTAAVLWARWTSWKWNGAVRSHVLKSLMSVGTASIALKRGVPHWVVRELLVLPYYMMEGDLPTPANARVVAVVTGGNKGIGLEVCRQLACSGVTVVLTARDDARGAAAVENLRGLGLSDVLFHRLDVTDAPSIARLAGFLETRFGKLDILVNNAAIGGVEYVHDQDCGSVTSEEKAKRDYHWSNILPNQMHPPDISLVEEFVQVFG

SEQ ID NO: 48757 - protein, 146 aa, Zea mays
  Coding DNA Sequence Number=SeqID_6978
MLPGIGDSAIVLPAETTPRSSLRLGGHCEERVCGGTGLAGAVLLAGARTSLTVGSGSKDPHGIPVREGIELICIAGHSSMYHHKMVNTRKGGGIDLPANPHNWKIIRQQQEEMDPPNPPPAGADPVVVAQMQMLQQMANTMTDTQA

SEQ ID NO: 48758 - protein, 347 aa, Zea mays
  Coding DNA Sequence Number=SeqID_6979
MAMPRGLNARSELRALLRPLCHTCLEGTIKKRRSVRDKPSWQGHLYVMGDNQWSSGVVILRSHSLEALDHQRRDFHPIKLSYLTEDPSLPSINRIQRALDNTHGSGTDWIPLPKDYLHLLWRRRRARAGRATVRCRVRSNNTDRVLALKTPVVFVLLAPVPMLEVGMDPPTGALSDAVGPPATGRAAVRSLAGARVPRGTTLVVAGHGPPATPPMDDPCCLGLDPPVGLAPGEGQSSLGGSCGGVGKAADACVPWARELACALALTVFRCSLAGSKVNTPSARSILRRLSSSNSPGLPGMEVLLADPLPLPRGLGARRGWRWRPHHRARNPQPAHRGSGSLGEGPGH

SEQ ID NO: 48759 - protein, 56 aa, Zea mays
  Coding DNA Sequence Number=SeqID_6980
MVAATPGPRASAQVTSWAARGEKREVGRAGKEVEWAARSNFGSYTTAIGLKNESGN

SEQ ID NO: 48760 - protein, 137 aa, Zea mays
  Coding DNA Sequence Number=SeqID_6981
MEATYAQQRASEEVGRSLSRLGQLRGLAAAVARGFHGGGRGTGDKAQPPPMATRWQQLMRVLLPPLRTEMGQRPWRSRGFRGRLRKLLTWLPHQVSERPSTRTTCGSERLRYRARMSVSIHGVGKRERVVICGPIAQ

SEQ ID NO: 48761 - protein, 179 aa, Zea mays
  Coding DNA Sequence Number=SeqID_6982
  Subcellular localization annotation: CTP_CleavageSite=26; ConfidenceScore=5.45e-01
MLDAPRPTAPRRAATPRRASAPHRARAPHPSPRTRPSPLAAHAPLAAPVPPATPARPPSAAPSPPAAPSPACRCTLHAHRAPRPPPPCPSPSLAPLAVPLALARAPRRAPATTAARHHRRWRPPPRAPPPLPSHATRTIIAPTREKILVFLAAAGLPTPRRVATALTRHSPTSLTPPPP

SEQ ID NO: 48762 - protein, 222 aa, Zea mays
  Coding DNA Sequence Number=SeqID_6983
MALSEEREGAEKAHAEAQAAHTEADAARAEASLALKRAADAESGLKSLRSYIEKTKASTRTGVGRAHTLFVDAYHELGARTNFFGRSGKEVGLRFLEWLQEELESLPSIATGLMSYALLVTCEGAANALSREGCKYFEVFDWATEDFDRGILQVEDKMMNEEEVEDFANLDSSMTQTDDAEAGDEGHSAPQAGPSEDHAAASAPAQVSFCAGSDIRACASNP

SEQ ID NO: 48763 - protein, 526 aa, Zea mays
  Coding DNA Sequence Number=SeqID_6984
  Gene Ontology: Mol. function=DNA binding; Cellular component=nucleus; Biological process=regulation of transcription, DNA-dependent
  Homolog annotation: Hit_ID=Q8H501; Match level="QueryCoverage=59%, HitCoverage=50%, E-value=1e-33, Identity=34%"; Hit description=Auxin response factor 10-like protein
  Pfam annotation: Domain name=Auxin_resp; Domain location=248-324; Score=15.1; E_value=5.1e-06; Accession=PF06507.4; Description=Auxin response factor
  Pfam annotation: Domain name=B3; Domain location=122-231; Score=53.5; E_value=6.9e-13; Accession=PF02362.12; Description=B3 DNA binding domain
  Pfam module annotation: Pfam domain module=Auxin_resp::B3; Domain location=248-324::122-231
MATQQPLPPADGVGDNTVDRDVWLACAAPFSRIPTVGDEVYYFPDGHIEQHQHLSAAPLPAQDRFHCTVTDVSLGVDDKTDEVFAKISLRPRPGRAAAPPPGPGGSSNSPAPAPGPPQKLRYFTKDLSQTDVYAKFRIPLENEHVLPIPKVETDGADQQRVQRQDVVMRDTRGKSWRFSETYRVNPSKEHSLGTGWLDFAKAKRLAAGDKIVFMRRPNGDLIVGVRRLHVPRYRPFDFQGPAQDVMEAVRLAAAGRPFTVTYFPRQAAVEFIVPRSEVDDALATSWEPGAVVRMEVMEDENRQHTVWVHGRVNAIRQNIWRMLEVLKLSSRWPANPRQGLGPLLPNGVPPRSEIQAPPANSAAPAHARTIRPPGVDRPAHQAGNQPLRQVADHLSDRPSMVDLKDSSDISTGNIIEPTWETLLVDKQLQFEEHKKQLIQEAKAKFLANFKVDRNNKVVRQRVTDLAVLRPTTATPKDATKESVGAGARKIGGQEHNDRQAGRALIGIADAVTMASRVKDMGAQELT

SEQ ID NO: 48764 - protein, 187 aa, Zea mays
  Coding DNA Sequence Number=SeqID_6985
ESRHDEPITRTRALPLPRALAPRRAPPRRDPGGFPRAPASPTPASPLTAAPCFPPDEPSLSLPTSGLGPGEPRLGRACPGTGEPRRPWPPRARRARPRPLARGRLRARARHRRPCPCPRALSRPCPGGLALAACPGGRAWPRALVPALGRTLSVVAMRLMVLGNDSGNGEDEVVEGDRQEFQDYNEF

SEQ ID NO: 48765 - protein, 108 aa, Zea mays
  Coding DNA Sequence Number=SeqID_6986
  Homolog annotation: Hit_ID=Q6JAC8; Match level="QueryCoverage=93%, HitCoverage=97%, E-value=2e-29, Identity=68%"; Hit description =Putative auxin-induced protein family
  Pfam annotation: Domain name=Auxin_inducible; Domain location=1-98; Score=20.5; E_value=2.5e-07; Accession=PF02519.5; Description=Auxin responsive protein
MVSWKKKRGGGGESQSPIRGAAEQEKVPRGHVPMLAAGEDDDAVDVGERVLGPVTLLSDPSVAELLDMAAQRYGYGQPGVLRVPCDAGRFRQVLHGAMHRRGIISSSA

SEQ ID NO: 48766 - protein, 205 aa, Zea mays
  Coding DNA Sequence Number=SeqID_6987
MSPAQKKFAQFLFLYTPKRVFDFEEPGINDKLLRSSIGQQQLHCSSARRLGEVSTQQSSSVQPSRSRRQKQPRRVARPVLQKQPRRVARPELQKQKQCGRPGASTGVSSQQKQRGRGWAAPLLGFAVAGRRWDLCAAGLLGFTVSVGSACEPAGKTAGIYGWRLGCGQDCGQDWSVAGGRLGAWAAEIYGWRLLRCWDLGRGIRD

SEQ ID NO: 48767 - protein, 301 aa, Zea mays
  Coding DNA Sequence Number=SeqID_6988
  Homolog annotation: Hit_ID=Q75GQ2; Match level="QueryCoverage=37%, HitCoverage=64%, E-value=3e-16, Identity=45%"; Hit description =Expressed protein
MAAEALGFMARGATGGRAAELVTRDFLGGCAAAEDDARDASARNDAVPARVHQQKHACPAAPRDLNLFPVAATTKPCAATAAAAAAPAVAGGATATYHSVCTIEKVKTALERFERGRQHQSPHPHQQQQHSGAGASPSSSSVTTSSVKRPRRRRRRRRRRGAGRRLRLALRRRDGGRGVPQVLPNQTIPQPQLVKAAILVDLACSSSVVVVVVEMFANCKLGCAAAAAAAAAVPWAHGLVSLVAVGRSGAKAQALGVRVLSSPAAGRFNAKGRELTSRAQRQARRRSRSLLRPCDRRECEF

SEQ ID NO: 48768 - protein, 46 aa, Zea mays
  Coding DNA Sequence Number=SeqID_6989
MASNESWLRAAVPVGRTKSVYLSMGRSWLKGEQYLSSLLLSQKEIV

SEQ ID NO: 48769 - protein, 110 aa, Zea mays
  Coding DNA Sequence Number=SeqID_6990
  Homolog annotation: Hit_ID=Q6JAC8; Match level="QueryCoverage=72%, HitCoverage=73%, E-value=5e-26, Identity=76%"; Hit description =Putative auxin-induced protein family
  Pfam annotation: Domain name=Auxin_inducible; Domain location=1-101; Score=25.2; E_value=7.8e-08; Accession=PF02519.5; Description=Auxin responsive protein
MVSWKRKRGGGGGGEEPPVRGAAEEEKVPRGHVPMLAAGGDDDDGVDDVGERVLVPVTLLTDPSVAELLDMAAQRYGYGQPGVLRVPCDAGRFRQVLDIAMHRRGVSSSA

SEQ ID NO: 48770 - protein, 116 aa, Zea mays
  Coding DNA Sequence Number=SeqID_6991
  Homolog annotation: Hit_ID=Q10BX5; Match level="QueryCoverage=64%, HitCoverage=21%, E-value=3e-22, Identity=68%"; Hit description =Expressed protein
MGRKVTQTAPPPPPLSRLSKLEYSLSFSVPLHKVEGHAIHYHIANDLGNVNDDIVWHSFTFNGSNLEELAHGLREETGLEDIIIRTHNPINGQIHKQWKNAGSSCGSELGYCYCLT

SEQ ID NO: 48771 - protein, 144 aa, Zea mays
  Coding DNA Sequence Number=SeqID_6992
MMDIVGRSWCSVGGSASTSEPWVGDGASWEGRLGEGGRARRGPRCFQGTGDGCGRGEGAATGRWARRGRLGEGATTGTDGGWGRGECGRRLRWGRTGGGGGGGLDGRRLRWARRAEAAARKKMGGGSGRKPEEMKIERSDASYN

SEQ ID NO: 48772 - protein, 270 aa, Zea mays
  Coding DNA Sequence Number=SeqID_6993
  Gene Ontology: Mol. function=protein binding; Cellular component =spliceosome; Biological process=mRNA processing
  Homolog annotation: Hit_ID=Q6QP54; Match level="QueryCoverage=38%, HitCoverage=37%, E-value=8e-18, Identity=59%"; Hit description =Putative kinase
MAPPVDVVGLCPGLGDVEAPPRSWSSLSSEAEVKSEPPGRARRRPLAEARAESEPWCRAKRSLSFFGAEPESVPWGRAERSLSSSGAEPESDPWGRAERSSPSSGDEPESEPWGRAERSSSSSGTEPEFEPWGRAERSSPSSGAEPESEPWGRAERSSPSSGAEPESEPWGWAERSSPSSGAKPESEPWGRAERSSSSSGAEPESEPWGGAERSFPWRLGPGLAAVSLTLLSGTAVRAAQTVLSFCQTGQWSGEVTAVTSALSTGGRASG

SEQ ID NO: 48773 - protein, 83 aa, Zea mays
  Coding DNA Sequence Number=SeqID_6994
MAPSSVSLGPRFNMLEARERRRLWRGDDEKKGFWEKKGMRKFPHRTRDYTRIKRLGTIGDALRSRSTAGYGDLMVNHRGRGWI

SEQ ID NO: 48774 - protein, 104 aa, Zea mays
  Coding DNA Sequence Number=SeqID_6995
MELKTLVTSSRRWASSPRSGSRLFLARQEQQQQEPVLGLAQARRRSPDARLTNQPARESLELLLALMVMDEILMPFAAVQFHSMQVQSSGLLGACCLGKQAGQQ

SEQ ID NO: 48775 - protein, 302 aa, Zea mays
  Coding DNA Sequence Number=SeqID_6996
  Gene Ontology: Mol. function=oxidoreductase activity; Cellular component=membrane; Biological process=transport
  Homolog annotation: Hit_ID=Q00YY6; Match level="QueryCoverage=75%, HitCoverage=73%, E-value=6e-18, Identity=32%"; Hit description =Homology to unknown gene
  Subcellular localization annotation: CTP_CleavageSite=40; ConfidenceScore=5.31e-01
MAASALLLSPRLVSFPPHPSLAPLFTKRPPPYPLGGAGARLRAVGDGPGAGLPPEQATVYDGAYGPWTLEDSDVREVLLYRSGLVTAAASFVAASSAAFLPEGNPAASAVTGAADLLYAAGAAGLGLSLVLIHIYVTPIKRFLQALWAAGALGSVGTYLVAARPLDEGLVQYVLDHPAALWFVGPTFAALTGLVFKEGMRMLLLVQGRKDVGSNCIHSTHRSLLWETGSWHLDSGLMDNSTKAGLLGLWMLLFTIFAARKFQQPIKDDVGDKSVFMFNALPEEEKKAWIQKLERQKGQELFE

SEQ ID NO: 48776 - protein, 753 aa, Zea mays
  Coding DNA Sequence Number=SeqID_6997
  Homolog annotation: Hit_ID=Q69UI4; Match level="QueryCoverage=28%, HitCoverage=31%, E-value=4e-58, Identity=58%"; Hit description =Kinesin 1-like
  Pfam annotation: Domain name=Kinesin; Domain location=430-703; Score =7.0; E_value=1.5e-14; Accession=PF00225.13; Description=Kinesin motor domain
MESSDAIVRKVLDAMHLMEVRLTEKITGRCDIVERRMDARCDELHCRFTARGYTIQQEVDAVIYDESSDHDGYGAAPFDINGSGEKSIFDDGPSFDEEHCTFSADNAHFNDVLRAHLFDSFLPTTTTVKETLRASFMREEDKRPKVPHDHGCSQGGAEAGRPGGAAAPQHRGARVPGGRREGACSGRHFQPRLSVPQVPHQRDRDGHKALLRRPPVRRGRIRPRLLRLHGPHPYRHQGAPARRALAKRIWRNTTTYDYYHQIFVLDREPPNGKSDEPLRVNNLFQHIKGMLSGKRAAVAEKLGLTDSQSASTLIDAQVVFDEMQQSDTSVGIAHDAFNTFFSEIGVNEHVTWIIFIAVSFTASAVWARAARRLDGVVVADNRKLRQASVDGRKMHCYELLTDEALESWRTRSSGQHPRKEYLESPRADLRCMAEPTIASIRNAQAPLFTTMYELEYEREEDVMFSFNTIFYENGQQSDVYNFHVVPIVSDTINGIIGTIITYGQSGASKTYSMDEPSILHHNEQKTGLVQRVVDELFVCLGSSASTWIMKLPMVEIYLQKVRNLLDLSKDNPQIKESKIQGIYISGAIEIFIFNSSDVLENLFPGIDNSAVGKTHMNLASSRNNCLCIFSVQYESTSDERVPSGTIILIDLDGSEKVGTTGAEGRGLDKAKTINIVIDSLSFVSVTIFQLEGIVLGLIASAVRFSDLGAVSSGQGNFSVFVWDPGDRAVMLLASGVVLVLQELPHFRWRAAEA

SEQ ID NO: 48777 - protein, 46 aa, Zea mays
  Coding DNA Sequence Number=SeqID_6998
MDGSPDHEPNGKLINYMGKDGVNKQTQATHMTIDAHINHRNPNPKQ

SEQ ID NO: 48778 - protein, 170 aa, Zea mays
  Coding DNA Sequence Number=SeqID_6999
  Gene Ontology: Mol. function=kinase activity; Cellular component =ornithine carbamoyltransferase complex; Biological process=amino acid metabolic process
  Homolog annotation: Hit_ID=Q6QP54; Match level="QueryCoverage=88%, HitCoverage=35%, E-value=2e-16, Identity=52%"; Hit description =Putative kinase
  Subcellular localization annotation: CTP_CleavageSite=47; ConfidenceScore=5.22e-01
MEPGGKTAVGDVESLLTSSCFRWARWRLLRGRGRVCLSRSRLSPSPRVGRGGDCRLRLGSSPSPGVGRSGVRRPSGLSLSPSPGVGRSGVRRPSGLSLSPSPGVGRGGDRRLRPGLSPSPRVGRGGVRRLPGLCPSPSPGVRRSGVRRLPGLSPSEREMCPWAISKYFGD

SEQ ID NO: 48779 - protein, 172 aa, Zea mays
  Coding DNA Sequence Number=SeqID_7000
MTAAAPIHTAERCRSTTPQCSRALFTSPIDTTRSSGSGEHYKKLRTCFPAKMSLGDAVGQHDRPCDVRRQIGLDTDDTSPFPRSRTRQNNPVMPRDCAKGWQASTAMWAMAAAVDPPLSYTIGSRRSSGLGLDYQKGRVPFQIPISRVQTDLNSWFVKGKCALGPFLAYFGD

SEQ ID NO: 48780 - protein, 519 aa, Zea mays
  Coding DNA Sequence Number=SeqID_7001
  Gene Ontology: Mol. function=protein serine/threonine kinase activity; Cellular component=flagellin-based flagellum; Biological process=protein amino acid phosphorylation
  Homolog annotation: Hit_ID=Q94KC3; Match level="QueryCoverage=77%, HitCoverage=69%, E-value=0.0, Identity=81%"; Hit description=CaMK1
  Pfam annotation: Domain name=Pkinase; Domain location=2-214; Score =187.9; E_value=2.5e-53; Accession=PF00069.15; Description=Protein kinase domain
  Pfam annotation: Domain name=Pkinase_Tyr; Domain location=1-253; Score=-67.0; E_value=2.3e-08; Accession=PF07714.7; Description =Protein tyrosine kinase
  Pfam module annotation: Pfam domain module=Pkinase::Pkinase_Tyr; Domain location=2-214::1-253
MTTAIAIEDVRREVRILSSLAGHINLVQFYDAFEDEENVYVVMELCKGGELLDRILARGGKYSEGDAKVIIHQILSVASFCHLQGVVHRDLKPENFLFMSKDENSALKVIDFGLSDFVKPDDRLNDIVGSAYYVAPEVLHRSYGTEADMWSIGVIAYILLCGSRPFWARTESGIFRAVLKAEPSFDEIPWPTLSAEAKDFVRRLLNKDYRHPWIRGTQEVKINLDMIIYRLMRAYISSSSLRKSALRALAKALTTDQLFYLREQFTLLGPNKSGHISLQNMKTALIKNSSGAMNDSRILDFVNSICNIQYGMIDFEEFSAAAISVYQMEGLETWEEHAQQAYELFDKEGNRPIVIEELASELGLGPSISLHVVLKDWIRHSDGNLSFLGFIKLLHGVSSRAITKWRIICPPIHSITFTPKQALIDWKQPLGICGRKIRSSFSVFAEGSVKMRSHLSSFHPNIWDVEFGMQIPKAGNDDYDLDEVAQITHFNSQATMVLLTSLCREEYNMVHRLQSAKEI

SEQ ID NO: 48781 - protein, 59 aa, Zea mays
  Coding DNA Sequence Number=SeqID_7002
MAKGGERQFTGLVDVYRKTFRFDGVAGVHDALLSLLLHAKKDNKVESKQSKGNVQAQAA

SEQ ID NO: 48782 - protein, 45 aa, Zea mays
  Coding DNA Sequence Number=SeqID_7003
MEVIEEELGRFALNKGEELQEIDIDVDAFVENLAMIKSQNDHIAN

SEQ ID NO: 48783 - protein, 124 aa, Zea mays
  Coding DNA Sequence Number=SeqID_7004
MTSYSLSAERCPCTIRPMKQGPASQHLAPSVRATKKQPAMPPKRTTSKAVASIDDATKAALLAEKKGKALVDTAPKRPSKITLSTARDKARITPPPTALCTLAVPRVHHKHHHQASFPQRAKTP

SEQ ID NO: 48784 - protein, 84 aa, Zea mays
  Coding DNA Sequence Number=SeqID_7005
MWRFSERREDGWEDGMESRKKGERGEGGDWLVATGWLITGGTRRLDLAIRGMLGINKPLLGLRPPKSLRAPPISAMGCGYLSIS

SEQ ID NO: 48785 - protein, 104 aa, Zea mays
  Coding DNA Sequence Number=SeqID_7006
  Gene Ontology: Mol. function=nucleic acid binding; Biological process= DNA integration
  Homolog annotation: Hit_ID=O24587; Match level="QueryCoverage=57%, HitCoverage=5%, E-value=2e-26, Identity=95%"; Hit description=Pol
MGELNYFLGFQVKQLKDGTFISQTMYTQDLLKRFGMKDAKPAKTPMGTDGHVDLNKGGWSPANWPLSGKLRRLSGTIIRGTLKTPNSQLVTPISIKLQRPDGYD

SEQ ID NO: 48786 - protein, 126 aa, Zea mays
  Coding DNA Sequence Number=SeqID_7007
MANDTNAHGVRRGGGGVVGGRFSEKSHGWFGEDAQRASYRVGPVDSGGGGRSLRGRGCVRATRAGHWAAALDAVGARARNAASALGRAAVRGWAGSAALGWAQASARAGSWAATRAGPRGRELARG

SEQ ID NO: 48787 - protein, 117 aa, Zea mays
  Coding DNA Sequence Number=SeqID_7008
MEKTEQGRRDGGTWPALGTTEQRTRPGSRRSHRELGDAVAGELELSAARWGARRELDDGRAERTLRAERLGTELEERRRCSLVAVKKKGAASRKYRPRRLGKICRGRRLRRERESGE

SEQ ID NO: 48788 - protein, 150 aa, Zea mays
  Coding DNA Sequence Number=SeqID_7009
MAATAGVVVSQQQHRDYNTGDDVEAGLLRGAQPLESTNGWVMCKLLRSRGRVCLLWPRSSPSPWVGRGGDRRLRPGRSPSPGGRAKRSSSSSGAEPKSEPWVGRSGVRRLLGLSPSPSPGSGGAEFAVFRGLARVRALGCAERSSPSSGA

SEQ ID NO: 48789 - protein, 176 aa, Zea mays
  Coding DNA Sequence Number=SeqID_7010
MHIRPLRCYSWQLLVSSQSFFPRPLMEPDMFWSSTEQEEHGLYVGMAAGRVVFGYDNTRPDIIPSPYTNIHTHKVNQLGGAAAQLGVGARQRAGGRWTAQLEDGTGAQLGPRGQRTAQARRAQLGDGRQGRGTPQAGRDHGSGAAPAGCAPALLAAGSWGWVGRWRLGTRKWELGI

SEQ ID NO: 48790 - protein, 252 aa, Zea mays
  Coding DNA Sequence Number=SeqID_7011
MDKDCQESTWKKRKVPLRLVDMRREAKVVRPGTKDSVVAAAAAMPPLAAAARKVPSRVKASVVEGEKGAEIGGADEASRELVVDDYLIEGVSMFDAHNRLAAGATGSGSRQMVVMSVVETTHAKSALEVSLDPWAQFCAAVDGSGGIANASTAGGVAASIARQLQAAAFTDQVAFGALVDIATSQLRSKRKCLEDKIECLRTQNIEAIGDKSTNENKRRNLLEKVDSLVKENEGLNRQLSKLKDAIVKGKWA

SEQ ID NO: 48791 - protein, 567 aa, Zea mays
  Coding DNA Sequence Number=SeqID_7012
  Gene Ontology: Mol. function=solute:hydrogen antiporter activity; Cellular component=integral to membrane; Biological process =regulation of pH
  Homolog annotation: Hit_ID=Q5ICN3; Match level="QueryCoverage=94%, HitCoverage=61%, E-value=1e-141, Identity=60%"; Hit description =Na+/H+ antiporter
MILVWSGLRGAVALSLSLSVKLRILKYTRYEMLKKALEAFGELRDDEELGPADWVTVKKYITCLNDLDYEPEHPHDVGDEDDCMHIMNLTDIRVRLLNGDSEVARTVIDESNAEGEEARKFLEDVRVTFPQVLRVLKTRQVTYSVLTHLSEYIQNLQKTGLLEEKEMTDLKKLQRNPPIVKMPRVSDLLNTHPLVGALPAAVRDTLLSNTKETLRGQGTTLYREGSRPTGIWLVSIGVVKCFFIETEKIEELLHSDPSIEIFLWQESALVLARLLVPHRFEKMGMHEMRVLVAERSTMNIYIKGEDLEVEQNCIGILLEGFLKIENLTLITPPALLLPWNADLSLFGLESSDYCHTARRYQVEARARIIFFDEAEAAHLHVQTSASLPQGEPARSMSKEHSGLLSWPESFRRSRGSLGLAAEMLPGGLSSRALQLSMYGGSVVSLSSGQQGHRRQRPRHRVQAATTMTNQKKHSSSYPRMPSISKERHLLSVQSEGSNMKRVAALPEVAATAPAPAGAAQGQRRAMNLQEEYNSSEDSAGEEVIVRVDSPSMLSFRESTAVPPPQEQ

SEQ ID NO: 48792 - protein, 168 aa, Zea mays
  Coding DNA Sequence Number=SeqID_7013
  Gene Ontology: Mol. function=solute:hydrogen antiporter activity; Cellular component=integral to membrane; Biological process =regulation of pH
  Homolog annotation: Hit_ID=Q5ICN3; Match level="QueryCoverage=89%, HitCoverage=14%, E-value=8e-46, Identity=62%"; Hit description =Na+/H+ antiporter
MGGEAEPDNAVLFVGVSLVLGIASRHLLRGTRVPYTVALLVLGVALGSLGANINPDLLLAVFLPALLFESSFSMEVHQIKRCMAQMVLLAGPGVLISTVLLGVAVKLTFPYNWSWKTSLLLGGLLSATDPVAVVALLKELGASKKLSTIIEAFSKLGSKNLKYDLCKQ

SEQ ID NO: 48793 - protein, 193 aa, Zea mays
  Coding DNA Sequence Number=SeqID_7014
  Subcellular localization annotation: CTP_CleavageSite=40; ConfidenceScore=5.17e-01
MNHGAKVFMVQLQANATHVFVKPSDSGTLMLMPLSLYLTSADFEVASPGHRSVVGFSAIADAHAGRCKIFDDAASPNNEMLMTHDGRGYIYFLLLSQPAVATATREEKKQEGAQVWWWCSGAWKDTIWGRLWAAGIAGKRKKVIMSGKPKRPPSAFFVFMVADELTEQQAWQLNFDLDSAYNAFLAVLPAAGL

SEQ ID NO: 48794 - protein, 131 aa, Zea mays
  Coding DNA Sequence Number=SeqID_7015
MEARRAFRYRVHMRRSWRPRNPEPGVKKKTCKIKVDRVEKRYDFDLEGLMGWVLSATREFKGVLSVGEDYCAWIGARSTVSILLKAGYKHVKACTDPDFKVPADNVQRSTVEALEWSKKFYLRFGKGVEKN

SEQ ID NO: 48795 - protein, 691 aa, Zea mays
  Coding DNA Sequence Number=SeqID_7016
  Gene Ontology: Mol. function=protein serine/threonine kinase activity; Cellular component=nucleus; Biological process=protein amino acid phosphorylation
  Homolog annotation: Hit_ID=Q7XIB4; Match level="QueryCoverage=69%, HitCoverage=65%, E-value=1e-144, Identity=56%"; Hit description =Putative cyclin-dependent kinase CDC2C
  Pfam annotation: Domain name=Pkinase; Domain location=123-409; Score =277.4; E_value=2.8e-80; Accession=PF00069.15; Description=Protein kinase domain
  Pfam annotation: Domain name=Pkinase_Tyr; Domain location=123-409; Score=13.5; E_value=2.7e-13; Accession=PF07714.7; Description =Protein tyrosine kinase
  Pfam module annotation: Pfam domain module=Pkinase::Pkinase_Tyr; Domain location=123-409::123-409
  Subcellular localization annotation: CTP_CleavageSite=45; ConfidenceScore=5.29e-01
MGCAVSRPGVVSSPSYEDDVSSCSYNMSRSASASADLGSASASASAMSIWSRPVRLEAFKDDDEDERRRRRSGREAAVAAAARLGSVRPCVEGEQAAAGWPAWLSAVAAEAVHGWVPLRADGFEKLEKVGQGTYSSVFRARELATGRLVALKKVRFDSVEPESVRFMAREILILRRLQGHPNVVGLEGLVTSRSSPSIYLVFEYLEHDLAGLSSSPDITFTESQIKCYMRQLLEGLAHCHARGVMHRDIKCANLLVSDGGELKVADFGLANLFAPAPAAPLTSRVVTLWYRPPELLLGATAYEPSVDLWSAGCVFAEMHARRPVLQGRTEVEQIHKIFKLCGSPPDHFWRRSGLSHAAVFRPQQPYPSRLRDTFAASMPDHAFRLLAMLLSLDPAARGTAAAALDAEYFTTAPYACDPGSLPKYAPNKEMDAKFREESRRRSNLRSQGGEGAKRLSWGHKSMQLQDTNQSHVHAEESLPVVAKSGAAVARNDGDSRLLVDLEPVPAIRFSKRHGDDGAGDHAPPYAKTLSSSFKEPARVADRRPLSGPGQLAASTGFAWAKKPRSVARSSTAAAAVTKRSYSKGSGTKNNSSGGGDRARTTSAATATEAAAPYEVEKQEVIKQWAQAADAFSASEAYSSRFRQTLAARQLKNGKVSLSQLTVTSIADLQYSAVCCLLDKFYYATKFCSSEG

SEQ ID NO: 48796 - protein, 792 aa, Zea mays
  Coding DNA Sequence Number=SeqID_7017
  Homolog annotation: Hit_ID=Q2QN61; Match level="QueryCoverage=99%, HitCoverage=100%, E-value=1e-171, Identity=47%"; Hit description =Expressed protein
  Pfam annotation: Domain name=DUF863; Domain location=132-782; Score= -82.3; E_value=1.9e-09; Accession=PF05904.2; Description=Plant protein of unknown function (DUF863)
MGIKVEGETYIPGYFDMEDSSVNYNGNVLPYHKENKPSVFLTEKFTIIASNGRVHYDKEMIKRTMLVHEATFRKQVYELHQLYKIQKELMARFQIEEINGCPSYAGLLQPRSSPSQALLDDVKGMRKTVNPISGHDPKQSCIDLINESSSQYSVSGTPLRHNNVRPQKKMIDLQVPADVYTDNDDDVEILEVRPSKRLPGANGSVLLGNVNLSLQNSEGYSHMKSWSTDIQAHHSSTAHILNKPVEDSSSMNRSNFLGVGISALQNHHYASQGVNLNPISLEAKLKEQCAGKASGSRFFGTNEEIRNNNPFQHRKDDSNSSMALYKQNCIGSSMGNYAPNASTFNHSILSPLGFNHALNLPWQSNNTSYLTKSHCGAAETFIPKDALSNGISVDSTPKAPYHHSLKIHGGAGYQKPPALHDNLKDIDLNDTPVDVAATWEQGSEKSVVDISWLSKKPVSLMESQVPSSYAKDHSQILPSPTLYSESRTPTRVPAFPFSVGAEKDSRCSPTLLYDLNNGPSIKHETDMEIQSLCKESDTDTRNLIDLNETLPIIDDPEIESHESGEIVPHEPNGPSQDSIAIAAAAETLVEMWNNSDRPAYQPDILHWFADLAISKDNTLLDKDSDDDFEAATLKLRETKSNEYHSTPRTTQEDNTNFGHCSAASLVSKPQRGRGRGRRQRKHFQRDILPGLASLPKHEVSEDLRALGRSKLVTPTKRGRNRQQPRGRRRARSVAVAMEVEESEVSPPLQASPSPVPADLDADALAITRWGRTTRRCRRPRCPPVNNASLRVA

SEQ ID NO: 48797 - protein, 149 aa, Zea mays
  Coding DNA Sequence Number=SeqID_7018
MSGFLWHGVESRLCIMLVQGLPGSRCLHRSTPEALHLRHYHRIGALGVVSSRRGKCLRCGVSSHGDRWDNHIYGSGKATLVLLPEPRLAMHAPEPRLAPFTVNDGGCKYVVCMCREKRSFSCATGYVDPAPEQSRESCAPMVLECESKS

SEQ ID NO: 48798 - protein, 72 aa, Zea mays
  Coding DNA Sequence Number=SeqID_7019
MAFASPRRRSEGAMPRATYAPSPAVPNSTHARSLAKEIGILTGDPGVDDAGRREWKRTAILNMAEASRVSCP

SEQ ID NO: 48799 - protein, 94 aa, Zea mays
  Coding DNA Sequence Number=SeqID_7020
MKARCPGQPMPHHPLYPMPHDSRSLAKEIGILIGDPGVDDAGRRERKRTAILNVVEASRVSCPQACPARARPPLSAPTKHHAIPDASQVSANGT

SEQ ID NO: 48800 - protein, 99 aa, Zea mays
  Coding DNA Sequence Number=SeqID_7021
MVDRRSTLKENQSLASCRTTPYRVIGGVVGAVRGFIVAPFGDPEEDFPSGEVAIRCRVPSTSATQELVPKQKTALGLKVILILKTTAMELALIDDVAPT

SEQ ID NO: 48801 - protein, 92 aa, Zea mays
  Coding DNA Sequence Number=SeqID_7022
MEADRNNEEEEEDPEEIEPASSLDTAYSGVPLFTCGQCCLCYLGSSGDEQGAALASFYNSDDKEKGESKRHSGRWPAMASRLPSMASINGER

SEQ ID NO: 48802 - protein, 69 aa, Zea mays
  Coding DNA Sequence Number=SeqID_7023
MPASRFIPGRTQIALLENKEEIEVEEVRTTPPPEEPQAGNCFYFDICGAESDSPITQGKPRCIATSLLF

SEQ ID NO: 48803 - protein, 286 aa, Zea mays
  Coding DNA Sequence Number=SeqID_7024
  Gene Ontology: Cellular component=integral to membrane
  Homolog annotation: Hit_ID=Q1HRC2; Match level="QueryCoverage=83%, HitCoverage=98%, E-value=2e-24, Identity=34%"; Hit description =Conserved membrane protein
MYMTIVERVYESSRHKGKKVAAPRGDGRRIGLAAAQRRRRYDGGYGMTVFHFLNCAFLTFGPHVVYYSATPLSEYDTIGTSIKAAAVYLGTALVKLVCLATLLKVPENDSFDPYQELMKVFIGFIDVAGLYFALTQLTHRNISQNHKFQAVGLGWAFADSVLHRLAPLWIGARGLEFTWEYIFQGLEANANLVMTLSLAALGSLMWLRKNKPRTLVPIIYACALLLATMPSITSRIVHWAQHAQTLQLLEEVIGVADTKGGWLRALLLPCYGFHQLAAVLGLSETD

SEQ ID NO: 48804 - protein, 223 aa, Zea mays
  Coding DNA Sequence Number=SeqID_7025
  Gene Ontology: Mol. function=porin activity; Cellular component =integral to membrane
  Homolog annotation: Hit_ID=Q67UZ2; Match level="QueryCoverage=83%, HitCoverage=39%, E-value=1e-36, Identity=45%"; Hit description =Putative nucleoporin p58; nucleoporin p45
MVEWLRCPHGPSMVCTHTQGGRIREHRDDSEQLDQCRRFDDLSLCNISFELKASQITQEAVSISTIMNREKNSIECLMTVIREIMRNTEFAIRSYVQLRARFVYPSAESANSGFSNHSGSSGAQTDFHQLLATTPRFRCYSSAARRPSPFVQQTVARFEDDFGYCCKLILELEQLLQMKDGKTFAESLKSLSNVVSNVHDYLIHVASKVSLTQNASHHRYFKT

SEQ ID NO: 48805 - protein, 363 aa, Zea mays
  Coding DNA Sequence Number=SeqID_7026
MVKDSEGDVRYLIESIHHRSDLRKKIAEKSRNSVPSGSQGQTAKPRPFPVPDGIPKTQEELTEEEEALMPESPYTRLLRRMGRYPEWRLSYGGANSPSSSRTPPLPLIYGSPEELMTPISPRTTSALYPAPGETSTPTVRVPMDTALALRPPAQPQSQQAQEAGTARRMSEQRRHKEERASFAEYRAGRNTRGSITRSTRLQALWSQQQSQQLMLYTVDGRAASYETKWDELHPVSQMLLLQIEGFHQAMVVNVSEPTAKPVRVYCVAHIQRSFIAFEYCLRRAIAAHRRDVYDHSLLWRRLGQKPDTRRSTLGFCVFLSNFLISWSSKQQSTISRSSAEAEDNFSVTTALVETTWGCQWTNG

SEQ ID NO: 48806 - protein, 108 aa, Zea mays
  Coding DNA Sequence Number=SeqID_7027
MGRIKETSRGSQLVNSPQYRRPPQEVGYYASQSGPNLLKPACFPHRATALTIESQSTTSSYSKAPRGGDSASHSDFTQEDISLGIAKGSYGKTTNRANKNPTNGATEH

SEQ ID NO: 48807 - protein, 135 aa, Zea mays
  Coding DNA Sequence Number=SeqID_7028
MAINWCHSHGRMERTSWRAQRLVPAPKNLEPLLELEEVLSTTVDATVPRSPPARVDQTSPSATRRAKTTVEFAFVDRTCPPNCLAISTVGSHEEVSVGIVEELPGILVEEGEPEAEAQECPDHRPIPSRKASLDI

SEQ ID NO: 48808 - protein, 111 aa, Zea mays
  Coding DNA Sequence Number=SeqID_7029
  Homolog annotation: Hit_ID=Q6QP51; Match level="QueryCoverage=83%, HitCoverage=52%, E-value=2e-26, Identity=71%"; Hit description =Putative growth-regulating factor 1
  Subcellular localization annotation: CTP_CleavageSite=57; ConfidenceScore=5.46e-01
MSRAASPYKVLTKINDNACRENSTIHPVPTTMPTTRVKLARMFSLGRNRELRLARPQASAAGEGLRLARPQASGGVTSSPDLSLNLRRSLRLAQSRPRTDYATGDTSLPYP

SEQ ID NO: 48809 - protein, 470 aa, Zea mays
  Coding DNA Sequence Number=SeqID_7030
  Gene Ontology: Mol. function=hydrolase activity, acting on glycosyl bonds; Cellular component=amyloplast; Biological process =carbohydrate metabolic process
  Homolog annotation: Hit_ID=Q84M40; Match level="QueryCoverage=80%, HitCoverage=85%, E-value=1e-154, Identity=69%"; Hit description =Putative polygalacturonase
  Pfam annotation: Domain name=Glyco_hydro_28; Domain location=123-466; Score=490.6; E_value=1.8e-144; Accession=PF00295.8; Description =Glycosyl hydrolases family 28
MAEESEGRIHLCLHRAYINGRGHAAYSLTTSGKLMKLVYMVTLLPLLFMSGVLEAAGAGNDSSADGTNGNLHSSGTSRPAAAPRGRSLQASQSSVYSVDRYGARGDGRNDDTRALEMAWKAACASPRPAVVLVPDGRRYLLKLLTLRGPCKSSVTLTVKGTLVASPNRADWSDNDRRHWIVFRSIDKLTVNGGGAIDGNGEKWWPHSCKINKALPCKEAPTALSFHYCVDLKVEDLKIVNSQQIHMSVEDSANALLARLSITAPGTSPNTDGIHITRSKDVRVTDCKIKTGDDCMSIENGTHNLHVSKVNCGPGHGISIGSLGDDNSRAEVSGITIDSVQLHGTTNGARIKTYQGGSGYAKDITFQNMVMYDVKNPIIIDQNYCDKAKPCGEQESAVQVSGVVFKNIRGTTSTKDAIKMNCSENVPCQGITLQNIDLKMQDGKGNTRSTCQNAKWTEFGTVRPQPCTAIK

SEQ ID NO: 48810 - protein, 196 aa, Zea mays
  Coding DNA Sequence Number=SeqID_7031
  Homolog annotation: Hit_ID=Q84M48; Match level="QueryCoverage=45%, HitCoverage=48%, E-value=9e-32, Identity=70%"; Hit description =Putative phytocyanin
  Pfam annotation: Domain name=Cu_bind_like; Domain location=34-103; Score=85.0; E_value=2.4e-22; Accession=PF02298.8; Description =Plastocyanin-like domain
MAAIMGVKKGLLVLALGLAMAATSSAVIYKVGDTSGLAPVDHLQFTYPPGIHNVLEVKKADYDSCTNSTPIATHSSGDDKIVIKSPGHRFFICGVPGHCAAGQKLNVRVLKTRSSDAPSPAPSARSAAGSAAATPSPTTETTGASSASGGSSTPDATTAPAPNANGAGVGAAGHQNVVVVVVAMAVAALASMTMLH

SEQ ID NO: 48811 - protein, 76 aa, Zea mays
  Coding DNA Sequence Number=SeqID_7032
MSIFMLLFQVQSKGEHDSQVLGLHGSWRRPQSWPLLNWGELIFKAGLSEQCCFVKLGVYSEIYSVLKPVKYFALDD

SEQ ID NO: 48812 - protein, 113 aa, Zea mays
  Coding DNA Sequence Number=SeqID_7033
MTQHRVVLDVAARALEIHSPTFGDLALYLPSQDSTRSCAFAMIELSLKKIPVVSHHNNPSPTHLPLSKVQPLPCLDLRRVGASLQLDFGGRKKEGEKGENSRHLIFAFGKGGK

SEQ ID NO: 48813 - protein, 53 aa, Zea mays
  Coding DNA Sequence Number=SeqID_7034
MSTTAFLGEDAAFPKLRCGTLQDMVEGVTWPSILPLGWTVEWDAAPAVEEQEE

SEQ ID NO: 48814 - protein, 207 aa, Zea mays
  Coding DNA Sequence Number=SeqID_7035
MGMGHARPCDQRECRGYRGAVWPGRSSRRWSWKRLQPWGKQGAGEELGWEELDAMEHGGRRGVRAMDAQERAPAARVGLEHRAGNRRAERGDRGRWRSSAERHRGEPREKGSRGRELAAHAAVASRARRARASRESRGDPADGVVGRAERAAQRRLHWRTSRENKGSGREISRAGAREYDRAEQDAERREMKEDRAHRLGIEVRLGR

SEQ ID NO: 48815 - protein, 145 aa, Zea mays
  Coding DNA Sequence Number=SeqID_7036
MELRHGGREHARDSRRIAELSAEVERLQREIVERHRAIDWAINSRSIAWDCEVTARTQVEELSIALENLQVYNNALHEEVHLLYDQLHPNVPPEVAAMGAGAAGAAGRGPYGELNLFRAPPSMNNMDDRPPEARSGAGAAKDTND

SEQ ID NO: 48816 - protein, 76 aa, Zea mays
  Coding DNA Sequence Number=SeqID_7037
MDHVQAPDPCPSGEWIPRAHVGLKTWVPPAKGLNASQGGLGPAHRGPGRMRGCQGPAHGGNLMVICLDTMEKVPQL

SEQ ID NO: 48817 - protein, 270 aa, Zea mays
  Coding DNA Sequence Number=SeqID_7038
  Gene Ontology: Mol. function=transcription factor activity; Cellular component=nucleus; Biological process=regulation of transcription, DNA-dependent
  Homolog annotation: Hit_ID=Q8S5S4; Match level="QueryCoverage=99%, HitCoverage=100%, E-value=4e-54, Identity=45%"; Hit description =Putative AP2 domain transcriptional regulator
  Pfam annotation: Domain name=AP2; Domain location=100-164; Score =143.5; E_value=5.7e-40; Accession=PF00847.10; Description=AP2 domain
MDRHWRRLQATPPPLGAVQYYRELIHSLDTPVQAAPIMVDTEPGQAMAIVGASRSKCYHLITPAQAAYYYRVVGGRLGSAPRLMKPYRCLGAPAPSTTTTKLYRGVRQRHWGKWVAEIRLPRNRTRLWLGTYDTAEEAALAYDGAAFRLRGDAARLNFPELRLGGTHLAPPLHPTVDAKLQAVTTSAPAAPALPRPESLDIESETSTTTTATAYGTGLCPSSTGSSSLAKTAPLPDMQELDFSEVPWDEGDGVALCKYPSLEIDWNAILS

SEQ ID NO: 48818 - protein, 103 aa, Zea mays
  Coding DNA Sequence Number=SeqID_7039
MSPPDAQVFVVSFFGNEQAFPKMRNRIPDITEAAAVEDFYRGSNDSSFVRAILQKAPVTSEQLFWEAHLHHRRRTSPRPHRKGQDYTSSAEEGHESAIRQVLG

SEQ ID NO: 48819 - protein, 127 aa, Zea mays
  Coding DNA Sequence Number=SeqID_7040
MKFTAEEATAVPVAMWKGDGVAVSVRQQSAGGGGASRGEDLGGVAGLPRISIMRLCQNERAERNHADRAAYRADMETHGEKGATRQEQGVRFSRSSRGWMHYSVAAEKTTSVTELERKKKLAFRAHV

SEQ ID NO: 48820 - protein, 283 aa, Zea mays
  Coding DNA Sequence Number=SeqID_7041
  Homolog annotation: Hit_ID=P54348; Match level="QueryCoverage=36%, HitCoverage=67%, E-value=6e-33, Identity=75%"; Hit description =Histone H2B.5
  Pfam annotation: Domain name=Histone; Domain location=61-131; Score =103.3; E_value=7.2e-28; Accession=PF00125.14; Description=Core histone H2AH2BH3H4
MAPKAEKKPAAKKVAEEEPSEKAAPAEKAPAGKKPKAEKRLPAGKSAGKEGGDKKGRKKAKKSVETYKIYIFKVLKQVHPDIGISSKAMSIMNSFINDIFEKLAAEAAKLARYNKKPTITSREIQTSVRLVLPGELAKHAVSEEYHISSTTIQIGTKIVRSSLLMYGSGISYHNGFAFFERSSIWVYLVEERGDAKEIVSSAAMRLYCTSGIQDENTSSPKRLQLRLRRGAEQLFGLEAERAQEDEPRRNSWQFQHQTTIAACQTTSVLYKYVYISLISTSYV

SEQ ID NO: 48821 - protein, 695 aa, Zea mays
  Coding DNA Sequence Number=SeqID_7042
  Gene Ontology: Mol. function=nucleoside-triphosphatase activity; Cellular component=myosin complex; Biological process=regulation of transcription
  Homolog annotation: Hit_ID=Q6ZGC5; Match level="QueryCoverage=99%, HitCoverage=45%, E-value=0.0, Identity=87%"; Hit description =Putative myosin heavy chain
  Pfam annotation: Domain name=Myosin_N; Domain location=6-47; Score =18.6; E_value=0.017; Accession=PF02736.9; Description=Myosin N -terminal SH3-like domain
  Pfam annotation: Domain name=Myosin_head; Domain location=62-692; Score=959.3; E_value=1.5e-285; Accession=PF00063.11; Description =Myosin head (motor domain)
  Pfam module annotation: Pfam domain module=Myosin_N::Myosin_head; Domain location=6-47::62-692
MSYRKGLKVWVEEKGEGWVEAEVVEAKERAVVVFSSQRKKITVSPEKLLPRDTDEDLGGGHVDDMTKLTYLNEPGVLYNLKKRYALNEIYTYTGSILIAVNPFTRLPHLYNEYMMEQYKGIRLGELSPHVFAVADASYRAMVNDSRSQSILVSGESGAGKTETTKLIMQYLTFVGGRAALDDRTVEQQVLESNPLLEAFGNAKTVRNDNSSRFGKFVEIQFDSSGRISGAAIRTYLLERSRVVQITDPERNFHCFYQLCASGKDAELYKLGHISSFHYLNQSNTHDLEGTNNEDEYWKTKRAMDIVGISREDQDAIFRTLAAILHLGNIEFVPGKDADSSKIKDSTSNFHLQTAAKLFMCDSDLLVSTLCSRSIHTREGIIVKALDCAAAAANRDALAKTVYARLFDWLVENINKSIGQDVDSKLQIGVLDIYGFESFKNNSFEQFCINFANEKLQQHFNEHVFKMEQEEYKSEEINWSYIEFIDNQDVLDLIEKKPIGIIALLDEACMFPKSTHETFATKMFRNFSSHLRLERTKFSETDFTISHYAGKVTYQTDSFLEKNRDYIVAEHCNLLSSSRCPFVSGLFTSLPEESIRSSYKFSSVASRFKLQLQALMETLNSTEPHYVRCVKPNSANRPQLFENQSVLHQLRCGGVLEAVRISLAGYPTRRTYAEFVDRFAVLVPELMIGRYHLYPL

SEQ ID NO: 48822 - protein, 108 aa, Zea mays
  Coding DNA Sequence Number=SeqID_7043
MSGTPEDSNSNLPPSGNSRGDSTIIHRTVWCTLDMSGAPRKDGLRNSPASGIHFSCSAIIHRTVRCTPDCPVQPRSNDYFGANVYLRRIKCARCARRSQARPYWRTGQ

SEQ ID NO: 48823 - protein, 109 aa, Zea mays
  Coding DNA Sequence Number=SeqID_7044
MALQKGNTDILLKSAYHSLLTQPYLSNSDLGQLHYFLGIEVQKGLVWESQNRRGLEGLESPSYSILNKKGTVVPPIPSGFVAPKLALSAFADADWASDPDDRRSSGLCS

SEQ ID NO: 48824 - protein, 110 aa, Zea mays
  Coding DNA Sequence Number=SeqID_7045
MLFDLELVRDAAAGTAADEQLMDTLKLALHCVDPLLVVLCSSKVVEESMGIEVVIKAAEIEDTIAPKVPALRPWFSVLQVAPTQEAVDLQGRTVRTWLADRPRSAEWPNG

SEQ ID NO: 48825 - protein, 764 aa, Zea mays
  Coding DNA Sequence Number=SeqID_7046
  Gene Ontology: Mol. function=nucleoside-triphosphatase activity; Cellular component=myosin complex; Biological process=regulation of transcription
  Homolog annotation: Hit_ID=Q6ZGC5; Match level="QueryCoverage=95%, HitCoverage=45%, E-value=1e-152, Identity=74%"; Hit description =Putative myosin heavy chain
  Pfam annotation: Domain name=DIL; Domain location=596-684; Score =117.9; E_value=2.9e-32; Accession=PF01843.9; Description=DIL domain
  Pfam annotation: Domain name=IQ; Domain location=46-66; Score=21.3; E_ value=0.0036; Accession=PF00612.17; Description=IQ calmodulin-binding motif
  Pfam module annotation: Pfam domain module=DIL::IQ; Domain location =596-684::46-66
MERPKLLTWLFGKEDVRKQTRNSSSCNCSESTWRRRKFVILFQNYRQATVAIQCSWRQKLARKELRKLKMAANEAGALREAKNKLEKKMDDLALRLTLERRLRASSEESKSVEILKRDKIIESLSAECAAAKSAAQNEHAKKLLLQKQLDDSLREITMLQSKKIMSAEAAEENSNLKNLVESLSTKNSILENELIVTRKSSDDTMEKLKEVEGKCNHLQQNLDKLQEKLTNLENENHVLRQKAFNMPTMNNLSVAPKTLSEKFSASIGLPNSEPKHIYESPTPTKYLASLPQTLSTSRRSRLPVERHEQNHEILLRCIKENLGYKDGKPVAACIIYKCLLHWRAFESERTAIFDHVIEAINDVLKGNEADGRLPYWLSNTSALLCLLQRNLRSNGLFTTPSRRSGGALGKIAQAGTLTEATRNPVKKHSGSGSSEQPTKDLELYLVVEDCKIGGRDPLICRLLFMKPHCAGCISHFLMHKFCKTLRSPSKFIGRSDTLPHVDARYPAILFKQQLTACVEKIFGQLRDNLKKEISPLLNVCIQAPKSTRGQSGKASKSSGVGAHPASNSNWDNIVNFLDLLMDTLRENYVPSFFIRKLITQLFSFINIQLFNSLLLRRECCTFSNGEYVKAGLSLLEKWITDVTDEVIHQKRKKTLEEIKQDLCPSLSVRQIYRICSMYWDDKYGTQGISTEVVAAMREMVNKDTQNLVSNSFLLDDDLSIPFSTEDLSMAIPSIDYADVDLPESLQHYTSVQFLLRQQDPQPAQ

SEQ ID NO: 48826 - protein, 253 aa, Zea mays
  Coding DNA Sequence Number=SeqID_7047
  Homolog annotation: Hit_ID=Q43246; Match level="QueryCoverage=45%, HitCoverage=31%, E-value=3e-34, Identity=49%"; Hit description =Cytochrome P450 88A1
MLGVGTAAAVLLGAVALVLADAAARRAHWWYREAAEVVLVGGVALVVVDAAARRAHGWFGRTRTGVYQGFMFSSLTVLMTTAEACKQVLMDEDAFVTGWPKATVALVGPRSFVAMPHDEHRRLRKLTAAPINGFDALTGYRAVGALPHDFGGGAQQVVGRERQRPIKVHQLAAHIATGLHLRRRRPHRGGDTGSDGRRKRRADGQRRSMINGSPQRLITIVSLYQRLRVLCISISSKSSPTPPFRRIQIYRVL

SEQ ID NO: 48827 - protein, 231 aa, Zea mays
  Coding DNA Sequence Number=SeqID_7048
  Gene Ontology: Mol. function=phosphotransferase activity, phosphate group as acceptor; Cellular component=cytoplasm; Biological process =nucleobase, nucleoside, nucleotide and nucleic acid metabolic process
  Homolog annotation: Hit_ID=Q9SE47; Match level="QueryCoverage=69%, HitCoverage=91%, E-value=1e-73, Identity=76%"; Hit description =UMP/CMP kinase b
  Pfam annotation: Domain name=ADK; Domain location=19-152; Score =110.1; E_value=6.6e-30; Accession=PF00406.12; Description=Adenylate kinase
MGTVVDAAPAVVAEVTENMLGGKKVTVVFVLEIKSGSENGTMIENMIKEGKIVPSEVTIKLLQEAMIKSENDKFLIDGFPRNEENRAAFENVTKISPAFVLFFDCSEEDMEKRLLGRNQGRVDDNIETIKKRFKTFVDSTLPVIEHYNSKDKVKKIDAAKPIPEVFEDVKAIFAPYSLKHTSAEMAQPSLPSELWHQMVSLGTSTFGSSASRWLYDAHGNLPVVLDYTEGC

SEQ ID NO: 48828 - protein, 167 aa, Zea mays
  Coding DNA Sequence Number=SeqID_7049
MAQQPGCAPGLQLPCLRRLACSGARLCACKFSLSTWLHRNELKENSAACPAPTAVPLARVRLTAAESSLTRHRKLRLADPGARPPPRPRKMVSASPDPRARPQPRPRKTVSASPDPGLGLNLDLGRRSPPRPTPGLGINLDLGGVSASPNLGLRPTMPQGGTSLPYP

SEQ ID NO: 48829 - protein, 518 aa, Zea mays
  Coding DNA Sequence Number=SeqID_7050
  Gene Ontology: Biological process=response to jasmonic acid stimulus
  Homolog annotation: Hit_ID=Q2QWM9; Match level="QueryCoverage=90%, HitCoverage=99%, E-value=0.0, Identity=75%"; Hit description=VTC2, putative, expressed
MEMKLTIRRVPTVVSNYQEDADKPRAGCGRNCLGDCCLPASKLPLYAFKLTPAKGSQEDAASTKACLGPRDLEGIEEAKILYAFKLTPAKGSQEDAASTKLLVDILLSEWEDRMTRGLFRYDVTACETKVIPGNLGFVAQLNEGRHLKKRPTEFRVDRVLQPFDPAKFNFTKVGQEEVLFQFENSGGDDSYFLNNAPIIAVDRAPNVIAINVSPIEYGHVLLIPRVLDRLPQRIDPESFLLALQMAAEGGSPYFRLGYNSLGAFATINHLHFQAYYLSVPFPVEKAATHKIPLSEDTKKNGVTVSKLINYPVRGLVFEGGNTLDDLATVVSNACIWLQDNNVPYNVLISDCGKRVFLFPQCYAEKQALGEVSQELLDTQVNPAVWEISGHMVLKRRMDYEEASETSAWKLLAEVSLSEERFEEVKAYIFSAAGLVQYDEEEEEASDGEGPTAYVPVKVTPLPVAEGCLVLPPNLASLYLKSLPIFGSTSTKDVLGGLPTPRHTYNLFSPTGSLPGGEI

SEQ ID NO: 48830 - protein, 137 aa, Zea mays
  Coding DNA Sequence Number=SeqID_7051
MPHGLHRGMLRAAVVHGLPSGLRTEVVLNARRTTCCAEGPAGRTPSAGHAAGRAGHASHTASRAGHVGQVAPAALLGTTPPHSGRAKRHSLAAAPRAHTGAEYPRARAELLHAEEEKRGSGAGKGGREEEEKGEWSP

SEQ ID NO: 48831 - protein, 828 aa, Zea mays
  Coding DNA Sequence Number=SeqID_7052
  Gene Ontology: Mol. function=hydrolase activity, hydrolyzing O -glycosyl compounds; Cellular component=cellulose and pectin -containing cell wall; Biological process=carbohydrate metabolic process
  Homolog annotation: Hit_ID=Q6Z8I7; Match level="QueryCoverage=84%, HitCoverage=95%, E-value=0.0, Identity=83%"; Hit description =Putative beta-D-xylosidase
  Pfam annotation: Domain name=Glyco_hydro_3; Domain location=78-334; Score=215.7; E_value=1e-61; Accession=PF00933.12; Description =Glycosyl hydrolase family 3 N terminal domain
  Pfam annotation: Domain name=Glyco_hydro_3_C; Domain location=406 -639; Score=277.2; E_value=3.2e-80; Accession=PF01915.12; Description= Glycosyl hydrolase family 3 C terminal domain
  Pfam module annotation: Pfam domain module=Glyco_hydro_3::Glyco_hydro_ 3_C; Domain location=78-334::406-639
MEGRARLSLVHAAAALVVLLQLHGGAVVVASEPPYTCGAGAPPNIPFCDAGLPIDRRVDDLVSRMTVAEKISQLGDQSPAIPRLGVPAYKWWSEALHGISNQGRGIHLDGPLRAATSFPQVILTAASFNPHLWYRIGQVIGVEARAVYNNGQAEGLTFWAPNINVFRDPRWGRGQETPGEDPTMTGKYAAVFVRGVQGYGLAGPVNSTGLEASACCKHFTAYDLENWKGVTRYVFDAKVTAQDLADTYNPPFKSCVEDGHASGIMCSYNRVNGVPTCADYNLLSTTARQDWGFYGYITSDCDAVAIIHDAQGYAKTAEDAVADVLKAGMDVNCGSYVQDHGASALQQGKITEQDINRALHNLFAVRMRLGLFNGDPRRNLYGDIGPDQVCTQEHQDLALEAAQDGIVLLKNDGGAGALPLSKPNVASLAVIGFNANDAIRLRGNYFGPPCVTVTPLQVLQGYVKDTSFVAGCNSAACNVTTIPEAVQAASSADSVVLFMGLDQDQEREEVDRLDLTLPGQQQTLIESVANAAKKPVILVLLCGGPVDVSFAKTNPKIGAILWAGYPGEAGGIAIAQVLFGEHNPGGRLPVTWYPQDFTRVPMTDMRMRADPATGYPGRTYRFYRGPTVFNFGYGLSYSKYSHRFATKPPPTSNVAGLKGGGGNGGRHGELRRGGDRVGDSLHLRATQTAHVEFEVSPCKHFSRATEDGRKVIDQGSHFVMVGEDEFEMSFMAPDTMKIMEDLFNMDELEYAFGGKNPATFKINDYDVRIREDDKRRLKMLDLLLKRVMNRILNLKRIEEQTRAESSTVHQENLPGEDNIPAYQIGPST

SEQ ID NO: 48832 - protein, 684 aa, Zea mays
  Coding DNA Sequence Number=SeqID_7053
  Gene Ontology: Mol. function=inositol or phosphatidylinositol phosphatase activity; Biological process=abscisic acid mediated signaling
  Homolog annotation: Hit_ID=Q6Z8I9; Match level="QueryCoverage=78%, HitCoverage=100%, E-value=0.0, Identity=70%"; Hit description =Putative inositol polyphosphate 5-phosphatase I
  Pfam annotation: Domain name=Exo_endo_phos; Domain location=252-644; Score=94.9; E_value=2.5e-25; Accession=PF03372.13; Description =EndonucleaseExonucleasephosphatase family
MTIHTKLARLLNNLKSVHVSMRTNKPNLCSFHLPGSWETACAGRLGLGPCAVPLPARALAACEEDWSAAWEATPLCEDAARRCACARLRAARCRGPAVRVTGKTGGPAVQLPGNGGLGGRISPPSGTRERRQPPGKRVGDWDWMSNHNAPCDIPKPASVDEFLAKNGKKKKSFMSGLFRKKGRGADKKLLSRRDIVFDLEGRSGDRMDLLETSAAVRKSFSDRHCTTRIENLTLSCLDSPRRPNVDTREYRVFVGTWNVGGKPPDSSEIVPLNAGNVLVVEDNEPAGKWMDLIYQALNRPPPHQDGQSSGDELSPPPSTSSSHYRSRPQGAARDPSNAAAIPKTSSGGMLCAQKPPPPLKMVSKCYRVDNALVKTCTCMSDPSTMQLRAREMREFLCRVEAAAASPGRGAGADDDALASIEGGDQRGGGGMNYCLVARKQMVGIFLSVWVRRELVQYVGHLRVDCVGRGIMGRLGNKGCIAMSMTLHHTSICFVCCHLASGEKEGDEVRRNSDVAEILKNAQFPRICKVPGQRVPEKIIDHDRIIWLGDLNYRVSLSYEETKTLLEDNEWDILLEKDQLAMERQAGRVFKGWKEGKIYFAPTYKYKQNSDSCDRILWHGQGIEQLQYIRGEFRLSDHRPVCSVFVIEADVDSGSKIRKGYSTLDARIHCESPEIPKRHSFYDDF

SEQ ID NO: 48833 - protein, 185 aa, Zea mays
  Coding DNA Sequence Number=SeqID_7054
  Gene Ontology: Mol. function=metal ion binding; Biological process =metal ion transport
  Homolog annotation: Hit_ID=Q1SJ50; Match level="QueryCoverage=30%, HitCoverage=37%, E-value=5e-13, Identity=63%"; Hit description=Heavy metal transport/detoxification protein
  Pfam annotation: Domain name=HMA; Domain location=39-99; Score=51.7; E_value=2.4e-12; Accession=PF00403.16; Description=Heavy-metal -associated domain
  Subcellular localization annotation: CTP_CleavageSite=48; ConfidenceScore=5.18e-01
MGGAMRQLLRFLGASNGRPREKKTKRTTLRRRLLVPTVELRVRMDCERCEREVKKALSGIRGVEHVEVNRPQQKVTVTGEVDPVAVLRRAQSTWKKAEPWRGPGHDQDTAGYYATPAAAALYGVGPAQLQAHDGRWADPAAYYYCRYPYPYPAPGLSSAEAAVVVGAEQISSLFSDDNPNACSVM

SEQ ID NO: 48834 - protein, 313 aa, Zea mays
  Coding DNA Sequence Number=SeqID_7055
  Gene Ontology: Mol. function=peptidase activity; Cellular component =membrane; Biological process=proteolysis
  Homolog annotation: Hit_ID=Q6Z8K1; Match level="QueryCoverage=71%, HitCoverage=95%, E-value=8e-52, Identity=72%"; Hit description =Aspartyl protease-like
  Subcellular localization annotation: CTP_CleavageSite=82; ConfidenceScore=5.31e-01
SPPPPQLASLPATRTRPLSAHHRFHAPRLVSRSRDVAPDPLPHPRQHRITLRSTPASLISDPPMRLPVLFALQLVALAAAASAAEAAATFSSRMVHRLSDEARLEAGPRMGLWPQRGSGGYYRALLRSDLQRQKRRLAGKNQLLSLSKGGSTFSPGNDLGCPLEMPDVPTIILAFAANKSFQAVNPILPFNDEQGALARFCLAVLPSTEPIGIIGQNFLVGYHVVFDRESMKLGWYRSECRDVDNSTTVPLGPSQHGSSEDPLPSNEQQTSPPVTPATTGTAPPSSATTNRQMLFASSYPLLFLTMSTVFFIS

SEQ ID NO: 48835 - protein, 175 aa, Zea mays
  Coding DNA Sequence Number=SeqID_7056
  Subcellular localization annotation: CTP_CleavageSite=19; ConfidenceScore=5.47e-01
MESSLKTSAKHRTEGTRCRGSTASSTSRTHSPADGVAASSYTRATLILKPASRAGAGSSSRSGGGTTGESSSCSSSTRRSRRRRARTRSGQWPHDGYYPDDKPPVVGACPPERASGDQRRDERGQPAPRAPPPVRHPEAIQQVIFLLRLLCFHIIILFVFLFLLYYCLDILAVPK

SEQ ID NO: 48836 - protein, 499 aa, Zea mays
  Coding DNA Sequence Number=SeqID_7057
  Gene Ontology: Mol. function=methyltransferase activity; Biological process=metabolic process
  Homolog annotation: Hit_ID=Q6Z8K5; Match level="QueryCoverage=61%, HitCoverage=83%, E-value=1e-133, Identity=77%"; Hit description =Methyltransferase-like
  Pfam annotation: Domain name=Methyltransf_11; Domain location=286 -376; Score=88.4; E_value=2.2e-23; Accession=PF08241.2; Description =Methyltransferase domain
  Pfam annotation: Domain name=Methyltransf_12; Domain location=286 -374; Score=36.6; E_value=8.8e-08; Accession=PF08242.2; Description =Methyltransferase domain
  Pfam module annotation: Pfam domain module=Methyltransf _11::Methyltransf_12; Domain location=286-376::286-374
MAGGKEPIEVRFRLFDGTDIGPTKYDPSTTVSSLKEFILARWPQAKAHCPTAAAVSSSSSSSQRRAFHLPLPPRLALGTQATAAALRFGLSATAGQPQTRCRRQRLFLPPLANRLAPSPPVLVPPAYRPATLHARLPLPFRLRWTVDSARPRRLHCAPRAAGGQWEPAAAAPARRPCRFGSACPKRSVTCPLTFQRELSASFWNPGNHLSTNNPMRPNDSLEAQDMVPAEGNHSCFSSVQSTPEIEKKYVHRVYDAIAPHFSATRFAKWPKVAGFLNSLRPGSVVLDAGCGNGKYLGFNPDCLFIGCDISPPLIEICAGRGHEVLVADAVNLPYRNDFGDAAISIAVLHHLSTDDRRRRAIEELIRVVRRGGLVLITVWAREQEDKSLLNKWTPLCEKYTEEWVEQSSPPVRSKSGTLLESIAETDEDAGFTKQTDDRLKSCHGEVEDKTIDCSNSKTDENEKNQQEYFVPWHLPFHRAEIGGASAALENGFAKKDEKK

SEQ ID NO: 48837 - protein, 320 aa, Zea mays
  Coding DNA Sequence Number=SeqID_7058
  Gene Ontology: Mol. function=catalytic activity; Cellular component =alpha,alpha-trehalose-phosphate synthase complex (UDP-forming); Biological process=trehalose biosynthetic process
  Homolog annotation: Hit_ID=Q1W5S5; Match level="QueryCoverage=66%, HitCoverage=100%, E-value=1e-107, Identity=82%"; Hit description =Ramosa 3
  Pfam annotation: Domain name=Trehalose_PPase; Domain location=93-294; Score=267.3; E_value=3.1e-77; Accession=PF02358.7; Description =Trehalose-phosphatase
  Subcellular localization annotation: CTP_CleavageSite=20; ConfidenceScore=5.26e-01
MGIAAGAALPGPSPALLACRGAAAGAMSLRYLDLAAAAARSASGTWADAMRASSPTRSRAADEFTAWVRKHPSALGKFEQIASASKGKKVVMFLDYDGTLSPIVADPDAAYMSDAMRAAVRDVAKHFPTSIVSGRCRDKPESVLCQPASEFLPVMDEVYKALVEKTKSTPGAKVEHNKFCLSVHFRCVDEKRWNGLAEQVKAVTKDYPKLKLTHGRKVLEIRPSIMWDKGKALEFLLESLGFANRSDVLPVYIGDDRTDEDAFKVLRKRGQGIGILVSKCPKETNASYSLQDPGEVMDFLLRLVDWKRKSSAAPMVRPRV

SEQ ID NO: 48838 - protein, 236 aa, Zea mays
  Coding DNA Sequence Number=SeqID_7059
  Subcellular localization annotation: CTP_CleavageSite=79; ConfidenceScore=5.09e-01
MVGSTVTLLPLQSQPPNMSSSGVMVVGGMLDEVALTTEAAGLQALSLLAVDPSSSRTLLPPSGGVSRNLPPFLLKGTIGEEMEVKECVFTLALRPDGSCYKPHGARWRGCGRRLPARKDGSMSSSAFERGSTTSKARWYAFALAVMRRGIKRRTSVARGPGSKVSSEGSGSICGYFLLDLKKKFSEAHDVMKADEEARKAAEDEVRKLSLACDYAVAAQVRMETSLSERGAELRGL

SEQ ID NO: 48839 - protein, 1229 aa, Zea mays
  Coding DNA Sequence Number=SeqID_7060
  Gene Ontology: Mol. function=microtubule motor activity; Cellular component=microtubule associated complex; Biological process =microtubule-based movement
  Homolog annotation: Hit_ID=Q9FME7; Match level="QueryCoverage=79%, HitCoverage=74%, E-value=0.0, Identity=54%"; Hit description=Kinesin- like protein
  Pfam annotation: Domain name=Kinesin; Domain location=21-368; Score =490.3; E_value=2.3e-144; Accession=PF00225.13; Description=Kinesin motor domain
  Pfam annotation: Domain name=Vicilin_N; Domain location=588-717; Score=-73.8; E_value=0.09; Accession=PF04702.3; Description=Vicilin N terminal region
  Pfam module annotation: Pfam domain module=Kinesin::Vicilin_N; Domain location=21-368::588-717
METTEAAAAHPQKDSVKVAVNIRPLITVELQDGCTDCVTVTQGEPQVQIGPHVFTFDHVYGSSGPSSSLIFEQCVHPLIDALFSGYNATVLAYGQTGSGKTYTMGTNYSGEENCGGIIPQVMDTIFRKVDTSKDGSEFLIRVSFIEIFKEDVFDLLDANQAAVRLDAGSMAKASAPGRVPIQIRETATGGIILAGVTEAEVKSKEEMASYLTRGSSSRATASTNMNMQSSRSHAIFTICVEQKRTSGTSDKSASSDYDILSSKFHLVDLAGSERAKRTGADGHRLKEGIHINKGLLALGNVISALGDEKKRKEGAFVPYRDSKLTRLLQDSLGGNSKTVMIACISPADINAEETINTLKYANRARNIQNKAVVNRDPATAEMQKLRSQLEQLQTELLFSRSGSAALEELQLLQKKVSLLELKTSELNNELKEKELSCEQLAERAQAAQLERDQLMLKIESVRNGKSLDDIENIDNDQDMDLLKGYISKIQQLESALMRQNFSNACRHGLHDQLAMDQDIFLNELGSGCEVETTDASNEVDEEEKEREHSFMQDQLDKELQELDKRLQQKEAEMKQFAKSDTSVLKQHYEKKLTDLEQEKKALQKEIENLRHALTNISSSMDDNAQKVKENYLQKLNALESQVHELKKKQEAQQQLLRQKQRSDEAAKRLQEDIQRIKSQKVQLQQKIKQESEQFRSWKAAREKEVLQLKKEGRRNEYEMHKLLALNQRQKMVYDNMIVAYTILLEIALIRAIDDELEVTVRAHELRSYYERQMQERAAISKEIAKLKEESKHKISDCPQAMSPSARSSRISALENMLSSSSSAMVSMASQLSEAEERERVFNGKGRWYHVRSLPEAKNIMNYLFQLASSARSQVLDKEVICNEKEHTITELKEKVVVLNGGIRQLETQVRDLRSQNTQLFTALNNAKKSARSNGTGFAGRKMSDYPSYMQSVRSSQHFGYSKDNFNWVDDMDISDSEHSDELENMSDGSDSDWVQSTRKAKKHQRRVSSHSNPNLDCQNTQGSAEPEKPSDEKCILPKYISSDGCSCSKSSSCKTNKCECRGSGAQCGAGCGCKDSKCSNRDSSTIEKANQGAMLLQTAFSEKEAQDAKPRKPLTNIGNNVVNQTAETKKPRKNRRKSAIQLVPGPLLPSEPVATEAAPRDIANIPLKLPRAMSSVTPAESNPPLTDRNAAKPDESVSTGSKNSTGAAATRAPSQLRKNATTEKENQLR

SEQ ID NO: 48840 - protein, 89 aa, Zea mays
  Coding DNA Sequence Number=SeqID_7061
MAPVNPPSRRDSRGEATPAEVKHQNQSDTGGQRQLEELPVPNSNVERQLEELSTTRGQIMGNQKPVVCVVLYLELTNLKEASVQILFSL

SEQ ID NO: 48841 - protein, 57 aa, Zea mays
  Coding DNA Sequence Number=SeqID_7062
MTDVYMADVEVFSSKKLQRALTFTDAEAEEQLSFEEDSASGIYNLGLYESSSWTNIK

SEQ ID NO: 48842 - protein, 654 aa, Zea mays
  Coding DNA Sequence Number=SeqID_7063
  Gene Ontology: Mol. function=metal ion binding; Cellular component =integral to membrane; Biological process=ubiquitin cycle
  Homolog annotation: Hit_ID=Q6Z2V8; Match level="QueryCoverage=56%, HitCoverage=92%, E-value=1e-131, Identity=65%"; Hit description =Putative RING finger 1
  Pfam annotation: Domain name=zf-C3HC4; Domain location=390-431; Score= 39.7; E_value=1e-08; Accession=PF00097.15; Description=Zinc finger, C3HC4 type (RING finger)
MRTLERHFVLMMGWTMRGGGAGTGWFCRVHLLVAWSMTALDADNLGVGGSSGLTRQSAPVVVAKKSRVSNLMRLPMMNADEAATGLRDVAWHTNHLLTWDVFSTTSSSVIHLSSPFIMRRRTSGTAYCPVPSDGYVSDVVLDRDHSVLAYRFHSPGHGSVMSHHVDLGGPFEEVFWAFTPSCSADVPSLEGVMKSSSNPGRSSALVMNVDGVYMCSTARPLAPYELWVSPPNPRLLEMVVAVASCQSSSTPLSPYPSSPSLRSFIRDAPPYSTQTPPQVQTAGVGGGGGNGKISPAVLFIIVILAVIFFISGLLHLLVRILMRKQHGRGATMGESAPSPPRTGARAAAMDRQLQELFHLHDSGLDQAFIDALPVFAYREVIGGNKEPFDCAVCLCEFDGEDRLRLLPVCGHAFHLQCIDTWLLSNSTCPLCRGTLFVPGMTVDDLLFDDFDERLEEPLPEECEDGHQVSRQKPMDEEQPMAEKRVFPVRLGKFKSVANQGAIGGVVVNGNEAGIVSKEAGESSSSSLDARRCFSMGTYQYVLGVSELRVALQTGHGRNGASSRFKGRVAGLSSVNADIMEGKRICARSKGESFSVSKIWQWSSLKGKLPAPPDTCSDTGSLAWMKRNAAGDKSNMVSQQSFIKGSILTGLLYCT

SEQ ID NO: 48843 - protein, 179 aa, Zea mays
  Coding DNA Sequence Number=SeqID_7064
  Homolog annotation: Hit_ID=Q6Z2V7; Match level="QueryCoverage=82%, HitCoverage=81%, E-value=1e-50, Identity=70%"; Hit description=NHL repeat-containing protein-like
MDTDHGGASAAGMDEAEAAFFARGGRRCCCFPWPAAASSSSSHQRVGGAAAAAAAAAEETWWQRAVDAVLKVREWSELVAGPRWKTFIRRFGRSGPPARPHHHHFGGRKLNYDALSYALNFDEGHGASPEGDYTGYRDFSARFVGPPASAKSSMDLGGRDAPPLFGPPPLPPHDGAGRA

SEQ ID NO: 48844 - protein, 228 aa, Zea mays
  Coding DNA Sequence Number=SeqID_7065
  Gene Ontology: Cellular component=integral to membrane
  Homolog annotation: Hit_ID=Q94CC0; Match level="QueryCoverage=52%, HitCoverage=25%, E-value=1e-19, Identity=42%"; Hit description =Hypothetical protein At5g49945 precursor
  Subcellular localization annotation: CTP_CleavageSite=22; ConfidenceScore=5.42e-01
MADLSRPSDAIAITRLPARPLRVSLASPLGSREGRWNTTTSASNPNPSTRTPRDPTLALDLWDEDKFEGISVLEAIPSDDSVAPAEADQSDPSIEAPAETIPTAKRSPAELLRAFSVEIACVSFLIYFVLNYFMGKRQNENIALAWATKFTTRDSIFDKNFSLLGTGDGKDSGHIVKDSNSDNIEKEKFELCVDKLNFELLLPNFYMVRTLSKFFSPFKLPELANWMF

SEQ ID NO: 48845 - protein, 82 aa, Zea mays
  Coding DNA Sequence Number=SeqID_7066
MITKGFTTGRPDKELYAIEEQPRTRGLILLRSLKPPLPLPDPSAAAPARPPPCRSAALPEAGVEAAPPEAAVEAAPARRPRA

SEQ ID NO: 48846 - protein, 267 aa, Zea mays
  Coding DNA Sequence Number=SeqID_7067
MSSSLRFLRPKNDGGGGDDGCFDGVELEVTVLSADSLRLPPSYSPLPRRLRAVRDRGVVGRARRLGLQHGGGSGERRRRRRARVGRHARRPRGRGLPGGPRPRSHVSVLSEPACRLVGATPLGWCRIPVADVLDGLRPAARAPPAQLLAALPAPRRGRGRVGPRRRAPLRAPAWPPRRRAGSHGHGHGRDAAGAAGLVPRGDGHPGVRTVVGGRFRRRRDALVVGRHHVTVTGPRLAVEKRWNFCRRSVDVDQRARDSILAQIVLIT

SEQ ID NO: 48847 - protein, 165 aa, Zea mays
  Coding DNA Sequence Number=SeqID_7068
MGFWATTLIFVLAGVAASLFTLLCCNRGPSTNLHADLGLGIPRARSGWFGRRSFDCGDVGVRATEQTTEEDGSALEEGLCRLQPPRDRGGKVAAQAEGRQSTTGQRERRVEAEKRRANQCLCGVHGPVHIIESQSPNITPEFLGRIKDARSIWITLQVKVATWHS

SEQ ID NO: 48848 - protein, 183 aa, Zea mays
  Coding DNA Sequence Number=SeqID_7069
MAFLGRSRKARVKLEFYLRLHQARPQARCRGVRPGASRSRQQCGRSRPGDCISTELPISSFSTSALEAELEMLRHCSGQLLDHVGAHGASLIERLDNAMCRVRDIADLGVHRGAAVALLMAEVCLGCNLQDLIGPPSSFLDEGLEDLLKGYDDVASRVILRVSTHDVVYCMLTATCYASALSS

SEQ ID NO: 48849 - protein, 100 aa, Zea mays
  Coding DNA Sequence Number=SeqID_7070
  Gene Ontology: Mol. function=zinc ion binding; Cellular component =nucleus
  Homolog annotation: Hit_ID=Q9FNE9; Match level="QueryCoverage=63%, HitCoverage=19%, E-value=3e-08, Identity=43%"; Hit description =Histone-lysine N-methyltransferase ATXR6
  Pfam annotation: Domain name=PHD; Domain location=50-87; Score=-2.5; E_value=0.1; Accession=PF00628.19; Description=PHD-finger
MPDAPTSSPLSQISHAKIGVTGYLRRWTQAQTPLGPKLEAVTGYNDDDVKCKACESEESVAELMLCDDCDRGFHIFFLCPILLCVPVGYFLNGATRVAMP

SEQ ID NO: 48850 - protein, 133 aa, Zea mays
  Coding DNA Sequence Number=SeqID_7071
MVPRFGTKRRARESAFTATKAVKCGVGTSAGATSLPLAWLDAAQEAIQRGVEMAWLALGGQVEQDATVAEVGASPLVSLVKVVPLSKEETRVADAQSAMASPIISDLLRSILDTPEATRSPEVVNVLRAPRGG

SEQ ID NO: 48851 - protein, 121 aa, Zea mays
  Coding DNA Sequence Number=SeqID_7072
MNRSWAPNSEHVHLKSACLYYPVGSVAVASTQSREPTEGYGVKPEKLAAAVDFDVSSAGIREAAQVKGGASERVSPPELGCTTHRKSGKFSPEQVRSRCPRPTFDHPGVIRAVGIGSDGGD

SEQ ID NO: 48852 - protein, 1082 aa, Zea mays
  Coding DNA Sequence Number=SeqID_7073
  Gene Ontology: Mol. function=RNA-directed DNA polymerase activity; Cellular component=mitochondrion; Biological process=RNA-dependent DNA replication
  Homolog annotation: Hit_ID=UPI00005A975E; Match level="QueryCoverage =95%, HitCoverage=59%, E-value=0.0, Identity=87%"; Hit description =PREDICTED: similar to Retrovirus-related Pol polyprotein from transposon 297
  Pfam annotation: Domain name=RVT_1; Domain location=56-225; Score =140.0; E_value=6.6e-39; Accession=PF00078.17; Description=Reverse transcriptase (RNA-dependent
  Pfam annotation: Domain name=RnaseH; Domain location=455-583; Score =19.2; E_value=9.4e-07; Accession=PF00075.14; Description=RNase H
  Pfam annotation: Domain name=rve; Domain location=794-953; Score =119.1; E_value=1.2e-32; Accession=PF00665.16; Description=Integrase core domain
  Pfam module annotation: Pfam domain module=RVT_1::RnaseH::rve; Domain location=56-225::455-583::794-953
MPGIPRDVAEHSLDIRAGARPVKQPLRRFDEEKRRAIGEEIHKLMAAGFIKEVFHLEWLANLVLVRKKGGKWRMCIDYTGLNKACPKVPYPLPRIDQIVDSTTGCETLSFLDAYSGYHQIRMKESDQLATSFITPFGMYCYVTMPFGLRNAGATYQRCMNHVFGQHIGRTVEAYVDDIVVKMRKASDLLFDLEVTFRCLKAKGVKLNPEKCVFRVPRGMLLGFIISERGIEANPEKIAAITSMGPIKDLKGVQRVMGCLAALSRFISRLGERGLPLYRLLRKAECFTWTPEAEEALRNLKALLTNAPILVPPAAGEALLIYVAATTQVVSTAIVVERREEGHALPVQRPVYFISEVLSETKIRYPQVQKLLYTVILTRRKLRHYFESHPVTMVSSFPLGEIIQCREASGRIAKWAVEIMGETISFAPRKAIKSQVLADFVAEWVDTQLPTVPIQPELRTMFFDGSLMKTGAGAGLLFISPLGKHLRYVLRLHFPASNNVAEYEALVNGLRIAIELGVRRLDARGDSQLVIDQVMKNSHCRDPKMEAYCDEVRRLEDKFYGLELNHIARHYNETADELAKIALWRTTVPPDIFSRDLHQPSVKIDNTAEPKAPSAQPEVPLAQSEAPPARPEAPLARPEAPSVQPEVPSAPEGEALRVEEERSGVTPNRNWQTPYLQYLHRGELPLDRAEARQLARHVKSFVLVGDGKELYHRSPSGILQRCISIDEGQELLQEVHSGACGHHAAPRALVGNAFRQGFYWPTAVADATRIVRTCEGCQFYARQTHLPAQALQTIPITWPFAVWGLDLVGPLQKAPGGYTHLLVAIDKFSKWIEVRPLNSIRSEQAVAFFTNIIHLFGVPNSIITDNGTQFTGRKFLDFCEDHHIRVDWAAVAHPMRNGQVERANGMILQGLKPRIYNDLDKFGKRWMKELPSVVWSLRTTPSRATGFTPFFLVYGAEAILSTDLEYGSPRTRAYADQSNQASREDSLDQLEEARDMALLHSARYQQSLRRYHARGVRSRDLQVGDLVLRLRQDARGRHKLTPPWERPFVIAKVLKLGTYKLANSQGEVYSNAWNIQQLRRFYP

SEQ ID NO: 48853 - protein, 353 aa, Zea mays
  Coding DNA Sequence Number=SeqID_7074
  Gene Ontology: Mol. function=phosphatidylinositol phosphate kinase activity; Cellular component=mitochondrion; Biological process =phosphatidylinositol metabolic process
  Homolog annotation: Hit_ID=Q6ZJN4; Match level="QueryCoverage=73%, HitCoverage=19%, E-value=1e-102, Identity=63%"; Hit description =Phosphatidylinositol 3,5-kinase-like
  Pfam annotation: Domain name=PIP5K; Domain location=125-307; Score =17.2; E_value=8.2e-12; Accession=PF01504.9; Description =Phosphatidylinositol-4-phosphate 5-Kinase
MEDEISSIIACALAISDERHHLIDLKFENGMDYSKGEYAKAIEKSFSFLSESSFSSSPWSSTNFEASLSSLSSFSSDDFSGYDSSFLLSPMHPEMTVNGKVTLKDKYSVTVVYDNQFFALRKKCCPSELAYITSLSHCKKWNAQACLPFSGHWKPNLSANILGIYQVKQIKHGKKVKIYLMVMENLLFGHNISRIYDLKDQNYVEDMGFSPIYIGGRTKHLLQRAIWNDTSFLTSVNVMDYSLLVGVDKEKHELVFGIIDYLRQYTWDKQLETWVKTSLVVPKNVLPTVISPKEFKKRFRKFMAKYFLSVPDTWSLDNPSKPCKSLGQSNRKLAEVQIGDNLSELPNEVEGCA

SEQ ID NO: 48854 - protein, 86 aa, Zea mays
  Coding DNA Sequence Number=SeqID_7075
  Subcellular localization annotation: CTP_CleavageSite=42; ConfidenceScore=5.03e-01
MELLVPVPWQSVSTHRTDGVSVGGDRLKLGQFCTGALHHRVVVSHRKQRTTLRGGRFGGIVLQRMLPRTLQRFAEGLTRGIWIVGG

SEQ ID NO: 48855 - protein, 560 aa, Zea mays
  Coding DNA Sequence Number=SeqID_7076
  Gene Ontology: Mol. function=oxidoreductase activity; Cellular component=membrane; Biological process=response to oxidative stress
  Homolog annotation: Hit_ID=Q8GVG7; Match level="QueryCoverage=52%, HitCoverage=89%, E-value=1e-100, Identity=63%"; Hit description =Putative peroxidase
  Pfam annotation: Domain name=peroxidase; Domain location=281-521; Score=385.9; E_value=6.1e-113; Accession=PF00141.13; Description =Peroxidase
MAPPPELAVVVPTMTLLVLALLGAAVAGKISYAPSTSPPATTPTSPNQSPPTYHAPSQIPSSTSITPPSPSPKLSLLLPTNSQPIPSPISYPPSQSPSISNPPANSQPIPNTSPSSISPTYPPSGRSSNPLISGPPIYPPSGSSNPSISSPPTYPQGVSTNPLVSNSPTYPQSASPSPSISTPPTYAPSASPSSSISTPPIYAPSTSPSSSISTPPIYPPSPSPSLSINSPPGSPTPSPSSSISIPPTYPPSLSPSPSSAPSSGLSVGYYKHTCSGAETIVREVVTNAIDSNRGTGAGLIRLFFHDCFVQGCDASVLLNTTGSSEPTERASAPNLSLRGFDVIDAAKAALEAACPGVVSCADIVAFAGRDATCILSGSAVSFDMPAGRHDGRVSLDSEAVANLPPPFASLERLEEMFAAKGLDVEDMVTLSGAHTVGRSHCSSFSDRLPPHVSDMNDTLSGTLATQCNSGGGGDTTVPQDSVTPGGLDSQYYRNVLNHEVLFASDAALLASDQTADMVSANAFTPGLWETKFKAAMVKMGRVGIKTSTDGEIRDKCWMVN

SEQ ID NO: 48856 - protein, 92 aa, Zea mays
  Coding DNA Sequence Number=SeqID_7077
MQQTSYRPPAPRGRGGEALAEEGNQQPTTSAASASHSQTSWAQLPPLPPLAPAPSHDQQPDGHLRSQQQSDLREQSEAHTVNNTVPESRHIY

SEQ ID NO: 48857 - protein, 431 aa, Zea mays
  Coding DNA Sequence Number=SeqID_7078
  Gene Ontology: Mol. function=oxidoreductase activity; Cellular component=membrane; Biological process=response to oxidative stress
  Homolog annotation: Hit_ID=Q8GVG6; Match level="QueryCoverage=71%, HitCoverage=80%, E-value=1e-82, Identity=57%"; Hit description =Putative peroxidase
  Pfam annotation: Domain name=peroxidase; Domain location=84-322; Score=334.3; E_value=2.1e-97; Accession=PF00141.13; Description =Peroxidase
  Subcellular localization annotation: CTP_CleavageSite=90; ConfidenceScore=5.31e-01
MSKPAAALVMLLALVAAGPAAGDGGSTRLGCFVGWSPLKTVSSLLCLLQGSSTFPSPKPAPTGQGLSVGYYNKSGSCPKAEQLVREAVTSATNGANRGLNAGLIRLHFHDAFVRGCDASVLLDKTASNNTDTEKTGPPNKDSLRGFEVIDAAKAAVEKECPGIVSCADILAFAARDASYILSNEKIYYEVPAGRYDGRESFADETDQLPGPGSSVQDLKKSFAAQGLSLADAVTLSGAHSIGLARCLFFKDRLSAMDPGYAATLNATCNAGGDSYKVNQDYKSPDVLDNQYYKNIDKFVLFASDAALKSSETIDQVNANAGGYGKWEKDFGDAMVKMGKIGVITSPGYGAEIRKPREVSALPDPRPQPQPRPREKVSALPDPKPQPQPQPRPREESHPRPTSALALGEVSASPDLGLGVDYATGDTSLPYC

SEQ ID NO: 48858 - protein, 106 aa, Zea mays
  Coding DNA Sequence Number=SeqID_7079
MDLGIVIMVAMVADTLEAGLGPMEDMAQEVRARKVMGEVTRRLTKGSMLVLAGALFKMVTWVTLEEAMAPVVQAIVPLGVHQPLNYRHLPDLLLISRRLSRCFNKL

SEQ ID NO: 48859 - protein, 138 aa, Zea mays
  Coding DNA Sequence Number=SeqID_7080
MPMQIDGHRNSRSRQSGDCQWVLGVAYAFHWPVDMNLEGLKLISRKVGYINEKSVQNDTRNQTRWFVRLCRPLLSCNCNCNCKRSNLRLTIVSSESRDPKIKGQGTLQTRQGQIGMHMVEFRLNTASNWRYYVTGSEG

SEQ ID NO: 48860 - protein, 152 aa, Zea mays
  Coding DNA Sequence Number=SeqID_7081
  Homolog annotation: Hit_ID=Q6Z6Y2; Match level="QueryCoverage=26%, HitCoverage=31%, E-value=1e-07, Identity=68%"; Hit description =Putative SWIb domain-containing protein
  Pfam annotation: Domain name=SWIB; Domain location=77-136; Score =14.1; E_value=0.0009; Accession=PF02201.9; Description=SWIBMDM2 domain
VAVGAEVAVAPELHPNIPVHTRNNVRERRAQFDSIHVKSEAAARSCFAFRWIYLANGMWIRSRGNEPCSQVYSISVVMLLTTVVSVLLFSFHVSPCLQNQAKKTDINCDATLKSLFGGRDKVGMLEISKLLSRDFPKISKLLWSMEPGMALW

SEQ ID NO: 48861 - protein, 153 aa, Zea mays
  Coding DNA Sequence Number=SeqID_7082
  Homolog annotation: Hit_ID=Q6Z6Y2; Match level="QueryCoverage=26%, HitCoverage=31%, E-value=1e-07, Identity=68%"; Hit description =Putative SWIb domain-containing protein
  Pfam annotation: Domain name=SWIB; Domain location=78-137; Score =14.1; E_value=0.0009; Accession=PF02201.9; Description=SWIBMDM2 domain
MYCLLSGVPVWARLTSARAARAFIALQERRAQFDSIHVKSEAAARSCFAFRWIYLANGMWIRSRGNEPCSQVYSISVVMLLTTVVSVLLFSFHVSPCLQNQAKKTDINCDATLKSLFGGRDKVGMLEISKLLSRDFPKISKLLWSMEPGMALW

SEQ ID NO: 48862 - protein, 363 aa, Zea mays
  Coding DNA Sequence Number=SeqID_7083
  Gene Ontology: Mol. function=nucleic acid binding; Cellular component= intracellular; Biological process=DNA integration
  Homolog annotation: Hit_ID=Q8W0X4; Match level="QueryCoverage=97%, HitCoverage=27%, E-value=1e-133, Identity=74%"; Hit description =Putative pol protein
  Pfam annotation: Domain name=zf-CCHC; Domain location=267-284; Score =30.5; E_value=5.8e-06; Accession=PF00098.13; Description=Zinc knuckle
MDPKGKGMVVNDKEKESFVNDPKDDKPTDSGSGHKRKDGRKKKTRRIKEIVYYDSDKSSSSQKDDDNDYEKKKTVSGLDNAKQIWDTLKISHEGNDVTMLTKMELVEGELGRFAMIRGEEPTQTYNRLKTLVNKIRSYGSTRWTDHDVVRLMLRSFTVLDPHLVNNIRENPRYTKMTPEEILGKFVSGRMMIKEARYVDDALNGPIQEPQTTALKATRSKEALPSKVAQVEAARLNDEEMALIIKRFKTALRGRKEHPNKTKTKGKRSCFKCGKIGHFIANCPDNDSDQEQGNKREKKKAYKKAKGEAHLGKEWDSDCSSSDSDNEGLAATAFNKSALFPNKHHTCLMVREKKVIRKARGSFV

SEQ ID NO: 48863 - protein, 213 aa, Zea mays
  Coding DNA Sequence Number=SeqID_7084
  Gene Ontology: Mol. function=DNA binding
  Homolog annotation: Hit_ID=Q2QX50; Match level="QueryCoverage=45%, HitCoverage=34%, E-value=1e-20, Identity=49%"; Hit description =Expressed protein
MQLKGGIDSGYYANLLVNGVDESQDPTPTRGTSKSSQGRSKKFRDEDILLVSAWLNVSMDPIHRVEQTHGTLWTRIHAYFNANKTFESNRSKVVIARDAPLPIDVDAELSARPDGKKKEKQKLRQRSTIDVVDYLMAKKKEADHEKDLKKEERCNKAFALKEERIKLDKEKFEFQRQLEEDRILNLDLSTMDYKQQQYYEHRQNEILARHFNL

SEQ ID NO: 48864 - protein, 112 aa, Zea mays
  Coding DNA Sequence Number=SeqID_7085
MSGRPNDQWLYSGVNGRRVINIGHVSIVMVGKGHRTCPVRHRAVRCPPEMEGYQSTDAVTIAAKPVRCAPDCPVHPLIEGNLEFPKEGATTLWPLRAIKEAPMCLYQITKHS

SEQ ID NO: 48865 - protein, 251 aa, Zea mays
  Coding DNA Sequence Number=SeqID_7086
  Gene Ontology: Mol. function=protein serine/threonine kinase activity; Cellular component=membrane; Biological process=protein amino acid phosphorylation
  Homolog annotation: Hit_ID=Q6ES01; Match level="QueryCoverage=73%, HitCoverage=23%, E-value=2e-58, Identity=61%"; Hit description =Serine/threonine-specific receptor protein kinase-like
MVLAFLVLLLLFAPVAVSQQGFLSIDCGLDASYSGYKDKVTGIVYVSDGSYVDAGENHRIAPDLEGSFQGRAQTLRSFPSGQRNCYLLPTVAGTRYLARATFAYGNYDGKNSSALEFDLHLGANYWQTVYPNARSSDVYEAVFVAWAGWAPWCLVNTGHGTPFVSVLELRPLGAELYPLVTPGLVVSMFARINMGGSVSMTRFKDHTDISATNIIKPTLEALPTDDQQPFNDLMRREEEEVLQQLPNGARG

SEQ ID NO: 48866 - protein, 549 aa, Zea mays
  Coding DNA Sequence Number=SeqID_7087
  Gene Ontology: Mol. function=protein-tyrosine kinase activity; Cellular component=membrane; Biological process=protein amino acid phosphorylation
  Homolog annotation: Hit_ID=Q6ERY7; Match level="QueryCoverage=94%, HitCoverage=81%, E-value=1e-166, Identity=56%"; Hit description =Serine/threonine-specific receptor protein kinase-like
  Pfam annotation: Domain name=Pkinase; Domain location=245-517; Score =113.7; E_value=5.2e-31; Accession=PF00069.15; Description=Protein kinase domain
  Pfam annotation: Domain name=Pkinase_Tyr; Domain location=246-513; Score=129.5; E_value=9e-36; Accession=PF07714.7; Description=Protein tyrosine kinase
  Pfam module annotation: Pfam domain module=Pkinase::Pkinase_Tyr; Domain location=245-517::246-513
MDGPSPHLHGGGFLELLWETLEAAPLEAALDTQLRQFDILINENQSGPKLTAYNDTWYLTPTHVHTKSYRADDGKYNVTLAATKASVLPPMINALEIYIRVPYESPTTLPQDFDAIVAIKTEYGLSRNWMGDPCFPIKYAWDGVKCSNASGNTSRITSLDLSNSSLHGTISKNFTLLTALENFLEMFFSESRLQADYTVQPVPTHGPTRDPEPDNVSGSQKSYGYNMNKTENRQFTYKELEKFTNNFKKFIGQGGFGPVYYGRLEDDTEVAVKMRSESSSHGLDEFLAEVQSLTKVHHRNLVSLIGYCWEKDHLALVYEYMSQGSLFDHLRGKNGVSQALNWRKRVQVVLEAAQGLDYLHKGCSLPIVHRDVKTNNILLGQNLQAKIADFGLSKTYLSDTQTHISVTPAGTAGYMDPEYYLTGRLSESSDVYSFGVVLLEVATGEAPTVPGRGHVIQRVKQKVATGDVGSIADSRLGSAYDISSMWKVIDTAVMCTADSAAQRPTMATVVVQLKESLALEETREKGSSNRVSRGSDIEAMASTLGPFAR

SEQ ID NO: 48867 - protein, 146 aa, Zea mays
  Coding DNA Sequence Number=SeqID_7088
MGKSNKRKRESTPPSEDFGNSEYSEEEFSSESEGSPAPVSPPASSDDSDDSPGIAAEVWTYIRAVERSGLEGSDESEYSSDEEDSSDSSEEGGGGDGGDDDDDGGDGDDGDDGGDGGSRGGSKGGNGGSSRGNNGGGGKGSNKASG

SEQ ID NO: 48868 - protein, 164 aa, Zea mays
  Coding DNA Sequence Number=SeqID_7089
  Gene Ontology: Mol. function=DNA binding; Cellular component =mitochondrion; Biological process=DNA integration
  Homolog annotation: Hit_ID=UPI00004C1733; Match level="QueryCoverage =73%, HitCoverage=8%, E-value=1e-60, Identity=90%"; Hit description =UPI00004C1733 related cluster
  Pfam annotation: Domain name=rve; Domain location=1-138; Score=59.3; E_value=1.2e-14; Accession=PF00665.16; Description=Integrase core domain
MEAYCDEKAPGGFSHLLVAIDKFSKWIEVWPITSIRSEQAVDLFTNIIHRFGVSNSIITDNGTQFTGKKFLDFCEDHHIRVDWASVAHPMTNGQVERANSMILQGLKPRIYNDLNKFGKRWMKELPSVRDPENDGVHISGKANRAEGLLRLRDTDTSLITFCDK

SEQ ID NO: 48869 - protein, 167 aa, Zea mays
  Coding DNA Sequence Number=SeqID_7090
  Subcellular localization annotation: CTP_CleavageSite=43; ConfidenceScore=5.52e-01
MASSAATTAKLIALPPAPTRGGCCCWRTRRPAIPAAAARLKVSASAASSDVPDFLSSNWLETRKRKPFGPRLNFSAEEAVEYQLESLKYNDLPRPDYGIEVMYRFAGFDPFERSTYFGRQFDLGQNQFKQRVWIQGARPEEEEIFQFTMVQVQTSRWLEKAERHVGV

SEQ ID NO: 48870 - protein, 139 aa, Zea mays
  Coding DNA Sequence Number=SeqID_7091
MNGMREGAAAMEGRCGGGAVGKKDLAWREHAMDGMRAVGEARFLGELPNGWWPMMLSEDPEACRRKWHLLSRLTCSRQFLLQAWLREVECHMDEKVPQLSQATLEKKMHMGSPPAGTWELWALLELNQGRQSRLHATAQ

SEQ ID NO: 48871 - protein, 98 aa, Zea mays
  Coding DNA Sequence Number=SeqID_7092
MRSPFGVHASWIEEGESDQWSPHRCDPENAPGAQRMPGGTHRSGGRVELRALILSFPVMVSLIRGQCISAELGHMIEVVMGELDYMMEVKILFDVRRG

SEQ ID NO: 48872 - protein, 199 aa, Zea mays
  Coding DNA Sequence Number=SeqID_7093
  Gene Ontology: Mol. function=binding; Cellular component=membrane; Biological process=peptidoglycan metabolic process
  Homolog annotation: Hit_ID=Q3XV38; Match level="QueryCoverage=83%, HitCoverage=61%, E-value=5e-19, Identity=36%"; Hit description=Sel1 -like repeat precursor
  Pfam annotation: Domain name=Sel1; Domain location=128-159; Score =0.1; E_value=17; Accession=PF08238.2; Description=Sel1 repeat
  Pfam annotation: Domain name=Sel1; Domain location=56-91; Score=50.9; E_value=4.3e-12; Accession=PF08238.2; Description=Sel1 repeat
  Pfam annotation: Domain name=Sel1; Domain location=92-127; Score =39.8; E_value=9.5e-09; Accession=PF08238.2; Description=Sel1 repeat
  Pfam module annotation: Pfam domain module=Sel1::Sel1::Sel1; Domain location=128-159::56-91::92-127
MAHTSPTSIHGRSSIRKPCLPQALHLILLLNVSAADPPKAEEAIRWFYPSASAGNARAQYNLGLCLQNGKGVKQNQKEAAKWYLRAAEGGNVRAMYNISLCYSYGEGLGQDPVRAKRWLQLAADCGHKKALYECGIKLCAAGDKVKCFMYLELATRRGEAAAAHMRDVILESLSVVNAQRAMSDADKWKPRTLHPRPRR

SEQ ID NO: 48873 - protein, 216 aa, Zea mays
  Coding DNA Sequence Number=SeqID_7094
  Gene Ontology: Mol. function=metal ion binding; Cellular component =intracellular
  Homolog annotation: Hit_ID=Q6DXS0; Match level="QueryCoverage=64%, HitCoverage=27%, E-value=1e-13, Identity=33%"; Hit description =Putative pentatricopeptide repeat protein
  Pfam annotation: Domain name=PPR; Domain location=109-143; Score =33.8; E_value=5.9e-07; Accession=PF01535.11; Description=PPR repeat
  Pfam annotation: Domain name=PPR; Domain location=178-212; Score=7.1; E_value=1.1; Accession=PF01535.11; Description=PPR repeat
  Pfam module annotation: Pfam domain module=PPR::PPR; Domain location =109-143::178-212
MPCRAPSHQSVSTQRSAYAVSAEASTSTALWLLESSAEPPDEDAYVMLFCLSEWHRAVEPKLRACAHTDDRHTWFRVRLGNAMLRMLVRFGDTWHTWRVFAKMPEHAVFSSNVMLGGYGKAGFLEQALDLYRRMMWVGLRLDVYMFPYVLQRCGGVPNWMTRRKVHAHVLRFGFREVDVLNALMTMYAKCEDVVYAHKVFENMVIMDCISWKMKVA

SEQ ID NO: 48874 - protein, 95 aa, Zea mays
  Coding DNA Sequence Number=SeqID_7095
MPPPPQITPTLPRPRQPASINEVVCFAITMWSGLIITVHGSLCCVLSSIQQIGYHVPTLCQKMTISHVQTGRYGVLWFVIENSSFSSVKGFTNGL

SEQ ID NO: 48875 - protein, 103 aa, Zea mays
  Coding DNA Sequence Number=SeqID_7096
  Homolog annotation: Hit_ID=Q9SKD8; Match level="QueryCoverage=91%, HitCoverage=24%, E-value=1e-23, Identity=57%"; Hit description =Expressed protein
MKDSQDIQSTTELQSSAQGTNEVQSQQPNPMTTDAPAGNSGSLSIASNDSKKVSREDIELVQNLIERCLQLYMNKGEVVRTLSTRARIEPGFTTLGDVFMLQW

SEQ ID NO: 48876 - protein, 129 aa, Zea mays
  Coding DNA Sequence Number=SeqID_7097
GGGAQPGLRAWRQCQVREDGRRSPGEGRRRRRRGLEVGGGGRTAAEAQCATGAQGRGDGRRSLGATGAQERGGGRGRRPREGGGAGGRGREEAGGATVEGKTPGGCAGEKMPLAAGRKQRTKPRLKIPC

SEQ ID NO: 48877 - protein, 624 aa, Zea mays
  Coding DNA Sequence Number=SeqID_7098
  Gene Ontology: Mol. function=hydrolase activity, hydrolyzing O -glycosyl compounds; Cellular component=integral to membrane; Biological process=polysaccharide catabolic process
  Homolog annotation: Hit_ID=Q5NAT0; Match level="QueryCoverage=94%, HitCoverage=94%, E-value=0.0, Identity=70%"; Hit description =Endoglucanase 2 precursor
  Pfam annotation: Domain name=Glyco_hydro_9; Domain location=34-503; Score=851.1; E_value=5.6e-253; Accession=PF00759.9; Description =Glycosyl hydrolase family 9
MAGYSMAAVALAGIALALAAATTTQVASAAGGHDYREALSKSILYFEAQRSGRLPGSQRVAWRADSGLLDGKANGVDLVGGYYDAGDNVKFGLPMAFTVTMMSWSVIEYGDQMAAAGELGHATDAIKWGTDYLVKAHPEPNVLYGEVGDGDSDHDCWMRPEDMTTSRQAYRLDPQNPGSELAGETAAAMAAASLVFRSSNPGYANTLLQHSKQLFDFADKYRGRYDSSITVARQYYASSSGYGDELLWAAAWLHEATGDARYLDYLANNADALGGTGWSINQFGWDVKYPGVQVLAAMTLLRRRGDAGAGAHADVLQRYKQQADLFACSCLGRGGPNSVRRTPGGMVYHQNWNNVQFVTSAAFLLAAYADHLAAAGQGARCPAGGTAQPSELLAFARSQVDYILGSNPRATSYMVGYGATYPRQVHHRGASIVSVRANPSFVSCQAGYSSWYHRRAANPNLIVGATVGGPDEYDNFADERDNYEQTEATTYNNAPLMGVLARLAAGHGGGGGKFGHHSLAADDSEHPSAWPIEIEQNATASWTKQGKTYRRYAVTVTNRSPKTVHELHIGISKLYGQVWGVDKARYGYVLPSWIPSLLAGKSAVFVYVQAAPPADVWVTGYKLI

SEQ ID NO: 48878 - protein, 262 aa, Zea mays
  Coding DNA Sequence Number=SeqID_7099
  Gene Ontology: Mol. function=protein binding; Cellular component =spliceosome; Biological process=nuclear mRNA splicing, via spliceosome
  Homolog annotation: Hit_ID=Q1SPA7; Match level="QueryCoverage=99%, HitCoverage=100%, E-value=8e-61, Identity=51%"; Hit description =Cwf15/Cwc15 cell cycle control protein
  Pfam annotation: Domain name=Cwf_Cwc_15; Domain location=1-262; Score= 402.7; E_value=5.3e-118; Accession=PF04889.3; Description=Cwf15Cwc15 cell cycle control protein
MTTAARPTWAPAKGGNEQGGTRIFGPSQKYSSRDLAAHTSLKLRKDGQQTQEELQKRNLREELEERERKHYSSKDKSYAGMATFSVSFFCSPLQDKFLAEERDRRKSSSQLLLEGSKREAEDKIVPREIDADDSDVEPKSDDESDEDGDDDDTEALMAELERIKKERAEEKLRKIMRDMTRIVPFQERQQAEEEAKMKEAELMRGNPLININNPGSFSVKRRWDDDVVFKNQARGETKTPKRFINDTIRSDFHRKFLHRYMK

SEQ ID NO: 48879 - protein, 195 aa, Zea mays
  Coding DNA Sequence Number=SeqID_7100
MPRAADTARINGDSGSQHGSTLTQPRGDYSEDRILDPGLRVGCTGEFISPTVWKGRVQSRRPQPPDEFHGGEQPMPTCGAAVIYVSGDQFAAPVDDFPPQQSRAHHRPHPNGCFGGDLDGDLCFITWDDKLIPKKVDSMDYTAMRFQDQLSRVIQVIEMDECAYQEMITHLHLCSIMCPRRDAKMSPRQSPGMLR

SEQ ID NO: 48880 - protein, 144 aa, Zea mays
  Coding DNA Sequence Number=SeqID_7101
MGKNKKGRGSSHHSGDKRKCEPSPPSEDFSDSEYSEEEFSSESERSPGIPAEVWMYIWAIQRSGLEGSDESEVSSDEENSSNSSKEESGSDGDDEGDGGDDSDDDGKGGEGDGGKGDGGSGGKGGGNGKGSGGSSKANGKAPLA

SEQ ID NO: 48881 - protein, 884 aa, Zea mays
  Coding DNA Sequence Number=SeqID_7102
  Gene Ontology: Mol. function=protein serine/threonine kinase activity; Cellular component=cell surface; Biological process =protein amino acid phosphorylation
  Homolog annotation: Hit_ID=Q9LLN5; Match level="QueryCoverage=97%, HitCoverage=98%, E-value=0.0, Identity=50%"; Hit description =Receptor-like protein kinase
  Pfam annotation: Domain name=B_lectin; Domain location=96-250; Score =29.5; E_value=4.5e-06; Accession=PF01453.15; Description=D-mannose binding lectin
  Pfam annotation: Domain name=PAN_1; Domain location=424-506; Score =5.0; E_value=0.05; Accession=PF00024.16; Description=PAN domain
  Pfam annotation: Domain name=PAN_2; Domain location=412-489; Score =80.3; E_value=6.1e-21; Accession=PF08276.2; Description=PAN-like domain
  Pfam annotation: Domain name=Pkinase; Domain location=578-857; Score =156.8; E_value=5.7e-44; Accession=PF00069.15; Description=Protein kinase domain
  Pfam annotation: Domain name=Pkinase_Tyr; Domain location=579-857; Score=77.6; E_value=4e-20; Accession=PF07714.7; Description=Protein tyrosine kinase
  Pfam annotation: Domain name=S_locus_glycop; Domain location=260-395; Score=24.2; E_value=6.2e-07; Accession=PF00954.11; Description=S -locus glycoprotein family
  Pfam module annotation: Pfam domain module=B_lectin::PAN_1::PAN _2::Pkinase::Pkinase_Tyr::S_locus_glycop; Domain location=96-250::424- 506::412-489::578-857::579-857::260-395
MPPPNNRLCVALAIALVVFSSLHTPAAASAADGDTLAAGQALAAGDKLVSRNGKFALGFFQFRQALPGGGGTGTSASVVVPSPGWYLGVWFNKIPVCTPVWIANRDRPITESELKVAQFRVASTDGNNKLLVVATSNTNTSADNSIIIVANTTTNGSSVHVVLMDTGNLVLLPQTEALLSSASAPAASSSSSSSSSSSSSSSSLWQSFDYPTDVGLPGAKIGWTKLAGGRYFSRQFISKKSLVDPSPGSYSISIDTNGFMQLTRNAPSVQYWSWTSGSLGNLVTALTALIDMDPRTKGLLKPGYVATADEVYFTYSITDESASVFVPVDVTGQLKLMLWSDSKRAWETIYAQPSDFCVTSAVCGPFTVCNGNSGPSPSSFCTCMDTFSIRSPRHWELGDLTEGCARTTPLDCEAANRSSNGSPAPAGSTDVFHPIAQVALPLPYNSRPIEDATTQNGCEAACLGDCNCTAYSFSTDGKCSVWNGDLLNVDQADSTISSQGVLYLRLAKSDFQGLSRGNKRTPTAAIAAGAVGSGILVLAVLALVIWRCNNVPPPLHAGVGDGGGIMAFKHTDLCRATKNFSDRLGGGGFGSVFKGLLGDSTAVAVKRLDDARQGEKQFRAEVSSVGMIQHINLVRLIGFCCEGDKRLLVYEHVVNGSLDAHLFQQSSAAVVATALDWSKRYRIAVGVARGLCYLHQSCRECIIHCDIKPENILLDASFAPKIADFGMAAFVGRDFSRVLTTFRGTAGYLAPEWLSGVPITPKVDVYSFGMVVLEIVSGQRNTPPQALSRSGYYHAAAYFPVQAITKLHEGDLQGLVDPRLQGDLSLEEAERLFKVAFWCIQDDECDRPTMADVVRVLEGLQELDMPPVPRLLAAITARANADFM

SEQ ID NO: 48882 - protein, 738 aa, Zea mays
  Coding DNA Sequence Number=SeqID_7103
  Gene Ontology: Mol. function=isomerase activity; Cellular component =cytoplasm; Biological process=negative regulation of transcription
  Homolog annotation: Hit_ID=Q6YPF2; Match level="QueryCoverage=94%, HitCoverage=100%, E-value=0.0, Identity=79%"; Hit description =Putative MA3 domain-containing protein
  Pfam annotation: Domain name=MA3; Domain location=159-270; Score =153.8; E_value=4.4e-43; Accession=PF02847.7; Description=MA3 domain
  Pfam annotation: Domain name=MA3; Domain location=323-434; Score =151.5; E_value=2.3e-42; Accession=PF02847.7; Description=MA3 domain
  Pfam annotation: Domain name=MA3; Domain location=457-568; Score =142.7; E_value=9.8e-40; Accession=PF02847.7; Description=MA3 domain
  Pfam annotation: Domain name=MA3; Domain location=620-729; Score =159.7; E_value=7.6e-45; Accession=PF02847.7; Description=MA3 domain
  Pfam module annotation: Pfam domain module=MA3::MA3::MA3::MA3; Domain location=159-270::323-434::457-568::620-729
  Subcellular localization annotation: CTP_CleavageSite=31; ConfidenceScore=5.25e-01
MTAALSPLRQQGDVSKDPTAPTAVVTTVVLRGGAGGRGGGLGAMTSPRKDAGFLTQDQREKLRIAQYELQMLEQKRAAAAAAAARGGGGGGGGPRHVRRSHSGKAIKVKKDGAGGKGTWGKLIETDAEACLDRNDPNYDSGEEPYELVEAPVSTPLEDYKKSVVPLIEEYFSNGDVKLAASDLKELGHDGFHCYFVKKLVSTAMDRHDKEKEMASVLLSYLYGNVVSSTQIRLGFVLLLEAVDDLAVDIPDVVDVLALFIARAVVDDILPPAFLSNAKVSLSGSSKGMQVVQIAEKSYLSAPHHAELIERRWGGSTHITVEEVKRRIADLLKEYIRNGDTAEACRCIRELAVPFFHHEVVKRALTLGMESPAAEALIVKLLKEASEECLVSSSQMMKGFHRVAESLDDLILDIPSAKSEFQLLVSKAISEGWLDSSYVNSGVNGSVEDDEHEKLARYKREAVSIIHEYFFSDDTTEVIRSVKELGYPEYNPIFVKKLITIAMDRKNREKEMASVLLPSLSMELFSSEDIAKGFVMLLESAEDTALDILDASDELGLFLARAVIDDVLAPLNLDEISSKLPPNCSGAETLNMARSLASARHAGERLLRCWGGGTGWAVEDAKDKITKLLEEYESGGDVGEACNCIRELGMSFFNHEVVKKALVMAMEKKNERTLNLLQECFGEGIITINQMTKGFSRVRDGLDDLALDIPDAREKFLSYVQRAKKSGWLLPGFGVASSA

SEQ ID NO: 48883 - protein, 207 aa, Zea mays
  Coding DNA Sequence Number=SeqID_7104
MASAGGRRRSKAKPRARAGGKAKKRTKYLSLTELLVKAHAQVGASPRSPWEDEEAVAAEVKPEDDACGDDDDDHHHHHHEASTLFEAVPAPSLSDILGPSPPESPAGLRLRGAAGRRGGGPPAPRAAGQGQGALGVLHRRAFAATASDGNRHRHRHRVAVLVRREHGRVAALAAAQAGLRRDPRGVGGLRAALHRRRRQPASGPRGR

SEQ ID NO: 48884 - protein, 208 aa, Zea mays
  Coding DNA Sequence Number=SeqID_7105
  Homolog annotation: Hit_ID=Q6QP51; Match level="QueryCoverage=84%, HitCoverage=94%, E-value=2e-15, Identity=38%"; Hit description =Putative growth-regulating factor 1
MAKSGPAVIAAADEQKQRDRERGCCGKDPSRRRKRAPSPPTDQGFEGWPLGRVSTASPEHSGFKPITDQGFEGWPLGRSLRPSSFTVRYDGKTAAPAPLRLSCQPPRRRLTTSHDQPPSSASGATGSSASPDLRIRPREEVSASPDLRLRPQEEVSASLDLRTQPRPRSREESRPRPTPASASREVSASPDLGLGPTAPTGDTSLPYP

SEQ ID NO: 48885 - protein, 289 aa, Zea mays
  Coding DNA Sequence Number=SeqID_7106
  Homolog annotation: Hit_ID=Q8W513; Match level="QueryCoverage=16%, HitCoverage=10%, E-value=2e-11, Identity=72%"; Hit description =Histone aceytl-transferase HAC108
  Subcellular localization annotation: CTP_CleavageSite=55; ConfidenceScore=5.22e-01
MTLAPHPAAPVISLHDPAPHPRSIPQSRFVTPNLMEAVLTGKGEAERKKRSGDERASRPVSPDPSRQSPSVQEEIRRRASVEAGATRPVPSIPISTASVTALRTSPPPPRRPPPRAVQIAAGGTLHDVLPGRAVMGDGDDEDSSVVATVTCRTCFHGRDRRQVEDMWLVVEKSQFPNITHEFIIASSFHIWRNNFTESKQGQGHEELDGASLREHEEFTKVKNITKVELGRYEIDTSYMVRTYLMCVLRQRRRPARAACAPQASLFSQPTTVLVYLTARTSKNIECSLN

SEQ ID NO: 48886 - protein, 233 aa, Zea mays
  Coding DNA Sequence Number=SeqID_7107
  Gene Ontology: Mol. function=enzyme inhibitor activity
  Homolog annotation: Hit_ID=Q2QTT7; Match level="QueryCoverage=68%, HitCoverage=72%, E-value=4e-41, Identity=56%"; Hit description =Pectinesterase inhibitor domain containing protein, expressed
  Pfam annotation: Domain name=PMEI; Domain location=68-223; Score =79.0; E_value=1.5e-20; Accession=PF04043.6; Description=Plant invertasepectin methylesterase inhibitor
  Subcellular localization annotation: CTP_CleavageSite=2; ConfidenceScore=5.07e-01
MAATTDRSRMQAAALVLTLLALLPPSILGARTRPPSPPHHSQGGHKRSPPPPASLPPPPPPPPPPPPAADAGLVRATCNSTAYYDLCVSTLGADPTSATADVRGLSTIAVSAAAADASGGAAAADALATAAGNTTATPVDATTRALLRSCAAKYGEARDALSAARDSIAQQDYDYAAVHVSAAAEYPQVCRVLFQRQRPADYPPELADREEPLRRLCTVALDIITLLANNDTN

SEQ ID NO: 48887 - protein, 392 aa, Zea mays
  Coding DNA Sequence Number=SeqID_7108
  Gene Ontology: Mol. function=signal transducer activity; Cellular component=chromatin assembly complex; Biological process=signal transduction
  Homolog annotation: Hit_ID=Q6ZD63; Match level="QueryCoverage=89%, HitCoverage=77%, E-value=1e-150, Identity=68%"; Hit description =Putative FAS2
  Pfam annotation: Domain name=WD40; Domain location=157-211; Score =3.1; E_value=16; Accession=PF00400.22; Description=WD domain, G-beta repeat
  Pfam annotation: Domain name=WD40; Domain location=216-254; Score =20.1; E_value=0.0081; Accession=PF00400.22; Description=WD domain, G- beta repeat
  Pfam annotation: Domain name=WD40; Domain location=26-64; Score=35.9; E_value=1.4e-07; Accession=PF00400.22; Description=WD domain, G-beta repeat
  Pfam annotation: Domain name=WD40; Domain location=68-106; Score =36.8; E_value=7.7e-08; Accession=PF00400.22; Description=WD domain, G-beta repeat
  Pfam module annotation: Pfam domain module=WD40::WD40::WD40::WD40; Domain location=157-211::216-254::26-64::68-106
EYLASGADGGGITLWKLHPADDGEAWKIHKTLLFHHKDVLDLQWSHDSTFLVSASVDNTCIIWEASKGTVQQKLEGHLHYVQGVAWDPLGQYIASLSSDRTCKIYAKKPQGKSKNAERLNFVCQHTLVKVEYQNHDESKPPTKSHLFHDETLPSFFRRPSIQLPGASKAIVAVRFCPVLFKPRGSNSDGFFKLPYRVVFAVATLNSLYVYDTESVPPILVHAGLHYAAITDIAWSSDAKYLAVSSRDGYCTIIEFENEELGQPHILPGSKEVANGNLTPETKKPVCADSMKVDNSANKLKMEASPVAVGVRAPLLPTENIKRTGELAEGNVTCENKEPVTIDSMEVDADDTKGKEATIPVAAEVTPPPAVPAAKNSASSKPAKRRITPIAID

SEQ ID NO: 48888 - protein, 355 aa, Zea mays
  Coding DNA Sequence Number=SeqID_7109
  Gene Ontology: Mol. function=serine-type peptidase activity; Biological process=proteolysis
  Homolog annotation: Hit_ID=Q69Y12; Match level="QueryCoverage=49%, HitCoverage=27%, E-value=3e-66, Identity=67%"; Hit description =Putative aminopeptidase C
  Pfam annotation: Domain name=LRR_1; Domain location=35-57; Score=7.0; E_value=14; Accession=PF00560.23; Description=Leucine Rich Repeat
  Pfam annotation: Domain name=LRR_1; Domain location=59-81; Score =12.0; E_value=1.6; Accession=PF00560.23; Description=Leucine Rich Repeat
  Pfam module annotation: Pfam domain module=LRR_1::LRR_1; Domain location=35-57::59-81
MAASLFSTLQHVDPARAPSNSPVKMEERMKLDLLQFIDITLNGNQLSGSLPDEIGYMRNLNILQINENNISGPTPNSFANLTSIKHLERLGCGQPLRFTYPAYMSSPCHSELFLLEKEDPMKKELMQLVVTTRLDPELEVPLLLTGPLKLVHAFLVSPAEVDLAAACVMHVGRPFWLHCPGFFQKIWDTFYLILIYSAVSRGSISLLDIPFSDLSDVVAADDYFYIEGASASIPRSIAKVTLNESKTKVVNFSIAWSSSPDLVQYRPFFSTPELVEFPTSKPGQKAYAYFYPPSNPNFQGLPYEKPPLLVKTHGGPTAETRAILDLSVQYWTSRGWAYVDVNYGGSTGLFLTLIV

SEQ ID NO: 48889 - protein, 62 aa, Zea mays
  Coding DNA Sequence Number=SeqID_7110
  Homolog annotation: Hit_ID=Q9SYI0; Match level="QueryCoverage=62%, HitCoverage=7%, E-value=7e-08, Identity=85%"; Hit description =Preprotein translocase secA subunit, chloroplast precursor
MAVKKWGEKSLTELEAEKRLSYSCEKEQSAMNHAELTIIEGDMKRAFDRKIESDRREGYKPH

SEQ ID NO: 48890 - protein, 845 aa, Zea mays
  Coding DNA Sequence Number=SeqID_7111
  Gene Ontology: Mol. function=nucleic acid binding; Cellular component= cytoplasm; Biological process=DNA integration
  Homolog annotation: Hit_ID=Q9SDG8; Match level="QueryCoverage=98%, HitCoverage=91%, E-value=0.0, Identity=80%"; Hit description =Putative zwille protein
  Pfam annotation: Domain name=DUF1785; Domain location=161-213; Score =105.0; E_value=2.2e-28; Accession=PF08699.1; Description=Domain of unknown function (DUF1785)
  Pfam annotation: Domain name=PAZ; Domain location=214-348; Score =146.9; E_value=5.4e-41; Accession=PF02170.12; Description=PAZ domain
  Pfam annotation: Domain name=Piwi; Domain location=493-806; Score =446.3; E_value=4.1e-131; Accession=PF02171.8; Description=Piwi domain
  Pfam module annotation: Pfam domain module=DUF1785::PAZ::Piwi; Domain location=161-213::214-348::493-806
MARLMICLHHPLWLLVNLKYEDDTPVDRKGSGRKVIEKLQQTYAAELANKDFAYDGEKSLFTIGALPQVKMEFTVVDEDVSTGKTPANGSPGNDSPPGSDRKRVRRPYNTKTYKVELSFAAKIPMSAISQALRGQESEHTQEAIRVIDIILRQHSAKQGCLLVRQSFFHNNPSNFVDLGGGVVGCRGFHSSFRATQSGLSLNIDVSTTMIVKPGPVIDFLIANQKVNDPSMIDWAKAKRSLKNLRIKTSPANQEQKIVGLSDRPCREQLFTLKHKNGESEEITVFDYFVKNRGIKLEYSGDLPCINVGKPKRPTYFPVELCSLLPLQRYTKALSTLQRSSLVEKSRQKPQERMSVLSDVLQRSNYDAEPMLKACGITIARNFIEVDGRVLQPPKLKAGNGEDIFTRNGRWNFNNKKLIRASSVEKWAVVNFSARCNVRDLVRDLIKCGGMKGIMVDAPFAVFDENPSMRRSPAVRRVEDMFEQVKTKLPGAPKFLFIMPLTFTGPWKKKCLAEFGIVTQCVAPTRVNDQYLTNVLLKINAKLGGLNSLLQIETSPAIPLVSKVPTIILGMDVSHGSPGHSDIPSVAAVVSSREWPLISKYRASVRTQSPKMEMIDSLFKPRETDDDGLIRECLIDFYTSSGKRKPDQVIIFSTNLICVSDYRDGVSESQFNQVLNIELQQIIEACKFLDEKWNPKFTLIIAQKNHHTKFFIPGKPDNVPAGTVVDNKVCHPRNFDFYMCSHAGMIGTTRPTHYHILHDEIGFNPDDLQELVHSLSYVYQRSTTAISVVAPICYAHLAAAQVGQFIKFDEMSETSSSHGGHTSAGSVPVQELPRLHEKVRSSMFFC

SEQ ID NO: 48891 - protein, 322 aa, Zea mays
  Coding DNA Sequence Number=SeqID_7112
  Homolog annotation: Hit_ID=Q5JMU5; Match level="QueryCoverage=90%, HitCoverage=88%, E-value=2e-89, Identity=81%"; Hit description=Rho -GTPase-activating protein-like
MASGSRGGGGSDFSVVVVGSDAGAGAALLVPSDRHSWHDCLAEADACFSDLEERQVVRVQGTDRARRTIVRVVGKFFPGARIGHVFAPLTAAVARCELAGCNPTVTIDAADCGMRTNQLLFNGWLSVIASQTSLGVSVYMAFTSEFWFPAPAIDGERLKKYVFYKLRTELPVGPFCILYMHSTVQSDDNNPGVSILRTIYEELSPEYKERLQVFYFLHPGLRSRLAIATLGRLFLSGGLYWKIKYISRLEYLWGDIRKGEVEIPDFVIEHDKVLEHRPLTDYGIEPDPLHLADVPAEEVGYSLGRYEDKWTPEDRWYSGNYM

SEQ ID NO: 48892 - protein, 428 aa, Zea mays
  Coding DNA Sequence Number=SeqID_7113
  Gene Ontology: Mol. function=transcription factor activity; Cellular component=nucleus; Biological process=regulation of transcription
  Homolog annotation: Hit_ID=Q2QXZ6; Match level="QueryCoverage=86%, HitCoverage=83%, E-value=4e-78, Identity=41%"; Hit description=GRAS family transcription factor containing protein
  Pfam annotation: Domain name=GRAS; Domain location=5-332; Score =339.2; E_value=7.1e-99; Accession=PF03514.5; Description=GRAS family transcription factor
MPLHGSPAAAGAPTPPWLPRDLRSDERGLCLIHLLLNCAAAAAAGRLDAANAALEHIASLASPDGDAMQRVAAAFAEALARRALRAWPGLCRALLLPRAGPTPAELAAARRHFLDLCPFLRLAGAAANQSVLEAMESEKMVHVVDLGGADAVQWLELLHLLAARPEGPPHLRLTAVHEHREVLAQTAMVLTKEAERLDVPFQFNPIVSRLETLDVESLRVKTGEALAITCSLQLHCLLASDDDSAKDSCHQQSSGDKRQRSPESGVSPSTSRADAFLSALWGLSPKVVVVTEQEASHNAAALTERFVEVLNYYAALFDCLESAAPRGSVERARVERWHLAEEVKNIVACDGAERRERHERLDRWAARMEGNGFARVPLSYYSLLHARRAAQGLGCDGFKVREDKGAFFLCWQERAIFSVSAWRGRRFD

SEQ ID NO: 48893 - protein, 257 aa, Zea mays
  Coding DNA Sequence Number=SeqID_7114
  Homolog annotation: Hit_ID=UPI00001C156E; Match level="QueryCoverage =24%, HitCoverage=33%, E-value=1e-07, Identity=40%"; Hit description =ring finger protein 13 isoform 3
  Pfam annotation: Domain name=zf-C3HC4; Domain location=211-253; Score= 46.4; E_value=9.5e-11; Accession=PF00097.15; Description=Zinc finger, C3HC4 type (RING finger)
MGLGRAGRSGSDWLRNEDNVACKGGAMTFSKSLLKKAHELAVLCNDERLTTLFLTAQRQLKQTGNIPPEALPPSPSLFGCLVKNNVGMAKTILAIVAINSLLVPLAAATDHDSYNAVPAPAPVPSKFATAAAAPTRYAIDEDKNKEKKSILTIVLVVAIAGLGLTAPLVAIVLYERSRGRQQDRHQHRGQAARKITVVRFHSDDEPAGDDCSICLDPYADRDRVGLLPCRHRFHAVCIRKWIVDGVSSTCPTCREVV

SEQ ID NO: 48894 - protein, 49 aa, Zea mays
  Coding DNA Sequence Number=SeqID_7115
MAWPRPPARASFPLGGDEEDGYDYAYGNGKEEGVEADLQELQDVDEFED

SEQ ID NO: 48895 - protein, 192 aa, Zea mays
  Coding DNA Sequence Number=SeqID_7116
MPLQLCADGGYQLRIRSLEGTPNYGPPQGKGRDQSSVRALTRRRARLLRGPRKRDVDKSGVCRTAVECDERSEHKSALARAFSTRLWVVYFLSRRRRGRRPPASQVVTRHSGAEEDPKDSRFVLARSRRAGPSSLLCVGASQPARSGGPRLGERRIFGRFDSARLTAPGYWTTKRWKLLIWTGRGPAARKSG

SEQ ID NO: 48896 - protein, 46 aa, Zea mays
  Coding DNA Sequence Number=SeqID_7117
MEYKLKSCSIQAHKGDNVIVDYPESGTCTSTIEHCNILKNAITIGF

SEQ ID NO: 48897 - protein, 90 aa, Zea mays
  Coding DNA Sequence Number=SeqID_7118
MVDPCPQIPSWPLQPPTNATVPVDIAPNSLIMPRIPCQHPHPVATNHIPSELVHTPAISSFPYIPTPPSLERKEDPKEKELATLPERKEI

SEQ ID NO: 48898 - protein, 111 aa, Zea mays
  Coding DNA Sequence Number=SeqID_7119
MRPQPDARGCRPMWPRAGRAPGHCKDRQLLRIDPTKAGFAIALSGGYGLFGWSSVCSSAQTTSSSIKGQRPLPWGKSKRASLMYVLWATGRPKTGDECTCAARDRRIDDNR

SEQ ID NO: 48899 - protein, 289 aa, Zea mays
  Coding DNA Sequence Number=SeqID_7120
  Gene Ontology: Cellular component=extracellular region; Biological process=sexual reproduction
  Homolog annotation: Hit_ID=Q94KT0; Match level="QueryCoverage=92%, HitCoverage=93%, E-value=3e-93, Identity=61%"; Hit description=Beta -expansin 4 precursor
  Pfam annotation: Domain name=DPBB_1; Domain location=98-180; Score =89.2; E_value=1.3e-23; Accession=PF03330.8; Description=Rare lipoprotein A (RlpA)-like double
  Pfam annotation: Domain name=Pollen_allerg_1; Domain location=192 -273; Score=94.6; E_value=3.1e-25; Accession=PF01357.11; Description =Pollen allergen
  Pfam module annotation: Pfam domain module=DPBB_1::Pollen_allerg_1; Domain location=98-180::192-273
  Subcellular localization annotation: CTP_CleavageSite=95; ConfidenceScore=5.47e-01
MATLSTSLLAAVVVLALLVSPIACSRKPRPKTKPISHRQAPLPARTSHKLTTATKSPPTTPHHPPPTMVPTAGCQALVPRGACGYQTAVGKQSFNSMIAVESALLYRGGEACDACYEVKCTSNAACSSKPVTIVITDLSPGGLFHREVAHFDMSGTVMGTMAKPDMGDKVRAGGVVRIQYRRVPCKYPGVNVAFKVDQGANPFYFNVLIEFEDADGNLNTVDLMLADNREWTPMAHNWGATWCLNNGRRLRAPFGLRLTSDSGRVLAPNNAIPVAWKLGKTYCSLVNYP

SEQ ID NO: 48900 - protein, 92 aa, Zea mays
  Coding DNA Sequence Number=SeqID_7121
MAMKGEEWSRNAPDDLSIVLSNVTTEARQENTKLVELQHVVIRDENTCMRDILKQAVAKASTVRDSLELTRVENACLNRAITDKESAMQSLR

SEQ ID NO: 48901 - protein, 344 aa, Zea mays
  Coding DNA Sequence Number=SeqID_7122
  Gene Ontology: Mol. function=protein dimerization activity; Cellular component=nucleus; Biological process=regulation of transcription, DNA-dependent
  Homolog annotation: Hit_ID=Q6AVM5; Match level="QueryCoverage=98%, HitCoverage=95%, E-value=1e-102, Identity=61%"; Hit description =Putative ABA-responsive element-binding protein 3
  Pfam annotation: Domain name=bZIP_1; Domain location=250-308; Score =45.7; E_value=1.6e-10; Accession=PF00170.11; Description=bZIP transcription factor
  Pfam annotation: Domain name=bZIP_2; Domain location=250-305; Score =48.7; E_value=2e-11; Accession=PF07716.5; Description=Basic region leucine zipper
  Pfam module annotation: Pfam domain module=bZIP_1::bZIP_2; Domain location=250-308::250-305
MSSQTGGGKESDAGPGQHRQMQSLARQGSLYNLTLDEVQNHLGEPLLSMNFDELLKSVFPDGVDSDGAVTGKPDRTSSLQRQGSILMPPQLSKKTVDEVWKGIQGGPETSTVVDGLQRRERHPTLGEMTLEDFLVKAGVVTEGLVKDSADFPSNMDTAGSSVVVAAASSLNPGAQWLQQYQQQVLGSQQLSLAGSYMASQLRPQPLSIATGATLDSIYSDDQITSPSFGALSDPQTPGRKRGALGEVVDKVVERRQKRMIKNRESAARSRARKQAYTNELENKVFRLEEENKRLKKQQVDSLANIAFLLGSFTSPYFQELDEILSSAPPPEPKYQLRRTGSAAF

SEQ ID NO: 48902 - protein, 230 aa, Zea mays
  Coding DNA Sequence Number=SeqID_7123
  Homolog annotation: Hit_ID=Q6L3H1; Match level="QueryCoverage=51%, HitCoverage=31%, E-value=1e-09, Identity=30%"; Hit description =Leucine zipper protein, putative
MAEADYEGWDKGYISKLKRAQRAVKQIAGGDDSMDEQEDETQENVWGKGKNAYYAPGEQSGDDEMDYEEAQRIQKNKEKRLSMKDFGLEDGESDEEGNATKVSNHESKMKEDFVVLSGDEKMDVLYRETKNLSTRGGGRMERGGVLPWEHPSSSGAENHNELGGVARADNGGMRACVRPAGSGGDGPGMRTDCQQMECGRSRYLRLARRLVAAAKCACGSGSSDRDLANE

SEQ ID NO: 48903 - protein, 35 aa, Zea mays
  Coding DNA Sequence Number=SeqID_7124
MALVRLGCPHWRTGNTTGKDAVESILLFVKGYKPL

SEQ ID NO: 48904 - protein, 400 aa, Zea mays
  Coding DNA Sequence Number=SeqID_7125
  Gene Ontology: Mol. function=protein binding; Cellular component =endoplasmic reticulum; Biological process=ER to Golgi vesicle -mediated transport
  Homolog annotation: Hit_ID=Q10M68; Match level="QueryCoverage=98%, HitCoverage=98%, E-value=1e-150, Identity=63%"; Hit description =Serologically defined breast cancer antigen NY-BR-84, putative, expressed
  Pfam annotation: Domain name=DUF1692; Domain location=178-396; Score =349.1; E_value=7.5e-102; Accession=PF07970.2; Description=Protein of unknown function (DUF1692)
MDAFLHRLKRLDAYPKVNEDFYKRTLSGGIVTLVAAVVMLLLFISETRSYFYSSTETKLVVDTSRGERLRVNFDITFPSIPCTLLSVDTTDISGEQHHDIRHDIEKRRLNSHGNVIEARKEGIGGAKVERPLQKHGGRLDKGEQYCGTCYGAEESDEQCCNSCEEVREAYKKKGWALTNPDLIDQCAREDFIDRVKTQQDEGCNVLGFLDVSKVAGNFHFAPGKGFYESNIDVPELSLLEGGFNISHKINKLSFGTEFPGVVNPLDGAQWTQPASDGTYQYFIKLYGLMVHKKLTEFPIKVVPTIYTDIRGRGIHSNQFSVTEHFRDGNVRPKSQPGVFFFYDFSPIKVIFTEENRSLLHYLTNLCAIVGGVFTVSGIIDSFIYHGQKALKKKMELGKYR

SEQ ID NO: 48905 - protein, 389 aa, Zea mays
  Coding DNA Sequence Number=SeqID_7126
  Gene Ontology: Biological process=heat acclimation
  Homolog annotation: Hit_ID=Q10M69; Match level="QueryCoverage=82%, HitCoverage=90%, E-value=1e-96, Identity=55%"; Hit description=F-box domain containing protein, expressed
  Subcellular localization annotation: CTP_CleavageSite=34; ConfidenceScore=5.34e-01
MTSNSKALSPVLKAASDGVRKRRKKHSNAASALHASRVESTRDSCHLGGPAFPGNLGGRFASLRGRKVEDVRSLGRCYAVSKRLCGLVSLVHDVYVKIDRVVAVDGDAEGTLNLSSPKPRSIFSHFLKLMLFTIIKPFHNMRSPNGTARPLFPQLSQHSPAQVLRNFTHVRNLRIELPSGDVGTEEGVLLKWRAEYGSTLENCVILGGTRVDRKPVGGEHEPALEDNGSMPESFYTNGGLKLRVVWTISSLIAASTRHYLLRSIINGHPTLQSLVLTDADGQGTLCMGAKQLEEFRENQLSTSACSNRTQVPACNMKLKYAPYVELPGGMALQGATLVAIKPSPEGSNGSHPNRKEAEGFVFGAFDGPFKAAVKALMKRRTYLLEMNGF

SEQ ID NO: 48906 - protein, 436 aa, Zea mays
  Coding DNA Sequence Number=SeqID_7127
  Gene Ontology: Mol. function=metal ion binding; Biological process =cell redox homeostasis
  Homolog annotation: Hit_ID=Q1S8X5; Match level="QueryCoverage=67%, HitCoverage=98%, E-value=5e-49, Identity=35%"; Hit description=Zinc finger, RING-type; RINGv
  Pfam annotation: Domain name=zf-C3HC4; Domain location=319-359; Score= 38.9; E_value=1.7e-08; Accession=PF00097.15; Description=Zinc finger, C3HC4 type (RING finger)
DELRDNELLVFANKQDVPNAMNAAEITDISLACTPCASGTAELKVEWSTSDRRQTQPPGSVRWIGTGRTASRTRSMPCCAVLYTPEISSDVGAATAMQESALNPRLVDTFLCVSLSVQAGRVWRMTEAAVNTRYWCHGCEKVIEEAMVGEDIKCPFCGGGFIEEMAGEDSEGLQLEREWGTPPGDSEDDDDDDIAHEFEGFIRRHGRASALRRVLDSIQDDLRADRERDNSVLINAFNQALASQGSALLDADEARDGRGGSSNSNDDGLLEEYDVLGAGLSLLLQHLAENDPNRYGTPPAKREAVEALPTVQIAEAVSCSVCLDDLELGSPAKQMPCGHRFHSSCILPWLELHSSCPVCRFELPSEETKDLNEPSDVHRRTESTRENDSESGNSAWPLVPWFFSGLFSVPEPSHTDRGTLTTDQQSPSTNPNAGGN

SEQ ID NO: 48907 - protein, 436 aa, Zea mays
  Coding DNA Sequence Number=SeqID_7128
  Gene Ontology: Mol. function=lyase activity
  Homolog annotation: Hit_ID=Q8GVM3; Match level="QueryCoverage=92%, HitCoverage=84%, E-value=2e-52, Identity=36%"; Hit description =Putative ribosomal RNA apurinic site specific lyase
  Pfam annotation: Domain name=F-box; Domain location=22-69; Score =31.6; E_value=2.7e-06; Accession=PF00646.23; Description=F-box domain
  Pfam annotation: Domain name=FBD; Domain location=361-411; Score=5.2; E_value=0.065; Accession=PF08387.1; Description=FBD
  Pfam module annotation: Pfam domain module=F-box::FBD; Domain location=22-69::361-411
MGIGVVTRSKRRRLDEEQRLADRISSLPDDVLGEIVSLLPTRAGARTQVLSSRWRHIWRSAPLNMDLHPDGPEWRHMPVEQIRRVLSAHPGPGRRLSVPSRFGYLHWMDGWLRSAAALGPRQPPGARTELTQPSSSSLVGLAHAAASAAIGAPLLVHPPRRLLPRLRVSDQCQGPRPSPQPVRLPRLQQLTLSGVTISEGSLHAMLAGAPALRSLLLLDSNGFARLQIASCSIENIGVRSRCRGAKLQHLVLEDTPSLKRLLLFEGTNHMDISVVSAPRLDVFGKLCDDATKLKYSSATTDLQGSPTVSVLHSVKLLALSSVRISLHALIDLLKCVPHLEKLYIEIWPVYQASSVCVRNGSYHKYRKHIGTLCVRLRRVVLGGYLGSKPHVNVAKFFVSIARALESMRLESWVIISKAWLARQHRLHAQQQEEGVV

SEQ ID NO: 48908 - protein, 304 aa, Zea mays
  Coding DNA Sequence Number=SeqID_7129
  Gene Ontology: Mol. function=metal ion binding; Cellular component =membrane; Biological process=protein transport
  Homolog annotation: Hit_ID=Q8LR61; Match level="QueryCoverage=85%, HitCoverage=60%, E-value=2e-72, Identity=69%"; Hit description =Putative WD repeat domain 45
MATLASVPTPPNPNPVSGDLPSLLLQQQEEEEVSEPVPETALTPLTTSIDPTPSSGKESESDDSLSVWSTPSSAPTHVLAPSPAAKDILHISFNQDYGCFAAGTKSGFCIYNCDPFREIFRRDLTAEGGISVGARGGGIGVEMLFRCNILALVGGGDNPHYPPNKVMIWDDHQSRCIGELSFRSPVRGVRLRRERIIVVLENKIFVYNFTDLKLLYQIDTLSNPKGLCAVSQQPGSIVLVCPGAQKGLVRWNTIRQGRPSLSMHTLPASRALRCRGMGGSLRLLASRGLLLESTMQLKAISCRK

SEQ ID NO: 48909 - protein, 157 aa, Zea mays
  Coding DNA Sequence Number=SeqID_7130
MSIRISEIEAMNSQQDDRLAALEVEIKQLKENHEAETNKLRIEAAEAKFDFKLEKDKKEDVDEKDHLDKLVGNFWSLKDDCFHVATRCCQELERTFSSVGARSQERNFIDGDIVGAMRWIYGKVCTFKAYCRHRRQLRRSRSSEKLYNRRSLKEPYT

SEQ ID NO: 48910 - protein, 191 aa, Zea mays
  Coding DNA Sequence Number=SeqID_7131
MELHHLNVRNGVILEDSSEEILATPTPLLESHTFATGASSSAPPVPISQVPALGGDDPDDSGNDGDDDDDAEEEENNNEDANNEPEDNFVGMWPVTEHYTSMFELNVRDGTLLKLAAGCVLHNMVYRHLPLHPHGESQTGVILGEAGEDRLNTLVGVVAGLNTDLDSATLDFSRVHEELEDAHERIVALEA

SEQ ID NO: 48911 - protein, 803 aa, Zea mays
  Coding DNA Sequence Number=SeqID_7132
  Gene Ontology: Mol. function=metal ion binding; Biological process =RNA-dependent DNA replication
  Homolog annotation: Hit_ID=Q2QZM2; Match level="QueryCoverage=81%, HitCoverage=88%, E-value=3e-44, Identity=28%"; Hit description =Expressed protein
  Pfam annotation: Domain name=DUF594; Domain location=730-791; Score =59.2; E_value=1.3e-14; Accession=PF04578.4; Description=Protein of unknown function, DUF594
MRHIMTCPDTINSYVGNLTESYTDKSNEPNMVAASVMMFALAGLFFNLNLFSGISDISAILDPKVRLFLSSALSLLLPVMSYLFSEAKNNAGNTTRVGTVHVADLSLRAGIILAWMLLVELLRKKVDEIRMRGYSGTVQRAGRVVWLGTLVFFNIKSTGRKAVFAILWILCATRVLQRIAFTEFGKRSYAHGKNARLISSYMAQILEQEEPRASVVHGDAAAGDEVLKSCNYIVMGEDTLVDIEPTADGYKLDEQASGSPPRYDDGGVVKWVRENDSIVTVGKVWELDDSDKFFTSQNQIQRLKRICLSFALFKLLRRRFEHLPALSKQEVDDSRDLLLKGLYNNGETSCSAEAMFQVMNDEVVFINEYYHSVVPVVLASPFFLVLNYFLLNIVVAILCVMTVILCANGDVPYAFQSIAKDNYTLDSGVFKIAICLLQRVGTPSNFFSVVDLSITILLFVIYLYEEMWEFFVFLLSNWFMVSLLYNYISKPRWLRHNSFRGTMFSVGFSVIMWLRSKMTQPSLTLKQFTVLNVRLPLKLPLFPAFTGLAVEKKPVPNSVMRSVIDYLAKRGHGAPNYDYDLDRGRSALRRNGVFDKLSWACESDSVAETILTWHIATSIMEVKCRPRTTAGSSAAEETTSSSRVAVRLSKYCAYLVAFHPELLPENPEKVERVFEGAKEELKGMIGCRDYYFSPERERVRKLMADGTTTLTPGDGCSSRVVRDGVRLAGKLLAIDDHNNNQWQVLADVWTELIIYLAPSSEEERVMGHEDALVQGGEFITVLWALTTHIGVSRPQQPASRPPC

SEQ ID NO: 48912 - protein, 55 aa, Zea mays
  Coding DNA Sequence Number=SeqID_7133
MALAGRNWLAGVRRGLFLVVDLGGNEIDAFGFGSGNGEDEAVEGDHQEFQDYDEF

SEQ ID NO: 48913 - protein, 101 aa, Zea mays
  Coding DNA Sequence Number=SeqID_7134
MAPLMTINGGETAPLKRWRTGEAASRRLGGMAGVEAAARPGRGCWLPAGAPRREGEARREGERVGARARVGEWRDQGAAAAVWGEGQGAAGYRKMAASIFI

SEQ ID NO: 48914 - protein, 95 aa, Zea mays
  Coding DNA Sequence Number=SeqID_7135
MPQRKDASATASDDPAGELSAEDRLRATMEIEAGSLRRKGLGEIRCMRVVATASGRSRLPAWPHARASLARREGLRDLHDDVMRDVMPMSLSARE

SEQ ID NO: 48915 - protein, 81 aa, Zea mays
  Coding DNA Sequence Number=SeqID_7136
MEERDHGGAISSPSLSLSPLLVFFQWWLFDLSQFMAKGEAASTLIPRVVDVDVRGCKGVHLMQRIFFPTMAVGGLDPQFHF

SEQ ID NO: 48916 - protein, 126 aa, Zea mays
  Coding DNA Sequence Number=SeqID_7137
  Subcellular localization annotation: CTP_CleavageSite=85; ConfidenceScore=5.41e-01
MEHSLPAEPSLFLPLPSSLSSRALLPGRDLATGARPHRLARTRARRSNRLRPPRPPRPSSLPLLCLRDRPPTPSLPASELCSCLRAVRRSPSVPESVKLAHAAPRQPCPRRSPSSVHPRLKRTKTI

SEQ ID NO: 48917 - protein, 90 aa, Zea mays
  Coding DNA Sequence Number=SeqID_7138
MASSVERQRWRRAPRLMRWQWARGIVGAAVRASEKIFGSLTALRRAGRKPAAAPRPCRCLDTGHPAKPPRRRLTRSPSLQWSRFSPIDGH

SEQ ID NO: 48918 - protein, 371 aa, Zea mays
  Coding DNA Sequence Number=SeqID_7139
  Homolog annotation: Hit_ID=Q6Z9M4; Match level="QueryCoverage=45%, HitCoverage=25%, E-value=2e-15, Identity=30%"; Hit description =Hydroxyproline-rich glycoprotein-like
MNTKWAKKGLDLTKRQEEAAKKAIGLPALSEEVGERTTNWIRAQKPKETDTGLSFDDPLLEEVTKSFFEAAAKQQEGTFKPQRERDIFTAGLGNPEHPGHMSTQSPQMQIVPTTSQPLGTQYPSSVASTATKGREVSKVVQGYEDDMLEISGPEGIEKLGQAIKNFILWPRRDVQLSDPPPSSLAIPLTEETSPILPPLDPPSPPNPLPPASPSNFPPFPLPKETEQTRSEPQKRAGVRKLVSPIQATKQKSARTTKFLSGIARTRTSRIVDLAEYEKSAEKAEIRTEMIRKPTREDYRDVPKTYVPGRPLLSWDKLKKVPARIKRLHGWYMRASSVGIDTINVSIPPAAFIGEREMAIVTFEDMWLMMNL

SEQ ID NO: 48919 - protein, 163 aa, Zea mays
  Coding DNA Sequence Number=SeqID_7140
MSEAEVEMTTGNSPSGDTPPSPSPWGRKIPAPVPVKPRGDHFLPIPVPDGFHTGNLSPQIFTVNSFASRKNRHHQLKVGARGRGRQSCTASVIDTQKSSVNSLMVAVEAPPKPCAAPWQSSACSTSVRWDGTRQGLGVRQKCAGGWGLVWSPGGGYEGKKMRD

SEQ ID NO: 48920 - protein, 155 aa, Zea mays
  Coding DNA Sequence Number=SeqID_7141
  Gene Ontology: Mol. function=protein serine/threonine kinase activity; Biological process=protein amino acid phosphorylation
  Homolog annotation: Hit_ID=Q5SN53; Match level="QueryCoverage=46%, HitCoverage=13%, E-value=6e-24, Identity=72%"; Hit description =Mitogen-activated protein kinase 8
MPQRKDASATASDDPAGELSAEDRLRATMEIEAGSLRRKGLGEIRCMRVVATASGRSRLPAWPHARASLARREGLRDLHDDALADPYFKGLAEVEREPSCQPITKVEFEFERTKVTKEGVKELILREILENHMNGTEKTNFIYPRYLFASDKNGA

SEQ ID NO: 48921 - protein, 684 aa, Zea mays
  Coding DNA Sequence Number=SeqID_7142
  Gene Ontology: Mol. function=ribonuclease H activity; Cellular component=intracellular; Biological process=DNA integration
  Homolog annotation: Hit_ID=UPI00004C1731; Match level="QueryCoverage =94%, HitCoverage=49%, E-value=0.0, Identity=76%"; Hit description =UPI00004C1731 related cluster
  Pfam annotation: Domain name=RnaseH; Domain location=334-449; Score= -26.2; E_value=0.016; Accession=PF00075.14; Description=RNase H
  Pfam annotation: Domain name=rve; Domain location=476-624; Score =84.4; E_value=3.6e-22; Accession=PF00665.16; Description=Integrase core domain
  Pfam module annotation: Pfam domain module=RnaseH::rve; Domain location=334-449::476-624
MPGISRDVAEHSLDIRAGSRPYHALRPEECRRHIQLCMNHVFGDHIGKTVEAYVDDIVVKTRKARDLVSDLEIAFACLRAKSVKLNPKKCVFRVPRGMLLGFIVSERGIEAIPEKIAAITNMGPIKDLKGVQRVMGCLAALSRFISRLSEKGLPLYRLLRKTERFTWTPEAEEALCNLKALITNTPILVPPTKGEALLLYVAATTQVVSAAIVVERREEGHASPVQRPVYFISEVLSKTKTRYPQIEKLLYAVVLARCKLRHFFESHPVTVVSSFPLGEIIQSKEASGRIGKWAVELMGETLSFAPQKAIKSQILADFLAGWTDTQLPTDPTQAELWTMYFDGSLMKIGAGAGSLFISPLRVHLRYVIRLHFAASNNVAEYEALVNGLRVAIELGVRRLDVRGDSQLIIDQVMKNSSCHDPRMEAYCEEVRRLEDRQGFYWPTAVADATEIVRSCKGCQFYTKQTHLPAQALQTIPITWSFAVWGLDLVGPLQKAPRGFTHLLVAIDKFSKWIEAVAFFTNIIHRFGVPNSIITDHGTQFMGRKFLDFCNDYHIRVDWSAVAHPRTNGQVEHANGMILQGLKPRIYNELKKFGKRWLKELSSVVLSLRTTPSRATRFTPFFLVYGAKAILPTDLEYGSPRLKAYSDQSNQIGRENSLDQLEEARDVALLHSARYQQSLRCYHAR

SEQ ID NO: 48922 - protein, 243 aa, Zea mays
  Coding DNA Sequence Number=SeqID_7143
  Subcellular localization annotation: CTP_CleavageSite=93; ConfidenceScore=5.24e-01
MPTSANRSDPRTCAFNAVCTATYPTAGAKATPYPGLGLGRNLRLARARPQPTAPIGKLTCSTANPAEARRSATAFAPLARGGTSRPPSLSLSPAETETETEQPQPCHGQHFSRSRHFWVEGRRRLPCEGPVWCHPHAENNDGRTRGPHDKPTDSSSRGLRGHHLRSTLDLLATSPTSEHMNSEEEDSMDFGLDFSGLRNADSTRHFLFACDYYLSDGSDDYGSDDEGYDPTRECFHVEHEHEG

SEQ ID NO: 48923 - protein, 228 aa, Zea mays
  Coding DNA Sequence Number=SeqID_7144
MGSEPSTVQWFKGWPLGGVRQPPQSTESVMNMGTSIHDRGSGYNPEGVPASAHRSDPRTCAFNAVCTATCPTAGAKATPDPGLGLGRNPRLARARPRPTAPTGKLGCSTANPAKGMGATETTRPVSLSKMTTGPDYHTLFRHIERCFNYSDSTPSDTSHSHLCTRRARGSDIRYRDRPCRYRARMRLRPAMPLRGSETPPLTTKIAQQTSVHMGLLATIKEKPRAFYR

SEQ ID NO: 48924 - protein, 111 aa, Zea mays
  Coding DNA Sequence Number=SeqID_7145
MSVGLWNQPQYHDTYPDRGMASLLGAELFGPLDLAVAVWGRSAARFIATSTLDARGAPPAEAEGSIAPSVGICTLGRGADASSLGASASSPPDGWIGTPVKGGSDRGLTSG

SEQ ID NO: 48925 - protein, 74 aa, Zea mays
  Coding DNA Sequence Number=SeqID_7146
MVLVMTGAGKWYSFRLEKVVSIATTAQAKMKLWKETSKSFKTTTSSRRGLAATPSRLPVKAAFIYVSFPHFDLL

SEQ ID NO: 48926 - protein, 242 aa, Zea mays
  Coding DNA Sequence Number=SeqID_7147
  Homolog annotation: Hit_ID=Q6QP51; Match level="QueryCoverage=51%, HitCoverage=51%, E-value=2e-16, Identity=56%"; Hit description =Putative growth-regulating factor 1
MQVACNCTTGTHPFDFDASSMEAQAHTTCNRRADYYVRKTAPPLAPMPRLVDCGTGAATRGNPVHGPTVPTEHIGHGPVNRGRRDRERGYPKRDPSPRRKRAPSPPTDQGFEGWSLGRENSAACPTPTAVPPARARLTTAKSSLRRNRKLRLARPQGSAPASASEGGLCLVRPQGSASTSTSEDGLCPPDPRARPQPRPRRMVSASPDPRARPQPRPRRSLRLARPWARTDHATGGSSLPYP

SEQ ID NO: 48927 - protein, 86 aa, Zea mays
  Coding DNA Sequence Number=SeqID_7148
MADVGALVRCPSSPHRSEILTILRDRGKALVAAAEAVSKTLHVIRSAFKDVENCWGPSSSEAPKLRARKLRHDSREGNRLKGEKAI

SEQ ID NO: 48928 - protein, 163 aa, Zea mays
  Coding DNA Sequence Number=SeqID_7149
MGRGRRGHGWPHHADGKRKRALSPPSEDFGDSKLSGLDESGVSSDEADSSDSSEEWSGSDGDDEGDNSSSGDDDKGDDGKNNGDDGSSSDDRKGNGGDSSSHGGRGDDGDDSSDSGKGDGGDGSSDSGNGDGDGSGKGDDSNGDGDSGRGGSGGKASGIMPLV

SEQ ID NO: 48929 - protein, 160 aa, Zea mays
  Coding DNA Sequence Number=SeqID_7150
MNVNEREWFDRQVTTRFGRGSGTSPASRGTGADDDDVDELRQWLLARGVGLQGAASGAGALGAGRRGRGAVLGVARRLEGKEAGRRGGSLGRAGALARMAGPRRLHGMARLGKKARAGPPASERRGGERKKPGGWHRERWERQPLVGRSQGRPARVRGWA

SEQ ID NO: 48930 - protein, 137 aa, Zea mays
  Coding DNA Sequence Number=SeqID_7151
MEEGFIGARRRSCNGYQRLRAPPPPTPGIGTCRLGRRAVLGSGGWRFVRLRRCRASAPRWSSTLQLLSRILDTYITSMLSQPLNMPPPKLRRDASPGTGSSRRRDAGESGRCVLLAEAAPENATTEGGGGDSSSRKA

SEQ ID NO: 48931 - protein, 336 aa, Zea mays
  Coding DNA Sequence Number=SeqID_7152
  Homolog annotation: Hit_ID=Q6QP51; Match level="QueryCoverage=50%, HitCoverage=82%, E-value=1e-16, Identity=44%"; Hit description =Putative growth-regulating factor 1
MQAACNRTKGAHSFDFDASSMEAQVHSSCNRRVGYYVRETAPPLTPVPRLLDCGTSAATRGTGKGDTPKGILLREGSGPRAPLLIRGSKAGPSEGFNSRLRALGLRAHYWSEVRRLAPRKGSTAALGHSGSAPTTDQGFVGWPPKGSTAASDTEREMTRGDNAACVAPTVVPLDRVRLTTAKSGLGRHRKLRLARPQGSAPVSASDDGLRLARPQGSDSASASEDDELRFARPQGSDLASAPEDDELRLARPQGLDSASALEDDELRLARPQGSDSALASDDGPCLARPGARTRPRPRKTDSTSTSEEPPPRPTQGSDRPRHRGGHHYPTEREMCP

SEQ ID NO: 48932 - protein, 355 aa, Zea mays
  Coding DNA Sequence Number=SeqID_7153
  Gene Ontology: Mol. function=DNA binding; Cellular component=nucleus; Biological process=regulation of transcription, DNA-dependent
  Homolog annotation: Hit_ID=O04110; Match level="QueryCoverage=75%, HitCoverage=96%, E-value=2e-76, Identity=56%"; Hit description=Myb factor
  Pfam annotation: Domain name=Myb_DNA-binding; Domain location=14-61; Score=43.7; E_value=6.2e-10; Accession=PF00249.21; Description=Myb -like DNA-binding domain
  Pfam annotation: Domain name=Myb_DNA-binding; Domain location=67-112; Score=47.0; E_value=6.4e-11; Accession=PF00249.21; Description=Myb -like DNA-binding domain
  Pfam module annotation: Pfam domain module=Myb_DNA-binding::Myb_DNA -binding; Domain location=14-61::67-112
MGRQPCCDKVGLKKGPWTAEEDQKLVTFLLINGQCCWRAVPKLAGLLRCGKSCRLRWTNYLRPDLKRGLLSEEEERTVIDLHAQLGNRWSKIASHLPGRTDNEIKNHWNTHIKKKLKKMGIDPVTHKPLHQPAPPPPLEEPAGSSGEEKQIVTAITSGYDDASFCTDDVPMALLLDDIDIVLPGDDVVSAQAAACFGTVYSPESSSSSSSSNSASAAASSGGTSSVDGEWLDWPPMMDWPEPMWQLEDVVTARKPWEFEDPFVTYQRIALSGVGGATAGGDGTGQPGLRRAGVAATGRLGWGRCGTALRQGLDGAAREGAGGGGTRRDIRSAAVGVSGDFLRATAGVSGGVGAIE

SEQ ID NO: 48933 - protein, 450 aa, Zea mays
  Coding DNA Sequence Number=SeqID_7154
  Gene Ontology: Mol. function=histamine receptor activity; Cellular component=integral to membrane; Biological process=G-protein coupled receptor protein signaling pathway
  Homolog annotation: Hit_ID=Q5VRQ2; Match level="QueryCoverage=88%, HitCoverage=89%, E-value=1e-129, Identity=55%"; Hit description =Putative hydroxymuconic semialdehyde hydrolase
  Pfam annotation: Domain name=Abhydrolase_1; Domain location=245-443; Score=37.9; E_value=3.4e-08; Accession=PF00561.10; Description =alphabeta hydrolase fold
  Pfam annotation: Domain name=PGAP1; Domain location=210-396; Score= -93.3; E_value=0.085; Accession=PF07819.3; Description=PGAP1-like protein
  Pfam module annotation: Pfam domain module=Abhydrolase_1::PGAP1; Domain location=245-443::210-396
MHIATCVWQEKAAPAGGMGGARVAGGGGGGEWGARAAAAAALGVAGRALNCAVSFVVFSALDVLDVVLCLAYKLADYAAEAEWRPCYCSAAADPRVAQQLPPKPKVVRLSAASPARLHLQLEDVSDTLYARPSLLADATRAGGDGVAPALTVSPAAIAALIREKTDRAPRQAPCWSDCDCKVCHAWSGTSPASLSHLYVHVQAPPAMPMAVETEDVVFIHGFISSSAFWTETVFPAFSPAARSRYRMFAVDLLGFGRSPKPAESLYTLREHVEMIERSVLRRYRLGSFHVVAHSLGSVLALALAVKYPAAVKSLTLLAPPYFPVPESEAESAAQYVMRRVRRGGVRSFLIEAFMCHTHNAAWHTLHNVVCGGAGRMGAYLDAVDRRLSCKVALFHGRDDELVPVGCTLAAGARVRRARVTVYERKDHITIVVGQERLFAAELEAIWSADQ

SEQ ID NO: 48934 - protein, 165 aa, Zea mays
  Coding DNA Sequence Number=SeqID_7155
MNNSKAQQSGVPIDNNDWNSGWGYKYLPTTTIQAIQALQLPHSILEQKNTLQNTIKASNPLQVPQSSQVIKSFTYSPSVGDRYPLGPLEGENPAWGHVPVAPQGHRVVDRAKIVVEMGRLREAMGSRPDYSQLGRDPVEVACFSRVRCPQTLGTARNGGAEFSSG

SEQ ID NO: 48935 - protein, 164 aa, Zea mays
  Coding DNA Sequence Number=SeqID_7156
  Gene Ontology: Mol. function=zinc ion binding; Biological process =ubiquitin cycle
  Homolog annotation: Hit_ID=Q10LI1; Match level="QueryCoverage=46%, HitCoverage=32%, E-value=2e-31, Identity=85%"; Hit description=CHY zinc finger family protein, expressed
  Subcellular localization annotation: CTP_CleavageSite=45; ConfidenceScore=5.61e-01
SRPPPAASAAHTTGRPRLRPPPPRLPTPRPPRPPSAADAPSPALSAAAAAAPGHACRPAPAPARCGTILLALFVCAGEQFHFDDCGICRVGGKENFFHCQTCGSCYSTTLRDRHCCIENSMKNNCPICYEGDVGAPLRPHHAPTVLPRDVEARQEVSQLSALTA

SEQ ID NO: 48936 - protein, 128 aa, Zea mays
  Coding DNA Sequence Number=SeqID_7157
  Homolog annotation: Hit_ID=Q6K675; Match level="QueryCoverage=93%, HitCoverage=8%, E-value=6e-51, Identity=88%"; Hit description =Putative streptococcal hemagglutinin
MGLRNGNAMDYLDHWAALQTEHSSSLSSATEALKASTLRLPVSGGAKADVLTVKNAVSSAVDIMQAMGSSVCHLLSKLQASHSLVTELSAVAAKESTLLNEYRELLATAAALQVQESSLRTQLIQETE

SEQ ID NO: 48937 - protein, 111 aa, Zea mays
  Coding DNA Sequence Number=SeqID_7158
MATEKGTQEQSRSSRCDKPGPNKQVPSGTLSEVASGSRIESVTSSPVCGPEPSPPGKPQEDFDPQRRPRLPHDRESAGVAVQAVLTSSNKMCMTLLADSNGFASLVPSLIG

SEQ ID NO: 48938 - protein, 111 aa, Zea mays
  Coding DNA Sequence Number=SeqID_7159
  Subcellular localization annotation: CTP_CleavageSite=22; ConfidenceScore=5.02e-01
MAGLHLHARQIGELMRRRPRRRSTARRCPVISRRRCVGDFFSPPAWPRAGFRLYIWYCFGVRSRVVQAVTELKGISDIQKFALWQVSYFQEMVPVTLHGSVGHNEAIQICY

SEQ ID NO: 48939 - protein, 538 aa, Zea mays
  Coding DNA Sequence Number=SeqID_7160
  Gene Ontology: Mol. function=oxidoreductase activity; Cellular component=chloroplast; Biological process=electron transport
  Homolog annotation: Hit_ID=Q6K689; Match level="QueryCoverage=89%, HitCoverage=87%, E-value=0.0, Identity=78%"; Hit description =Putative Rieske iron-sulfur protein Tic55
  Pfam annotation: Domain name=PaO; Domain location=292-382; Score =132.1; E_value=1.5e-36; Accession=PF08417.2; Description =Pheophorbide a oxygenase
  Pfam annotation: Domain name=Rieske; Domain location=87-189; Score =99.2; E_value=1.2e-26; Accession=PF00355.16; Description=Rieske [2Fe- 2S] domain
  Pfam module annotation: Pfam domain module=PaO::Rieske; Domain location=292-382::87-189
  Subcellular localization annotation: CTP_CleavageSite=50; ConfidenceScore=5.58e-01
MTTPSTAPAPLASLLRVSAAAVPVARRRPKSPAAAAAARWEGGGGRRRCRAAVVEEAGVLLPKEGEGEGEGEEAPDAAAGRYDWREEWYPLYLAKEVPDDAALPLTVFDRQLVLWRDAHGVLRCHEDRCPHRLAKLSEGQIVDGKLECLYHGWQFDGDGKCVKIPQLPEGAKIPRSACARNYEVRDSQGVVWVWMSDANPPDEGKLPWFEPYARAGFTDLSTVHELPYDHSILLENLMDPAHVPISHDRTDWTAKREDAQPLFFDVTERTPRGFAGYWGRTGTPHLRNLLRFEAPCVLTNTLEFADKDGREQCFSAHFLCRPAGQGKSMLLVRFGSTLRSPLAKVLPSWYFHQNACKVFEQDMGFLSSQNEVLLREKLPTRELYLNLRSSDTWVAEYRKWMDRAGHGMPYYFGHSTLSPPPVPAVVEQAPAGAVAGISASFPAKGGVGMVHAPNPTNRYFRHVVHCKGCRATVKKYTSLKTVFAALAAAALSAAILAATRQWKAVLVAASAVLAAASYACDAVLSLITTNFIRTHRRL

SEQ ID NO: 48940 - protein, 131 aa, Zea mays
  Coding DNA Sequence Number=SeqID_7161
MGDGDGDGARDRERESSHIYIGVANCRAAEAEVGGGERRTTHEACCIGVPGGEHGRELLLLSFAASSMWSLRPTDEAQRSVRASAGRLGGADADADASYSYQLACCASVARAGRDVIMFSMALTCPYGWLA

SEQ ID NO: 48941 - protein, 328 aa, Zea mays
  Coding DNA Sequence Number=SeqID_7162
  Gene Ontology: Mol. function=metal ion binding; Cellular component =membrane; Biological process=protein transport
  Homolog annotation: Hit_ID=Q6K9M2; Match level="QueryCoverage=99%, HitCoverage=100%, E-value=1e-137, Identity=67%"; Hit description =Transport protein-like
  Subcellular localization annotation: CTP_CleavageSite=12; ConfidenceScore=5.12e-01
MASSSSPSQVICASFNQDNSMFSVGTKDGFKIFDARNGRLCYEKSLGGFNIVEMLFGTNLLAIVGTGEQDRTFVYDLNSTTILDEIETVPNTKGLCAFAPNSEECYLALPASTSKGSALVYKASKPELICQIDAHLAPLAAMVFSLNGMYLATASEKGTMIRVHLVAQATKSHSFRRGTYPSTIYSLAFSPSVDLPDVLVATSSSGSLHMFFLDASRNARRQANTLFSSVIPGSVTDALDPANHHVIHNVVTADIKSCLAVHSVENSQNSSKFPSLKTVIYIVTHNGYFREYLIGTTKSNESSWLLEREFNLLDAYSGSPKQNELHID

SEQ ID NO: 48942 - protein, 108 aa, Zea mays
  Coding DNA Sequence Number=SeqID_7163
  Subcellular localization annotation: CTP_CleavageSite=19; ConfidenceScore=5.22e-01
MAQEYPPAPLFLRSPVKVLSKRRAGGQCRRPFRVPGVSLRGVALIRETWMNIVSHTNKPCCWSSPGCKSGFRGRNHADLSLDMLEPSCANATTGALLPQVIRVKFRRV

SEQ ID NO: 48943 - protein, 206 aa, Zea mays
  Coding DNA Sequence Number=SeqID_7164
  Homolog annotation: Hit_ID=Q6K683; Match level="QueryCoverage=28%, HitCoverage=7%, E-value=6e-22, Identity=86%"; Hit description =MutT/nudix protein-like
MNKSKIATAMLFATVTSYMEGSAFPKLLSVHRLLYALQGGVQMIALQAQSTIVRPENSLPRVRGIAGGDVAGANDVSLPRPQFLAISSALQQQLPGALAVDPHVHRSVVVSVPVHLRPEENEASERRNHTIRSKESNRYGRVRFGDGGVPGLGDSGLLPEALRSEDAESLLWCARCGGHQRCGPAALAAVSVGVGARKRNGVMVGN

SEQ ID NO: 48944 - protein, 530 aa, Zea mays
  Coding DNA Sequence Number=SeqID_7165
  Gene Ontology: Mol. function=nucleic acid binding; Cellular component= intracellular
  Homolog annotation: Hit_ID=Q6K687; Match level="QueryCoverage=94%, HitCoverage=94%, E-value=1e-169, Identity=64%"; Hit description=Zinc finger (CCCH-type) protein-like
  Pfam annotation: Domain name=G-patch; Domain location=335-379; Score =62.3; E_value=1.6e-15; Accession=PF01585.13; Description=G-patch domain
  Pfam annotation: Domain name=zf-CCCH; Domain location=165-190; Score =20.9; E_value=0.0023; Accession=PF00642.15; Description=Zinc finger C-x8-C-x5-C-x3-H type (and similar)
  Pfam module annotation: Pfam domain module=G-patch::zf-CCCH; Domain location=335-379::165-190
MAGEGEDEAAAIERQLEQQLQEQRSSLAAVDEALAADPSNADLLEVHEELLAAIKDAEEGLLHLKRSRLLKQVDEIFPDKESISQSPEVAIESLDPDDVEPEPLESHDFSVGSKCRFRHNNGRWYNGCIIGFEGSGDARISFLTPTSENMSPKLSEYEQEKNSKRDSQICKFFLQQRCRFGSNCRMSHDIERYTRLIQNLFSGIVMPSKALKRFTPTRWEQSLVGSSILATSGYNSGLWRRAELESWDDNLKIGQVVFQDDGSSASLPSDSLSVSEYADMSDEDEGSLSDEESEFSDDADQEDGSVHQGLGLLEFTNFSGIQTDTMIFAKWEHHTRGVASKMMAKMGYREGMGLGVSGQGMLDPIPVKVLPPKQSLDHALASSEADGGSGKKRSRGGKRKREKKFAEQARAAKAEEAERSVFNFINSHLVSQEGSTTKVRKGSSVETNGLAKKEDRRSLVAYGEEVKELRIRVEKLEEMKNRNCKDKAFFEAASRKLEETRKALADAEATHASATSAVTRKEKEKKWLKF

SEQ ID NO: 48945 - protein, 340 aa, Zea mays
  Coding DNA Sequence Number=SeqID_7166
  Gene Ontology: Mol. function=protein binding; Cellular component =membrane; Biological process=induction of apoptosis
  Homolog annotation: Hit_ID=Q6K688; Match level="QueryCoverage=90%, HitCoverage=91%, E-value=1e-103, Identity=83%"; Hit description =Putative tumor differentially expressed protein 1
  Pfam annotation: Domain name=Serinc; Domain location=8-332; Score =401.1; E_value=1.6e-117; Accession=PF03348.6; Description=Serine incorporator (Serinc)
MWAASCLASCCAACACEACRTAVGSIGRRSARIAYCGLFALSLFASWALREVAAPLLQSIPWINHFHKTPDREWFETDAVLRVSLGNFLFFTILAVIMAGIKDQKDPRDKIHHGGWMAKIFCWVIIVFLMFFVPNGVVSFYESISKFGSGLFLLVQVVLLLDFVHGWNENWVAKDEQFWYMALLVVSVVCYIATFCFSGLLFHWFTPSGHDCGLNLFFIVFTLILVFAFAIVALHPKINGSLLPASVIGTDKPLLPFSKADEQEDKKDVPRPVTYSYSFFHLIFSLASMYSAMLLTGWSTSVGESGKLVDVGWPSVWVRIATQWATAGNSKFNHGIVPLS

SEQ ID NO: 48946 - protein, 298 aa, Zea mays
  Coding DNA Sequence Number=SeqID_7167
MAVSIAAYWRAGRSAALLAAPTAAAGTVPASRLHLRCTRWGTDTGPPPHVRSIFPQRDGEGDEGTAACLPARGESAPFDAAAGSAPGDSPWPRRGARGQDSHSRRLAALPRISRRPISVRVDWTLQRKPPQPPLLLEKREGAAQRGQPKVDSAPWARRPPAEEERQLSARKGGGLVVLAVVVVVVVEDPLSRQALCGKHKGGRRRRGRRRRASPPHKAKRLQKEESFRLGRESEASCVSCSSPGAVSETVAMALQEQEADGDEGGEEDDEGEDERMTGYGVGELISACPEACCPLAAV

SEQ ID NO: 48947 - protein, 125 aa, Zea mays
  Coding DNA Sequence Number=SeqID_7168
MPVVEDVPGVTNAFDAVLYVDTRRSRLGGLRPLLQDEVVCSMTLRAGVLPPIDLGLLCCSPLHQVVEVLREQIKSRMEARRASRYRVHRRRSRIPRNPKPRVKKKTCKVKVDRVKKGYGASRSTI

SEQ ID NO: 48948 - protein, 194 aa, Zea mays
  Coding DNA Sequence Number=SeqID_7169
MGIPHDVFRQDDIVDRDSMSGRDPTVRLARRTIGGPLGSPWNISMLIRTHGISISYKAPRLKPTFRGSNGWGKNGKGKRGEGTKRRRPLTPASEDFGDSEFSKEQLSFEDERLEGFDDSDESSKESTDDDDDEDSGKVGGDGGGDVAASRATMEAVATGAATAAMAKVAATATTVGAATMAVETRATILVARHR

SEQ ID NO: 48949 - protein, 103 aa, Zea mays
  Coding DNA Sequence Number=SeqID_7170
MAAGVAMAHCGAEASPARATARGAAKGPCGLYPGAISVMANQSSCNLYMYEPRLRLSVNLIEFGSRCSAPVTFQTSKWGAGPRTAAVAALGNGTFISISIHVD

SEQ ID NO: 48950 - protein, 246 aa, Zea mays
  Coding DNA Sequence Number=SeqID_7171
  Gene Ontology: Mol. function=acetyl-CoA C-acyltransferase activity; Cellular component=membrane; Biological process=poly-hydroxybutyrate biosynthetic process
  Homolog annotation: Hit_ID=Q94CI5; Match level="QueryCoverage=49%, HitCoverage=21%, E-value=7e-34, Identity=64%"; Hit description =Protein kinase AtSIK
  Pfam annotation: Domain name=Thiolase_C; Domain location=96-213; Score=83.0; E_value=9.3e-22; Accession=PF02803.8; Description =Thiolase, C-terminal domain
MAWMTAVSAPVVLKSSQVGGLCAPSDSNERMLVYERLYHGSLDKLLFGRSDGHFMDWSKRLKVALGAARGLAFLHDEGPFQAMYNEFSTLNIQIDKGFTAKLSGYGCVGFNTEEISNAPVICFLRSAANHSVETLEKGLLTQFVYCCNKSGLDRSKVNVNGGTIALGHPLGATGARCVATLLNEMKCRGRDCRFGVVTMCIGSGMGAAAVFELCSARLEVSTITRHCNPMVIDDPVDIFVMLWNVV

SEQ ID NO: 48951 - protein, 151 aa, Zea mays
  Coding DNA Sequence Number=SeqID_7172
  Homolog annotation: Hit_ID=Q6QP51; Match level="QueryCoverage=34%, HitCoverage=30%, E-value=7e-14, Identity=77%"; Hit description =Putative growth-regulating factor 1
MQVACDRTAEMHPFDFDASSMEAQAHTSCDRRAGYYVRKTAPPLAPMPRLLDCGIGAATRVNPARGPTVPTKHIGHGNRERGYFERDPSPRRKRAPSPPTDQGFEGWPLGRVRQPPQSTRASGSLLIRGLKAGPLEGFDSRLRPLGLRSHY

SEQ ID NO: 48952 - protein, 66 aa, Zea mays
  Coding DNA Sequence Number=SeqID_7173
MAQAHWGPLVRQEGFREIQGSAANMARGTTSAQGRWRGRFMARRLGDDAILLRRAIAHHQGQTREK

SEQ ID NO: 48953 - protein, 149 aa, Zea mays
  Coding DNA Sequence Number=SeqID_7174
  Subcellular localization annotation: CTP_CleavageSite=64; ConfidenceScore=5.61e-01
MANSDTERVGHKGSGNVVMLNSVEVKGSSTSTMKRGRRAQQATTNSKRCRGSGAVPVQRSWRMRAEKQSRGGAAARRGSECENERGEESRGDAGKGKQTPLMETRWRKRPGLRRRGGKRHGSQNEGDSGMAKQIGGASICEQAANRRIR

SEQ ID NO: 48954 - protein, 543 aa, Zea mays
  Coding DNA Sequence Number=SeqID_7175
  Gene Ontology: Mol. function=zinc ion binding; Cellular component =membrane; Biological process=defense response
  Homolog annotation: Hit_ID=Q6ZHD3; Match level="QueryCoverage=99%, HitCoverage=67%, E-value=1e-178, Identity=53%"; Hit description =Putative ZR1 protein
  Pfam annotation: Domain name=DZC; Domain location=500-535; Score =67.6; E_value=4.1e-17; Accession=PF08381.1; Description=Disease resistancezinc fingerchromosome co
  Pfam annotation: Domain name=FYVE; Domain location=120-188; Score =30.2; E_value=3e-07; Accession=PF01363.12; Description=FYVE zinc finger
  Pfam annotation: Domain name=RCC1; Domain location=14-65; Score=10.6; E_value=0.05; Accession=PF00415.9; Description=Regulator of chromosome condensation (RCC1)
  Pfam annotation: Domain name=RCC1; Domain location=68-117; Score =30.0; E_value=8.3e-06; Accession=PF00415.9; Description=Regulator of chromosome condensation (RCC1)
  Pfam module annotation: Pfam domain module=DZC::FYVE::RCC1::RCC1; Domain location=500-535::120-188::14-65::68-117
VSCGISLTAVLTITGVVFTIGSKDHGQLGNPRSDTDSACICMVEGPLKTEFVKDISCGSSHVAVLAMNGKVFTWGKGTEGQLGLGDYVDRSSPTLVEALEDKQVDSIVCSSNSTAAICVHGEISSKDQSVCSSCRLAFRFTRKKHNCYNCGSMVCNSCSSNKVHRAALAPDKSKRCRVCDACFNELNKTAEHGKMSCGSKIQKEPSYLAETRTYTPKLSRMLKEANFIMEKMGSSAQSPGQRNQEPATPNQMQKERWGQVECPDRFKCARDNIPHRLTPKKQTIDDYPMRRMADPVSQKTAAPLTQTTSDRRKEQDLIEKILLEEVKQLQAQVTTLAEECRHRSLKVRLYKRKLEETWLIVRDEATKCEAAEEIIKVLTNQRNALSNKLLDGLELDGSSIVPNPPDKALATCKTPPLNSIRDQHNAEAEEVLDTRSTASSNTVAVDDSAAHQNGRSRASSSSRGYYDDGGTDSTAAPTDSNGVIEQIERGVYITVVTSPSGKKGIKRIRFSRKHFGEAEAQKWWERNESRVFAKYDSVEYLAA

SEQ ID NO: 48955 - protein, 117 aa, Zea mays
  Coding DNA Sequence Number=SeqID_7176
MVFEMFVNGVRPSQRVEEVVHLPVAAEQQQRVEEAVVLVGSPLLPSSTTLCAVADLQVQQQKRVCETEQLDLLAVALSSTGVARRASEDPCVLCCQKQERPRIYRRRCIPRPEARLG

SEQ ID NO: 48956 - protein, 115 aa, Zea mays
  Coding DNA Sequence Number=SeqID_7177
MRRRTGAWPPGRTTGCSKWMHWSSGASGCSKWQQVDAAAASGHWSSGAWPGKWMDWMQRQQVGSGLWAVARRSAAHSPVGKLEEGAGGVPGRRAVALLEAQLGGRPGDLQASSAG

SEQ ID NO: 48957 - protein, 55 aa, Zea mays
  Coding DNA Sequence Number=SeqID_7178
  Homolog annotation: Hit_ID=Q6K675; Match level="QueryCoverage=76%, HitCoverage=3%, E-value=7e-12, Identity=88%"; Hit description =Putative streptococcal hemagglutinin
MTSSYRLHTLWFTELSAVAAKESTLLNEYRELLATAAALQVQESSLRTQLIQETE

SEQ ID NO: 48958 - protein, 75 aa, Zea mays
  Coding DNA Sequence Number=SeqID_7179
MKLFCHCRDRGGRSRVGIESKNMDLFAESARNERASIPPIGANNSLKCGWGMVPCWSWSKAILSGFIPMKLYHLQ

SEQ ID NO: 48959 - protein, 357 aa, Zea mays
  Coding DNA Sequence Number=SeqID_7180
  Homolog annotation: Hit_ID=Q9SNM0; Match level="QueryCoverage=22%, HitCoverage=18%, E-value=1e-14, Identity=60%"; Hit description =Putative lung seven transmembrane receptor 1
MPATWARSKLEQQHTGKQGQLANSGLGEWNATQGAGARGQRTARARRQRPGTGSLDRALYGGVRLGLGRELAGRVARRSKLGKARASRGIGASSRAEKEIVGGRSRARKSRLERWTPWREEQSAEQKGRAREKLEAGRVAELGEQRREEGHPDAQEDWTRARRPWETERTERRAQGAAMVELMAGRRLETGLGAIGEQGGASAVGSRAVQAGERATRRPGRAEDGGGRGRASVRNGKEKQGKQAGTTSRSTAPPLGQYTLVFANYLDGGLKVDMDVRSVIYNIDPTTGERNISPWEPPCYPPSTSSSTSTMPASPLSGSPSFFHRTDAPNGTDRGTDELPGEQREVLLSGSTVLIIT

SEQ ID NO: 48960 - protein, 65 aa, Zea mays
  Coding DNA Sequence Number=SeqID_7181
MASWQFHASNVAPAVTEPHEIASRAIRQHRESRTRPAGKRQPWRYRGPNLENVAGDEENIEDGIF

SEQ ID NO: 48961 - protein, 158 aa, Zea mays
  Coding DNA Sequence Number=SeqID_7182
  Homolog annotation: Hit_ID=UPI00001632AD; Match level="QueryCoverage =34%, HitCoverage=12%, E-value=3e-11, Identity=58%"; Hit description =protein binding / ubiquitin-protein ligase/ zinc ion binding
MARGVTGDAAGSSAADERGRGEAAPPQSATWQRVRRAGQGVAAHALLLCFTALLALKLDGVLSLSWWVCHKIARNTETGHVEPFIIDLKLVFLPLLALEIITLVDNFRMCGALMPGHGETITEEAIWERLPLMLESFSSKSYLGVFMTEDGISSFFLF

SEQ ID NO: 48962 - protein, 58 aa, Zea mays
  Coding DNA Sequence Number=SeqID_7183
MVAAAHYTRNDESPKVVGILGVVGDGSRGGGQGLLQMNELNKEILPYDYPSLCKPKYF

SEQ ID NO: 48963 - protein, 110 aa, Zea mays
  Coding DNA Sequence Number=SeqID_7184
  Homolog annotation: Hit_ID=Q2RAX8; Match level="QueryCoverage=98%, HitCoverage=99%, E-value=7e-27, Identity=61%"; Hit description =Expressed protein
MAAAAEVYRRVLKAVQKHVGRGATKQRFLDFGAAEFRAPVGTEADARARLRLAGDYAYLLTSVHHHKVLEIDPDLLLSYNIAVDRSDETKKILNKSAASVGLQLPDVYKP

SEQ ID NO: 48964 - protein, 226 aa, Zea mays
  Coding DNA Sequence Number=SeqID_7185
  Gene Ontology: Mol. function=sequence-specific DNA binding; Cellular component=nucleus; Biological process=regulation of transcription, DNA-dependent
  Homolog annotation: Hit_ID=Q655V4; Match level="QueryCoverage=67%, HitCoverage=70%, E-value=8e-23, Identity=41%"; Hit description=MADS -box transcription factor 30
  Pfam annotation: Domain name=K-box; Domain location=74-172; Score =32.1; E_value=8.6e-07; Accession=PF01486.8; Description=K-box region
  Pfam annotation: Domain name=SRF-TF; Domain location=9-59; Score =94.6; E_value=3e-25; Accession=PF00319.9; Description=SRF-type transcription factor (DNA-binding and dimerisation domain)
  Pfam module annotation: Pfam domain module=K-box::SRF-TF; Domain location=74-172::9-59
MGRGKVEMRRVENRVSRQVTFSKRRKGLLKKADELAVLCGVDVGVVVFSERGKLFEYSSPTRSLTPTLSTVTIFAKLGGSDSPQQQQMAAEISQLRSECEQLEASLNAYTGEDLSSVTSVVELLELEQRLESAIGKVRARKDELLVNLTEELQVKTEEHGRHDGPPAAAGVEATVAEPPLPQSPSFAYLLALEEKSAASTMLRLWPPTDEDADGGGSSSPRDLHLW

SEQ ID NO: 48965 - protein, 282 aa, Zea mays
  Coding DNA Sequence Number=SeqID_7186
  Gene Ontology: Mol. function=sequence-specific DNA binding; Cellular component=intracellular
  Homolog annotation: Hit_ID=Q655V5; Match level="QueryCoverage=68%, HitCoverage=79%, E-value=2e-52, Identity=57%"; Hit description =Putative CCAAT-box binding factor HAP5
  Pfam annotation: Domain name=CBFD_NFYB_HMF; Domain location=128-192; Score=89.4; E_value=1.1e-23; Accession=PF00808.13; Description =Histone-like transcription factor (CBFNF-Y) and archaeal histone
  Pfam annotation: Domain name=Histone; Domain location=122-195; Score =43.9; E_value=5.5e-10; Accession=PF00125.14; Description=Core histone H2AH2BH3H4
  Pfam module annotation: Pfam domain module=CBFD_NFYB_HMF::Histone; Domain location=128-192::122-195
MATFSGLTTIMELVDWLCIASCLPAFQSEIKVIVIIVCHRKLWKDHRFLGNSKWTWNHPLSLSLRWVSPPSVQPFPANPAHMSAQHQIVYQQAQQFHQQLQQQQQQQLQQFWVERMTEIEATADFRNHNLPLARIKKIMKADEDVRMISAEAPVVFAKACEIFILELTLRSWMHTEENKRRTLQKNDIAAAITRTDIYDFLVDIVPRDEMKDDGIGLPRPGLPPMGAPADAYPYYYMPQQQVPGPGMVYGAQQGHPVTYLWQDPQEQQEQAPEEQQSLHERD

SEQ ID NO: 48966 - protein, 92 aa, Zea mays
  Coding DNA Sequence Number=SeqID_7187
MGVMGIAAEVWTYIRAVEHCGLEGSDESEISSDEEDSFESSEEGSGGDDDDEGDGGDKGDGDSTKLGGGSGKGVGGSGSPGAASAGPVAKRH

SEQ ID NO: 48967 - protein, 156 aa, Zea mays
  Coding DNA Sequence Number=SeqID_7188
MAVSQERYSNPDDDDDEQSVRANSGAAAGAAASRLPRHVPFPNPDSSPGPSSVSTTTLLTLVIDEDYQNQAWLRSNKQGGWNHSGRAACGTGICSSSSCKKEGNRLDSTDHNEVTPPDQQINGRHSRGITALSSRVAEDGTCAELEERNASEDSGT

SEQ ID NO: 48968 - protein, 378 aa, Zea mays
  Coding DNA Sequence Number=SeqID_7189
  Gene Ontology: Mol. function=transcription factor activity; Cellular component=nucleus; Biological process=regulation of transcription, DNA-dependent
  Homolog annotation: Hit_ID=Q6L4H4; Match level="QueryCoverage=98%, HitCoverage=100%, E-value=1e-119, Identity=60%"; Hit description =Putative AP2 domain protein
  Pfam annotation: Domain name=AP2; Domain location=78-140; Score =109.0; E_value=1.4e-29; Accession=PF00847.10; Description=AP2 domain
  Pfam annotation: Domain name=B3; Domain location=208-314; Score =109.5; E_value=9.8e-30; Accession=PF02362.12; Description=B3 DNA binding domain
  Pfam module annotation: Pfam domain module=AP2::B3; Domain location =78-140::208-314
  Subcellular localization annotation: CTP_CleavageSite=48; ConfidenceScore=5.30e-01
SDRMDSTSCLLDDASSGASTGKNKPAPVPAPAAVTGKPLQRVGSSGASAVMDAAEPGAEADSDGARRAPGGVGGKLPSSKYKGVVPQPNGRWGAQIYERHQRVWLGTFTGEAEAARAYDVAAQRFRGRDAVTNFRPLAESDLDPDAAAELRFLASRSKAEVVDMLRKHTYGEELAQNRRAFAAAAASLASPQLPPAKNTSPAAAREHLFDKTVTPSDVGKLNRLVIPKQHAERHFPLRRVQGGRAPILSFEDAAGKAWRFRYSYWNSSQSYVLTKGWSRFVKEKGLHAGDAVGFYRSAAAGRQLFIDCKLRPKAVRLFGVDLLTEPPRSAAAVAQPEPEQEEIAVSKNKRARDAIAASATPVHIAFKKQRVDVALTTT

SEQ ID NO: 48969 - protein, 171 aa, Zea mays
  Coding DNA Sequence Number=SeqID_7190
MAPSFCATVTLAPLGGPRAFPRVHPRQGGSGHRADATDKARRPDRAAKAVVATQDQVHAAWDTLARERQAASDLKCAMGVTHNAAFPPAQGDALNNDVDVVEDPDYEATLIVNPHTQAAKVRVVIKGAGGHHDSGNCSSEYLQQHRIAKHRGRPPSTPIACEYPPPMFAIP

SEQ ID NO: 48970 - protein, 143 aa, Zea mays
  Coding DNA Sequence Number=SeqID_7191
MGDGDINPISDREKRRSSNRSGTSSGTLMEVWPPARGEDEGHCGTKAAASKVQCEIGTERDLAHPPHDVPVPRVAQPHSGHQRSESVGPVAHPTRALPRLRVISPGAARQQKTKTKSLNLDLSYHIRRHRTQHRQNYIYALDN

SEQ ID NO: 48971 - protein, 124 aa, Zea mays
  Coding DNA Sequence Number=SeqID_7192
  Subcellular localization annotation: CTP_CleavageSite=51; ConfidenceScore=5.27e-01
MAWCGSAVVASQPAAVSAAPKPEQVQRSPPARAPRYGTEETTNEALMMRIRGGSRRAAKWWTGSAHLWPPGNKETTQASTQARNSVHAQPPGKKTELTSVAHSTASVTEAADRALLSASGAQKR

SEQ ID NO: 48972 - protein, 316 aa, Zea mays
  Coding DNA Sequence Number=SeqID_7193
  Gene Ontology: Mol. function=DNA binding; Cellular component=nucleus; Biological process=regulation of transcription, DNA-dependent
  Homolog annotation: Hit_ID=P20024; Match level="QueryCoverage=99%, HitCoverage=100%, E-value=1e-136, Identity=73%"; Hit description=Myb- related protein Zm1
  Pfam annotation: Domain name=Myb_DNA-binding; Domain location=16-63; Score=52.0; E_value=2e-12; Accession=PF00249.21; Description=Myb -like DNA-binding domain
  Pfam annotation: Domain name=Myb_DNA-binding; Domain location=69-114; Score=44.2; E_value=4.5e-10; Accession=PF00249.21; Description=Myb -like DNA-binding domain
  Pfam module annotation: Pfam domain module=Myb_DNA-binding::Myb_DNA -binding; Domain location=16-63::69-114
MGRGRAPCCAKVGLNRGSWTPQEDMRLIAYIQKHGHTNWRALPKQAGLLRCGKSCRLRWINYLRPDLKRGNFTDEEEEAIIRLHGLLGNKWSKIAACLPGRTDNEIKNVWNTHLKKKVAQREKKKAGAGSGDAGTPATAPLSSATSSTTTHNSSGGSDSGDQCGTSREPDATDPMPSPSSSSSLTTCVGGVEELIELPVIDIEPEIWSIIDGESAVARHGGDAAAPCTGTGTAVSTSEAEEAAANDWWLENLEKELGLWGYAEEDTQAHPDLLDHYTGLSPLCALEGDPVSTYFQTGPAAAEPELLVVVEPSAVLL

SEQ ID NO: 48973 - protein, 176 aa, Zea mays
  Coding DNA Sequence Number=SeqID_7194
MGEGSRLGRKNRAKVGKTNETSNDGENDGLLTLARKPPTDSKESHEGSGAAVGYPGTGYQGKAHKPRPSLRRVRRRPTPGGRRNHDSPEANLGRETQSLLIRGQPRARDAVMTRPRPTSGDRRTHTRLRPNPDERRSHGLPEANLGRVAHFRLTRVLCSDLCDPPFVVMTVGINKW

SEQ ID NO: 48974 - protein, 47 aa, Zea mays
  Coding DNA Sequence Number=SeqID_7195
MAPSWGAIGAAAPVGLSWGDHYVNGNMERPPGKTVLPQGYNGTPLAD

SEQ ID NO: 48975 - protein, 79 aa, Zea mays
  Coding DNA Sequence Number=SeqID_7196
MPRNMVLLRMIGCWCDLASIPATGIDGRLNSLPPEPYDPYTDPTLKGTFDEFKIVNATLDEAVEKLLNEAAEKVLKEDD

SEQ ID NO: 48976 - protein, 130 aa, Zea mays
  Coding DNA Sequence Number=SeqID_7197
MGEEKGPLAMEERARGRWSCCWAPVRGGRRGACTFLRDGEVELGDAACARSMKEDGAMEERELGWNFLGTMGVADLRRGGRKGEQQQGRELGGHGRLEEEARRRGRLAAMELLRAGCCCRGVGTKKAAGG

SEQ ID NO: 48977 - protein, 130 aa, Zea mays
  Coding DNA Sequence Number=SeqID_7198
MGEEKGLVAMEERARGRWSCCWASVRGGRRGADTFLRDGEVELGNAACARSMKEDGAMEERELGWNFLGAMGGADLRRGGRKGEQQEGRELGGHGRLEEGARRWGRLAAMELLRAGCYCRGAGRKKAAGS

SEQ ID NO: 48978 - protein, 125 aa, Zea mays
  Coding DNA Sequence Number=SeqID_7199
MAGSLLRDGGHGLPFVDERRGARELCGRRRGAGRGSSARGRRCGGVVGPGAGALPRAGGAAASWGWARELCEGLGGAAGVVGGRGVVGALHGRRGARELCGVGVRRRGVVKERFETSERRLAPTM

SEQ ID NO: 48979 - protein, 216 aa, Zea mays
  Coding DNA Sequence Number=SeqID_7200
  Homolog annotation: Hit_ID=Q67UA7; Match level="QueryCoverage=30%, HitCoverage=21%, E-value=3e-10, Identity=42%"; Hit description=F-box protein-like
  Subcellular localization annotation: CTP_CleavageSite=38; ConfidenceScore=5.04e-01
MVALSRRFVALSRPVVPLAVGTTPTAGTACRSLSPAAPSALDSGGYGATGRPDYGPDHGFHGFLGKTIEKRKLVIDVKYFFFYVHSEPRDIYGETSCLATGDFMLSLDFATNTFYQKNGGNNKGCWKMKYIIIANKLAFPEALGFGPSQVAKFCLFYTTDSLQLNLRFLFPCLEEVMIIRMVIRISKMKNCHKGADEFFDDICNFNYMNYKKVQIE

SEQ ID NO: 48980 - protein, 129 aa, Zea mays
  Coding DNA Sequence Number=SeqID_7201
MMVKPWRCLCLALTVHWMKKDALAAVEERREATDAARCSATRTNRVAAVYPRQALSRMSMVAALWGQGRKRWKVVEGSHGREGMCEIDDVDSMEIYERCRFLEAITRLSPYPSFNKDDDHKKDDVVHNG

SEQ ID NO: 48981 - protein, 40 aa, Zea mays
  Coding DNA Sequence Number=SeqID_7202
MAMAYGIAEVAMVTAGWWPWFLWNLYLKSGQELLELWGVL

SEQ ID NO: 48982 - protein, 308 aa, Zea mays
  Coding DNA Sequence Number=SeqID_7203
  Homolog annotation: Hit_ID=Q75I58; Match level="QueryCoverage=80%, HitCoverage=100%, E-value=1e-116, Identity=76%"; Hit description =Expressed protein
MALVVKRYRCTHSVSCACLKGHVREDAMYLVFKHMNWNPKMIAILSSVCKWFDEFAKRVLWKEFCHARAPKMMKDLHSDGSHIVDGNWKALGKLLIYCAGCPSGDLFSNIHDPVPGHFVYRTRFSRTLGKSLLAPQCRSDALYVSESCEHLDQGEEGDLGLFRGIFKSFAASKMKKMLIERQANFHLNKMCPYCKTKLWDLMQPNMIPSSAAVRLGAEDGSVEYYVCLNGHILGSCTLIPISDSEGTKEEAPAYCFGTALIELQRVHAVVASGEAKEAWMMDAAPLPVCNLLRSRASFRFSTSGIRFF

SEQ ID NO: 48983 - protein, 1386 aa, Zea mays
  Coding DNA Sequence Number=SeqID_7204
  Gene Ontology: Mol. function=nucleic acid binding; Cellular component= nucleus; Biological process=regulation of transcription, DNA-dependent
  Homolog annotation: Hit_ID=Q10LF6; Match level="QueryCoverage=97%, HitCoverage=86%, E-value=0.0, Identity=74%"; Hit description =Transcriptional activator, putative, expressed
  Pfam annotation: Domain name=DEAD; Domain location=582-752; Score= -21.2; E_value=0.00034; Accession=PF00270.19; Description=DEADDEAH box helicase
  Pfam annotation: Domain name=Helicase_C; Domain location=1237-1315; Score=91.6; E_value=2.4e-24; Accession=PF00271.21; Description =Helicase conserved C-terminal domain
  Pfam annotation: Domain name=ResIII; Domain location=578-746; Score= -1.9; E_value=6.6e-05; Accession=PF04851.6; Description=Type III restriction enzyme, res subunit
  Pfam annotation: Domain name=SNF2_N; Domain location=584-881; Score =345.9; E_value=6.5e-101; Accession=PF00176.13; Description=SNF2 family N-terminal domain
  Pfam module annotation: Pfam domain module=DEAD::Helicase _C::ResIII::SNF2_N; Domain location=582-752::1237-1315::578-746::584 -881
MGVTGNAVAAFAELKGSCTRKSRPLREQQLKWESKHFSFLGQGSLLDQYNGVHDASHGLHRKRKKHPDGAGDDDHADAYSNKMMEDHYRAMLSEHVQKYRRSKFKEGAFISDPSQVAIPQIKHKNGGKKVMKHISNFRDIAALNGIEASHEYNWIECIETHGGFNKLVASVDSTYLDMGDNIHYLVPEGYDKLALSLNLPISSDIRVEEHFLKGALDLCTLSAMLGTDQRFEASSHGGLSEPLPQFESLKERVKVQKFSLQVTEDPFAIPEGAAGRIRRSIISETGNLQVHYVKVLEKGDTYEIIERSLPKKQIVKKEPFVIVKEESEKTYKLWQYLATKSIPKHHRNFTSLMKKRQVDAKRFSDSCQREVKFKVRRSLKLMRCAAIRTRQLARDMLIFWKRVDKEQVFFLPLRCLQNMSLKMMTLKFFSRYQYELRKKEEREAAEALKREEELREAKRQQQRLNFLLSQTELYSHFMQNKAGGSAPPDEEDVPDEDEEEDPEEAQLKREALRAAQHAVSQQKMRTNAFDSETVRLRQTSESVLPTDDSSSMDPSKIDLLHPSTMPEKSSVQTPELFKGVLKEYQLKGLQWLVNCYEQGLNGILADEMGLGKTVQAMAFLSHLAEDKNIWGPFLVVAPASVVNNWAEELIRFCPDLKILPYWGPERMILRKNINPKRLYRRDASFHILITNYQILVNEEKLLRRVKWQYMVLDEAQAIKSSSSQRWKTLLSFSCRNRLLLTGTPIQNNMAELWALLHFIMPTLFDSHEQFNEWFSKGIEGHAEHGGALNEHQLSRLHAILKPFMLRRVKIDVIAEMTKKKEEIVPCKLSSRQQIFYQAIKNKISLNELLDGSRGNLNDKKLLSLMNIVMQLRKVCNHPELFERNEGSSYFYFADIPNSLLSPPFGALQDVHYAGKRNPIIFEIPKLVYDGIICNTENSGSICGFQNGYLNRLFNIFLPSNIHRSAIPEVNSSNESVLSSGAFGFTRLSNLCPVEAFFLATSSFFEGLAFSVMRWNRNYTDEIMDAFLDSEDTDIQFSQNDSTRVRAVARLLLSSTKAKPSLLRTKIGTGPSEGPYEALVLSHHDRLASNIRVLRSAYTYIPPARAPPPFALCQINVSCADRNFAYKFTDEMYDPWVMKLFLGFARTSEFNGPRQPVALHPLIQELNTDLPILEPMLQLPYRIFGSSPPMSNFDPAKMLTDSGKLHTLDMLLRRLRAEGHRVLLFAQMTKMLDILEDYMNFRKFKYFRLDGSSAISDRRDMVRAFQNRNDVFVFLLSTRAGGLGINLTAADTVIFYEIDWNPTQDQQAMDRTHRLGQTKEVTVYRLICKDTIEEKILQRAKQKNAVQELVMKGKHVQDDHLLRQEDVVSLLIDDTQIAHKLKEISMQ

SEQ ID NO: 48984 - protein, 74 aa, Zea mays
  Coding DNA Sequence Number=SeqID_7205
MVGLSRRLASINGEATRRGALGSDRADEGWAREKELTGGVGCHVFCFLTKNSLNELGDKYGLCEVLQIILSICK

SEQ ID NO: 48985 - protein, 279 aa, Zea mays
  Coding DNA Sequence Number=SeqID_7206
  Gene Ontology: Mol. function=RNA-directed DNA polymerase activity; Cellular component=mitochondrion; Biological process=RNA-dependent DNA replication
  Homolog annotation: Hit_ID=UPI00004C1731; Match level="QueryCoverage =99%, HitCoverage=27%, E-value=5e-95, Identity=90%"; Hit description =UPI00004C1731 related cluster
  Pfam annotation: Domain name=rve; Domain location=89-245; Score=97.6; E_value=3.7e-26; Accession=PF00665.16; Description=Integrase core domain
MGRHPASSSSDPTGTLNHVFRRVADENRSGRGLLFISPLYVLRLHFPASNNVAEYEALVNGLRITIELGVQRLDARGDSQLVINQVMKNSHCRDPKMEAYYDEKAPGGYTHLLVAIDKFSKWIEVRPLNSIRSEQAVAFFTNIIHRFGVPNSIITDNGTQFTGRNFLDFCEDHHIRVDWAAVTHPMTNGQVERANGMILQGFKPRIYNDLNKFGTRWMKELPSVVWSLRTTPSRATGFTPFFLVYGAEAILPTDLEYGSPRTRAYDDRSNRTYREDSLD

SEQ ID NO: 48986 - protein, 116 aa, Zea mays
  Coding DNA Sequence Number=SeqID_7207
  Subcellular localization annotation: CTP_CleavageSite=66; ConfidenceScore=5.43e-01
MSGADGPEFEGFFHLVVSNPSLPRLLLPHPRHISRLVPSSRRWMNTPLTLRSVSSLFRRCRPQISRFAMTTSRHEVYILQIQGGSYDNQAGVKFYEVVCAEHNINASSRYDDDFDL

SEQ ID NO: 48987 - protein, 33 aa, Zea mays
  Coding DNA Sequence Number=SeqID_7208
MAKENVHVLGDEVDELISLGFGTDKVFKEVHLN

SEQ ID NO: 48988 - protein, 128 aa, Zea mays
  Coding DNA Sequence Number=SeqID_7209
  Subcellular localization annotation: CTP_CleavageSite=63; ConfidenceScore=5.45e-01
MASLIDAAAVMALQTIAAVVTAATGTGTVDPVLVLNPAMYNTMAAASAAAVVRTTTMLGPPARSAAAVAASNACVANLHLLRLKLSGYPTCTGALAAIVESGPLSSARLSRQPLPGFSTTRPLVANPT

SEQ ID NO: 48989 - protein, 1159 aa, Zea mays
  Coding DNA Sequence Number=SeqID_7210
  Gene Ontology: Mol. function=2 iron, 2 sulfur cluster binding; Cellular component=peroxisome; Biological process=electron transport
  Homolog annotation: Hit_ID=Q6AUV1; Match level="QueryCoverage=99%, HitCoverage=90%, E-value=0.0, Identity=80%"; Hit description =Xanthine dehydrogenase, putative
  Pfam annotation: Domain name=Ald_Xan_dh_C; Domain location=484-591; Score=157.6; E_value=3.2e-44; Accession=PF01315.12; Description =Aldehyde oxidase and xanthine dehydrogenase, ab hammerhead domain
  Pfam annotation: Domain name=Ald_Xan_dh_C2; Domain location=599-1070; Score=584.6; E_value=9.3e-173; Accession=PF02738.8; Description =Aldehyde oxidase and xanthine dehydrogenase, molybdopterin binding domain
  Pfam annotation: Domain name=CO_deh_flav_C; Domain location=319-430; Score=162.5; E_value=1.1e-45; Accession=PF03450.7; Description=CO dehydrogenase flavoprotein C-terminal domain
  Pfam annotation: Domain name=FAD_binding_5; Domain location=132-312; Score=256.9; E_value=4.1e-74; Accession=PF00941.11; Description=FAD binding domain in molybdopterin dehydrogenase
  Pfam annotation: Domain name=Fer2_2; Domain location=1-42; Score =19.2; E_value=8.6e-08; Accession=PF01799.10; Description=[2Fe-2S] binding domain
  Pfam module annotation: Pfam domain module=Ald_Xan_dh_C::Ald_Xan_dh _C2::CO_deh_flav_C::FAD_binding_5::Fer2_2; Domain location=484 -591::599-1070::319-430::132-312::1-42
MSMYALLRSSKQPPTEDQIEDCLAGNLCRCTGYRPIIDAFRVFAKTDNLAYTNSCSEDAKDQAICPSTGKPCSCRNETDVNVNESSLSSSVERYSPYSYNEIDGSAYNERELIFPPELQLRKVMPLKLNGSNEIKWYRPLKLKQLLHLKSCYLDAKLIIGNSEVGVETKFKNAQYKVLIAVTHIPELNTLKAKEDGIHIGSAVRLAQLQNFLKKVVAEHDLPETSSCQAIVRQLKWFAGTQIRNVASIGGNICTASPISDLNPLWIAVGAKFHIIDVNGNVRTTLAKDFFLGYRKVDIKPEEILLSIILPWTRPFEYVKEFKQAHRREDDIALVNAGMRVYLQETERNWIISDVSIVFGGVAAVPLSASRTENFLTGKKWDSGLLDDTFNLLKEDISISENAPGGMIEFRRSLTLSFFFKFFLSVTHEMKIKGLLADGLHADHLSAVQPYSRPVTVGTQSYELVRQGASVGQPMVHMSAMLQVTGEAEYTDDTPTPPNTLHAALVLSKKAHARILSIDDSLAKSSPGFAGLFLSKDIPGVNHTGPIIHDEEFFASNIVTCVGQIIGIVVADTHDNAKTAANKVHIEYCELPAILSIEEAVKIGSFHPNTKKCLVKGDVEQCFLSGACDRIVSGQVHVGGQEHFYMEPQCTLVWPVDSGNEIHMVSSTQAPQKHQKYVASVLGLPQSKVVCKTKRIGGGFGGKETRSAIFAAAASVPSFCLRRPVKLVLDRDVDMISTGQRHSFLGKYKVGFTNEGKILALDLEIYNNGGHSLDLSLAVLERAMFHSENVYDIENIRINGQVCFTNFPSNTAFRGFGGPQGLLIAENWIHHIATELQRSPEEIKAGALVQVYTDGTVLVTHGGVEMGQGLHTKVAQVAASSFNIPLSSVFISETSTDKVPNASPTAASASSDLYGAAVLDACQQIKVRMEPIASKGTHNSFAELAQACYMERVDLSAHGFYATPNIGFDWTIGKGTPFNYFTYGAAFAEVEIDTLTGDFYTRTADIVMDLGFSINPAIDIGQIEGAFIQGLGWAAIEELKWGDDNHKWIRPGHLFTCGPGSYKIPSVNDIPLNFKVSLLKGVPNPKAIHSSKAVGEPPFFLGSAVLFAIKDAISAARAEEGHLDWFPLDNPATPERIRMACVDSITKKFAGIDYRSKLSV

SEQ ID NO: 48990 - protein, 190 aa, Zea mays
  Coding DNA Sequence Number=SeqID_7211
  Pfam annotation: Domain name=XYPPX; Domain location=24-28; Score=1.2; E_value=1.4e+02; Accession=PF02162.7; Description=XYPPX repeat
  Pfam annotation: Domain name=XYPPX; Domain location=29-33; Score=2.2; E_value=72; Accession=PF02162.7; Description=XYPPX repeat
  Pfam annotation: Domain name=XYPPX; Domain location=34-38; Score=1.6; E_value=1e+02; Accession=PF02162.7; Description=XYPPX repeat
  Pfam annotation: Domain name=XYPPX; Domain location=41-45; Score=4.0; E_value=22; Accession=PF02162.7; Description=XYPPX repeat
  Pfam annotation: Domain name=XYPPX; Domain location=46-50; Score=4.0; E_value=22; Accession=PF02162.7; Description=XYPPX repeat
  Pfam annotation: Domain name=XYPPX; Domain location=51-55; Score=4.0; E_value=22; Accession=PF02162.7; Description=XYPPX repeat
  Pfam annotation: Domain name=XYPPX; Domain location=62-66; Score=4.0; E_value=22; Accession=PF02162.7; Description=XYPPX repeat
  Pfam module annotation: Pfam domain module=XYPPX::XYPPX::XYPPX::XYPPX: :XYPPX::XYPPX::XYPPX; Domain location=24-28::29-33::34-38::41-45::46 -50::51-55::62-66
MSYYGQQQPPVSAPPAQGYPGKDAYPPPGYPPAGYPPPAQGYPPQGYPPQGYPPQQGYPQQGYPPQYSQPPPPPRQQQSSGPSFMEGCFAGDDALGGGASGRLVGVLCGADVIAVADSRLACHCQRQSASGWMGRGRGGSRPGALRAREVDRALRSSKSPNRGPQSPLPPRRLSLLDRLAIQSGSSRLVG

SEQ ID NO: 48991 - protein, 88 aa, Zea mays
  Coding DNA Sequence Number=SeqID_7212
  Subcellular localization annotation: CTP_CleavageSite=32; ConfidenceScore=5.27e-01
MGTNGHLDLDTGDSLVNYSGATLGKPRERPVRGAARPGHRTVPGAQRTMSGVPLAAPMLVFAPNFVEFPNLFSLLVYVELYAPEINDN

SEQ ID NO: 48992 - protein, 115 aa, Zea mays
  Coding DNA Sequence Number=SeqID_7213
MRGTTVRRAPPRTPPGAGFVVALVVACMLTVGDVHGGDRFPVGFPTGINSPTATWMGEKAPPQAFTGMGTGTGNFSPCGDGETFPDREIPVVVPTPGRALRRHACDGWCVETGET

SEQ ID NO: 48993 - protein, 153 aa, Zea mays
  Coding DNA Sequence Number=SeqID_7214
  Subcellular localization annotation: CTP_CleavageSite=18; ConfidenceScore=5.04e-01
MKLWKETSRSSKTTTSSRCGLAATPSRLPVKAAFIYVSFPHFDLLSDIKRRPMPICGGFTTEVNDRGEICGEEKVSAAAHRWGREWSSGECQQQHEVGDDVPRKEVNLPQVERRKQHEEDELSPGWMGGGDREYARREEETNQDNRPTFGHRM

SEQ ID NO: 48994 - protein, 150 aa, Zea mays
  Coding DNA Sequence Number=SeqID_7215
  Gene Ontology: Mol. function=nucleic acid binding; Biological process= DNA integration
  Homolog annotation: Hit_ID=Q3LRV2; Match level="QueryCoverage=96%, HitCoverage=71%, E-value=1e-32, Identity=47%"; Hit description=Gag
MVTSEKPESSGRKNEERTPSKEAGDKHKEESASSIKSHRKGDKKKKKMKKVVYYETDSSSLFTSGAESTTSKRQEHKKYSKPPYFDGEDYCMWGDKTRHHLTSLHESIWDIVEFGAQTPQVGDKDYDSNEATQIRHFNSLATSILLASLC

SEQ ID NO: 48995 - protein, 310 aa, Zea mays
  Coding DNA Sequence Number=SeqID_7216
  Homolog annotation: Hit_ID=UPI0000DA43ED; Match level="QueryCoverage =82%, HitCoverage=54%, E-value=2e-08, Identity=29%"; Hit description =PREDICTED: similar to keratinocytes proline-rich protein
MGWGSECGCGRCSKGSWGAWVGDVAEHPGERACVRSTGPWQVAGMAELTGGSHDTARGRGRAGKQFGALTRRAREAEWGRGAQARESGADRAAPLGRGRGVGGYKRQRGREREACTRRPVLPVRPTLRKRALDLPFIGGNDGPSCDVVGPSPGSGEAEAPPRSRSSLSSEVEVKSEPLGQARRRPSAEARAESEPWGRARRSSSSSRAEVESEPWGRARRSSSSSRAEAKSEPWGRARRSSSSSGAEAESEPWGRARRSSSSSGAEAESEPWGRARRSFLWRPRPDLAAVSLTLSSGTAVGAAHAALSSC

SEQ ID NO: 48996 - protein, 191 aa, Zea mays
  Coding DNA Sequence Number=SeqID_7217
MERQGLSPVSEKMVKIVEIKEEQDDACPDDDDCYEIGIEEFAKKLNVKEDDDVILVAAKGEIVKVEAGQPEDSAKARDVDANAECSCRIRGSGGGSRGRRAAAAGGDCLDNRPYKVADDETSLVTVGDMAFVIGKPSDVPGVLLVPPVVKSEPAGDNGVETAEEASYDHCPETMALAHEKRIFDEDDDEDA

SEQ ID NO: 48997 - protein, 116 aa, Zea mays
  Coding DNA Sequence Number=SeqID_7218
MTPRSSADKLSRGGYTDVWRKAEKLPPKLSCAPGVIGGDRWQNAVILKVTIAIQQPSARSHNDEGYTFVNMASLESIGRAPWARSKARAVHYADLRPGPPARAAATTFCRTNSWRT

SEQ ID NO: 48998 - protein, 127 aa, Zea mays
  Coding DNA Sequence Number=SeqID_7219
  Gene Ontology: Mol. function=nucleic acid binding
MAMKALEDTERFKLDASQSCFMYEEGHDCLCLSGQLLDCSLAKPLADKKDDTSTPKGGPLLPSYTPLGYGLMGAYNPLGNGLAVVGAYNPYGNGLAGAYGLLGACWGPSASEGPQKQDLTVFLEYNV

SEQ ID NO: 48999 - protein, 141 aa, Zea mays
  Coding DNA Sequence Number=SeqID_7220
  Homolog annotation: Hit_ID=Q5JML5; Match level="QueryCoverage=95%, HitCoverage=21%, E-value=7e-30, Identity=51%"; Hit description =Putative calcium-binding protein
MNQDFQENRLLMSFVNFHEQEKISKEIVTHAIESCMKKQADNLLNSLDVINGRLSQLELYCYILERSIGELRSDVMDYHNEANLNFRCVEKQVKEIHGQVQKSVQAVQEKQELAETQKELTKLQIVHEDSAQKSEDLSWYI

SEQ ID NO: 49000 - protein, 68 aa, Zea mays
  Coding DNA Sequence Number=SeqID_7221
  Gene Ontology: Mol. function=DNA binding; Cellular component=nucleus; Biological process=regulation of transcription, DNA-dependent
  Homolog annotation: Hit_ID=Q6H7C6; Match level="QueryCoverage=69%, HitCoverage=15%, E-value=6e-18, Identity=87%"; Hit description =ATMYB4-like
MTDSRTVGHYGLQELLPALFPWRRGLQPNGKSCRLRWINYLRPGLKHGMFSPEEEETVMSLHATLGNK

SEQ ID NO: 49001 - protein, 34 aa, Zea mays
  Coding DNA Sequence Number=SeqID_7222
METSLIARRAFSTTAVPPDIEDSATTVTSAVAII

SEQ ID NO: 49002 - protein, 216 aa, Zea mays
  Coding DNA Sequence Number=SeqID_7223
MQAACNRAKWAHPFDSNAPNMEAQAHTSCSRRAGCYVRETAPPLAPLPCLLDCGTSTTTRGNPAYDPTVPARHIDHGSVSRGRRRDGRYGQKWTKPEGQRRLRHSDCSATRQSESDRQSGLAKGAIGNSAPPDPRARTRAKTRKTANSAPPDPRARTRAKTRKTANSAPPDPRARTRAQPRKTANSAPPDPRARTRAKTREDGELRSARPQGSDSG

SEQ ID NO: 49003 - protein, 351 aa, Zea mays
  Coding DNA Sequence Number=SeqID_7224
  Homolog annotation: Hit_ID=Q6QP54; Match level="QueryCoverage=28%, HitCoverage=41%, E-value=4e-11, Identity=47%"; Hit description =Putative kinase
MTSLTEGQRRLRHSDCSATRQSESDRQSGLAKGAIGNSAPPDPRARTRAKTQKTANSAPPDPRARTRAKTRKTANSAPPDPRARTRAQPRKTANSAPPDPRARTRAKTRKTANSAPPDPRARTRAKTRKTANSAPPDPRARTRAKTRKTANSAPPDPRARTPPWPRSNDLRLARPGGSGSASATEDRLNLGFGGAPTSPDLGHRPATSTGSAIIILPRADSGHREQDRLRCYSDSHDITPARCQDLSGCHIGMAFLEEVGRAGPRTRQALSWGRSLPSPAWTLVTPLLQAHPTWARDEHEGRGISTSLTPVSGHFASPPFALAHALDPSGLGHAAHSLVGLGTPPVSKRRQ

SEQ ID NO: 49004 - protein, 134 aa, Zea mays
  Coding DNA Sequence Number=SeqID_7225
MWIACDQTGHQHVTSCLETDHQYESRALDAFVEYRDQNSQVQAASIVLTAMEVEVVAFAERDALQADHQKHLPTLPHHQETRPRVSPKRLGIPSLVFKGEAQKIQRLTQRRSCEAGKLRHVRRKGNRLKDEKAI

SEQ ID NO: 49005 - protein, 427 aa, Zea mays
  Coding DNA Sequence Number=SeqID_7226
MDGKEPSSINGAQKTAWRRAQGATQRLEASAQRQRRKPERFQVCVHACFGGLLHVSRPDAPASRRSLVSPLATPVVHTCGWAVNVSFSRHCGGMLGTASLKNHPSRRRSRLAHRHTIGLGHSLLFSLHVWKWEAEHAPRPSRFHSVASAAYSPRPTCGLCQGDASRCVEDLEETLLLVAAPWRIPRRRGLQPGRCGLERDTSRDLRMAVSEMAALQSVHSRTDPVRGSHHTGGQAAHQRGWASPGGEQPRASMGGQVAHTRAWANPAMGRHPRRGLARAQTASATGETGAAPSARASAHRQALTGVRSDMGVPAVDPLARGAAPRCTLGHGGARCGPVGAWATPATRDHGPGSPGGGRGRGSAPASRGQWARAQSGLGHCAASHGTQPPAAERSGLGAGQPRPRRGLAQPSAPALARGEVGHARPPT

SEQ ID NO: 49006 - protein, 224 aa, Zea mays
  Coding DNA Sequence Number=SeqID_7227
MQESLAGPPSQQNPPEGLPTLTTPLLPLPLSGKISATRSFLLPYAVAHIYLRIDAGAKRQHTGTSGLGEGKVLTDDGGGPNDLGAQVTAGRRTPTSSPSSSVTPVQCAAGRWSSPTAGEMETERSTTRQIARGRREGWVGEKAGGSPAHSHLSPMLYGAREVRARSRGHQSPWFMCGGYGARQSVSVVRIRGRRKRPRISPERRRAPAQPGAPARAASVKIRPP

SEQ ID NO: 49007 - protein, 84 aa, Zea mays
  Coding DNA Sequence Number=SeqID_7228
MGDKWLCAGLPPAFSPTQPSLLPRAIRLVVDRSVSISPAVGLDHRPAAHWTGVTLDDGDDVGVRRPAVTCAPRSFGPPPSSIRS

SEQ ID NO: 49008 - protein, 105 aa, Zea mays
  Coding DNA Sequence Number=SeqID_7229
MARPQCLAPPSDLRTWGPNSPCASDVDEPAADDDVASSLLEMGALVLSTADPLTKARRTHATFSRWAVGLPVGQATAPYHLDEPLVYESPKVLAKECPNPDEDDH

SEQ ID NO: 49009 - protein, 402 aa, Zea mays
  Coding DNA Sequence Number=SeqID_7230
  Gene Ontology: Mol. function=dopamine beta-monooxygenase activity; Cellular component=membrane; Biological process=histidine catabolic process
  Homolog annotation: Hit_ID=UPI000051A0D1; Match level="QueryCoverage =63%, HitCoverage=10%, E-value=7e-18, Identity=28%"; Hit description =PREDICTED: similar to corin isoform 1
MQAACNRTKGAHPFDSNASSVEAQAHTSWTEKGDTLKGILLREGSGPRAPLLIKGSKAGPSKGSNSRLRALGLCTHYWLEVRRLAPRKGSTTASGHSGSAPTTDQGFVGWPPNGATATSEHAERGMTLGTLGHFRDRRERFCNGIPPEGGIEPSDPVKRGSGPANHPQGSDTASASEDGLRLARPRARTQPRPRKTDSASPDRRGRTQPQPRKTVSASPDPRAQAQPRRWTTDSASPDPRARTQPRLQKTTDSALPDPRARTQPRLRKTMDSASPDPRAQTQPRPRKTDSASPDPRGRTQPRPRKTVSASPDPRAWAQPRRWTTDSASPDPRARTQPRLRKTMDSASPDPRAQTQPRLRKTMDSASPDPRLGLNLDLGGIATSPKLGSEPATSPGGPSLPYP

SEQ ID NO: 49010 - protein, 193 aa, Zea mays
  Coding DNA Sequence Number=SeqID_7231
  Gene Ontology: Mol. function=binding; Cellular component=thylakoid; Biological process=photosynthesis
  Homolog annotation: Hit_ID=Q75LL1; Match level="QueryCoverage=83%, HitCoverage=50%, E-value=3e-31, Identity=49%"; Hit description =Expressed protein
MGKRGVKLGKAAYQELTGVKKPVLDEQGVLHWPVLLLYPEGGFGKPLSRSEVLRYLLEGNVDSKALPDSLLDGEDEEHDSTKCTTVTSRRCFRVLLYSPISQNTSLQETLSIVTRQLVMFALTGLLYNSLHSGFDLQLIAPCSSLFQGSPHSIKTSRLETGLCHETEPDTKVQLKSISETGSGYGKKAEDALL

SEQ ID NO: 49011 - protein, 175 aa, Zea mays
  Coding DNA Sequence Number=SeqID_7232
  Gene Ontology: Mol. function=two-component sensor activity; Cellular component=membrane; Biological process=response to stress
  Homolog annotation: Hit_ID=Q75LL0; Match level="QueryCoverage=94%, HitCoverage=95%, E-value=5e-49, Identity=60%"; Hit description =Putative stress-related protein
  Pfam annotation: Domain name=Usp; Domain location=27-170; Score=62.2; E_value=1.7e-15; Accession=PF00582.16; Description=Universal stress protein family
MEQTEAAVSGALGAGVEGGDKTARKALKVVAAVDASEESLHALSWALDNVVRLSVRDLTPERFVPRTLMIQEGIVYAPSSAVESVRAAQEESSRRVVARALDICKERQVDATGAVVEGDAKEAIRQAVERMQAGLLVLGSRGLGAIKRAFLGSVSDYLIHHACCPVLVVRPRPTK

SEQ ID NO: 49012 - protein, 61 aa, Zea mays
  Coding DNA Sequence Number=SeqID_7233
MANIPVTFQSMKQKGGRYITATNVKQYGYLSQYSLISVDFVTSEDQVGDIVTKRLYCSRLR

SEQ ID NO: 49013 - protein, 230 aa, Zea mays
  Coding DNA Sequence Number=SeqID_7234
  Gene Ontology: Mol. function=carboxyl- and carbamoyltransferase activity; Cellular component=ornithine carbamoyltransferase complex; Biological process=amino acid metabolic process
  Homolog annotation: Hit_ID=Q6QP54; Match level="QueryCoverage=37%, HitCoverage=37%, E-value=1e-15, Identity=59%"; Hit description =Putative kinase
MAPPVDVVDPCPELGEVEAPPRSRSSLSSKVEVESEPPGGTRRRPSADARAESEPWGWAKRSSSSFGAKPESEPWGRVKWSSSSSGAEPESEPWSRAKRSSSSSGAEPESEPWGRAERSSPSSGAEPKSEPWGGAERSSPSSGAEPEPWGRAERSSPSSGAEPESEPWCRVKRSFPWRLGSGLAAVSLTLSSGTAVRAVQAALSFCQTGQWSGEVTAVTSALSTGGRASG

SEQ ID NO: 49014 - protein, 151 aa, Zea mays
  Coding DNA Sequence Number=SeqID_7235
MPSHLRSPLPCSVFVRNCHPGPGVVQLRTLGSGVHELSAFQHAVYSCYGWTAALLLTHSCASLELKTLEHAEKTKKYQGKLAARLKAKYFSNKTFEEGYVFEEIVIESKTVRLSRWPFTRLFADPARFCREKSSTEKGISRPLAGEAMPDD

SEQ ID NO: 49015 - protein, 224 aa, Zea mays
  Coding DNA Sequence Number=SeqID_7236
  Gene Ontology: Mol. function=nucleic acid binding
  Homolog annotation: Hit_ID=Q6ZDR7; Match level="QueryCoverage=50%, HitCoverage=38%, E-value=1e-17, Identity=50%"; Hit description =Putative splicing factor, arginine/serine-rich
  Subcellular localization annotation: CTP_CleavageSite=66; ConfidenceScore=5.10e-01
MSHFGRTGPPDIRDTFSLLVLNISFRERDLTLAPAPFPLSLTASFSYSSSPSAQEPRPTTFSRSSSAAARSSTSSSRGTAGRNVDGRNIMVQFAKYGPNAVPIHKGRVKEGVEKSRDRSRSRSPRPSSSPARRSASPPKSPPPQRSPTPEKHANGKDSPLSRSVSPSPKRASSRSPGSDSKLSVRERGCCLPVEWYCSGPTMVDDVLLLVFVIGVDMGMTQLMM

SEQ ID NO: 49016 - protein, 141 aa, Zea mays
  Coding DNA Sequence Number=SeqID_7237
  Subcellular localization annotation: CTP_CleavageSite=39; ConfidenceScore=5.23e-01
MAVGKAVCRRAHQTIRKRFDPISLSVIMPTGLNPSLFARASSPSAPKGAPSSPGTMPTGGSGSQQQASAGSGAGGPPPAAATTPMATTASTMATPSSTPSTVVEEVLAALAPAMGGDAGGASSSNPPPSLEESEVVLGRRL

SEQ ID NO: 49017 - protein, 125 aa, Zea mays
  Coding DNA Sequence Number=SeqID_7238
  Subcellular localization annotation: CTP_CleavageSite=46; ConfidenceScore=5.64e-01
MGSNSKSPNGGGADASRRNVTVALPRIPPPRLYSHNLVARASLTPRARAVRRSVPTPPLRDFSLPEELEAAVAWLRREKEVAEDLSGFKRNRWRWSPDLDSAVVLQMHGLRSGLYRQPVKISSKG

SEQ ID NO: 49018 - protein, 124 aa, Zea mays
  Coding DNA Sequence Number=SeqID_7239
  Subcellular localization annotation: CTP_CleavageSite=75; ConfidenceScore=5.76e-01
MTARSTWVAGFAAGPRSRSSSRHRHRRHSATWSWSPSAPPSRLTRGRRRPMPAERSSGQEPPCLRKNFLVALGLRADLPVHFIDDEKCLKATDLDPHQNRALGVRMVAGFAAGECCARALHGWG

SEQ ID NO: 49019 - protein, 109 aa, Zea mays
  Coding DNA Sequence Number=SeqID_7240
MTLRKKLNSNDCNLADGEYVLVPEQGAAQEVAPDPAPEPAPEDLPATALEGKPRNPWGLVVYEVGTGIRIKVWYRSLEDMVAGVTWPSTLPPGWTVEWDPASAEEEHEE

SEQ ID NO: 49020 - protein, 42 aa, Zea mays
  Coding DNA Sequence Number=SeqID_7241
MGEKKEALERRLQDIMMATDVVEDWYGQEFEEWYAAPASALL

SEQ ID NO: 49021 - protein, 131 aa, Zea mays
  Coding DNA Sequence Number=SeqID_7242
MTKHGDDVGAADGGEEQRVWPTNKEAGSSVVKEMGGRASSSMGEAESSAGCARHTRHNVRPQRDTCNASVKEFQTKFKEPDSISRIRVWARRRWLNPNDTGFDVPKITKVCILQNKLGQFRQMEIDTISKS

SEQ ID NO: 49022 - protein, 110 aa, Zea mays
  Coding DNA Sequence Number=SeqID_7243
MTKHGDDVGAADGGEEQRVWPTNKEAGSSVVKEMGGRASSSMGEAESSAGYACHTRHNVRPQRDTCNASVKEFQTKFKEPDSISRIRVWARRRWLNPNDIGFDVPKITKV

SEQ ID NO: 49023 - protein, 92 aa, Zea mays
  Coding DNA Sequence Number=SeqID_7244
MDAPGALATSHAAPGADRASRGRHEQPRRGRREQPRAEQHARPHATTQRKGGKGERRSRAHLDGDGMQTRQIRRAPTGNVFEARHRAVWGRE

SEQ ID NO: 49024 - protein, 915 aa, Zea mays
  Coding DNA Sequence Number=SeqID_7245
  Gene Ontology: Mol. function=translation initiation factor activity; Cellular component=eukaryotic translation initiation factor 3 complex; Biological process=translational initiation
  Homolog annotation: Hit_ID=Q6YNS0; Match level="QueryCoverage=87%, HitCoverage=86%, E-value=0.0, Identity=62%"; Hit description =Putative translation-initiation factor 3 subunit
  Pfam annotation: Domain name=PCI; Domain location=662-792; Score =114.6; E_value=2.8e-31; Accession=PF01399.17; Description=PCI domain
  Pfam annotation: Domain name=eIF-3c_C; Domain location=793-912; Score= 55.1; E_value=2.3e-13; Accession=PF05469.2; Description=Eukaryotic translation initiation fac
  Pfam annotation: Domain name=eIF-3c_N; Domain location=44-656; Score =1022.6; E_value=1.3e-304; Accession=PF05470.3; Description =Eukaryotic translation initiation fac
  Pfam module annotation: Pfam domain module=PCI::eIF-3c_C::eIF-3c_N; Domain location=662-792::793-912::44-656
MTSRFWGQGDSESEEEEEEVESEQGSDNDDDGGHGGAGRGAQNRYLKNQEDDSDESDTGHREIRSLRDKHNEEMRSIVDQMRNAMKINDWVSLQESFEKLNKNLEKVVRVNESTKVPKMYIKALVLLEDFKAEAPANKEAKEKMSSSNSKALNKMSQKLTKNNKQYKEQIQKCREHPESFEDEAADDKDMDDDDVDESDAEIEDPDKIAMSESEEDHDEEDGDKEGWEQKRSKKDKMMDKQFLKDPSEITWDIVDKKLREIIASRGKKGTGRIERVEQLTFLTRVAKTPAQKLETLFHVISAQFDVNPSLLGHMPVNVWKKCVNNMLLVLDILQQYPNIVVDTSFEPDEKETQKGADYNGTIHIVGDLVAFLERLDSEFLKTLQCTDPYTKDYVQRLREEPLFLVVAQNVQDYLERVGNLKAAAKVALRRVELVYYKPQEVYDAMRKLAEQPEDCVDDDDAEAGDEHQAVDDNRGPSPFVAIPEVVHRKPTFPESGRTLMDGLMSLIYKYGDERTKARAMLCDIYHHAISDEFSVARDLLLMSHLQDGVQLMDISSQILFNRVMAQLGLCAFRAGLINEAHGCLTELYFTGRVKELLAQGVQQSRYHEKTPEQERLERRRQMPYHMHINLELLEATHLICAMLIEVPNMAASTYDKRRPMSKTFRRLLEVSERQTFVGPPENVRDHVMAATRALKKGDHQKAFSVINSLEIWKLLRNREHVLEMLKLKIKEEALRTYLSSYSSSYKSLSLNQLTTMFDLSEQHAHSIVSKMMMHEELQASWHQPTKCTVFHSLDQTRLQELLFQVAEKISVLVETNERAYELRTGGTLEGLPPRRRGEAQDSSKWQESFVASQGRQGGGNRFGYSGRGAASGQSGGLQRGRGNHVSRGGYGGNTRFQDASAHMVNLNRVGRVVSV

SEQ ID NO: 49025 - protein, 990 aa, Zea mays
  Coding DNA Sequence Number=SeqID_7246
  Gene Ontology: Mol. function=RNA-directed DNA polymerase activity; Cellular component=mitochondrion; Biological process=RNA-dependent DNA replication
  Homolog annotation: Hit_ID=UPI00005A975E; Match level="QueryCoverage =99%, HitCoverage=57%, E-value=0.0, Identity=88%"; Hit description =PREDICTED: similar to Retrovirus-related Pol polyprotein from transposon 297
  Pfam annotation: Domain name=RVT_1; Domain location=56-225; Score =149.9; E_value=6.9e-42; Accession=PF00078.17; Description=Reverse transcriptase (RNA-dependent
  Pfam annotation: Domain name=RnaseH; Domain location=455-582; Score =8.0; E_value=1e-05; Accession=PF00075.14; Description=RNase H
  Pfam annotation: Domain name=rve; Domain location=780-939; Score =125.0; E_value=2.1e-34; Accession=PF00665.16; Description=Integrase core domain
  Pfam module annotation: Pfam domain module=RVT_1::RnaseH::rve; Domain location=56-225::455-582::780-939
MPDIPRDVAEHSLDIRAGARPIRQPLRRFDEEKRRVIGEEIHKLMAAGFIKEVFHPEWLANPVLVRKKGGKWRMCVDYTGLNKACPKVPYPLPRIDQIVDSTAGCETLSFLDAYSGYHQIRMKESDQLATSFITPFGMYCYVTMPFGLRNAGATYQRCMNHVFGEHIGRTVEAYVDDIVVKTRKASDLLSDLEATFRCLKAKGVRLNPEKCVFGVPQGMLLGFIVSERGIEANPEKIAAITSKGPIKDLKGVQRVMGCLAALSRFISRLGERGLPLYRLLRKTECFAWTPEDEEALGNLKALLTKAPVLVPPADGEALLVYVAATTQVVSAAIVVERQEEGHALPVQRPVYFVSEVLSETKIRYPQVQKLLYDVILTRRKLRHYFESHPVTVVSSFPLGEIIQCREASGRIAKWAVEIMGETISFAPRKAIKSQVLADFVAEWVDTQLPTAPIQPELWIMFFDGSLMKTGAGAGLLFISPLGKHLRYVLRLHFPASNNVAEYEALVNGLRIAIELGVRRLDARGDSQLVIDQVMKNSHCRDPKMEAYCDEVRRLEDKFFGLELNHIARRYNETADELAKIASGRTTVPPDVFSRDLHQPSVKIDDAPEPEVPSAQPEAPSAQPEAPSAQPEVPSAPEGEALDVEEEQSGATPDRDWQAPYLQYLRRGELPPDQVEARRVARRAKSFVLLGDEEELYHRSPSGILQRCISITEGRELLQEIHSGACGHHAAPRALVGNAFRQGFYWPTTVDDATRIVRTCEGCQFYAKQTHLPAQALQTIPITWPFAVWGLDLIGPLQKAPGGYTHLLVAIDKFSKWIEVRPLNSIRSEQAVAFFTNIIHRFGVPNSIITDNGTQFTGKKFLDFCEDHHIRVDWAAVAHPMSNGQVERANGMILQGLKPRIYNDLNKFGKRWMKELPSVVWSLRTTPSRATGFTPFFLVYGAEAILPTDLEYGSPRTRAYTDQSNQASREESLDQLEEARDKALLHSARYQ

SEQ ID NO: 49026 - protein, 109 aa, Zea mays
  Coding DNA Sequence Number=SeqID_7247
MGDNGHSLVPCCAGHARNAQGSKKMLAVNGGLTDKSIEKHETSHAILATLPAIPFHRRPMASKMVALACPIKYRVDPCLPINNPAQTSQPRTRCFAEPATTTYHEDTDA

SEQ ID NO: 49027 - protein, 124 aa, Zea mays
  Coding DNA Sequence Number=SeqID_7248
MTNQAPAKKELCRTCAPPLPFGLTLGNGSRRSASPRIADELATEDPEVQQVETAEQELVEGNLERASTLGYRALGEKELGRAKKEKGKFGGEKEKGGKGREAAAGPPWGWAGMGGGRTRWAAKG

SEQ ID NO: 49028 - protein, 166 aa, Zea mays
  Coding DNA Sequence Number=SeqID_7249
  Subcellular localization annotation: CTP_CleavageSite=36; ConfidenceScore=5.15e-01
MHSGGRFFNFRPHILRPHWENRPRRPSPKKLASFLPCSTQSSSLARHCAGKPNHRLELPADLADGRRENGLVEESEEFTGEDPEQHLVVMRMMVLVLTMVMVVRVATTAQEKMKPWKETSRSSKITTSSRRGLAATPSRLPVKAACIYVSFPHFDYCKDYVDVSDI

SEQ ID NO: 49029 - protein, 189 aa, Zea mays
  Coding DNA Sequence Number=SeqID_7250
  Homolog annotation: Hit_ID=Q6ETN2; Match level="QueryCoverage=90%, HitCoverage=70%, E-value=1e-37, Identity=55%"; Hit description =Integral membrane protein-like
MAAAGALLLGFSAQTKTVLFIQKKAVPKDVQALCSFYHACAVADRCPCVARACLPACAVHARVLIVAAAAAAAYHVAQLARCLCMERLAIGGGGCRRLGRAVACASFLLDKGCAYMVFATTVAALQACFVGLLGVDALQWSKLCNIYTRFCEQAAAGMVCSLLAAAGMAVLSAFSARDLFRRPCSPEYR

SEQ ID NO: 49030 - protein, 102 aa, Zea mays
  Coding DNA Sequence Number=SeqID_7251
MARGWQGSHRGAGWEARLGTGGRAALAAMAEPHRAAALLRVSCTRTRAGQADRLRGLDTPRRGAWEWRSGCASREKGETRERETGGGVVQAWSAFGGGRRGD

SEQ ID NO: 49031 - protein, 123 aa, Zea mays
  Coding DNA Sequence Number=SeqID_7252
  Gene Ontology: Mol. function=RNA-directed DNA polymerase activity; Biological process=RNA-dependent DNA replication
  Homolog annotation: Hit_ID=Q9ZTP2; Match level="QueryCoverage=99%, HitCoverage=9%, E-value=4e-36, Identity=61%"; Hit description=Prpol
MESSFEGLSVKNISRANNEHADMLAKSIAQGLPLPPEVFFKILKAPSVELMERAILTVSATHSEEWRIEIISFFQGNHPTDDEVYIKRMQARKKPYKIIEGNYSKKVFVRPNSSAFLETKAKI

SEQ ID NO: 49032 - protein, 116 aa, Zea mays
  Coding DNA Sequence Number=SeqID_7253
MGSLEMVADNEDEGHTGFDMEHNKSLGLEAKYSGHISLVVLSLSWVLLSHGSDVFVCSGAHTPHALDAQEDRDARIHELEDRIRDLNNATSKWCFYSYIDGRSPVAMQLKLDSSNY

SEQ ID NO: 49033 - protein, 103 aa, Zea mays
  Coding DNA Sequence Number=SeqID_7254
MGGAIHGNKRGGWRPHHGKEQGGRWTEGRGELQGVASATRKQKQGCALGWMLSRSWKPWKERPSAMGRDEGGTAMGEEQKMTGKLEHLVRRDREKGQRARLRN

SEQ ID NO: 49034 - protein, 59 aa, Zea mays
  Coding DNA Sequence Number=SeqID_7255
MGRRWRDSDCAKVAPGVTHLFHNRHHVAAEAEAISDRAIKKAEDDEILKICELIYDKAM

SEQ ID NO: 49035 - protein, 71 aa, Zea mays
  Coding DNA Sequence Number=SeqID_7256
MQERDAVERGRERRRGRKKRRHNSIDGIHGGLNGGREKGKWGEEEKRRLSGSGVTVGHGVGGLGAGGCSAG

SEQ ID NO: 49036 - protein, 46 aa, Zea mays
  Coding DNA Sequence Number=SeqID_7257
MENGIRIKVWYRSLEEMVAGITWPSTLPPGWTVEWDPASAEEEHEE

SEQ ID NO: 49037 - protein, 446 aa, Zea mays
  Coding DNA Sequence Number=SeqID_7258
  Gene Ontology: Mol. function=RNA-directed DNA polymerase activity; Cellular component=intracellular; Biological process=RNA-dependent DNA replication
  Homolog annotation: Hit_ID=UPI00004C1733; Match level="QueryCoverage =99%, HitCoverage=32%, E-value=0.0, Identity=93%"; Hit description =UPI00004C1733 related cluster
  Pfam annotation: Domain name=RVT_1; Domain location=56-225; Score =131.9; E_value=1.7e-36; Accession=PF00078.17; Description=Reverse transcriptase (RNA-dependent
MPGIPRDVTEHSLDIRAGARPVKQPLHRFDEEKRRAIGEEIHKLMAAGFIKEVFHPEWLANPVLVRKKGGKWRMCVDYTGLNKACPKVPYPLPRIDQIVDSTAGCETLSFLNAYSGYHQIRIKESDQLATSFITPFGMYCYVTMPFGLRNEGATYQRCMNHVFGEHIGRTVEAYVDDIVVKTRQASDLLSDLEATFRCLKAKGVKLNPEKCVFGVPRGMLLGFIVSERGIKANPEKIAAITNMGPIKDLKGVQRVTGCLAALSRFILRLGERGLPLYRLLRKAECFNWTPEAEEALGNLKALLTNAPILVPPAAGEALLIYVAATTQVVSAAIVVERREEGHALPVQRPVYFISEVLFETKIRYPQIQKLLYAVILTRQKLRHYFESHPVTVVSSFPLGEIIQCREASGRIAKWAVEIMGETISFAPRKAIKSQVLADFVAEWVDT

SEQ ID NO: 49038 - protein, 249 aa, Zea mays
  Coding DNA Sequence Number=SeqID_7259
  Gene Ontology: Mol. function=kinase activity; Cellular component =ornithine carbamoyltransferase complex; Biological process=amino acid metabolic process
  Homolog annotation: Hit_ID=Q6QP54; Match level="QueryCoverage=59%, HitCoverage=45%, E-value=5e-19, Identity=48%"; Hit description =Putative kinase
  Subcellular localization annotation: CTP_CleavageSite=82; ConfidenceScore=5.49e-01
MASPIIEHVSGTIIRGTPKTPNLSWARTRTQPRKTTNSTSPDPKARTRAQPQKTTNSASPDPRARNRAQPRKTTNSASPDPRARTRAQPRKTTNSASPDPRARTRARPQKTTNSASPDPRARTQPWASADGLRLARPRGSDSTSASEVRLDLNLGGASASPNPGRGPTTSQEAPSLPYPKLTQATGERDLRPIWLAPWLSAPLPNQGYVSKDSTAPTAVLPLGSSVLLTSMSHQLGMRIALRGGPRVCR

SEQ ID NO: 49039 - protein, 123 aa, Zea mays
  Coding DNA Sequence Number=SeqID_7260
MALSEDAMGSGNNNIGDDSITEVLPFVDDLAAEADELTTTLASQDKFLRFSARERKEYKSKTVQLQTLHPRVSQVALRYNSPDCPVHQRSNGYFAQRSPAKAEFQMNSAQTVRGRAEQSSEAH

SEQ ID NO: 49040 - protein, 97 aa, Zea mays
  Coding DNA Sequence Number=SeqID_7261
MPRREKGRDGPRSSWAGQEGVGAGPWEGRAGLAEREKQFIPPNSGCYTKWPRQRILRVGEAKPTTCVEDRVLKAEEHHSRAWSAELAMVDAARKHLW

SEQ ID NO: 49041 - protein, 678 aa, Zea mays
  Coding DNA Sequence Number=SeqID_7262
  Gene Ontology: Mol. function=zinc ion binding; Cellular component =nucleus; Biological process=regulation of transcription, DNA -dependent
  Homolog annotation: Hit_ID=Q2QWZ2; Match level="QueryCoverage=88%, HitCoverage=73%, E-value=0.0, Identity=60%"; Hit description=SWIRM domain containing protein, expressed
  Pfam annotation: Domain name=Myb_DNA-binding; Domain location=313 -358; Score=48.5; E_value=2.3e-11; Accession=PF00249.21; Description =Myb-like DNA-binding domain
  Pfam annotation: Domain name=SWIRM; Domain location=80-170; Score =85.6; E_value=1.5e-22; Accession=PF04433.7; Description=SWIRM domain
  Pfam module annotation: Pfam domain module=Myb_DNA-binding::SWIRM; Domain location=313-358::80-170
MRPSSRCSRPERSACSGDVPTVALPALENISHGQLQVLSGVLPDHPSLATDPDKPSLYVCTPPPLMEGHGVPKQFQGRFHVVPKHSDWFSPGTVHRLERQVVPHFFTGKSPGHTPEKYVMLRNKVIAKYLENPSKRLAFAECQGLVGSTSELYDLSRIVRFLDTWGIINYLAAGSVHRGLRMATSLLREEPTGELQLLTAPLKSIDGLILFDRPKCSLPVEDISRMAATSSNSEAVDFDAAFSDLDGKIRERLSESSCSYCLQPLPSLHYRSQKEADIFLCSDCFHDARYITGHSCLDFQRVDGDNDESENDSDKWTDEETLLLLEGIEKYNDNWDDIAGHVGTKSKAQCIYHFIRLPVEDCLLENVEIPNAPIPFRPQSNGYQCLDSNGSTSGAPVQNIQQGNELPFINSSNPVMSLVAFLASSIGPRVAASCAHAALSFLTRDEDSRVSSEGSHAGGLGNGANPNFQNHNGASPSISPGNVKYAAMLGLSAAAMKSKLFADQEEREVQRLTATVINHQLKRLELKLKQFAEVETLLLKECEQVERVRHRISAERVRMRSALLGPTGSGLPGGSCSTMPSNPAGMSPRPVGVPGYMPQTSMPATYANNLQGHGNPQMPFLHQRPQMLSFGPRLPLSAIQTQPSPQSSNMFNSGMPNSIAPNHHQLLRSSSGNNSSAG

SEQ ID NO: 49042 - protein, 475 aa, Zea mays
  Coding DNA Sequence Number=SeqID_7263
  Homolog annotation: Hit_ID=Q2QLW7; Match level="QueryCoverage=33%, HitCoverage=9%, E-value=8e-11, Identity=25%"; Hit description =Retrotransposon protein, putative, unclassified
MDPQITDPREPIWCEIENQKGRKTLNQGKEVWKNFKIKHLPIELKWSDWVPTRDIKCRDIREKEPGVYVPAWLTPPRKKSKNRVEVISGKYRGGEAKKPEPGHFNSHHPPELAKGAQPLHTSETNPKSPTLSHLSRFVGHFWGKPRRSFASVVKNPRAPTTVVKMQPRGAGRRGGVASRGTGRRSARENVWRRVEEGSSSAHRQEADPTDEEKMKGEEPHQQNPWEQQRKSPEGKSGIDWRHVAEDEDFKEENIKKEESIDTRMIRERSSTAVISVVQGTVGEKQIEQEFVNLVGKNIWRWTARSIGENKFLMRFPDPKMIKDLGYFRPLGMRTAKAQITIDPWSPAVSAKSCLQRGWFRIRGIPIEQRSIKTIAKVGGLVGKVVEIDEKTRVRNEYVRVRIACRDVSIVPCTVESSLGLFIYDFHFEREIQEEDPHDNRGSGIKIDDQDQNNAKRTKFEGNPWSEGKNKGKTQE

SEQ ID NO: 49043 - protein, 250 aa, Zea mays
  Coding DNA Sequence Number=SeqID_7264
  Gene Ontology: Mol. function=electron carrier activity; Cellular component=extracellular region; Biological process=cellulose and pectin-containing cell wall organization and biogenesis
  Homolog annotation: Hit_ID=Q75I75; Match level="QueryCoverage=91%, HitCoverage=89%, E-value=2e-96, Identity=70%"; Hit description =Expansin-A31 precursor
  Pfam annotation: Domain name=DPBB_1; Domain location=58-145; Score =140.4; E_value=4.7e-39; Accession=PF03330.8; Description=Rare lipoprotein A (RlpA)-like double
  Pfam annotation: Domain name=Pollen_allerg_1; Domain location=156 -233; Score=106.9; E_value=6.1e-29; Accession=PF01357.11; Description= Pollen allergen
  Pfam module annotation: Pfam domain module=DPBB_1::Pollen_allerg_1; Domain location=58-145::156-233
MASSFMLCTVVVAACLAAAAADWSQGTATFYGGVDASGTMGGACGYDNLYNAGYGVNTAALSPTLFNDGASCGQCYLITCDGTRPGGQYCKPGNSITVSATNLCPANYALPNGGWCGPGRPHFDMSQPAWENIGIFGGGIIPVLYQQVKCSRTGGVRFGLAGSQYFLLVNIQNLGGSGSVGAAWVKGDRTNWIQMSRNWGANWQALAGLVGQGLSFAVSTTGGQYIQFWNVAPGWWQFGQTFGTNLNFYY

SEQ ID NO: 49044 - protein, 112 aa, Zea mays
  Coding DNA Sequence Number=SeqID_7265
MAHRQQLTTKRGSETVLRSRRAIQTPNEVFPAPIRHDHIPRVQANHPDHVLPPTRRSRDAHIGLEKWKLLKMRPIVVSASVSMRGGWRKNRNNPSVVTAHRLRLRFGEACVQ

SEQ ID NO: 49045 - protein, 127 aa, Zea mays
  Coding DNA Sequence Number=SeqID_7266
MNGGARRVRQAGPRAGEVSVRERMGKRERLTQRTHMTAAVEERVVCLRQLARGRIMMDPQLCSWSKAEVGRGGDSSEAEDEVGRGCDSSRGRGRARRRFFPEAEAEAEAWGRARRRPSPEADAEAGA

SEQ ID NO: 49046 - protein, 49 aa, Zea mays
  Coding DNA Sequence Number=SeqID_7267
MVALLSRVVTPRTGPYREDIIGQRTLAFTRLLLREVSNNTLKNLGLLVV

SEQ ID NO: 49047 - protein, 97 aa, Zea mays
  Coding DNA Sequence Number=SeqID_7268
MRAPTLVSLTCRLCSTVVWDHTVRRTAARKTGIPHRTWSSAADPHRVVDSFSGPSIPGRKDLRGWPWRRRIALSAARFGSVGRRWPPGRWIVPYGGD

SEQ ID NO: 49048 - protein, 90 aa, Zea mays
  Coding DNA Sequence Number=SeqID_7269
MARAREHKSLLLPLVCDSPHQLPHATTVALPVAVIHAPDRLAPPELHATEVACSAPRGLELFLEYHFVRTYSLDDHPRKQYNHEDGMGHP

SEQ ID NO: 49049 - protein, 160 aa, Zea mays
  Coding DNA Sequence Number=SeqID_7270
MSTLRDQGRAPGCWAAAPGSRAGGRAGHDGAGERRRGVGQGQAERAAAGGARTAAPPGGGAGAGGPRRGWGAPPRGGAGVGGPRRRGEGRGGRRHAWGRGGVTPHRRGQGQAAPGQGRARRGEGEGARREENMRERERERGDGRGAHLRDPTPAITVSKT

SEQ ID NO: 49050 - protein, 304 aa, Zea mays
  Coding DNA Sequence Number=SeqID_7271
  Gene Ontology: Mol. function=DNA binding; Cellular component =nucleosome; Biological process=chromosome organization and biogenesis (sensu Eukaryota)
  Homolog annotation: Hit_ID=Q9FYS5; Match level="QueryCoverage=59%, HitCoverage=93%, E-value=5e-48, Identity=60%"; Hit description=High mobility group I/Y-2
  Pfam annotation: Domain name=AT_hook; Domain location=113-125; Score =13.7; E_value=0.097; Accession=PF02178.9; Description=AT hook motif
  Pfam annotation: Domain name=AT_hook; Domain location=138-150; Score =12.2; E_value=0.18; Accession=PF02178.9; Description=AT hook motif
  Pfam annotation: Domain name=AT_hook; Domain location=173-185; Score =10.1; E_value=0.42; Accession=PF02178.9; Description=AT hook motif
  Pfam annotation: Domain name=AT_hook; Domain location=87-99; Score =14.4; E_value=0.075; Accession=PF02178.9; Description=AT hook motif
  Pfam annotation: Domain name=Linker_histone; Domain location=13-81; Score=55.2; E_value=2.1e-13; Accession=PF00538.9; Description=linker histone H1 and H5 family
  Pfam module annotation: Pfam domain module=AT_hook::AT_hook::AT _hook::AT_hook::Linker_histone; Domain location=113-125::138-150::173- 185::87-99::13-81
MATDEATKPSPIPPYPEMILAAIEGLDDKSGSNKSAISKYIEGKYGSLPPAHASLLTAHLARMKESGELVFLKNNYFRAGAPDAPPKRGRGRPPKARDPNAPAPAPKSPSSTGRGRGRPPKAKSPLEAAVKQATAGMPKPRGRPPKKAKTDGAASPSPSPAPAPAGDGSTPGKRGRGRPPKFHRVSLVLCAGSVDAWELQLFASAVHSCGVGTLGRGGLAGPVRDEDETWGEQVSTVDTESARPEGLRRRTAYHLPEPEHLGLGWVIGWRGDCLLASRGVGGRNVGARGVIQGRIQSWGILQPA

SEQ ID NO: 49051 - protein, 1132 aa, Zea mays
  Coding DNA Sequence Number=SeqID_7272
  Gene Ontology: Mol. function=phosphatidylinositol phosphate kinase activity; Cellular component=mitochondrion; Biological process =phosphatidylinositol metabolic process
  Homolog annotation: Hit_ID=Q8H3L8; Match level="QueryCoverage=99%, HitCoverage=69%, E-value=0.0, Identity=71%"; Hit description=FYVE finger-containing phosphoinositide kinase-like
  Pfam annotation: Domain name=PIP5K; Domain location=891-1123; Score =189.8; E_value=6.4e-54; Accession=PF01504.9; Description =Phosphatidylinositol-4-phosphate 5-Kinase
VLLRGSCREELKRIKRAVQLAVFAAYHLSLETSFFADEGATLPKLPSRHVVVDPDTRNCTNSNSAALTNVGMPHGRKSEHDKLSQTAMVNIMFENTPVSPSSLPSNGEGHMFVGACQHKETEYSVDHKNSCEHCVSRATGSCNGYETSLCSSDNDSMTQNQNLQNSAKLTSNAHQYEFPAKECQQVDHWDRQPHDDQSVDQRDLNKFSGEYFPGSDNHQSILVSLSSTCIPKGLVCERSHLFRIKFYGSFDKPLGRYLRDDLFDEAYRCQSCKEPSESHIRRYTHQHGSLTISVRRLQSRKLPGERDGRIWMWHRCLKCKPKDGVPPATRRIIMSDAAWGLSLGKFLELSFSNHASANRVASCGHSLQRDCLRFYGYGNMVAFFRYSPVDILSVNLPPPVLDFNCCSTQEWLKRVAVEIFGKMESLHVEVSEFLHCTEKNIVTEDEPVRECVQRQIIEMKDWLKMQRNEYEVMLLLPVMRESNHPMQTSIDILELNRLRRGLLLDAYIWDRRLCHIDSVLNTHGHISKTNPDNLDILLCTRLKEWKADLLCGDTEIEKSLGSPKKSLLSREGHLNDNEYSVADTNLEICLEGHPVDDADDLDKVYNKFSGVKKRPTAEPTDGLEPVERLPSLASIFSDTIDLAWTGSCDLQHDLPQAFTKIDENVSFNLDSPKYSNLVTPVRIHSFSSTLGLRQRERTGLVPASLHLSSFKSAEYFGAMRSILKDPMPNMRRSCSQRSPGTIEKLNVVLARKPTYISSTSNIINDGARLLLPQTGYEHDVVVAVYEDEPTSIISYAMTSEEYVEQVTHRLNSSLSFSHQPNTNGISSHGLEASSPSQGDHLHSKGTHFKLSFDDDSPISPDKTKFSVICYFAKHFAALRKKCCPKDIDYIRSLSRCKRWNAQGGKSNVYFAKTLDERFIIKQVTRTELESFVEFAPQYFKYLMESLASGSPTCLAKIVGLYQVGVKSLKTGKEVRMDLMVMENVFFERKISRVYDLKGSLRSRYTAGDSKVLLDANLIEALHTKPIFLGSKAKRRLERAVWNDTSFLALADVMDYSLLVGIDEEKKELVIGIIDYLRQYTWDKQLETWVKASGILGGPKNESPTVISPMQYKKRFRKAMSKYFLTVPDQWSS

SEQ ID NO: 49052 - protein, 266 aa, Zea mays
  Coding DNA Sequence Number=SeqID_7273
  Subcellular localization annotation: CTP_CleavageSite=44; ConfidenceScore=5.11e-01
MVDGPAAAHALVSVALTSPFHPLMDFGDALMVLARPVLRRWRPQCTHAPARTRRLPTSPVVTVASPSVAPPHQPHHPAFPRTPLRASPKLRRVIPTLPSKPRSSTTSRRIMGEHHQPPWASPPSAPSSSAPRPPPAPATAVGRPGPWSRTSGVLYNINTEESRIVLHNGNSLPLLQPVCSKASFSSYANLLDLYWLLSGAPNLVLSTVRNHPASDSESAGADIALSRVKSLPVDSSGEVISSGGRTDDACGGSSIGDEREPTVGNE

SEQ ID NO: 49053 - protein, 226 aa, Zea mays
  Coding DNA Sequence Number=SeqID_7274
  Gene Ontology: Mol. function=zinc ion binding; Cellular component =intracellular
  Homolog annotation: Hit_ID=Q109Q1; Match level="QueryCoverage=61%, HitCoverage=32%, E-value=3e-27, Identity=48%"; Hit description =Endonuclease/exonuclease/phosphatase family protein, putative, expressed
  Pfam annotation: Domain name=zf-RanBP; Domain location=12-42; Score =21.6; E_value=0.002; Accession=PF00641.9; Description=Zn-finger in Ran binding protein and others
MPSPSRSPTTPPVASEWSCVRCTLLNPDHSDSCVACEASRPVEVDIDSPVVVGAALALASPKRSRRKNERSASPPPQRFGRKREHDASPEVVELCDIAGKGPATKKGNLEICLDKKTFKIMTYNVWFREDLELRSRMDALGDLIKQHCPDFICFQVDALSYELFSFPVLMVLICGTVGQEVTPYIYMLMQKSDWWQQYTCLLSHENAIQMPYYCMQLLDECSHHCY

SEQ ID NO: 49054 - protein, 177 aa, Zea mays
  Coding DNA Sequence Number=SeqID_7275
MAERRHHMERELLIGAIESCPRSTSCCGLGTVRLDESIHRSIANRSSVSNLRHGAASCRGASPLPLHRWPHSVTLPRLLGRGVSVYVKGKCALGPFLSILVIECQLKCLNVNLCHGCIEGKSRAKEEKEKKRVGCVQPEGCFGLEHRTVRWCTGQCPVRQAASAEEAALGNWLTVYG

SEQ ID NO: 49055 - protein, 372 aa, Zea mays
  Coding DNA Sequence Number=SeqID_7276
  Homolog annotation: Hit_ID=Q6YT10; Match level="QueryCoverage=56%, HitCoverage=64%, E-value=3e-62, Identity=62%"; Hit description =Putative lateral root primordia
  Pfam annotation: Domain name=DUF702; Domain location=93-239; Score =262.0; E_value=1.2e-75; Accession=PF05142.3; Description=Domain of unknown function (DUF702)
MAGFPLGGGGHGRGDHHHHHHPHVNPSSASGSDSATAAAYLYTAAAPRGGFQLWPHHPAEEHHHHFYAPNIIRFADDPFAGSSRGGRGSDAFVAAGAGTISCQDCGNQAKKDCVHMRCRTCCKTRGFDCPTHVKSTWVPAAKRRERQQQVTEPSKRHRDATVGAQPSSTTATTTSSGEQQQMAVAAERFPREVSSEALFRCVRLGPVDEPGAEVAYQTSVNIAGHVFKGILHDVGPDPSSSVAAGGGGFRHATDGSSPGTAGRRQRRGGGARLVIGCGHGPVPDADDARTVRRLAFLPRPSELGNLMLVAAGGGVRGEWGERRDFFQSSYAQLSRIGRRLAESDIYVSRRESNDDEMLGKEEILLLCACNSS

SEQ ID NO: 49056 - protein, 210 aa, Zea mays
  Coding DNA Sequence Number=SeqID_7277
MKGTASSRQRLEQLISPLLDQQRSSDHSFALVEATATEDTVVADDEADQVIDDEANQEADDEADQTTGDEAEAKAITDEAESDEVAAAATSNIRLLEMVLSLPLSRRMLRGTQGSTSRSPGDSLRRQCNTKVGRGDATTTVGDATNATIDANDAISKYVYVDASTGFWDRSLQPNDAPNDVVGIRSVGAASDDSADAASDANADAAATVS

SEQ ID NO: 49057 - protein, 68 aa, Zea mays
  Coding DNA Sequence Number=SeqID_7278
  Homolog annotation: Hit_ID=Q10SX6; Match level="QueryCoverage=56%, HitCoverage=30%, E-value=7e-09, Identity=64%"; Hit description =Rhodanese, putative, expressed
MEYAPSSLAFVVHRLSVSHLPQKPSRLGSEARVTIVDVRDEERGYDSHIVGFHHYANDTYAERMPELA

SEQ ID NO: 49058 - protein, 171 aa, Zea mays
  Coding DNA Sequence Number=SeqID_7279
  Homolog annotation: Hit_ID=Q5Z974; Match level="QueryCoverage=28%, HitCoverage=7%, E-value=8e-11, Identity=73%"; Hit description=Cell division protease ftsH homolog, chloroplast precursor
MVLGRRVEHLEDARAVGRLPYAEQRGPCMEPRCQLEPWWTQHRSCTPPRAWCDTLHLVEVEPVVHSPCASIPNGLAAMAVPRSEAERVAVVVIVEGWRAGGRSANGGDKGGERGGEHGEHADLVARMSMRSESLGTTSMVRQPLTAVSWSRPPSLEKLMHSTLPHLTADRT

SEQ ID NO: 49059 - protein, 750 aa, Zea mays
  Coding DNA Sequence Number=SeqID_7280
  Gene Ontology: Mol. function=protein dimerization activity; Cellular component=nucleus; Biological process=regulation of transcription, DNA-dependent
  Homolog annotation: Hit_ID=Q2QRD1; Match level="QueryCoverage=92%, HitCoverage=69%, E-value=0.0, Identity=60%"; Hit description=HAT family dimerisation domain containing protein
  Pfam annotation: Domain name=hATC; Domain location=642-725; Score =106.9; E_value=6e-29; Accession=PF05699.5; Description=hAT family dimerisation domain
  Pfam annotation: Domain name=zf-BED; Domain location=87-137; Score =25.7; E_value=0.00016; Accession=PF02892.5; Description=BED zinc finger
  Pfam module annotation: Pfam domain module=hATC::zf-BED; Domain location=642-725::87-137
MEHRYDPTSINHDLVLMGQTPDDVDDVHDGLEDLFGSTAPTPNPTPNPTPNPTINLGDDNVAAEGEALPDATASTTASTGRKRKCTSDVWEDMDKIFATENGVQVRVGARCHFCKKELVARSTIGTGHLSRHRDKCKRLHGRTGNQSMLRYNADGTVFRWEYSAEVARVQLCRLIARLDLPLCFADCDAFDEYIKTAHNPRHCNVSRQTTTRDMEKYFKERHAIVAEKLKSVTSVSLTSDIWSGNAKEDYLSVVAHFVNSDWQLEKRILAVRLIDCSHSGKNIAERIHAVVNEYELAKKVFSITLDNASANTRAMDHLTPLLSAYVGPLLLHQRCACHIINLAVHATFVELKPYLEDFRTAISFLNSSNQRIAAYKSFCVAMGVRPRKFGLDMEVRWNSTYLMLKQLIPYKSTFSVFIQTHYHPREEGTTLLSEAHWYVAEKILEFLERFYDSTVVMSGVYYPTSPLMLHHILHINKHMNMYENDNLLRHIVVPMKDKFLKYWGTIPLLYAFAFILDPRAKMRGFNNVLALMSQLTHSDYSGYLTTVRADLSDLFNKYDDKFGSVRLQRTSNATPGEGKSKYAWDLVFAADGIGSSSSMALGAGLGAFGASSSSGMVPELSRRTSASALLHAASTPGISGSELAAYLDSDTVQKFDDEFNLLDWWHDHKLTYPVLSILAKDIISVPVSTVSSESAFSLAGRLIEERRRRLGSGMVEMLSLLKDWEAADARMQHTTEDKIMEESFSDLFID

SEQ ID NO: 49060 - protein, 125 aa, Zea mays
  Coding DNA Sequence Number=SeqID_7281
MGATVATHTLSNRPRPPGPTSLRDYLRHLRQVSPPETDDIIEDSEVLVEDRLKLQALRITNNHLQKQKEILAAKCQRIIIHAKVRQMIPDEEQKAKELEQQIANMQGCNTQKFNYESLVKFYKKI

SEQ ID NO: 49061 - protein, 224 aa, Zea mays
  Coding DNA Sequence Number=SeqID_7282
MTRTAPSLQIQIGSHLMEGGSIDDHLSASIPSSSPNYMETSLEAKEADDGKVIGTEDEMETIYLGNGSVEEVKDVAECNEQPNCCTEDEQLKNTGVMERHPDASNHYIDICTNEIVPTATESSAPSVEIVVEKIVDELAESSLDSSISIPLPALVSTPANLEASSEQVAHDTDVQQPVKEAPDEEIDAKKTDAAKLPQNKPKANCCMIRASDCSGINRGISLYK

SEQ ID NO: 49062 - protein, 107 aa, Zea mays
  Coding DNA Sequence Number=SeqID_7283
  Gene Ontology: Mol. function=protein serine/threonine kinase activity; Biological process=protein amino acid phosphorylation
  Homolog annotation: Hit_ID=Q6RZW0; Match level="QueryCoverage=47%, HitCoverage=8%, E-value=3e-14, Identity=76%"; Hit description =Hypothetical protein G9-5
MAIDISDDESDEEVPQAIPLFPNADDHPFYLLQANHQYSKGSFFSYKKTMKAADNFSTVIGKGGFGTACKAQFSDGSIAAVKRMNKVSKQAEEELECLQKGKTSATN

SEQ ID NO: 49063 - protein, 118 aa, Zea mays
  Coding DNA Sequence Number=SeqID_7284
  Gene Ontology: Mol. function=RNA-directed DNA polymerase activity; Cellular component=chromosome; Biological process=RNA-dependent DNA replication
  Homolog annotation: Hit_ID=Q7XE81; Match level="QueryCoverage=99%, HitCoverage=52%, E-value=2e-21, Identity=39%"; Hit description =Retrotransposon protein, putative, LINE subclass
MALDLLGWVLKAIDKLRKGLLWKGRKEVKGGYYLLSWPKVTRPKELGGLSIHDLQKLGWALRVRWLWLQMTEPPRPWSEFQVQICDIVKKLVSVAVISQVGKHNDTLFWADNWLHGRS

SEQ ID NO: 49064 - protein, 34 aa, Zea mays
  Coding DNA Sequence Number=SeqID_7285
MRKHLWLCGVSGSRSSSKKENKDVGAQKCQSRSS

SEQ ID NO: 49065 - protein, 146 aa, Zea mays
  Coding DNA Sequence Number=SeqID_7286
MKPFPTFAETKNDLLLEELRLSTTATAAPATTLYNAPRASPSASRGVPLNHTLVPCRLELFDSLLTPGGGRGRGRKSGRSGTTALRVVPSGHLSTTHGQAPSTCGPGHPRVPRLLAPSLLKQIFFDTPPPAALKVPFAREQDLDVA

SEQ ID NO: 49066 - protein, 197 aa, Zea mays
  Coding DNA Sequence Number=SeqID_7287
  Gene Ontology: Mol. function=ribonuclease H activity
  Homolog annotation: Hit_ID=Q0KIQ6; Match level="QueryCoverage=73%, HitCoverage=14%, E-value=1e-08, Identity=28%"; Hit description=RNase H family protein
  Pfam annotation: Domain name=RnaseH; Domain location=46-166; Score= -8.8; E_value=0.00038; Accession=PF00075.14; Description=RNase H
MAPPNDPNLYHHTSQLSPWARPYHPGRVVMVQWSLPPHGWYKLNFDGSVYHDGSARASIGGAIRDSDGRVVLAFAEPTEHSTVGIVEARAMARVLRLALGLNLQRVVVEGDDLMLVRLLRGEDTRTRIPVALQEIHGLLRCFAGCDVRHVYREGNQVAHTLCRQAYHCPGVWVGTVPSVVFDKAEEDRRGVLHERSV

SEQ ID NO: 49067 - protein, 216 aa, Zea mays
  Coding DNA Sequence Number=SeqID_7288
  Gene Ontology: Mol. function=protein binding; Cellular component =extracellular region; Biological process=antigen processing and presentation of exogenous peptide antigen via MHC class II
  Homolog annotation: Hit_ID=Q10MT7; Match level="QueryCoverage=83%, HitCoverage=83%, E-value=2e-63, Identity=61%"; Hit description=Gamma interferon inducible lysosomal thiol reductase family protein, expressed
  Pfam annotation: Domain name=GILT; Domain location=28-137; Score =133.4; E_value=6.3e-37; Accession=PF03227.6; Description=Gamma interferon inducible lysosomal thiol reductase (GILT)
MDSRLAIAALLLLASASSAAAAADGGKVAVALYYESLCPYSARFVVNHLAKVFADGLREVVDLTLVPYGNARIHPGGEISCQHGPYECLLNTVEACAIDAWPDLDVHFSFIYCVEDLVVKRQYKDWESCFEKLGLDPKPVTECYKSEHGHKDYENFEAYICKAYKGTPPKACQGLGRLQMALETAAEARNGVSYNSGVSKLATAEDEGGEHKVGEY

SEQ ID NO: 49068 - protein, 94 aa, Zea mays
  Coding DNA Sequence Number=SeqID_7289
  Homolog annotation: Hit_ID=Q10MT8; Match level="QueryCoverage=73%, HitCoverage=27%, E-value=1e-19, Identity=69%"; Hit description=Gamma interferon inducible lysosomal thiol reductase family protein, expressed
  Pfam annotation: Domain name=GILT; Domain location=33-94; Score=-8.2; E_value=7.4e-05; Accession=PF03227.6; Description=Gamma interferon inducible lysosomal thiol reductase (GILT)
MAGPRRLLLLVPLLVLLGAHPPQCGSAEEGTKVSLELYYESLCPYCSRFIVNRLAGIFEDGLIDAVHLRLVPYGNARVASNSEISCQKHLATQQ

SEQ ID NO: 49069 - protein, 90 aa, Zea mays
  Coding DNA Sequence Number=SeqID_7290
  Homolog annotation: Hit_ID=Q10MU1; Match level="QueryCoverage=79%, HitCoverage=65%, E-value=3e-28, Identity=81%"; Hit description=CHCH domain containing protein, expressed
MSASSTPVDASGEPIPTSSVLMAASKHIAVRCRPENVAFLNCKKKDPKPEKCLEKGRQVTRCVLSLVRYVREAICEVTDVAVEHLALVMR

SEQ ID NO: 49070 - protein, 351 aa, Zea mays
  Coding DNA Sequence Number=SeqID_7291
  Gene Ontology: Mol. function=DNA binding
  Homolog annotation: Hit_ID=Q5VPS4; Match level="QueryCoverage=83%, HitCoverage=49%, E-value=5e-11, Identity=37%"; Hit description=NAM -like
MEKGQLSNEWAQEHNEQYLHDDWADSLGVFIENPEYVNTFENDMVSQQSFPSQEKVKEVLQQMQERNEKTEEKQEQQMQEILTLKGNKMRLIEKMFDLQKHEMEVRSKLKEEQLSLTKQDIEARAKQSEAQLLTTELGIMGADLDKLSPSVRAYYSAMQQQIMERRGIITPHDTSLAPLLQLESKVDRRNENGKNEQDRIDDAVKMYEEKEAFQFLHCWKMLRNEPKWNDKKCCSKCKRGMKKTEEKQEQQMQEILTLKGNKMRLIEKMFDLQKHEMEVRSKLKEEQLSLTKQDIEARAKQSEAQLLTTELGIMGADLDKLSPSVRAYYSAMQQQIMERRGIITPHDSNGA

SEQ ID NO: 49071 - protein, 89 aa, Zea mays
  Coding DNA Sequence Number=SeqID_7292
MASGKTDRIIETGINEGQYGLPAVAIGVAGRVRAAVAVAAAGRPFGLPPDLEAKLMRCIYNSRGLVARRVDAVTIDADLIRVGANSFSD

SEQ ID NO: 49072 - protein, 431 aa, Zea mays
  Coding DNA Sequence Number=SeqID_7293
MRDEAGQWRVATEVSVPWPVRGPARSPQRHLIASALWHMPVSLAEARPGPGNAVSRFRLTPALEAPAPRPIPPPATAHGWIRMARVLHSKSPGDDARSPAPLPACLPPPHSAPLAKATTRHGTVGHARTRERSSPSRGKAAQHAPHDFLQLHRSAGWQALIIRSETSQLPQEARASSCSTAATHAHHDQGEAEATDRPSEAGLSVRVRVRVPVPVARHGRASPSPHPPPSLPVAARPRARSPTWFAALRPAPAAETTGQLSARPHGNWESGRSPPLDAIRTRPDHHPPAATFAPPPPIPKAPTDCASPLLPNAFHPLSSSDSLRRLLGLPSSPCHCHCHCTCCADPSCGRVSNGAAAAAATEAAAPCVRLSCHHLPPRELRFVSSPWTLDFVGVIEVIGCAFGLMVFCCCLPARSRDWKLRSRCGEQWSFV

SEQ ID NO: 49073 - protein, 42 aa, Zea mays
  Coding DNA Sequence Number=SeqID_7294
MAASHKQFVSARGLHRPVLTRAEQRCFHFGPRPSQRLMVSNV

SEQ ID NO: 49074 - protein, 293 aa, Zea mays
  Coding DNA Sequence Number=SeqID_7295
MAAYAGTRTFHPRVRGGVGGAGRVPSMRAGRALLPLTAAEEEVAAQACWREEEGADVAEARFLVADAQSFHCCRGEISGSDQWDACVCEIVGHVYACVNMCYILRKQKVDPHTTVISAPTKLEVTGSTLTRMNPEIRCTNRSHLAIIHALGVSSLLTCPRDPPSRRRSRSHVTVVRTSRGRCRVHLRETLSRSSPTGSTAAAAATSPSCAPHGAVAACVPSGSDVAAAPTSLSCAPQGSTAMSVSPRSTVARLLPGSIVACLSWMGHILDLVRLNRLATSGQGFRSAIGSPGL

SEQ ID NO: 49075 - protein, 53 aa, Zea mays
  Coding DNA Sequence Number=SeqID_7296
MDDKGKGKGIIIGDPRMSIISQKKIARKASDEKAKKSEDAEVPIVISRLDSRV

SEQ ID NO: 49076 - protein, 161 aa, Zea mays
  Coding DNA Sequence Number=SeqID_7297
  Homolog annotation: Hit_ID=Q852K8; Match level="QueryCoverage=36%, HitCoverage=24%, E-value=2e-20, Identity=67%"; Hit description =Putative zinc finger protein
  Pfam annotation: Domain name=zf-AN1; Domain location=102-142; Score =68.6; E_value=1.9e-17; Accession=PF01428.7; Description=AN1-like Zinc finger
MTQKRKSIGRGGVEDCGSPARAAACTSTTAASTSTTVEEKNTPAVFETTPPLWMTGPAETKKPKIASSSSSSSSSSSSSPDGGSNNAAVAQAQPQPPPANRCSACRKKVGLLGFRCCCGKTFCGAHRYAEKHACGFDYKHAGRGRIAKENPIIVADKIAKI

SEQ ID NO: 49077 - protein, 48 aa, Zea mays
  Coding DNA Sequence Number=SeqID_7298
MEAMRATRGGVEGRTSGHLCLVLEEAELLSGRGNHLWRRQIGSVKVTK

SEQ ID NO: 49078 - protein, 1357 aa, Zea mays
  Coding DNA Sequence Number=SeqID_7299
  Gene Ontology: Mol. function=2 iron, 2 sulfur cluster binding; Cellular component=peroxisome; Biological process=electron transport
  Homolog annotation: Hit_ID=O23888; Match level="QueryCoverage=99%, HitCoverage=99%, E-value=0.0, Identity=84%"; Hit description =Aldehyde oxidase-2
  Pfam annotation: Domain name=Ald_Xan_dh_C; Domain location=597-708; Score=179.6; E_value=7.6e-51; Accession=PF01315.12; Description =Aldehyde oxidase and xanthine dehydrogenase, ab hammerhead domain
  Pfam annotation: Domain name=Ald_Xan_dh_C2; Domain location=719-1257; Score=877.7; E_value=5.3e-261; Accession=PF02738.8; Description =Aldehyde oxidase and xanthine dehydrogenase, molybdopterin binding domain
  Pfam annotation: Domain name=CO_deh_flav_C; Domain location=419-532; Score=130.7; E_value=4e-36; Accession=PF03450.7; Description=CO dehydrogenase flavoprotein C-terminal domain
  Pfam annotation: Domain name=FAD_binding_5; Domain location=238-411; Score=200.9; E_value=3e-57; Accession=PF00941.11; Description=FAD binding domain in molybdopterin dehydrogenase
  Pfam annotation: Domain name=Fer2; Domain location=9-80; Score=37.5; E_value=4.6e-08; Accession=PF00111.17; Description=2Fe-2S iron -sulfur cluster binding do
  Pfam annotation: Domain name=Fer2_2; Domain location=88-176; Score =181.3; E_value=2.4e-51; Accession=PF01799.10; Description=[2Fe-2S] binding domain
  Pfam module annotation: Pfam domain module=Ald_Xan_dh_C::Ald_Xan_dh _C2::CO_deh_flav_C::FAD_binding_5::Fer2::Fer2_2; Domain location=597 -708::719-1257::419-532::238-411::9-80::88-176
MGKQAAVVLAVNGKRYEAAGVDPSTTLLEYLRTQTPVRGPKLGCGEGGCGACVVLVSKYDPATDEVTEFSASSCLTLLHSVDRCSVTTSEGIGNTKDGYHPVQQRLSGFHASQCGFCTPGMCMSIFSALVKADKAADRPAPPAGFSKLTSSEAEKAVSGNLCRCTGYRPIVDACKSFAADVDLEDLGLNCFWKKGDEPADVSKLPGYDSGAVCTFPEFLKSEIKSSVEQVNGAPVPVSDDGWYRPKSIDELHRLFQSESFDENSVKIVASNTGSGVYKDQDLHDKYIDIKEVPELSVINRSNKGVELGSVVSISKAIEVLSDGNVVFEKIADHLNKVASPFVRNTATIGGNIIMAQRLQFPSDIVTVLLAAGTTVTIQVVSKRLCLTLEEFLQQPPCDSRTLLLSIFIPYWSSDGITFETFRAAPRPLGNAVAYVNSAFLARTSVDAASRDHLIEDTCLVFGAYGTDHAIRASKVEDYLKGKTVSSTVILEAVRLLKATVKPSEGTTHPEYRISLAVSFLFTFLSSLVNNESTKVNGPNGSCSNGATNGALEHSPEKHLKFDSNDLPIRSRQEIFLTDEYKPVGKPIKKAGAEIQASGEAVYVDDIPAPKDCLYGAFIYSTHPHAHVKAINFKSSLASQKVITVITAKDIPSGGQNIGSTFPMMGDEALFADPVTEFAGQNIGVVIAETQKYAYMAAKQAIIEYSTENLQPPILTIEDAIQRNSYFQVPPFLAPKPVGDYNKGMAEADQKILSAEVKLESQYYFYMETQVALAIPDEDNCITIYSSTQIPEVTQNVVAKCLGIPFHNVRLISRRVGGGFGGKAMKAIHVACACAVAAFKLRRPVRMYLDRKTDMIMAGGRHPMKVKYSVGFKSDGKITALHIDLGINAGISPDVSPMLPPAIIGALKKYNWGNLAFDTKVCKTNVSSKSAMRGPGDVQGSFIAEAIIEHVASALSVDTNTIRRKNLHDFESLVVFFEDAAGEASTYSLVTMFDKLASSPEYQRRAAMVEHFNRSNKWKKRGISCVPITYEVNLRPTPGKVSIMNDGSIVVEVGGVEIGQGLWTKVKQMTAFGLGQLCPDGGESLLDKVRVIQADTLSMIQGGFTGGSTTSETSCEAVRQSCVALVERLKPIKENLEAEAGTVEWSSLIAQASMASVNLSAHAYWTPDPTFRSYLNYGAGISEVEIDVLTGATTILRSDLVYDCGQSLNPAVDLGQVEGAFIQGVGFFTNEEYTTNSEGLVIHDGTWTYKIPTVDTIPKQLNVELINSARDQKRVLSSKASGEPPLLLAASVHCAMREAIRAARKEFSVCTGPANSAITFEMDVPATMPIVKELCGLDVVERYLESMSTAGPTTTAKA

SEQ ID NO: 49079 - protein, 79 aa, Zea mays
  Coding DNA Sequence Number=SeqID_7300
  Gene Ontology: Mol. function=structural constituent of ribosome; Cellular component=intracellular; Biological process=translation
  Homolog annotation: Hit_ID=P34788; Match level="QueryCoverage=78%, HitCoverage=41%, E-value=1e-24, Identity=82%"; Hit description=40S ribosomal protein S18
  Pfam annotation: Domain name=Ribosomal_S13; Domain location=4-79; Score=20.3; E_value=2.6e-07; Accession=PF00416.12; Description =Ribosomal protein S13S18
MCLTCRRVCRAGELTPEELERLMTVVANPRQFKVPDWFLNRKKDYKDGRFSQVVSNALDMKLRDDLERLKKISFFISYR

SEQ ID NO: 49080 - protein, 92 aa, Zea mays
  Coding DNA Sequence Number=SeqID_7301
MGRILGHFPSTAWLPWHVMGKEGKRTEAHLELQCQSGGHGAVRSSAAQGPGRGESELGEGRTGTGTALAREWPALRDSKLQSHILADGEDET

SEQ ID NO: 49081 - protein, 141 aa, Zea mays
  Coding DNA Sequence Number=SeqID_7302
  Subcellular localization annotation: CTP_CleavageSite=82; ConfidenceScore=5.61e-01
MSGAPRKLGLLNSPASGSRGSRSAKIHRTVRCAPDCPVCQRSNGSLRRQRLLALHLMRAQRAQTSGTPMPVHRTSNSACPVCTGHPGGPTSQKLQRLESNDSDDVAGAPDCPAVAATSSALAHRVADAPSGSALASSVDLS

SEQ ID NO: 49082 - protein, 339 aa, Zea mays
  Coding DNA Sequence Number=SeqID_7303
  Gene Ontology: Mol. function=N-acetyltransferase activity; Biological process=metabolic process
  Homolog annotation: Hit_ID=Q852L9; Match level="QueryCoverage=50%, HitCoverage=98%, E-value=2e-55, Identity=67%"; Hit description =Putative acetyltransferase
  Pfam annotation: Domain name=Acetyltransf_1; Domain location=229-308; Score=45.8; E_value=1.5e-10; Accession=PF00583.14; Description =Acetyltransferase (GNAT) family
MERRHPVANVGDLPAASVFEEDAHHDKEYFFRGWNLEDVAGDSLTKNAFCRWEPYASTEPLAFLRDIVLARAHWGKCVATAAVRRAHGDVELEGEWRRWRWTWPTGRCSCSAWRRRSASKQGQDAKLPLVTAHHHDTTKQKKRQKQRVGWEGGSEMEQEAPARPGSVPAVTLRRFELGDVDAMLEWASDPEVTAFMAWDACTSRDALLAFLRDAVLPHPWFRAVCLGGGGHCRPVGAVSVTPTDDACRAELRVVLARAHRGKGVATAAARRAVSAAFGDLPGVERVEALVDVDHNAAARRVLEKAGFQREAVLRSYRVVKGRLRDVAVYSFISTDPVVE

SEQ ID NO: 49083 - protein, 87 aa, Zea mays
  Coding DNA Sequence Number=SeqID_7304
MAMWGKRPLHHHIVDSDFWALSLPWLRTEHYGVGSVYTGGSSAAVERPPPRSRLVDLWYLKYESLDGDPMARIGYRFGVFEDLIWAV

SEQ ID NO: 49084 - protein, 93 aa, Zea mays
  Coding DNA Sequence Number=SeqID_7305
MAMWGKRPLHHHIVDSDFWALVNGRRASGDRMGHFQGSFGQNRGRKYRQLLTELSSPPCSEVTSHLKIILVPGISSLRQVVPLITSFTYSCSD

SEQ ID NO: 49085 - protein, 193 aa, Zea mays
  Coding DNA Sequence Number=SeqID_7306
MGVDGASGGRRGTTGRAKARALHEHARETARTRHELAVRTSGPSASRAQSCALKARWAELEATSGPSRREQGTAGRAGKRAGASEHGRARTRPGEDTAGRGRARGRVAEPGRDGSGRAGAREGRARQEAAKRARGSPEARRPRATRTGPNGSEFPSRPRVGTPADPAAYVVDPIASTPTTLRLPYALSTSVSN

SEQ ID NO: 49086 - protein, 226 aa, Zea mays
  Coding DNA Sequence Number=SeqID_7307
  Subcellular localization annotation: CTP_CleavageSite=44; ConfidenceScore=5.02e-01
MACSNAKKVNLCSEHLGPTRQRRNVRGRRAPTGGKGRLRWRFVGADQDAGRVPGRQRGWARLAGDSPDCRHTMRLWWDDGEARRASMARVRLQSFAAAAISVKAGHEKRNRVGGLAAVPQRTEGSGWPPRRREQRGGDPRSDWGGERRAGGQGLLAAACGDMTSDSPGEGAGRRWGSAGGVEERRVGRRDLPRRQPTTAGSAGAISFLYEGDRRGRYALGQLEEEE

SEQ ID NO: 49087 - protein, 223 aa, Zea mays
  Coding DNA Sequence Number=SeqID_7308
MGIESRVCCSTSIVPSGGGMPGHDPGARDLRQHHLRLGPPHARRRLLDGAARPRRRLPPDRLRRARGLPIRRPQRPPGSRRPRGVGSRAATALGVARLAVAGYRDRLNSDNRAYSFPPRARSAVPVASLGSPGPLSGRAVGARVGAWEALFDEVAGAEAAALRRRRSVARMGLYSLEEVEAIKARAEWWEWDAQSPAEICRLLRLGLPSLALSRADSSSTAEL

SEQ ID NO: 49088 - protein, 71 aa, Zea mays
  Coding DNA Sequence Number=SeqID_7309
MRGARPGVLPIYPQEMRTLLLPFYLLSFEEFRQCWEGVVLGSILIKDSQQQQKQLRSMIHLTMAGNEPRRG

SEQ ID NO: 49089 - protein, 92 aa, Zea mays
  Coding DNA Sequence Number=SeqID_7310
MGKANKSPSPAVAKEGDYSALRELFRPHVESFDYFLDKGLDEMIESIRPMLERFRVQSDVNEQGRSLMFLAIAAVSPETIHVIVKFKWTGIV

SEQ ID NO: 49090 - protein, 818 aa, Zea mays
  Coding DNA Sequence Number=SeqID_7311
  Gene Ontology: Mol. function=glycerophosphodiester phosphodiesterase activity; Cellular component=membrane; Biological process=glycerol metabolic process
  Homolog annotation: Hit_ID=Q6ZFH9; Match level="QueryCoverage=78%, HitCoverage=91%, E-value=1e-130, Identity=59%"; Hit description =Putative glycerophosphoryl diester phosphodiesterase 2
  Pfam annotation: Domain name=GDPD; Domain location=370-610; Score =28.8; E_value=1.1e-07; Accession=PF03009.8; Description =Glycerophosphoryl diester phosphodiesterase family
MGRSRRHEGGGGGERRGAGAGGVAAAAFAALLLGCVVMALVGGAAAQGPRLPSDYKTLSGAAPLVVARGGFSGAFPDSSEGAYSFGASASAPGTAMWCDVQLTKDGVGLCLRDVNMKNCTTVDQTYPGRKRTYVIDGVHKTGWFVPDFTSAELLQSVYLTQAIWSRTERMDGIYPIVTVPDVQSIVNTSPIWLNVQHPIFYKQRDLDMSSYIHSIRKLVRMDYISSPEIGFLRNISARVRRRTKLVFSFLDKKLLDHSVNQTYGSLARNLTFVRSVASGILVPKDYIWPVTADNYLLPSTSIVTEAHEAGLEIYASGFVNDKAVPFNYSYDPLAEYLNFVGDGGFSVDGVLSDYPITASEAIGKPLVISHNGASGDYPDCTDLAYHSAVDDGADVIDCPVQVTSDGVLMCMSSINLLDTTNVQRTPFATPSLVPSILINVILSSLINLSSLPQNAAFIAKSLGIDMVDSVTAALSAAGFSNQTTKEVLIRSTDSAVLVKLKQQKTRCKLVYTLPLGIGDASKPSLKDIKAFAEAVVVDRTSVFALSYDFIMGQNRIVRDLQAAGLAVYAQVFRNEYVAHPFDFLGDPTVEINYYVQTFNLSGMITDFPKTVRRYKENTCTALGKDMPKYMRPVEAGSLADFLRSFQTQPPSVAPMPALNSSSVEEPPLPTAAPRNVPPGGGAPADAAGTAGGAAPSDASSGGAPPSDARHTATGSSAKVCSFWEHRTVRWCTGQCPVRQAGSSELAALGNSPATYDYNSPDCPVSQRSAGPTVGRAICAGHVAEPTARRGHRTVRDEYHKVSGLDNAKQIWDTLKDLS

SEQ ID NO: 49091 - protein, 388 aa, Zea mays
  Coding DNA Sequence Number=SeqID_7312
  Gene Ontology: Mol. function=protein serine/threonine kinase activity; Cellular component=membrane; Biological process=protein amino acid phosphorylation
  Homolog annotation: Hit_ID=Q6H459; Match level="QueryCoverage=95%, HitCoverage=41%, E-value=8e-67, Identity=37%"; Hit description =Putative wall-associated kinase
MARAPAKVHAAAGTGTKASLSPCPSRCGDVEISYPFGIGLGCFRQGFELTCDQTAPSPRLFFVSGNSSIQASTPTPSLGRPLLPLVSVFYADNNYLYTVGCGVYVYVFGDNREIMESANTGSGVCEGLGCCSIPMRGGQGFTLKLGRLNSTIPQFGEALSSVKIIVSQNYEFVTDDVYASWVNTSNVQGMLLDIAITDQPNCASAQSQENKDTYACTSESICNDVLPPVVSQGGYSCFCPGQIEGNPYIEDGCIAYYNPEAPSIRNCTRLCGNISVPFPFGIEEGCYANDNLRLNCTINDTTLILDRGYAQYRVTNLSLDDGLLMVTNMLNDTSSKNVERIIITSNYDNYQEVMDGNYDFSQEDTAIKWVISNITCQKAMQNNATYAC

SEQ ID NO: 49092 - protein, 71 aa, Zea mays
  Coding DNA Sequence Number=SeqID_7313
MAAALRLQRQSLTASPFLFSAHGLRYRKLEVILTTNIDGLDGIGNHEPIKTKDKKFYERSEHWLLSNSSTN

SEQ ID NO: 49093 - protein, 566 aa, Zea mays
  Coding DNA Sequence Number=SeqID_7314
  Gene Ontology: Mol. function=transporter activity; Cellular component= membrane; Biological process=oligopeptide transport
  Homolog annotation: Hit_ID=Q6I5V4; Match level="QueryCoverage=92%, HitCoverage=93%, E-value=1e-118, Identity=43%"; Hit description =Putative peptide transporter
  Pfam annotation: Domain name=MFS_1; Domain location=39-508; Score =27.8; E_value=1.7e-05; Accession=PF07690.6; Description=Major Facilitator Superfamily
  Pfam annotation: Domain name=PTR2; Domain location=92-492; Score =269.6; E_value=6e-78; Accession=PF00854.12; Description=POT family
  Pfam module annotation: Pfam domain module=MFS_1::PTR2; Domain location=39-508::92-492
MDNGHGSIEKNAYTKCADPIDRWVRACMHDAVAEIGERFAFYAVASNLIIFLTGPLQEGIAAAAAATNVWNGTALMLPLLGGAIADLWLGRYLTIISASLLYTLGLGLLAVSTLVGHHCNAAATGDRCPAPPTIQVTLFYVSLYMVAVGEGGHKPCAHAFGADQFDQSDPGESVSRSSFFNWWYFGVCAGTAATLLVVSYVQESLGWHPGFAIPCAVMACTLVVFLLGTRTYRYTDTSGTRNLFAHAAEAFAGWRRRQRSRLRAAHRTSHQASHQGVVGVSAEEPPEASRRSRIDEEAQVVAATTAATNTAVVVSEAKDVLRLFPIWAMTLVYAVVYSQSMTFFTKQATTLDRRVGEVVKVPAAALLAFISITIMVLIPVYDGLIVPLSRRFTGRPSGITMLQRIGAGMLLSTVSTVIAALVEERRLRVAREAGLADEPRIQLPMSLWWMVPQYVVFGAADVFAMVGLQEFFYDQVPDRLRSVGLALYISIFGIGSFVSSALVSGIHRVTAARGQSWFSDNMNRGHLDYFYWLLAGLSALQFFAYVFFAWRYKYINRTLEPRTCDT

SEQ ID NO: 49094 - protein, 514 aa, Zea mays
  Coding DNA Sequence Number=SeqID_7315
  Gene Ontology: Mol. function=transferase activity; Cellular component= integral to membrane
  Homolog annotation: Hit_ID=Q0HA27; Match level="QueryCoverage=99%, HitCoverage=100%, E-value=0.0, Identity=95%"; Hit description=Beta 1, 2-xylosyltransferase
MMAGRAHGHRNRLRRLIPRLLLLLVAVYAASFAIYLLLQSHSHHQSPPDPTPRTEARDGVLAPSSSQKPWPRLPSFLPWVSSAVPPPPLHTCEAYFGNGFSRRVDVLPAGRGSGGGGWFRCHHSETLGSSICEGARVRLDPALIAMSRGGEPLEQVMGRAEEEELPKYEPGALQVEGPAAGMPVPLVDAGFLNDYVPTGGIGMHTMRALLESTRVVPPGELHCSQWVEEPTLLVTRFEYANLFHTITDWYSAYVSSRVTNLPNRPNVVFLDGHCKAQLEETWEALFSSVTYAKNFTVPVCFRHAILSPLGYETAMFKGLSESFSCEGASVDSLREKPDYEKTARLSEFGEMIVASFDLLQDDIMSSKKSNGLNVLFVRREDYLAHPRHSGKVESRLSNEQEVYDAIDKWAQGLKCKVNVANGLFAHMTMKEQLRAILEASVVIGAHGAGLTHLVSATPDTKVLEIISSMYRRPHFALISHWKSLEYHAINLPGSFARVTDVINELRKILEGLGC

SEQ ID NO: 49095 - protein, 130 aa, Zea mays
  Coding DNA Sequence Number=SeqID_7316
MAAMSQAPHTVSTKSATTATRRLPDVDWRVKVVSGLPIYSGRVDAETDRGPVIPGGGSQQPPSYPGFGLEEDDRREGPTRQPPNVEARLGRTVGGGLTVGGLGPRLDQHYGPRLRPKHDTSLVPGWSRHY

SEQ ID NO: 49096 - protein, 101 aa, Zea mays
  Coding DNA Sequence Number=SeqID_7317
MAAPGANKHQGTSISVPLRHALDSPEPKTHPGVAVHGVSAAPDSPLTTVDRPTEPLPKPRPNPREKTVHTSGEAPPSEESEFCFAGRSPVPRSLDSHPDRR

SEQ ID NO: 49097 - protein, 542 aa, Zea mays
  Coding DNA Sequence Number=SeqID_7318
  Gene Ontology: Mol. function=oxidoreductase activity; Cellular component=integral to membrane; Biological process=electron transport
  Homolog annotation: Hit_ID=Q7Y1K4; Match level="QueryCoverage=85%, HitCoverage=90%, E-value=0.0, Identity=76%"; Hit description =Putative cytochrome P-450
  Pfam annotation: Domain name=p450; Domain location=58-511; Score =248.8; E_value=1.1e-71; Accession=PF00067.12; Description=Cytochrome P450
  Subcellular localization annotation: CTP_CleavageSite=20; ConfidenceScore=5.40e-01
MDATLSTTTTQDSLLFLLPSAATLLSPLLTVLLVAVSLLWLFPGGPAWAFVSRSRATPPGAPGLVTALAGPAAHRALASLSRSLPGGAALSAFSVGLTRLVVASQPDTARELLASAAFADRPVKDAARGLLFHRAMGFAPSGDYWRALRRISSAYLFSPRSVAAAGPRRAAIGERMLRDLLSGAAGREVVMRRVLHAASLDHVMATVFGARYDAASPEGAELEEMVKEGYDLLGMFNWGDHLPLLRWLDLQGVRRRCRSLVGRVNVFVARIIEEHRHKKDDAIGEPAAAGDFVDVLLGLDGEEKLSDSDMIAVLWEMIFRGTDTVAILLEWVMARMVLHPGIQSKAQAELDAVVGRGRAVCDADVARLPYLQRVVKETLRVHPPGPLLSWARLAVRDAVVGGHVVPAGTTAMVNMWAIAHDPAVWPEPSAFRPERFEEEDVSVLGGDLRLAPFGAGRRVCPGKTLALATVHLWLAQLLHRFRWAPADGRGVDLAERLGMSLEMEKPLVWSTWTMTEVKVMWARADGLGIVKDECWALADGPE

SEQ ID NO: 49098 - protein, 87 aa, Zea mays
  Coding DNA Sequence Number=SeqID_7319
  Homolog annotation: Hit_ID=O49622; Match level="QueryCoverage=42%, HitCoverage=25%, E-value=8e-10, Identity=78%"; Hit description =NAP16kDa protein
MSRGGSAGGGQSSLGYLFGSGAPPAEKPPAAKPDGTSQIAAGVTSQTNNYHRADGQNTGNFLTDRPSTKVHAAPGGGSSLGYLFGGN

SEQ ID NO: 49099 - protein, 67 aa, Zea mays
  Coding DNA Sequence Number=SeqID_7320
MAGHAAEADVDGLGLEPRKNLCCYNSFFSTTAASPLLVETGPELATKALKFADRSSAPIILLTLMNS

SEQ ID NO: 49100 - protein, 155 aa, Zea mays
  Coding DNA Sequence Number=SeqID_7321
  Gene Ontology: Mol. function=kinase activity; Cellular component =ornithine carbamoyltransferase complex; Biological process=amino acid metabolic process
  Homolog annotation: Hit_ID=Q6QP54; Match level="QueryCoverage=65%, HitCoverage=36%, E-value=1e-09, Identity=53%"; Hit description =Putative kinase
MAPPVDVAGLRPRLGEVEAPPKLRLSLSSVAEAESEPLVGRSGVRRLSGLSPSPSPGIGRSGVRRLPGLSPSPSPGSGGAEFAVFWDLARVRALGRAERSFLWCLLQDLTACQHHSVKWHCSRRGAGGAVLLSGRSVERRSDGGHFGSVGGRMQG

SEQ ID NO: 49101 - protein, 47 aa, Zea mays
  Coding DNA Sequence Number=SeqID_7322
MSRLASPLRAELSRAFSFNSLSERAELGSAAPNIGLGATGLDRGRVL

SEQ ID NO: 49102 - protein, 113 aa, Zea mays
  Coding DNA Sequence Number=SeqID_7323
MNVCVLTLAVLTSPRSRIEPRCDTRVIVPEVKLTEATNTADGGDVSSGMHTTQGGDGSSTGVRVRERRGVSGDVASKGVGRVGWWPGDARHGCVHGRACARTVGEDETERRGP

SEQ ID NO: 49103 - protein, 839 aa, Zea mays
  Coding DNA Sequence Number=SeqID_7324
  Gene Ontology: Mol. function=cellulose synthase (UDP-forming) activity; Cellular component=membrane; Biological process=cellulose biosynthetic process
  Homolog annotation: Hit_ID=Q7E0V9; Match level="QueryCoverage=97%, HitCoverage=95%, E-value=0.0, Identity=61%"; Hit description =Cellulose synthase-like F7
  Pfam annotation: Domain name=Cellulose_synt; Domain location=34-837; Score=972.4; E_value=1.7e-289; Accession=PF03552.5; Description =Cellulose synthase
  Subcellular localization annotation: CTP_CleavageSite=37; ConfidenceScore=5.11e-01
MSTTYTTKSNGTTSDDNKWPKDHVKKSASVDRPPLVRTTKLSTITIKLYRLMIILRMGIFVLFFKWRIGTALVMISSTGTDDKSTVLGMWMVSMAGELWFALMWVLDQVPKMQPVRRVVYLAALDEPMLPAMDVFVTTVDTEKEPPLVTVNTILSILAADYPAEKLTCYVSDDGGALLTRDAVAEAARFSALWVPFCRKHAVEPRNPEAYFSPGASNGFKAWRADYKGTAWPELARDRRRVRREYEELRLRIDALQAGGRAAVDAVAADRSCWRRGAAEDHAGAVELLVDNPGPGSTPRLGVSGTVDGVSNLLDLSSVDVRVPALVYMCREKRRGRVNHGKAGALNALLRASAVLSNAPFILNLDCDHYVNNSQALRAGVCHMLDGEGGNGNDVAFVQFPQRFDGVDPADRYANHNRVFFDCTELGLDGLQGPIYVGTGCVFRRSALYGVDPPLWRPQGDDAGKGAANGIETGKLGVSTPFLRSVYAVLTNQSDQWDTVSISSPPCSFDAAAIGEATALVSCGYEDRTAWGRDIGWIYGTVTEDVATGFCMHRRGWRSSYCATAPDAFRGTAPINLTDRLYQVLRWAAGSLEIFFSRNNALLAGRRLHPLQRLAYLNTTVYPFTSIFLIAYCGLFPAIPLVTGNGATTGAFFSIIIRPPSATYIAFVAALMLTLAVVAVLEVRWSGISLGDWWRNQQFWMVSATSAYLAAAVQVALKIAAGKEISFKLTSKQRATSTVASVKDRFAELYAVKWTVLMVPTAVVLAVNLTSIVAAMEGGSWRDGPMAVFALAFNAYVVVHLYPFALGLMGRWSNTLSPLLLLIAFFTVRLLCIVLYVQML

SEQ ID NO: 49104 - protein, 105 aa, Zea mays
  Coding DNA Sequence Number=SeqID_7325
  Homolog annotation: Hit_ID=Q5SMJ0; Match level="QueryCoverage=39%, HitCoverage=3%, E-value=8e-07, Identity=60%"; Hit description =Putative salt-inducible protein kinase
MRWTRLAATIGVSLRAGPWDALHMGGNIPTFGLARSSLATVVLLVLKVPKLFISAPREDLDSIISVSYPEDYNNMMEQYEKLTIAAPESSLCPGTGSGYRLEGGE

SEQ ID NO: 49105 - protein, 447 aa, Zea mays
  Coding DNA Sequence Number=SeqID_7326
  Gene Ontology: Mol. function=DNA binding
  Homolog annotation: Hit_ID=Q9LGH0; Match level="QueryCoverage=62%, HitCoverage=92%, E-value=7e-40, Identity=31%"; Hit description=NAM -like protein-like
MAGSGLSGGGSTGGGGLGSSGGGGRGRGRGCGGDGRGRGCGGAGRFGGAGGAEHGGGGGLDVGAGGGHDGGGGGGGRGGDYWQCGSTSARSATPTVPANSIGGGFPQMHVTCGEEIDLDGGHTVPGTFHGGPFRPAVPAHARVVADPLASTMFSCRDELPSSFNRGEDVVRGNGYFSNMMMDDNIEGEFDNNSNTCPDIQPQSMQVGPIVPTSRPNHKRSKNFSDQEDEILVSAWLNISMDPVVGKDQKVGRIQLRRQSDTTMQDMVAQACALYKSEDEHEKGFQFMHCWNKLRLQPKWLGKVDDLAAAKPSNKKQKTTREGDANGTLPYETKESQVQVVENYQLTRPPGKKTAKAALVQEKRKSVIVAIENLWAAKKESDAEKEQKKEERFNKAFALEVDRVNTEKALMEVRKEEIELQKRRDEERIINMDLSGLTEEQQSYYTKL

SEQ ID NO: 49106 - protein, 501 aa, Zea mays
  Coding DNA Sequence Number=SeqID_7327
  Gene Ontology: Cellular component=nucleus
  Homolog annotation: Hit_ID=Q208U9; Match level="QueryCoverage=40%, HitCoverage=57%, E-value=8e-46, Identity=47%"; Hit description=CFM6
  Pfam annotation: Domain name=CRS1_YhbY; Domain location=192-276; Score=114.8; E_value=2.5e-31; Accession=PF01985.11; Description=CRS1 YhbY domain
  Subcellular localization annotation: CTP_CleavageSite=22; ConfidenceScore=5.42e-01
MRPFQVYDHATPREGFNSPYPVQRSSVPLPNVLGWTGLEFSRRNATQCPTRTVAPRSAGTPTTRSASASAAVLPPPRRRRSSRALRPWAPVWFLHHALSRFLPACALLPGDGQPSLRAPSAHEVVAAAGATASLALPAVSRWGLGVFPWDAGAARASAQLTIARKKEERLVVALKKIEPEDPSEPTHDPEVLTPEEHFYFLKMGQKCKNYVPVGRRGIYQGVILNMHLHWKKHQTLQVIVKTFTPEEVKEIAIELATLSGGIVLDIQDGNTIIMYRGKNYAQPPPEIMSPKVSLSRKKALDKSKYMEKLRALRRYIPRLEQELEDLHAQMKLAGEHQGQNAGKHVASISHNTNSMPVRKEPCGSIRNKTVSDLLSETVEGSKRLEDESSAIEDDSASESLSFTESEDLSDIFETESEEQEEDNKDRPLYLDRLDKFPSGKNDNEPDDFEEHLRRIASLSDKTDSPSKELKVSELDEIDKIFLRASDAKVQLMQERSHWYAS

SEQ ID NO: 49107 - protein, 67 aa, Zea mays
  Coding DNA Sequence Number=SeqID_7328
MGPQWWVGESPPWFREGLYGCAMEDTPPGLKGNGRPTGARRSYSAVGGFVAVAQPRIEVEELVRAVG

SEQ ID NO: 49108 - protein, 228 aa, Zea mays
  Coding DNA Sequence Number=SeqID_7329
  Homolog annotation: Hit_ID=Q40672; Match level="QueryCoverage=24%, HitCoverage=30%, E-value=9e-19, Identity=81%"; Hit description =Cyclophilin 1
  Pfam annotation: Domain name=Pro_isomerase; Domain location=146-228; Score=-27.3; E_value=7.3e-05; Accession=PF00160.11; Description =Cyclophilin type peptidyl-prolyl cis-tr
MKPTEIVEALHSYSIGPSSSLTEVLTLFLASIVGEGAILPQYLNISEDEYRKTIKVNVIRPWFLMKVILMASPPQPKQLVLATSSTDPDLAALDLRTGVEDYVIHGSRPGCLGPLHLVWRTFASALALPALGRSPQLPTASLPSLKLFPLAITLGPSTSTTGTSRKWSSRACGDFTRGNDTGGESIYGARFTDENLKLRHTGLDVLSMANAGPDTNDSQFFICTAQTP

SEQ ID NO: 49109 - protein, 242 aa, Zea mays
  Coding DNA Sequence Number=SeqID_7330
  Gene Ontology: Mol. function=transcription regulator activity; Cellular component=nucleus; Biological process=regulation of transcription
  Homolog annotation: Hit_ID=Q7XJU2; Match level="QueryCoverage=44%, HitCoverage=67%, E-value=3e-26, Identity=56%"; Hit description=BHLH transcription factor
  Subcellular localization annotation: CTP_CleavageSite=49; ConfidenceScore=5.26e-01
MAPSCVTSAPQPVAPSFGSKRANKISGGPNIDSSCPSQSPSPLILPVPAAKHARGKDGAGKPIEPARVDKMMMAEVVANHSKRSHTDGYFSAKAAVAAAAAASPPEELGSMPMSSKKPRPRNSNSPRTAPVSPKEKKDRIGERVAALQQLVSPFGKTDTASVLQEASGYIRFLHQQLQVGVPPVLSSPYMRAPPAAGAAPEDPEHYSLRSRGLCLVPVDQTLQLTQSNGADLWAPANTTRRR

SEQ ID NO: 49110 - protein, 131 aa, Zea mays
  Coding DNA Sequence Number=SeqID_7331
  Subcellular localization annotation: CTP_CleavageSite=48; ConfidenceScore=5.07e-01
MVVPGGGGGGHEAVASWAPATSGKGGGGHKAMVGMGSSGWRRAQEWWRAATGKRARASGTTPGRGHRAMSSLGLRRMGGREGDVRWGHNHRVGMGAGPRGDGGDDIFGKLGAIACGAELTQLGATAYGAEL

SEQ ID NO: 49111 - protein, 54 aa, Zea mays
  Coding DNA Sequence Number=SeqID_7332
MGFTKVPLTPVTDPGFYGSLGYIGAQNWELESAFLSYVVWLHVELGYGIRAPIP

SEQ ID NO: 49112 - protein, 107 aa, Zea mays
  Coding DNA Sequence Number=SeqID_7333
MASRNEAEAQGLDGATMVDSGCARKRSGERGPDAAGRERAHLRVSRLADGKAKLTVALGGAGAQRWPRNRQWASAGHGGALGLRGQSEREGEGAGQRAQMRERRWAS

SEQ ID NO: 49113 - protein, 85 aa, Zea mays
  Coding DNA Sequence Number=SeqID_7334
MKKDPSRTDRHFSEVVLSGQIPSLPTPIFVSPRHAHRTRFPILKPHHASLVASTGGDVMPVPDVDTGLPLIEVPFGEYGFSKRNV

SEQ ID NO: 49114 - protein, 111 aa, Zea mays
  Coding DNA Sequence Number=SeqID_7335
  Pfam annotation: Domain name=Auxin_inducible; Domain location=1-101; Score=70.5; E_value=5.5e-18; Accession=PF02519.5; Description=Auxin responsive protein
MRQLIRRLSRVGDCSPPPSHSQETRKGEAHAGVPEGHVPVHVGGGADGAEERFLVRAELLGAPALADLLGRAAQEYGYRHQGPLRIPCPVAVFRRALASVAVAAAGDEEGD

SEQ ID NO: 49115 - protein, 79 aa, Zea mays
  Coding DNA Sequence Number=SeqID_7336
MATARGMSPTLHDLRLARWGEEGKSPRKERVTTPRLVPSPEAGPGATVGTLDQGYPYYDGAQAIQQAACPSNPNSMPKL

SEQ ID NO: 49116 - protein, 102 aa, Zea mays
  Coding DNA Sequence Number=SeqID_7337
MSARRHAEWVCDCTVPMACTVLGGTGPGVHGAGELPEAESTVRCHWFQMHMYGSQFLGLAGHMKYPLFLRSPEQRTDIMDSAVGNLDFPEELETIVSHTGIN

SEQ ID NO: 49117 - protein, 327 aa, Zea mays
  Coding DNA Sequence Number=SeqID_7338
  Gene Ontology: Mol. function=phosphoric monoester hydrolase activity; Biological process=metabolic process
  Homolog annotation: Hit_ID=Q8W0E7; Match level="QueryCoverage=85%, HitCoverage=86%, E-value=3e-72, Identity=49%"; Hit description =Phosphatase-like
  Pfam annotation: Domain name=Put_Phosphatase; Domain location=9-284; Score=374.4; E_value=1.8e-109; Accession=PF06888.3; Description =Putative Phosphatase
MASASAPEVVVVFDFDRTIIDWDSDDWVITKLGAADAFQRLRPTMRWNPLMDRMMAELHARGKTPEDIRDCLRSAPLDTHVVSAVKTAAALGYARHNHTMPTTFSPAAAALAFGTDRPMFFDAGNGMAAAAPVCRCDLKVVSDANTFFIETVLAHHGVLGCFSEIVTNPASVDADGRLRISPFHDPASAPHGCSLCPDNMCKGKILGRIQATGSDKKRRRRFIYIGDGKGDYCPSLKLGEGDHVMARENYPLWHLICDNKQLLKAEVHPWNSGEELEKTLLKLAGEVISPPAQASQFDYSKCEMSNPASCPPSCAALITDQLLVRKY

SEQ ID NO: 49118 - protein, 100 aa, Zea mays
  Coding DNA Sequence Number=SeqID_7339
MTRETLDSKADRAKGLLHLRDTDTLLVTFRESTLGGFPDLQQISQYLEQLHFALTFPYKWDSSSIPAGMNYLHTRGGPTVIAAMNVRKQRSNHLQARTLS

SEQ ID NO: 49119 - protein, 250 aa, Zea mays
  Coding DNA Sequence Number=SeqID_7340
  Gene Ontology: Mol. function=protein phosphatase type 2A regulator activity; Cellular component=protein phosphatase type 2A complex; Biological process=signal transduction
  Homolog annotation: Hit_ID=Q5ZAG2; Match level="QueryCoverage=94%, HitCoverage=58%, E-value=1e-106, Identity=81%"; Hit description=Type 2A protein serine/threonine phosphatase 55kDa B regulatory subunit -like
  Pfam annotation: Domain name=WD40; Domain location=127-166; Score =9.3; E_value=3; Accession=PF00400.22; Description=WD domain, G-beta repeat
  Pfam annotation: Domain name=WD40; Domain location=186-223; Score =8.4; E_value=3.8; Accession=PF00400.22; Description=WD domain, G -beta repeat
  Pfam annotation: Domain name=WD40; Domain location=72-111; Score =11.4; E_value=1.7; Accession=PF00400.22; Description=WD domain, G -beta repeat
  Pfam module annotation: Pfam domain module=WD40::WD40::WD40; Domain location=127-166::186-223::72-111
MACYFDIISAIEFNKSGHHLATGDRGGRVVLFERTDVKDHASRKDAEKADYSISRHPEFRYKTEFQSHEPEFDYLKSLEIEEKINQIKWCQATNCALFLLSTNDKTIKFWKVQEKKVKKVSEMNLDRSTAPTNGSPGEVITSAEFHPTHCNTLAYSSSKGSIRLVDLRQSALCDNHSQIFEQHEAPGSRSFFTEIIASISDIKFSKDGRHILSRDYMTLKLWDVKMNSGPVATFQVHEYLRPKAAGPDYL

SEQ ID NO: 49120 - protein, 129 aa, Zea mays
  Coding DNA Sequence Number=SeqID_7341
MQDATWHALLQYCSLFGGVADDLDLKYYPRRSTGSTRGVIVLPVGEDNPILSSMVNLVAVFNIELDHALDELCKARAEIVELHAKRVERRHQEDGSPTTVGTQRPYRSPPHHRYAYGTPDYRTWINLEP

SEQ ID NO: 49121 - protein, 216 aa, Zea mays
  Coding DNA Sequence Number=SeqID_7342
MVGHICRKQGNRCHARQGSTPGRRRRLATLHHGHTQGSSRQPCVATWRGPRWGPWCHRGTAELLLGAHVPAGFPAAVVISANAGRSTGTSSPLVQPRRCMHRRLELGFPGSFDDEACSPTMRDILSLPTSRIDLLELRKERNVGGLRIKSDTKQPRKDRMWAYMKAWDLRENWSALSQDNCPEMFSGHGMNLGDITRDVISGEMNNQTSLVCFLSF

SEQ ID NO: 49122 - protein, 119 aa, Zea mays
  Coding DNA Sequence Number=SeqID_7343
  Subcellular localization annotation: CTP_CleavageSite=34; ConfidenceScore=5.07e-01
MRPGKVAAQRSAAKPSKRSADPSARERKADVVVVCSLVPRPWRFGEGKIETACTGRGYASRLREVAAKKSKRGGFGDGKNDRSGLQPREARRGRATRVWGWLTGAAVRWATRGHNNVGA

SEQ ID NO: 49123 - protein, 67 aa, Zea mays
  Coding DNA Sequence Number=SeqID_7344
MSPLYISVPVAVRRLGRFAAVSLALGRGMLAGERNGRREIEEPVTEDTGEQQIETAEQELVEGKLCP

SEQ ID NO: 49124 - protein, 318 aa, Zea mays
  Coding DNA Sequence Number=SeqID_7345
MASTKYLLRKQEPAAHQLKTAADLSRLQTEHDGLDLQLMREVAEVDVASSMEERRRPHRYSARFCLPPPTSTAPLRSRMVVTLSSLPSTVSFPRPRPPPQSTPLPPQSQSNPGAHLPSTKRLFLAPRYAHPDHDKWALNVSVPLHFLALASQQTPLCLGLPPPDPAAMVTPLCPTPATTRTFRLSVARFLVPRVPSPPSPPDSLAWTALRNTGERAATSSQVKVSLPLPDPTRSVEHLVGVLVVMEVEPALERLSGGDTRGGNRSDPGQGEPPPPDPTRSDERLVGVLVVVEVEPALERPSGLQFELLRALLARDCAH

SEQ ID NO: 49125 - protein, 507 aa, Zea mays
  Coding DNA Sequence Number=SeqID_7346
  Gene Ontology: Mol. function=monooxygenase activity; Cellular component=integral to membrane; Biological process=electron transport
  Homolog annotation: Hit_ID=Q2R3E2; Match level="QueryCoverage=97%, HitCoverage=99%, E-value=0.0, Identity=69%"; Hit description =Cytochrome P450 51, putative, expressed
  Pfam annotation: Domain name=p450; Domain location=55-496; Score =92.6; E_value=1.2e-24; Accession=PF00067.12; Description=Cytochrome P450
MAIDLNLQETMSLITEKHQGRLIAGAVLLVTTIVSFIKLLLMWSDSRVRSRSRLPPTIPAVPIIGGLIRFMRGPISMIREEYARLGSVFTLNALGYRITFLIGPEVSEHLFNGAESEMSQREVYRFTVAAFGRGVAFDVPYSLRLEQIRIFAEGLRGNKLRGYATLMVCEAEEYFSKWGESGTVDLKHELEQVILRITSRCLLGREVRENLFDDVATLFHDLCNGMQPVSVIFPYLPIPAHWRRDRARQRLREMFGTIIRARKASGRSEEDMLQRLIDYRYKDGRATTEDEIAGLLITVLFGGQQTSSITSTWTGAYLLQFRRYLAAAVEEQEEAIWRHGDRIDHDVFAEMDVLYRCIKEALRLQPPVAIMFRWSHSDFAVTTREGEELVVPKGQMVAASPAVANRLPHVYKDPDLYDPERFAPGRSEDKAAGALSYISFGGGKHWCLGEFFAYLEIKTVWAHLLRNFEMELVSPFPENEWNSMLVGVKGKLMVKYTRRKLVVVDGK

SEQ ID NO: 49126 - protein, 126 aa, Zea mays
  Coding DNA Sequence Number=SeqID_7347
  Homolog annotation: Hit_ID=Q6A4M2; Match level="QueryCoverage=46%, HitCoverage=18%, E-value=2e-09, Identity=55%"; Hit description=Beta -ketoacyl reductase GL8B
MAGRALATFSMAVFVLRKFPGAEADTEGHHDTVRVYFDRVSGDDGQLLLVAVDEDKPEPGRGEAKGNGVANAVGGGSHHSPGTVAAGTGLPRQRGTRRRQRTPSAKRMPCGRPRGGSTNVHKDGRW

SEQ ID NO: 49127 - protein, 130 aa, Zea mays
  Coding DNA Sequence Number=SeqID_7348
MSKMSEKDASDAKPGLVRLRYKYKFEYEFGSLVMNDNNVKDEDVVTIALATKNATLPIVDVVKPKSPNVQPVPPALTPSAIIVVEEKTGSAKLVMVGDKGKGPAKIKEAKKAIEDDTLLGDGPFDQELGG

SEQ ID NO: 49128 - protein, 39 aa, Zea mays
  Coding DNA Sequence Number=SeqID_7349
MSPEDFSDCLTYTHIKGLFLSKALKTRKMLRAKMPKEKL

SEQ ID NO: 49129 - protein, 150 aa, Zea mays
  Coding DNA Sequence Number=SeqID_7350
MENNRNLRDFLSQVGSSSSARIPHGREAPEEDLGIFYQTPLSRAPSISSPAARLHIEDLHINSLGNDFPNLSSYQEVLRVGVMRSRGGSQVFRGQGGSRGCRGARGRATVTRGGRSGVNPTTDHVLVQDLQHEEENELDTQSPVILIQQY

SEQ ID NO: 49130 - protein, 200 aa, Zea mays
  Coding DNA Sequence Number=SeqID_7351
MKSLVHDRPAAESRGVRRRCFLSFGLVDEERMWRRLEREGVKIKQGRSLFMRPNFQTANHTNQSSPAHGGDPGSGLQWLLFAAISGLAELGILLRLRSDSYAEVGDELRNRSWRGSLRRTARITAEEQRPADLVPHEEEGWADDAAPRVIGPNRCPRRLKSGPQRQQAQVRSGWAAQRYLGLGRGFLGFGCVIEFDEWLI

SEQ ID NO: 49131 - protein, 178 aa, Zea mays
  Coding DNA Sequence Number=SeqID_7352
MKSLVHDRPTAESRGVRRRCFLSFGLVDEERMWRRLEGEGVKNKQGRSLFMRPNFKTANHTNQSSPAHGGDLGSGLQWLLFAAISGLTELGILLRLRSDSYAEVGDELRNRSWRGSLRRTARIAAEEQRPADLVPHEEEGWADDAAPRVIGPNRCPRRLKSGPQRQQAQVRSGWAAQR

SEQ ID NO: 49132 - protein, 153 aa, Zea mays
  Coding DNA Sequence Number=SeqID_7353
  Homolog annotation: Hit_ID=Q6K8R1; Match level="QueryCoverage=50%, HitCoverage=32%, E-value=9e-15, Identity=51%"; Hit description =Putative glycine-rich protein
  Subcellular localization annotation: CTP_CleavageSite=55; ConfidenceScore=5.13e-01
MMSYFQTTTCKPQSRVVVNKPIPGLGSTSQHPLYSHALRFHRLQQKVYPRLLLVAASHKRLTPVCVLSGKGNAGTADDVLSKPVVGRIVILLEVDYGPVWFVANCATLFLSTDIGCFCYRLCGLNCKVSVIGITFNGTSAYGESGKFHYNTRS

SEQ ID NO: 49133 - protein, 405 aa, Zea mays
  Coding DNA Sequence Number=SeqID_7354
  Gene Ontology: Mol. function=hydrolase activity, hydrolyzing O -glycosyl compounds; Cellular component=vacuole; Biological process =carbohydrate metabolic process
  Homolog annotation: Hit_ID=Q8S9P4; Match level="QueryCoverage=77%, HitCoverage=97%, E-value=2e-97, Identity=58%"; Hit description =Putative glucanase
  Pfam annotation: Domain name=Glyco_hydro_17; Domain location=91-399; Score=522.3; E_value=5.2e-154; Accession=PF00332.9; Description =Glycosyl hydrolases family 17
MRACTIEEHYRKRPDGVRVRNLPEIFSYMSFSSSSITVHSQKKRKGKGKERKEKKRKSITDTRLLPVCAPLTRSLHPWGRTSKPNAGAASVGVCYGTSGDNLPPASAVVGMLRDNGFTVVRLYWPDGDALAALGGSGIRVVVGAPNEALPALASGAAAAAAWVRDNVQAHPAVAFRYVVVGNEVPLEQAPLLVPAMENVHAALAAAGLGHVKVTTAVSQGAIAVHLPPSAGEFTEEARSFMGYVVAFLARTRAPLLANLYPYFVYTLGLGHLGMDFALFTAPGTVVQDGEYGYQNLFDATVDALYAAVGRLGVAGGDGVRVVVSETGWPTAGGAAASLENARTYNQNLVRHVWKGTPRRPRRVEAYVFAMFNEDKKDAGVEQNWGLFYPNMERVYPITFGAGRRH

SEQ ID NO: 49134 - protein, 283 aa, Zea mays
  Coding DNA Sequence Number=SeqID_7355
MGDSDSCARIYCSAGSRWRGGVSLIPFHSAPVSASDDKLHLAQPRAQTRPRLRKTTNSASPDPGLGLVLGSERRRTPPRPTQGSDSASALEDDELRLARPRARTPPRLRKMTNFASPDPRARTQPRLQKTMNSASPDLRARTQPWPQTMISASPDPGLGLDLDLGRQTRPRPRRSHRLARPRARTDHVTGGAIITLPLASSGYREQDQRPIWLAPGSHTGRLAARRGRDGAYKPLAPSHADACNPLMQAHPTWAQDNTKAAGTPRGRNADTNIEEMILSMDAQ

SEQ ID NO: 49135 - protein, 412 aa, Zea mays
  Coding DNA Sequence Number=SeqID_7356
  Gene Ontology: Mol. function=receptor activity; Cellular component =nucleus; Biological process=regulation of transcription, DNA -dependent
  Homolog annotation: Hit_ID=Q10N12; Match level="QueryCoverage=75%, HitCoverage=83%, E-value=1e-116, Identity=56%"; Hit description=WD domain containing protein, putative, expressed
  Pfam annotation: Domain name=WD40; Domain location=213-254; Score =8.7; E_value=3.5; Accession=PF00400.22; Description=WD domain, G -beta repeat
  Pfam annotation: Domain name=WD40; Domain location=258-296; Score =31.4; E_value=3.3e-06; Accession=PF00400.22; Description=WD domain, G-beta repeat
  Pfam annotation: Domain name=WD40; Domain location=39-77; Score=43.7; E_value=6.1e-10; Accession=PF00400.22; Description=WD domain, G-beta repeat
  Pfam annotation: Domain name=WD40; Domain location=81-135; Score =10.2; E_value=2.3; Accession=PF00400.22; Description=WD domain, G -beta repeat
  Pfam module annotation: Pfam domain module=WD40::WD40::WD40::WD40; Domain location=213-254::258-296::39-77::81-135
MAAAAIEAAGRRKGSCFLEVGRREIGSSFPRVSSRRISGSEYGKLHGHEGCVNTVSFNPAGDLLVSGSDDTNIILWDWLSKTKKLVYPSGHQDNVFHARVMPFTDDSTIVTVAADGQNPYYFSIGGSDEYARLYDMRKFQLDGSRNTNQPVDTFCPKHLIKGASARVHITSIAYSYAREILVSYNDELIYLFQHNIGLGPNPVSAEPEFFNMLDQPQAYRGHRNFRTVKGVSFFGQHDEYVVSGSDCGNVFIWRKKGGELIRMMNGDKSVVNCIEPHPHFPFMATSGIDNTVKLWTPAAKKLIMPLPKNAKQIASEGLKYRVFRSHWLIFRVMKTRHTGDQTACRRCPRVEEQVVVVARHEERAMVIERDIEREAGYGVAAVWAWMEQCKSLEGITRASTYPNTLLTRRLVM

SEQ ID NO: 49136 - protein, 168 aa, Zea mays
  Coding DNA Sequence Number=SeqID_7357
  Gene Ontology: Mol. function=spermidine synthase activity
  Homolog annotation: Hit_ID=Q2VW28; Match level="QueryCoverage=75%, HitCoverage=10%, E-value=1e-15, Identity=84%"; Hit description =Spermidine synthase
MSNKCARMKYNQVANWISSGVIGFLLCAKEGHAVNFLTPVNPIEKIEGAANTYCIAKEGRAVNFLTPMNPIEKIEGAASTYWQIFFVSTFAKFTDNQVANWISSGVIGFLLCAKEGRAVNFLTPVNPIEKIEGATKAGRELRFYNSEEKPKESVSEPQKIKILPMTRC

SEQ ID NO: 49137 - protein, 85 aa, Zea mays
  Coding DNA Sequence Number=SeqID_7358
  Gene Ontology: Mol. function=lipid binding
MAVHGWRLASGVRAGVRVVAGGSRLATAKRGLTEIYMNTFFGQAGSMIWVADKVLDHSRLKTTNWKFIIPRLYWNYRNDDVLLNI

SEQ ID NO: 49138 - protein, 342 aa, Zea mays
  Coding DNA Sequence Number=SeqID_7359
  Gene Ontology: Mol. function=protein dimerization activity
  Homolog annotation: Hit_ID=Q2R244; Match level="QueryCoverage=98%, HitCoverage=82%, E-value=1e-109, Identity=57%"; Hit description=F -box domain containing protein, expressed
  Pfam annotation: Domain name=DUF295; Domain location=249-306; Score =63.8; E_value=5.6e-16; Accession=PF03478.8; Description=Protein of unknown function (DUF295)
LAEKKTYTLTLPDPPLCSRYIFGSSYGWIVTADERSELHIVNPITGDQIALPSVTTIDQVKPIFSDIGVVCGYEHSGYSGVWEVSDIPSIFDLSELRDHLFHKVFLSSDPSAGDYFMVLIHNPHCQLSFARAGDDKWTWLPQGDSYDDCLFNGQLLYACTQLGEIHEFDLGTPTITHKIFLGRVKDLYDEKIYMVQASCGQMLQIWRSDDTIEEGDNEDEYDPDFGPDLPWHSTSMIKVYKLEPTSKKLVEISSLGANVLFLGHNLSLCLHAEEHPQLKANHIYFADDEPYTYFKSKRRDIGVFDLERNCSEKIVSPQLWSNWPAPVWLVPNPRRIGLSLCK

SEQ ID NO: 49139 - protein, 163 aa, Zea mays
  Coding DNA Sequence Number=SeqID_7360
MGAKCCNLILPKLLNQTSLAKTQDTNKCCTVSSCLSQRLDSLLILGAWLIWKHRNGAVTRSFLTSPVSTAGTWLGSNHQSLRTPQTNDESGSLIGDIVPGTIDRYTKCPLSGHHGMGSFNWGIVSLGTFLILKTHIGRKPSGKLSYPVGRRLFSVCGKLTVAL

SEQ ID NO: 49140 - protein, 64 aa, Zea mays
  Coding DNA Sequence Number=SeqID_7361
MGQRTLAFTNQLLLKVFTCNSFELHQQTVIYDARPSSVHGGWVSRRDATRSEEERNVEGGRGRA

SEQ ID NO: 49141 - protein, 82 aa, Zea mays
  Coding DNA Sequence Number=SeqID_7362
MAIESAESKVVRRHESATRKVSHDMLNCGVSPWPLCQAELATIKLGRRITANAQFDTDDDHALFDGMSDKALIDCTARSVDC

SEQ ID NO: 49142 - protein, 109 aa, Zea mays
  Coding DNA Sequence Number=SeqID_7363
MLGRRRRRYPSLDAFANLAAPTEAKRLAAYTLRPTYCKTKAYNEVAPSREVVDHEGPCGIRPIVTSPAWLKGDYTSRYSAIIPFGCSGLALCGVKIKQLLLVGQGEALA

SEQ ID NO: 49143 - protein, 163 aa, Zea mays
  Coding DNA Sequence Number=SeqID_7364
  Subcellular localization annotation: CTP_CleavageSite=83; ConfidenceScore=5.08e-01
MQYNGSSSLISCEKQNDSNRVFNPGKLAARVGGGARCATSERGSGSGSDVRQQCKGGALCRGYRNSGVSPRSCAGRRGGASCCCARENEPGKKKGRPAAGRRTRGVLVEVAGQVKDDAGQGRLDLGTSSCWIEQGCTWGGGLPAAVPEGGAKGREGGAMGSSK

SEQ ID NO: 49144 - protein, 451 aa, Zea mays
  Coding DNA Sequence Number=SeqID_7365
  Homolog annotation: Hit_ID=Q2R244; Match level="QueryCoverage=73%, HitCoverage=91%, E-value=1e-99, Identity=51%"; Hit description=F-box domain containing protein, expressed
  Pfam annotation: Domain name=F-box; Domain location=115-161; Score =22.1; E_value=0.002; Accession=PF00646.23; Description=F-box domain
MKQTWESQATLEARISAERQNASCCRPGPRQRIDEHGLRELGPAGRFVEHLQHQLDAVGLGLGIRERHGDKHGPTLEEDATTGRCEGSNPSDLKLMDKYEASEFNTLFDPNTMEKTAEDLSFDVLWLIFANLELPDLVRAGSVCSIWRDIYTSLCNSGSYNPQHTPCLLYTSESAGTKAACLYSLAEKKTYTLTLPDPPLCSRYIFGSSYGWIVTADERSELHIVNPITGDQIALPSVTTIDQVKPIFSDIGVVCGYEHSGYSGVWEVSDIPSIFDLSELRDHLFHKVFLSSDPSAGDYFMVLIHNPHCQLSFARAGDDKWTWLPQGDSYDDCLFNGQLLYACTQLGEIHEFDLGTPTITHKIFLGRVKDLYDEKIYMVQASCGQMLQIWRSDDTIEEGDNEDEYDPDFGPDLPWHKEHPQLKANHIYFADDEPYTYFKSKRRDIGVFDLE

SEQ ID NO: 49145 - protein, 111 aa, Zea mays
  Coding DNA Sequence Number=SeqID_7366
MKNVALFASCFTSHYLMALFARCMLLLACLGLGEDLHVIVDEVHDEHGEGQNVDAGHTNTTHNVGGHTHTQNAVAGRVRGRLGLVEGVELVSLLGAGNVMTLFTPTVVGRV

SEQ ID NO: 49146 - protein, 288 aa, Zea mays
  Coding DNA Sequence Number=SeqID_7367
  Homolog annotation: Hit_ID=Q10QG0; Match level="QueryCoverage=92%, HitCoverage=90%, E-value=2e-25, Identity=65%"; Hit description =Uncharacterized plant-specific domain TIGR01568 family protein, expressed
  Pfam annotation: Domain name=DUF623; Domain location=208-267; Score =80.3; E_value=6e-21; Accession=PF04844.4; Description=Protein of unknown function, DUF623
  Subcellular localization annotation: CTP_CleavageSite=51; ConfidenceScore=5.56e-01
MAKRLFHSCRSPSAAAAVSPTTTLLPTAHPPVVPAPSGGACCPRRVPRRGRAQTPAACGAGGCTVDYGADDLPPARGTPAYRWLKSSRWHVIEAANAYASDGDGDDTPRLKIDARRRVRHSRRRRRRRVLHRRLAGPASWSSGDSGWFSSDDDEPFGAGSALHVAASSSTTTESSSTGARQNSAGAARGEGEAAAASLAGGFAVVKRSDDPRADFRRSMAEMVVGRGIYDADGLERLLRCFLALNDRRHRPDIVAAFGDVWEAVLSDLPSQSHSHGTAAAATSAMSHP

SEQ ID NO: 49147 - protein, 215 aa, Zea mays
  Coding DNA Sequence Number=SeqID_7368
  Subcellular localization annotation: CTP_CleavageSite=56; ConfidenceScore=5.11e-01
MAVDNPPAGGGIDDVFLTWRKNDFRPPHLLASLSRAQAVVALRTSVPAHARSDRCRAALPKTELRAPLPDRTQDDATRRPCRDRAAAQEPSKDPAIPMPRRAAHRPRPESPSRKRLPFLLPFSLPTSSLLQWRPATVSSSPGSLSPRPYKSSFPRHADPSQPSLSHASSLLPPRGTVTANSMSATCVACQFLVGRRSFVETWPWSSQHHTLVAKA

SEQ ID NO: 49148 - protein, 154 aa, Zea mays
  Coding DNA Sequence Number=SeqID_7369
MAEEFAGALGPKFPNKLVLNKEEGEAKLWISRLPARKAPTRLATACRVKVQSQLAKVPRVQPYARDARRGRETEREIFAWQMGTTTQCLPRLKGQFSWSEACARPHRAWSARTRVQRVEEGSADEVAPRNSGPEDVRRGGVRLSGGLEASACAG

SEQ ID NO: 49149 - protein, 49 aa, Zea mays
  Coding DNA Sequence Number=SeqID_7370
MGKIYAKLFFSLPSSFIFSVVTLLYFAHLYHLISYNSSQRVKNLDRILR

SEQ ID NO: 49150 - protein, 196 aa, Zea mays
  Coding DNA Sequence Number=SeqID_7371
MGPDTGRVGAKRNPTTSAVRSRSDGGDQSQEGWWGALWTYASALDRVGLAGHCAGASSKRGRMPVRPNWLKAGANRKNQARGRVSHLGRSSGSLGVASDELEDRHGGRGSPAKLSGMGRAREGAGLCEMGWGSECGRARCSKRGGAWAGDVAEDSGDVREYARWSTVRRGEGRTDRGGPRRSEGGSERMGQRLDVW

SEQ ID NO: 49151 - protein, 138 aa, Zea mays
  Coding DNA Sequence Number=SeqID_7372
  Subcellular localization annotation: CTP_CleavageSite=9; ConfidenceScore=5.42e-01
MTPSGRSLLASRGSPLVSTFINLSYAIFVVVVGSHHGATRVTPSRPAGGFPCASCLPWSSGLPAMVERSQGVTGPAPPPHMNSAPILCMSPMGGQQRHRRAAPFLVLGRRAPPPLRQLFLPPMNVLEVRERPDQIPLF

SEQ ID NO: 49152 - protein, 41 aa, Zea mays
  Coding DNA Sequence Number=SeqID_7373
MGMRCLRDEYKCGHCTTAVGVSEALYAKALMRLLDPLYCIE

SEQ ID NO: 49153 - protein, 44 aa, Zea mays
  Coding DNA Sequence Number=SeqID_7374
MVNHAGITGARRYPARLRASTLYHVACSGVFLMLPDPANWTRTP

SEQ ID NO: 49154 - protein, 576 aa, Zea mays
  Coding DNA Sequence Number=SeqID_7375
  Gene Ontology: Mol. function=RNA-directed DNA polymerase activity; Cellular component=nucleus; Biological process=RNA-dependent DNA replication
  Homolog annotation: Hit_ID=UPI00004C1733; Match level="QueryCoverage =73%, HitCoverage=31%, E-value=1e-178, Identity=70%"; Hit description= UPI00004C1733 related cluster
MTHSLSKSAGCRPGSTREQERLSRSAGTSGRHERANPRPEKYVIYPRASSTASPTTSGSGHHPHLVGSARTWLQQRCFSARCRSHQPPRGGESRGAQESPGRRRGPTGRELCLPKAGAFSRAIRRAPFPTRFRPPTTITKYSGETRPELWLADYRLACQLGGTDDDNLIIRNLPLFLSDTARAWLEHLPPGQISNWDDLVQAFAGNFQGTRRSRLSFEGTSSPRAAPSEDAPEASTQRGAKKKGKKKSQAKRDAADVDLVAAAKYKNPRKPPGGANLFNKMLKEPCPYHQGPVKHTLEECVMLRRHFHRAGPPAEGGRARDDDKKEDHQAGEFPEVRDCFMIYGGQAANASARHRKQERREVCSVKVATPVYLDWSDKPITFDRADHPEHVPSPGKYPLVVDPVIGDVRLTKVLMDGGISLNIIYVETLGLLRVDLSSVRAGAAPFHGIIPGKRVQPLGQLDLPVCFETPSNFRRETLTFEVVGFRGTYHAVLGRPCYTKFMAVPNYTYLKLKMSGPNGVITVGPTYKHAFECDVECVEYVEALAESEALIADLESLSKEVPDVKRHAGVTPLVLL

SEQ ID NO: 49155 - protein, 435 aa, Zea mays
  Coding DNA Sequence Number=SeqID_7376
  Gene Ontology: Mol. function=sequence-specific DNA binding; Cellular component=nucleus; Biological process=regulation of transcription, DNA-dependent
  Homolog annotation: Hit_ID=Q10M28; Match level="QueryCoverage=70%, HitCoverage=90%, E-value=9e-67, Identity=49%"; Hit description =Homeobox domain containing protein, expressed
  Pfam annotation: Domain name=Homeobox; Domain location=34-95; Score =48.1; E_value=2.9e-11; Accession=PF00046.19; Description=Homeobox domain
MEGGSNSPDGQSSGGSPEERGSGGSGGRGTGEPARSRWTPKPEQILILESIFNSGMVNPPKDETVRIRKLLERFGAVGDANVFYWFQNRRSRSRRRQRQMQAAAAAAAAAAASSASNNSSPAASATVGLPSGALQYPLAMGGTAACQYEQQASSSSSSRSTGGSSLGLFALGAAGVPGTGGGGYFQASCGASSPLATGLMGDVDSSGGSDDLFAISRQMGFAAASTVASASVAPSSNAHHQQYYSCESPAATITVFINGVPMEVPRGPIDLRAMFGQDVMLVHSTGVILPVNDYGILTQTLQLGESYFLRFLDTACLAVPERTCQALLTPACSGAGRRHLPLDPPPHALHVRWSIRKSLDLGAREQGRGCVVVIQLSVRDNAADYIYILHPACRVELKTSSESECVLLGLLAEVSMHIAQPPSPAVVASSSFDPA

SEQ ID NO: 49156 - protein, 108 aa, Zea mays
  Coding DNA Sequence Number=SeqID_7377
MDFSKEANDGYAFVNLTSPEAACRLRWPHGGLPYALVGLPSCGEASPGELGVKRSCGPTDGFATSPEVGLTASIGTPRLGYPLLLGLGGTPVAVHSHIVTGSSAYLRI

SEQ ID NO: 49157 - protein, 112 aa, Zea mays
  Coding DNA Sequence Number=SeqID_7378
EVADGLNLRYYRRYSTGSTGSVVVSPIGEGNPRLSNTVNLVDVLNTELDHALDELSRARAEIAELRAKRMEHRHQDDGSPAPTRTQHPYRSLPRGHHAYGTPDYRVKIDLDP

SEQ ID NO: 49158 - protein, 52 aa, Zea mays
  Coding DNA Sequence Number=SeqID_7379
MAAMGRDAPLLGSVGRMMGRGPPIHRWTSEIKGEARGFEDLKNHPGNWNLKS

SEQ ID NO: 49159 - protein, 82 aa, Zea mays
  Coding DNA Sequence Number=SeqID_7380
  Gene Ontology: Mol. function=zinc ion binding; Biological process =cell redox homeostasis
  Homolog annotation: Hit_ID=Q10M33; Match level="QueryCoverage=67%, HitCoverage=17%, E-value=7e-19, Identity=71%"; Hit description=Zinc finger, C3HC4 type family protein, expressed
  Pfam annotation: Domain name=zf-C3HC4; Domain location=2-39; Score =28.7; E_value=2e-05; Accession=PF00097.15; Description=Zinc finger, C3HC4 type (RING finger)
MCLDEVAGGGAEREMPCKHRFHDQCILPWLEMHSSCPVCRHQVPTEEPAAGQLTVAEAQVLSPVATRAATTGRWTGSQGASR

SEQ ID NO: 49160 - protein, 806 aa, Zea mays
  Coding DNA Sequence Number=SeqID_7381
  Gene Ontology: Mol. function=transferase activity; Cellular component= membrane
  Homolog annotation: Hit_ID=Q10M35; Match level="QueryCoverage=52%, HitCoverage=91%, E-value=0.0, Identity=78%"; Hit description =Secondary cell wall-related glycosyltransferase family 47, putative, expressed
  Pfam annotation: Domain name=Exostosin; Domain location=430-755; Score=369.4; E_value=5.5e-108; Accession=PF03016.6; Description =Exostosin family
MARTMLDEYKTSDRFWAEPINTACYAINRLYLHRILKKTSYELLTGKKPNVSYFRVFGSKCFILVKRGRKSKFAPKAVEGFLLGYDSNTRAYRVFNKSTGLVEVSCDIVFDKTNGSQVEQVDLDELDDEEAPCIALRNMSLGMCVLRNPKSLHMHKINHLPPCKHLHQPKMRIKLKMMIMKIKRSHLKRRTMIKGEMLMIKTRKMMRVKGRHTQESTKQYNEITPVEDTLRDSDWVLAMQEELNNFTRNEDAKPIKTPMETNGHLDQHTGGKSVDQKRYESSTKHPLRSVWDSSSFKKFGEVNEAAPNSTAAISSRSDRLDRDASISIATNRPPRVTNPAALSPVRSPPSQPWPSPVPPSARIATVSAMATACRSPLVWLFALAAALFFLSWYLLLNSAAGPTAARRPNQGLRLGGPGRKCDPAEALLRVFMYDLPPEFHFGLLDWKPPGFGGGVWPDVRDGVPDYPGGLNLQHSIEYWLTLDLLASEQGAPTPCAAARVRHAADADVVFVPFFASLSFNRHSRVVPPARNSEDRALQRRLLEFLAARPEWRRTGGRDHVVLAHHPNGMLDARYRFWPCVFVLCDFGRYPPSVANLDKDIIAPYRHLVANFANDTAGYDDRPTLLYFQGAIYRKDGGSIRQELYYLLKDEKDVHFSFGSVAGNGIEQATQGMRSSKFCLNIAGDTPSSNRLFDSIVSHCVPVIISDEIELPFEDVLDYSKFSVIVRGADAVKKGFLKSLIKGISQEEWTRMWNKLKEVEKHFEYQYPSQTDDAVQMIWKAIARKQTPAFTMFSILPKQELILKTKP

SEQ ID NO: 49161 - protein, 82 aa, Zea mays
  Coding DNA Sequence Number=SeqID_7382
MAGGIELAGAKERWLAGEGAKGSQKANKKTKKRVQQKEQRDNRRHPGLAHRTVRCTTRHVRCTRVLHALNSSPSGKLRAAAL

SEQ ID NO: 49162 - protein, 186 aa, Zea mays
  Coding DNA Sequence Number=SeqID_7383
  Homolog annotation: Hit_ID=Q69Y12; Match level="QueryCoverage=19%, HitCoverage=5%, E-value=1e-07, Identity=72%"; Hit description =Putative aminopeptidase C
MGGECPSDEASVQRLMLKDLAQAIHFHLKINGLWIYAATWEFDQNPNDLAHSNELKLEEYFFNVKALLISYVRDFNCDFVYSHAKWMIVDRLKSCAHRGCFVIHIYIFRRVKDRVELKDLTQWHRLDGTLSVSSSVHHFAWETSVSGCIMVSPDQATKIYKAMKDKGLPVDLVECEGERHGFLKAQ

SEQ ID NO: 49163 - protein, 461 aa, Zea mays
  Coding DNA Sequence Number=SeqID_7384
MDDLLECKQAMFKASTMPNRDVEEISSKWRLSDYYDELNQDSDTPFFLSLGMNYLVEMSVSSSSLGMNEDLPFVPDTHSSLLQQAAWDREHFDYEMRKSIAEIVLEDELFDVGSSVHSVDSCMQFRDQICMSKLLIDSYRMELKYKIAYISMCQWDPGILSLGDWPIGGNFSPRKSDLIGYCYEKMPPWNLTSPSPATATYTYPCSPPPPFPPGGTGWTTRTAHLVHMHEAAHARARAFRRRRWLSLRFCLAPSPSPNTRADEETHATRKGCAEIRPVPRSPHAILPRQASLASTSALVERAQAARFADFPLASASARWCSPSVRPSVLLCLLPAQSQARAQRGRGPSAGAEDLRELSLLSRPVPVVDATRRPSIMRPSSSTVAAAVLVLAAVLASGGTVGAAARPVVGHGGGDRAAVFVAVEVATGTDSSAQPSNCTYGNNVGGVCPPFPPTPSAPNAGH

SEQ ID NO: 49164 - protein, 148 aa, Zea mays
  Coding DNA Sequence Number=SeqID_7385
MGRGRRGIGWPHRANSKSKCALSPPSKDFGDSEYSKEASFEYDQSLAPASPPVSFKDSDDSIGLSTVARAYWRSIERARLSGGDGDGSSSDDDDEDDGSKGDDGKGDGGSDDGEVYGSKGDNDKGDGDDSSGKGDGGNGKAGGIMPLV

SEQ ID NO: 49165 - protein, 420 aa, Zea mays
  Coding DNA Sequence Number=SeqID_7386
  Gene Ontology: Mol. function=sequence-specific DNA binding; Cellular component=nucleus; Biological process=regulation of transcription
  Homolog annotation: Hit_ID=Q6IES5; Match level="QueryCoverage=96%, HitCoverage=95%, E-value=1e-75, Identity=45%"; Hit description=WRKY transcription factor 6
  Pfam annotation: Domain name=WRKY; Domain location=346-406; Score =130.9; E_value=3.5e-36; Accession=PF03106.6; Description=WRKY DNA -binding domain
MEAVEEANRAAVESCKKLVAVLSLSGGDAFRPMPVAAETDEAVARFGKVVAVLSGRLGHARARVGKRSPAPPVVDASCLLDHPSLAVAPRHTPNGGHLLLSATTPPLPPLPPHLLPPASMAMRSAAVPMTMRSQEAAPAPAVLLVPPCASNVTLTPAKKFDRSMFLETPLLELNSCGVPPSPSASPAMAAVQRNSTKVAAAVPAPNPCTSAPRIQFHPPHQQQQQAAKKQKSFQFDQTPSGEQFHIEVPVPLPRAAPAAKEVISFSFDNNSVCTSSAATSFFTSIGSQLISMSDAATSSAATAKKACGKRAEDSSGVRCHCPKKKKPREKRVVRVPAISDKNADIPADNYSWRKYGQKPIKGSPHPRGYYRCSSKKDCPARKHVERCRSDAAMLIVTYENDHNHAQPLDPSVLTAANAEA

SEQ ID NO: 49166 - protein, 53 aa, Zea mays
  Coding DNA Sequence Number=SeqID_7387
MAWWRWKESLPDLSVILYREVGAYAYVRWAVSLAPSLEQEAILKNWSIITGAN

SEQ ID NO: 49167 - protein, 561 aa, Zea mays
  Coding DNA Sequence Number=SeqID_7388
  Gene Ontology: Mol. function=GPI anchor binding; Cellular component =plasma membrane; Biological process=invasive growth (sensu Saccharomyces)
  Homolog annotation: Hit_ID=Q3DVE9; Match level="QueryCoverage=46%, HitCoverage=80%, E-value=4e-19, Identity=30%"; Hit description =Putative Ig
MASSSSSPSSTSPSTASRSEYQDTDHLAAQSLYETTYPPLPTREAAPTTSAALGVAPGAINASATAPGVSRSNTRSQIYHTLWGGTKRVPLPTNISLALAHQRRCRGRTRTRNSADVSQPRRNNPVGLSQHVSYASRLDLDSGWGTAPAPTSALAPMRSSTANPSPPTSAWTRPFLSSSTVASTRTDNRIAVAATPPPDTTLVPDAPGYAPAVATSVDTEPEPNASISTTYFAPAVATSADTAPEPNASISTTSFAPAMATSADTAPEPNASISTTSFASAVATSADTAPEPDASISTTYFAPAVATSADTEPEPDASISTTSFAPAVATSADTAPEPNASISTTSFAPAVATSADTVPEPDASISTTSFAAGVTTSADTAPEPDAFISTASFAPGVTTSADRALELDALTSASSSAPGADPDISSIIDDLETLFVAGSGMQAIGDRGVHPVDDFYPDLFQAWREDVASRAWREDVAPRAGREHFASRAWPQDVAPRTFGYYDIPAADIPLCSECRIRSAQIEARHYDHLDICARCYAKKFVCPICGYDLGVPPSTGTHRG

SEQ ID NO: 49168 - protein, 82 aa, Zea mays
  Coding DNA Sequence Number=SeqID_7389
  Homolog annotation: Hit_ID=Q69MD6; Match level="QueryCoverage=99%, HitCoverage=11%, E-value=2e-07, Identity=56%"; Hit description =Ternary complex factor MIP1-like protein
  Subcellular localization annotation: CTP_CleavageSite=65; ConfidenceScore=5.27e-01
MEEQRRPPSSKMVPVSMKASSPNATLQGMKNRSHFRSDRKTALQQDVCVLFYLVFSCGQAEEKVVAREERPLSSKAGIREAA

SEQ ID NO: 49169 - protein, 90 aa, Zea mays
  Coding DNA Sequence Number=SeqID_7390
MRHERPFLGKEVDANDHGADMLSRGRQLDTPKQDLGTIYIDAETCNFGVNNNNAEVIINKLTTMLTNPRKPALSLQFGPPPQTLQLGSWL

SEQ ID NO: 49170 - protein, 145 aa, Zea mays
  Coding DNA Sequence Number=SeqID_7391
MDGRAPVADGCLVVLVVIHVNLLILVAAARDGERAEARWNLQAWEGRRGGRGGVWVGDSAMAGRRSGSGEEEQAGGRCKCHGGEVWCFGVEELGEGGSMGEMSHGDLGVDCGGLPQRRHRWKGVLRAGPALRAKPVHPSNVGRLQ

SEQ ID NO: 49171 - protein, 277 aa, Zea mays
  Coding DNA Sequence Number=SeqID_7392
  Pfam annotation: Domain name=DUF241; Domain location=59-260; Score= -36.4; E_value=0.00098; Accession=PF03087.5; Description=Arabidopsis protein of unknown function
MAPSFLLDCARPKKLSLPVRLHPLAAALHESARALLAWADAPAQTGPAWVADGAGRAGRVLSGLADLLHHPQARDALRRHPWTTEQLLDDLLLLADLHGCFRESLVALTQLLAETHAALRRRDGARLAAALRAQRRSAREVSRLASSARDLSHRAGARRRLRRGHPRPTPSRPRRLPWPPPRPRSSPACPPASAESAASAAPSPRTPTPYSPARTPGSPIGGGGAERLHMGRVRELEECVDATKTESHEVYRALVKRQSLPDHPAHRPRSDSDDICS

SEQ ID NO: 49172 - protein, 75 aa, Zea mays
  Coding DNA Sequence Number=SeqID_7393
MAGSRPPTTLLTDERVFLFVAPTHLATSLTILVVAALVVELTVDGFGSALLRHFGTRAFFGSVWFMARASRGYNL

SEQ ID NO: 49173 - protein, 125 aa, Zea mays
  Coding DNA Sequence Number=SeqID_7394
MELEDVAAMGGCSTEEKQRRPARSRTELEHRDTQGNGGGAAGGEFEGDGEGMGEELSTRDSSVAMGCSAASPRRWLAPPPATSPTRRSQQEQGEARNRGWAPWASAGEERDAFSPVINIWRFRSI

SEQ ID NO: 49174 - protein, 92 aa, Zea mays
  Coding DNA Sequence Number=SeqID_7395
  Subcellular localization annotation: CTP_CleavageSite=16; ConfidenceScore=5.15e-01
MTQLPQRTPANFQGLSAARGADFNGSANPCPVLAPIWVPLTSPFLANLTHQRPHESSCGERHYRRKGAVEREQRVLALAAYCGALVTTLIMR

SEQ ID NO: 49175 - protein, 43 aa, Zea mays
  Coding DNA Sequence Number=SeqID_7396
MAAETGYGGDPTPRRLGESLATWARMAEGDTEIGSGATWAARQ

SEQ ID NO: 49176 - protein, 178 aa, Zea mays
  Coding DNA Sequence Number=SeqID_7397
  Subcellular localization annotation: CTP_CleavageSite=54; ConfidenceScore=5.61e-01
MAMIMPSTTCSTSSPSQSRSLSSKLPPFTMGFLDALYHVVMRRNAVYVTVVVIDSSAGEQLSLLPPASLSDSPSHVGFPTPYTFLAGSFLEAKRLLMAGRRWMAPLDADCHDIVPVLVPQFLRWVADYGKLVTVGARSNLKDECPSGQGVTLHKIVTAIGGGVSVAKAQRLWKAVVGP

SEQ ID NO: 49177 - protein, 206 aa, Zea mays
  Coding DNA Sequence Number=SeqID_7398
  Subcellular localization annotation: CTP_CleavageSite=57; ConfidenceScore=5.46e-01
MPPHSNQVAADVGSPNIGLGASPSLLGVTRRPPVKPVAGQGAIAHRTSFLRHRPPYVAAGVTEATITGNKPILVFVIHCALCSYDELENGEPECVIDVRRSWAPPWLGVRRRAWVPCWGDDRAQLDDQQRLRLDHLHTDSRNGFGAVRSASGGREASVEEVLRMVNLNRRIPIHRSGLFTDSYKAWANSGGRRPLDFPELRPSPVA

SEQ ID NO: 49178 - protein, 355 aa, Zea mays
  Coding DNA Sequence Number=SeqID_7399
  Homolog annotation: Hit_ID=Q6QP54; Match level="QueryCoverage=22%, HitCoverage=27%, E-value=5e-09, Identity=45%"; Hit description =Putative kinase
MAPPVDVAGLRPRLGDVEAPPKPRSSLSSVAEVESEPLGRARRRPSAEARAESEPWGRAKRIGVAQAALSFCQADQWSGEVTAVTSALPRGTRQDKGGSVDCPRSLPARASENPAPQRTPAPHAPPSSARPRAAAAAKSCSHTPAPALATAHARASAHNGVVTASVAAVLEVSGETTRILVLACHPRDRSHHGNKVTMAANKTTMATRLPPPPAAGEYRGAGGRRGGTAALSIDGLGFSTVLASWLYVKPARDKTCLGVVGSRERGLPDGAATATNNSEPLPPATISSVASSPSRAPSSIPRARKPRAQSPAQRPELNPRVPVHGALDEVHELGHHLWVEPLIAEPVESRLEGGG

SEQ ID NO: 49179 - protein, 437 aa, Zea mays
  Coding DNA Sequence Number=SeqID_7400
  Gene Ontology: Mol. function=RNA-directed DNA polymerase activity; Cellular component=mitochondrion; Biological process=RNA-dependent DNA replication
  Homolog annotation: Hit_ID=Q8S463; Match level="QueryCoverage=99%, HitCoverage=22%, E-value=0.0, Identity=88%"; Hit description =Putative prpol
  Pfam annotation: Domain name=RnaseH; Domain location=13-140; Score =9.6; E_value=7.4e-06; Accession=PF00075.14; Description=RNase H
  Pfam annotation: Domain name=rve; Domain location=345-437; Score= -5.2; E_value=0.016; Accession=PF00665.16; Description=Integrase core domain
  Pfam module annotation: Pfam domain module=RnaseH::rve; Domain location=13-140::345-437
MGRHPATDGSDPTGALTMFFDGSLMKTGAGAGLLFISPLGKHLRYVLRLHFPASNNVAEYEALVNGLQIAIELGVRRLDARGDSQLVIDQVMKNSHCRDPKMEAYCDEVRRLEDKFYGLELNHIARRYNETADELAKIASGRTTVPPDVFSRDLHQPSVKLDDTPEPEVPSAQSEVPSAWPEAPSARPEATSVQPEVPSASEGEALRVEEERSGATPDRNWQTPYLQYLHQGELPLDRAEARWVARRAKSFVLLGDEKELYHRSPSGILQRCISVTEGQELLREIHSGACIHHAAPRALVGNAFRQGFYWPTAVADATRIVRTCEGCQFYAKQTHLPAQALQTIPITWPFAVWGLDLVGPLQKAPGGYTHLLVAIDKFSKWIEVRPLNSIRSEQAVAFFTNIIHRFGVLNSIITDNGTQFTGRKFLDFCEDHHIRVD

SEQ ID NO: 49180 - protein, 163 aa, Zea mays
  Coding DNA Sequence Number=SeqID_7401
MREIGTGNKSASSGRTHSRESAHKHKEESSSSIKSQRKGDKKKKMKKVVYYETDSSSPPPPARNRHPSLLSAMSARSIDSAACATPTAAPLGRVRLTAAKSGLERHRKLRLARPQGSDSGSAPEDDELRLARPRARTWAQPRKTTDYASPDPGLGLGLSPGRR

SEQ ID NO: 49181 - protein, 143 aa, Zea mays
  Coding DNA Sequence Number=SeqID_7402
METERLEDSDDEDSHGGMKGSRAVQGSRAVEEPPLLLLLVSAQGSLRGGGEPHGGGETRGGRGEGSPERSARRSREPRWRGAARWSLERAIWDRFGGEPEVRTGPTCKDLGPHGRVFDGRKCRREVISEHSVEVGRGKLSREF

SEQ ID NO: 49182 - protein, 177 aa, Zea mays
  Coding DNA Sequence Number=SeqID_7403
MRQRQLRYAMRNSPASWIVSDTDTPDASGYSFDCERCIGSIVIRACLVWFLHARSIAYMKMALALFFPFAVQKHSTRGRLVQQSRRAGGEAGGHALQLSLNPNFLSRVQESAHLKAVLDNPQFQLDPFAAIHQHLLATQPPAAAKKDDAAGKQGKVSKDKKSRRKKGTSSISQAMDI

SEQ ID NO: 49183 - protein, 44 aa, Zea mays
  Coding DNA Sequence Number=SeqID_7404
MTRRGGGCPQWSGDPEGCGQGAAKDLGSDCHVRQRKVEYEVQKP

SEQ ID NO: 49184 - protein, 76 aa, Zea mays
  Coding DNA Sequence Number=SeqID_7405
MAEQKKGIQSKRVTGGDGGGRSGESVRLDLLHRGMKAACEWDSMAAVGGLAYYSFVWKRARARNTNYDPSINLETW

SEQ ID NO: 49185 - protein, 102 aa, Zea mays
  Coding DNA Sequence Number=SeqID_7406
  Gene Ontology: Mol. function=sequence-specific DNA binding; Cellular component=nucleus; Biological process=regulation of transcription
  Homolog annotation: Hit_ID=Q94J08; Match level="QueryCoverage=95%, HitCoverage=31%, E-value=4e-13, Identity=47%"; Hit description=WRKY transcription factor-like
MSSGEDGYCSSDSSRAESPDQPQAAAAADADVESPRAGAGPNKRDLHASPPAKRSRRSMEKRVVSVPLAECGDRPKGGSGGEGPPPSDSWAWRKYGQKPTLE

SEQ ID NO: 49186 - protein, 85 aa, Zea mays
  Coding DNA Sequence Number=SeqID_7407
MRFSRGYGGWSDLAVYPATGLDSRVGPYLSRRGAGGVMGQASPSSLLFTLLDLIKFLKVTHEDFKKAKEKVMYKKKEGVPDGLYM

SEQ ID NO: 49187 - protein, 281 aa, Zea mays
  Coding DNA Sequence Number=SeqID_7408
MPDNRGSGSSKSMGGSYAGEDSGGQVKRVERVGAVIASEHDTQGNVAYGWIKGHERAPDELAIVEKGTHNKFGGNGRSHGTGEGGDNTGSSSATARVARRRMAGEGMRCVEEGRGGPDNVRDSCCRDGRGMARRPSRVSVPWGWLGRWSKGRGGPDDVATVAAAMAAGWRGGQAGVGGRRAATRRWEGTLAAMGKGGAALRRASQPRLELATPATSEDMEAAGKWAAMDRERGGRRELFDRNGEGRDECDGLESGRRLDGGRVDPRAPMTGESGRTQEGHT

SEQ ID NO: 49188 - protein, 301 aa, Zea mays
  Coding DNA Sequence Number=SeqID_7409
  Gene Ontology: Biological process=pollen maturation
  Homolog annotation: Hit_ID=Q66VB0; Match level="QueryCoverage=74%, HitCoverage=20%, E-value=5e-73, Identity=57%"; Hit description=No pollen
MSNVTGKGQLGSDMADLFLTLRLQGLAGLFNLMENRSSGQQHETCWFQESCTISKKPRADLMTKELELSKMKHPFIPYSIHETQNQIIMAIWKLRSSGLEQKGEVIDKEPELKENPYEEGSLLANEDVKMSEVYSAVLSVDVSALMEMFSGGPLEHKVMERAGCVDYLATEWELLNRNVYQRHINFRFDKSLSRYGGEATTTQQKYNLPNQNDWIVEEVMTLQGVQHEDYSSIQLKYHMTSTPLRPNSCRIKVLLGIAWLKGTKHQKKAAKNVMMNSANRLREIFSEVEKEVTSRKVPASG

SEQ ID NO: 49189 - protein, 1290 aa, Zea mays
  Coding DNA Sequence Number=SeqID_7410
  Gene Ontology: Mol. function=protein dimerization activity; Cellular component=nucleus
  Homolog annotation: Hit_ID=Q1S398; Match level="QueryCoverage=24%, HitCoverage=70%, E-value=1e-109, Identity=63%"; Hit description=HAT dimerisation
  Pfam annotation: Domain name=hATC; Domain location=704-795; Score =31.1; E_value=4e-06; Accession=PF05699.5; Description=hAT family dimerisation domain
MTCAVPHFFVVDWTASEVGRMRGAERRILFGSLVGEESKLPHVGRQQRDKTSLAKTDRGYELQSQGPATQGPDVLDNLVSATRRTSSSSAPPPQHLPTATPPPSPPSSPPLAATSITSTNGGPSAKAPQADAWAATPPSVQKKMRRFLVDRSLLSAPQGQSAIATQPNPPQAQSRGGNEINLDEIVSDPALRKPIHEYAPEIRDQIKRAYILKGPTQPIVNFPKKKFGDSSRAFQQAWYKKFDWLEYSVSKDAAFCFYCFLFKEPGRAEFHGFDVFNKLGFNNWKMAYKSLPEHVGGINSGHNKCVEQCDDFKNQRQSISSKLSSATREAEELYQTRLTSSLECLRFLIGQGMAFRGHDESSSSLNKGNFLENDRLVQEHNELVRHSFNRGGLNCQMISPKIQKDLARCCAEEVTDVIMGELGDKHFSILIDESRDISVKEQMALMLRYVNNQGKVVERFLALQHVIDTTSESLKVSLLALLDKYNLSISKIRGQGYDGASNMRELMWDSVIEVLGIVERDGRISSAAGGLIEKMENFKFVFILKLMGNLFSITNDLSQVLQRKDINIIHAIDLVDDVKYQLIALRDHGWEDFLDEVKKFCEAKCVLVPNMDDEIPCRSRSRRERLIITNLHHYRVELFYVTIDQIIADMNHRFNEATTEILTCFSCLDPKNNFSKFDTDKLFRLAEIYDADFSNSDRSLIRGQLETYILQVRRHAAFASCKDVASLAIKMVETGKHLVFPLVYKLIELVLILPVSTASVERSFSAMKIIKSKLRNKIGDEWFNHLMVCYTEREIFKGLDDVTIMRRFQNIKTRKMNLPCGSSCVDIYSTDHGGEGLDGLLQLGGGRADVVHLDLDGRGHHVLASIQGFVEPTLWATAALGPARSPSIKIGSRRSTLVLVRLKRRRGSRYTLVVSGCCSASTSGYRTPQSLVAAMGLAYQFELQEQYTASAPRASPNPRLLSPAAHLALPAPPSAKAATSATITVEGLPIKRLTQAEQEECRHLGLYCNCDEKFTRDHNRVCKRLFLLDGFEEEDGAATETVEDVGLRTPGPSQGRINDTMQLGVELGFASLVALLDSGSTYNFILEAATLRTRLPLQHQPASRLWSPTANASCALASSVTFRLQSVAPCSPLISMSCLWRYDVVLGTRWLAMLGPIVWDFSNRAVSFTYQNHAFCWQWLASPRALVMSTTTASSSFLEELLVDFDDVFDELHNLPPSRSRDHSITLVPRAPPVAVRPYQYPVCTRTNWSVNVRPCWTRGLFSAASLRSHPWASSRRWTDLGGSKSTTVR

SEQ ID NO: 49190 - protein, 860 aa, Zea mays
  Coding DNA Sequence Number=SeqID_7411
  Gene Ontology: Biological process=pollen maturation
  Homolog annotation: Hit_ID=Q66VB0; Match level="QueryCoverage=85%, HitCoverage=70%, E-value=0.0, Identity=59%"; Hit description=No pollen
  Pfam annotation: Domain name=C2; Domain location=108-189; Score=92.3; E_value=1.5e-24; Accession=PF00168.20; Description=C2 domain
  Pfam annotation: Domain name=C2; Domain location=657-749; Score=63.9; E_value=5.3e-16; Accession=PF00168.20; Description=C2 domain
  Pfam annotation: Domain name=GRAM; Domain location=811-859; Score =10.7; E_value=0.019; Accession=PF02893.10; Description=GRAM domain
  Pfam module annotation: Pfam domain module=C2::C2::GRAM; Domain location=108-189::657-749::811-859
MRNMISAGRADEASSREYAPQKPDSPHTRASVALQTTISESCSPTYSVFAEGGTGIDGRVANPPLAIARSLSLSSHLRSRRSPRPRMARTSGPPGPPEPGRHDAPMLLRVHVIEARGLPAIYLNGSSDPYVRLQLGRRRPRETTVVKRSLSPVWDEEFGFLVGDVAEDLVVCVLNEDRFLGAEFLGRVRVPLTAIMETDDLSLGTRWYQLQPRSGVKFRKKRRGEICLRVYLSVRATLCDDAHQAPPQLIDDISCSSHRSIETNESPLSATVNSLDMSACASMDRTSLKSSDGFNQSMTEVRGPRSTGPLSCVSIEQSILLEPEEDDGSAIVDTSSVVEVMSRYFRKTADATHSVASDPVSLDQFRSTQMNSECRENEEGCTLPEVSLDELLKNMESKDQACELPGNLPGGVLMDQSYIIAPAELNSLLFSGTSDFWPEVSELQGTSGFNIEPWKHDNNENCLKRTITYTKAASKLVKSVKATEEQKYLKATGSSFAVLSSVSTPDVPCGNCFKVEILYRIISGSQLPLEQTTQITVSWRLNFVQSTMLKGMIENGAKQGLAEGYSHFSEVLSRKVKVAELADANTKDKILASLQTQKESNWKLVARFLGSFAFICSLSTALYITTHLHLAKPNVVLGGLEYFGIDLPDSIGEIVFCIILIIQGHNIMKVGRRFLQAWKQRGTPGVPDPYVVFTCNGKRKTSSVKYQTSEPKWNEIFEFDAMDDPPARLDVVVHDSDIPNNETPIGQTEVNFVKNNLSDLGDMWVPLDGRFPQGHQPKLHLRIFLNNSRGTEVVMNYLEKMGKEVGKKTNSAFRKLFSLPPEEFLIDDFTCHLKRKMPLQYFKGKICSWTLRTAPFARGH

SEQ ID NO: 49191 - protein, 316 aa, Zea mays
  Coding DNA Sequence Number=SeqID_7412
MGGGGGAAQGGERAACWAVLHGARAARGRGATTGMEMVEAARRAEAALQREGTARWRGQEPKGAARVLAGTDRAPSAGDPRERRRPGDGLGRADPAGLDARRRGEARHRDDQRVARLLARPAAPRATSSGWTTAAGVLAPTRGEGGLGEQQGGGRGGLPAGVRRDGRGSATAVGWGGRSHTTEHQKIQSDLKNQSAMALHNGPIGMPPMLKQTRTYIPNRPTTTLPVPTMVIILGLKYVSTFEQWTRTKQDAQNDQKLFLPSSTPQLSSPQLPPVNEENKSCYEKQSLKIISANVPIWINTLCKTTYVFKRRIIKI

SEQ ID NO: 49192 - protein, 174 aa, Zea mays
  Coding DNA Sequence Number=SeqID_7413
MLLELNAGGSQLWDGAAAKENGMIVHQVRGFDMELLFGKDEAEAWRRGQGSCAELHGWRRPSARGHGARGGALRLGLRELTGEGAKGSTQTNKKIKVRVQNKGAKETEENPGLAHRTVSGAPPDSVRCTGPYDFKLATFGFLESRSAIIHRTVWCASGATASERNGRLQRSPAT

SEQ ID NO: 49193 - protein, 46 aa, Zea mays
  Coding DNA Sequence Number=SeqID_7414
MTEGHALLGKSSGGPSSGLWSEINLKGVVTASPARGWPRPPSFKLT

SEQ ID NO: 49194 - protein, 1064 aa, Zea mays
  Coding DNA Sequence Number=SeqID_7415
  Homolog annotation: Hit_ID=UPI000069E2F5; Match level="QueryCoverage =34%, HitCoverage=49%, E-value=8e-10, Identity=27%"; Hit description =UPI000069E2F5 related cluster
  Pfam annotation: Domain name=Extensin_2; Domain location=208-538; Score=-138.0; E_value=0.066; Accession=PF04554.4; Description =Extensin-like region
MEDEGRRRQRAGTERQHPAGECPVAPTVEHSSSKELVMGMEDEVAEATTASDLRIRERTLLGARPREGALAVVADAAGVDENGHRLLVHCSLQGGLVGVVHHVPAVDVHHRTEDSQSMERLGRGDSTDCVDLCRGIEIHGERGDGRARMGALMEGIVGAGTRIMGHPKMAPVGVGERGGGENRGSGELAAWCARAGGHHSHSEASGFRWGFAVWSASFAAALTAWSAEVFGGGPSRRRPHRLRATVALPAAARTGYGDRSPPGGGRTGYGDHSPPRGSRIGYGDRSPPRGDRIGYGDRSPPRGDRIGYGDRSPPRIGRIRIGYGNRSPPRRERAGYGHLDASPRRGHAPYKDAFGSPGGDRHASPRGRREYGDSRVSPPGGRDYERAPCREERDRYGRPGRGADLGHNSPPAHMLPDHPSDLGRSASLRADDHSLLKDDYPRGGPHRSIRKENELFANGDLTLRISATEMGRTSAMYSQDRRLSPPPPIYPYVPRETGFLTGGSAMKASDGYGAGTGSAQRLHDDDDFKYHKDAPHIERSRDIDRHYSGSRDLVVEKGGVAERYASADDLPSGRIRETESLYSSRGMLESDLVPCRQLKVLGDPSSALPAKDHHPYRMYTEPGYETSNRYIMEGLGRSSHDSLGHGSDHPHRFSGGSLEHVSGHGDETLLDIARQAHSKHTPRAASLEYDVHDTHSEPENLRGNVSMTSRHTSVSTSLRGLRDERINDNLRLSRRIEEDEGSIESMHQDTEHLIRHCYNGDASVQYQTARGGDDHYSHSPGTEPIGIARRLAHQHEFDSFGYSSDQEASLMVSRKRCRSPEYHDHEIDMYQADHGFAGHEHYDDDVVDEYDIPPPRMSRFDDEYDEIHDVLANRDVFSRISLPHETNQEWTDMDQGNHPHSNILGYGCSKHVPMHQRLSKPNYHSQFGETPMHGRGRGRGGLTKSAKKGLRTAPHQLHDGYPSGRNEFVRPNKFSKSSKDELNGSEVKHEDAPEYEDVPLQKDPPEGSEEFSKQVDEAFLKYTKILNESPAMQKKYREAPKGSLPCCVCGRFVFLCLRTKQFLL

SEQ ID NO: 49195 - protein, 101 aa, Zea mays
  Coding DNA Sequence Number=SeqID_7416
MKALGAAAERKIRGRGRRLGEKNRGSEGEVAMGRGVETSAFGVRTWGRPTWGRDLDVHGEEPEQQRTKREKAGASRDARDLGERVLGRAARASCWCRSGRD

SEQ ID NO: 49196 - protein, 76 aa, Zea mays
  Coding DNA Sequence Number=SeqID_7417
MEVVTGATPRDDRRDGGGGRKERGGRNTPEREVEDEKREMLHIENNDDDREQEWRDEHDPKEKNTNGVQWSLMPNI

SEQ ID NO: 49197 - protein, 85 aa, Zea mays
  Coding DNA Sequence Number=SeqID_7418
MARKTLDQPEGCQSGCFLQSGSVCRDTPALALSRKRKGKASGAGIRKNGAATSRHQLLGIEIFAYMAPASMGFACTAPQGRQLQI

SEQ ID NO: 49198 - protein, 103 aa, Zea mays
  Coding DNA Sequence Number=SeqID_7419
MATNYFSEMAAAIVNLSSVEQSLSESGSLSSARRFVECNILSHPDLRDKAGTHRFKKPAPPVPPGASPVLPVWDAVAPGPSIAPAPVPSICSTSVLANVKTWS

SEQ ID NO: 49199 - protein, 291 aa, Zea mays
  Coding DNA Sequence Number=SeqID_7420
MDRRMDVAKKKWVQIKYKGLQAKTPTVYLCTETHIHTTDSNGPPGTAANSPRCTAHLTLLRVSPQPQFPPTQAMRASQDHAPQPLPLPLPPPPLSLPSPPAPPRRGRHRSSYSSSSSASSISSASSTFCPSPSPSPRASTATSLVPFSWERQPGVPKNSSRVGLASPTGTGTPLPPPPLRPAPRRRRARDDDPFVAAFAECTRDDDDDSIRKLWPVTAKPAAESSGRAERWWWIAAGGGGGLVAFLDLHGCKSAVDVADGAAFHPRRLVAAAAAAAGPRAVGRPGKPKMSN

SEQ ID NO: 49200 - protein, 434 aa, Zea mays
  Coding DNA Sequence Number=SeqID_7421
  Gene Ontology: Mol. function=membrane alanyl aminopeptidase activity; Cellular component=extracellular space; Biological process=proteolysis
  Homolog annotation: Hit_ID=Q6K4E8; Match level="QueryCoverage=76%, HitCoverage=42%, E-value=1e-122, Identity=67%"; Hit description =Putative puromycin-sensitive aminopeptidase; metalloproteinase MP100
MEEHRAHVRSYVSVDTRRRSTVASLTLMQPNRGAHNRMEKHRKALASYIKKYAYSNAKTEDLWVVLEEESGEPVKDLMTTWTKQQGYPVIYAKINGHDLELEQAQFLSDGSSGPGMWIVPVTACCGSYDAQKKFLLKDKMDKINIKEFSDSQSADGEKNQIIWIKLNIDQTGFYRVKYDDELAAGLVNAIKAKKLSLMDKIGIVEDSYALSVACKQTLTSLLRLLNAYNDESDYTVLSHVTSVCLSISKITVDATPDLNKDIKQLLINLLLPAVIKLGWDPKDGESHLDVMLRSLLLTALVRLGHNETINEGVRRFHIFFEDGKTSLLPPDTRKAAYLAVMRTVSTSSRSGFDALLKIYREASEPQEKSRVLVIILQNYSKYCLQVCTMILKAQQKDGSNPTPQAVEADGDDNRWFRKVVPYSSALQQPFHAPT

SEQ ID NO: 49201 - protein, 114 aa, Zea mays
  Coding DNA Sequence Number=SeqID_7422
MAATSCPPRWHAWRKVRSKTDLPRTRVDERRSYRGCDCGRGQQIGEEEQGEGRKNERDIQRWQKRWCAHDVKRSRVRAIATARIGVGIAVGRIWGGSARSHVLCREWGGAEAEA

SEQ ID NO: 49202 - protein, 154 aa, Zea mays
  Coding DNA Sequence Number=SeqID_7423
MTASFLRELDGEKRQGGTSVRGGDIAAMLRWADNKDREENSAACVAPTAVPLNRVRLTVAKSSLGRHRKLRLARPQGSGSTSMLDDGLRLARPQGSDIASASEDGLRLARPRARTQPRPRKTDSASPDPRARIQPRPRKTDSTSTSEEPPPRPT

SEQ ID NO: 49203 - protein, 112 aa, Zea mays
  Coding DNA Sequence Number=SeqID_7424
MMKSKNGGGSTTASRGTVSSEGATGEGAVGEGAVGKELRRAPRTADDGGGSGRHVRAREREKRVRGERGASSVARGPVPWARHRLYKEGWERKRQWREMPTNAINVVNGVGY

SEQ ID NO: 49204 - protein, 90 aa, Zea mays
  Coding DNA Sequence Number=SeqID_7425
  Subcellular localization annotation: CTP_CleavageSite=81; ConfidenceScore=5.52e-01
MVLASVVSTSFTFLLIFSLPSCLCLRATPFSVEGVGANASSSYSSDTSPNTDPHSGYYVQVFVVSFSSNEQVCPPLPFRSCSMKPWKWGR

SEQ ID NO: 49205 - protein, 147 aa, Zea mays
  Coding DNA Sequence Number=SeqID_7426
MSRTTTVLTVSSYSGSYSGVAAANTVDDLCDMIRGFVDQLANRAVGDLLTSLRPCALLPASLHVGGVTNSGFHRSATLTLEQDGIRGLAILHRRRVILLTTDTASLQTEADLRRVQAPADEQSRHSRARSVPPSGERAWCSVSITTM

SEQ ID NO: 49206 - protein, 232 aa, Zea mays
  Coding DNA Sequence Number=SeqID_7427
  Homolog annotation: Hit_ID=Q6QP51; Match level="QueryCoverage=16%, HitCoverage=17%, E-value=2e-14, Identity=94%"; Hit description =Putative growth-regulating factor 1
MQVACNYTTEMHPFDFDASSMEAQAHTSCNRRAGYYVRKTAPPLKPMSRLLNYGTGAATRGNPVHGPTVPTKRIGHGDPERGYSERDPSLRRKRAPSPPTDQGFEGWPLGRVRQPPQSTQAPRPLLIRGSKAAPPKGLGLNLDLGRRSPPRPTPGLGLNLDLGRRSPPRLTPGLGLNLDLGRRSPPRPTPGLGLNLDLGGVTASPDLGLGPTTPQGGLKRSSDDHDITCTGH

SEQ ID NO: 49207 - protein, 47 aa, Zea mays
  Coding DNA Sequence Number=SeqID_7428
MRLGVPVVLPLLPLLPLTLLLLRSSRPLLSSRLTWQRSGSSYSAASV

SEQ ID NO: 49208 - protein, 185 aa, Zea mays
  Coding DNA Sequence Number=SeqID_7429
  Homolog annotation: Hit_ID=Q8SA97; Match level="QueryCoverage=37%, HitCoverage=14%, E-value=4e-13, Identity=58%"; Hit description =Ornithine carbamoyltransferase
  Subcellular localization annotation: CTP_CleavageSite=91; ConfidenceScore=5.07e-01
MEVRGAPDLTDFMNDWFFGKVGAQHSSGVGYDLTRESSKTPASSAQGSCPGSLADLGRSPRRARPSGPDVALSQKLWQREYGTWAVGLAVVREVVPNSSDSTCQVTLKVSGTIIRGTLKAPNSQLAVRPGRRHHRKLRSARPRARSRAKPRKTANSAPPDPGLGLGLSPRRRRIPLRPTQGSDSG

SEQ ID NO: 49209 - protein, 269 aa, Zea mays
  Coding DNA Sequence Number=SeqID_7430
  Subcellular localization annotation: CTP_CleavageSite=44; ConfidenceScore=5.49e-01
MAPHTLPDDGGSRPPYGSKRTSARTRQPRQLSFRQAPALLRRPRHHTNWVSKPLRLPQRHALATWRYRQRDHATRVHHLVPYAPRPLRLLRPLLLIPSLPPNPRRKCRFRDAPTPDSPHGRATSISPISAVHSRHRCHTSASSAPAFAADGSSDGVARLSSFLRRQRAVVAVLAAGDRTASRPTKLVLSDASKSVSSIVAAICYAWMLPSKGDGQAAVPVVNMRRSRMAWCRQAAWLLYHVGVDASALLFTDENFAFVYGMQNAPFPSL

SEQ ID NO: 49210 - protein, 187 aa, Zea mays
  Coding DNA Sequence Number=SeqID_7431
REMFNCFYNDEGASSAFCDDDGICDDDDDDDDGESFNRTTVLSKIHLHHYACARRLTAPDGTCNTIGSGPRSRARVLSRPMPNSISGESSASSEPGLDYLLRRGSRGRALRRLWHTSSNLKTRLGRNLEWTFTSSELGSSLNICDRGLPNVIKNSGADTSPLGLGLSSQRKTSEHKSTAKYQAILST

SEQ ID NO: 49211 - protein, 368 aa, Zea mays
  Coding DNA Sequence Number=SeqID_7432
MLTGDLASCMIYLRLRVALCSCKKNTDPAVQRTQSLDHLLSLSRRGQDFAAGPAKHWSTANLRASGPGIYRCRAWAPTPEHEPRTVRASCRVLDSWSGAVGVFLRSKIQEMILRRRSRSMNSSAGAQRSHVPGQSARSSTSPCDGDSGGAGDGAAAASSKSATARALFASPRLLHSSSLPAGTVAFAKSPAPDAEPQTAFSMSPTSVLDAAAAFVPGTDGAGKRRPPWRARDNNGLADALDCSDHHHQQQQQERIVLAATPSSCSLARSCSLDRRVEFGVKNRSSWLPLRGREATAPAPADPWEIEPSSEDYTCVISRGPNPRTVHIFGDRVVEGGAGAGADAAAEREDSSPRQINLPARGDRGFFSL

SEQ ID NO: 49212 - protein, 380 aa, Zea mays
  Coding DNA Sequence Number=SeqID_7433
  Gene Ontology: Mol. function=nucleic acid binding; Cellular component= mitochondrion; Biological process=RNA catabolic process
  Homolog annotation: Hit_ID=Q94GP3; Match level="QueryCoverage=89%, HitCoverage=60%, E-value=1e-175, Identity=89%"; Hit description =Putative mitochondrial RNA helicase
  Pfam annotation: Domain name=DEAD; Domain location=47-183; Score= -30.4; E_value=0.0021; Accession=PF00270.19; Description=DEADDEAH box helicase
  Pfam annotation: Domain name=Helicase_C; Domain location=236-322; Score=59.7; E_value=9.4e-15; Accession=PF00271.21; Description =Helicase conserved C-terminal domain
  Pfam module annotation: Pfam domain module=DEAD::Helicase_C; Domain location=47-183::236-322
MAVAVLLRQRALSSPHAVSCRNGSYCLERLDPWALRMIAGWHPHMWYPKAREKKRNVFLHVGPTNSGKTYSALKRLEASSSGVYCGPLRLLAREVAQRLNKVNVPCNLITGQERNEIEGAKHSSVTVEMADMTTNYQCAVIDEIQMVGCKSRGYSFTRALLGLCSDELHVCGDPAAVPLIQRILEATGDVVTVQYYERLSPLVPLKSPLGSFSNIKAGDCLVSFSRRGIYKLKKRIEREGKHLCSVVYGSLPPETRTKQATMFNDDTSDLNVLVASDAIGMGLNLNISRIIFSTMMKFDGFCNRELTVAEIKQIAGRAGRYGSKFPVGEVTCLNPQDLPLLHSSLKSASSIIERAGLFPTFDLLSLYSRLHGTDFFHPIL

SEQ ID NO: 49213 - protein, 321 aa, Zea mays
  Coding DNA Sequence Number=SeqID_7434
  Gene Ontology: Mol. function=transposase activity; Biological process= transposition, DNA-mediated
  Homolog annotation: Hit_ID=Q10CY9; Match level="QueryCoverage=96%, HitCoverage=44%, E-value=2e-98, Identity=54%"; Hit description =Expressed protein
MSPNKSGHASGRDAVFWSDRMNEYLIDSLLHQQAIGNRSESKFSSVAYDSIITGVGERFGVVIDRNNIKNRLKHIKESFNECRNLLGEDNRFRWCPESRRFNADPNVWRELIERKPEAKKWMMKTIDHYDSLMDLFGKNREKRQDVENSKGTSKKKARTEPPKEILQRTPLNRKGSALAESSDKTVDKCEIHDEIKTNVELDLSESCRTDNGIVAIPVRAYSYGKGLPYAPENWPRHGDIWHWKVGSRASGAGHWADRYIMPPSRFRGAAPKKLGFASRGFASRLQVEEFVKREFPDVDPSTFFSMFIWKIPAEGYRIQKG

SEQ ID NO: 49214 - protein, 598 aa, Zea mays
  Coding DNA Sequence Number=SeqID_7435
  Pfam annotation: Domain name=DUF1677; Domain location=5-141; Score =147.3; E_value=4.1e-41; Accession=PF07911.4; Description=Protein of unknown function (DUF1677)
  Pfam annotation: Domain name=ERG2_Sigma1R; Domain location=397-598; Score=-109.2; E_value=0.055; Accession=PF04622.3; Description=ERG2 and Sigma1 receptor like protein
  Pfam module annotation: Pfam domain module=DUF1677::ERG2_Sigma1R; Domain location=5-141::397-598
MEVEPEAVSCECCGLEEECTGDYIVGVRAYFGGRWLCGLCSEAAKYEAGKECARRGAGASAAAAPPDVEEAVRAHMAICRTLKGGGGPAGRVAEGMRQMLRTASWKKAASSSAASPRGPAAGHHRASPGAGPVTPRQGSTNWLKAHLDFWAKATSASLESASRVPHGSISAVHPVPGPDQICEAVAPAGRFKFRTPRRPGPPYNTDPNPRNPTSQPANQPTADEHEPMDETREMDPGAGVPRRAATASGTPTASRGSSTASSCSSNSNPSARASASTSTGTPPSAVVLPWAARAAAGDSCYYPGCRKDANCSCEMCLASIDATRDLVRAPEARRFFGGARDRRLFFRDRAAGAGSGSGEGSDATEPPWTPPMRSTAKSRRAPGREAAGGPEARAGVRSHDWLLYAATVIGFLLLMWVDTGLVPEAAARGFGPKLSPEAVARVGADARLAPGGLEHKLHVMERRVRQLVGGEGIANCSSRDSVWRFHQNDQQVFHWRCTVYKSVAEEVSVWGSPLRTSGLLPRALSARHLTLLSGEITEWSDGKVWPTVRASNGSSWAHRRQSAAAVRLEPETWVVEYQRSALFEGTRLLPAAAELIAS

SEQ ID NO: 49215 - protein, 247 aa, Zea mays
  Coding DNA Sequence Number=SeqID_7436
  Gene Ontology: Mol. function=nucleic acid binding
  Homolog annotation: Hit_ID=Q10D00; Match level="QueryCoverage=64%, HitCoverage=29%, E-value=3e-69, Identity=75%"; Hit description =Helicase conserved C-terminal domain containing protein, expressed
  Subcellular localization annotation: CTP_CleavageSite=42; ConfidenceScore=5.15e-01
MEIKQKQPLLLPAPSSPSRLLCSAQHQQYLRPAAPALLSVLRQQHLATVSRCGISSPLHHLTPILYETSPVGSTILSAFLWLHERFLEKAKLSPDYFITDCEDMLKVAAIVDDLPLGLYDKYLFCMSPVDFAENYARKGIVRLKEIFTPGTLQVPKTDNQLKELESVHKVLELYVWLSFRMDDSFPDREVAASQKSICSMLIEEYLERFGWQPQDRRKVLGGAQKLLQEYDVSQMNKYFQEVNPGPK

SEQ ID NO: 49216 - protein, 821 aa, Zea mays
  Coding DNA Sequence Number=SeqID_7437
  Gene Ontology: Mol. function=RNA-directed DNA polymerase activity; Cellular component=intracellular; Biological process=RNA-dependent DNA replication
  Homolog annotation: Hit_ID=UPI00004C1731; Match level="QueryCoverage =95%, HitCoverage=52%, E-value=0.0, Identity=86%"; Hit description =UPI00004C1731 related cluster
  Pfam annotation: Domain name=RnaseH; Domain location=312-439; Score =12.7; E_value=3.8e-06; Accession=PF00075.14; Description=RNase H
  Pfam annotation: Domain name=rve; Domain location=540-699; Score =103.8; E_value=5.2e-28; Accession=PF00665.16; Description=Integrase core domain
  Pfam module annotation: Pfam domain module=RnaseH::rve; Domain location=312-439::540-699
MPFGLRNAGATYQRCMNHVFGEHIGRAVKAYVDDIVVKTRKASNLLSDLEVTFRCLKAKGVKLNPEKCVFGVPRGMLLGFIVSERGIKANPEKIAAITSMGPIKDLKGVQRVMGCLAALSRFISRLNERGLPLYRLLRKAECFTWTPEAEEALGNLKALLTNAPILVPPAAGEALLIYVVVTTQVVSTAIVVERQEEGHALPVQRPVYFISEVLSETKIRYPQVQKLLYAVILTRRKLRHYFESHPVTVVSSFPLGEIILCREASGRIAKWAVEIMGETISFAPRKAIKSQVLADFMAEWVDTQLPTAPIQPELWTMFFDGSLTKTGAGAGLLFISPLGKHLRYVLRLHFPASNNVAEYEALVNGLRIAIELGVRRLDARGDSQLVIDQVMKNSHCRDPKMEAYCDEVRRLEDKFYGLELNHIARRYNETADELAKIASGRTTVPPDVFSRDLHQPSVKIDDTPEPEVPSTQSKVPSARPKAPSARPEASSVQPEVPSAPEGFYWPTAVADATRIVRTCEGCQFYAKQTHLPAQALQTIPITWPFAVWGLDLVGPLQKAPGGYTHLLIAIDKFSKWIEVRPLNNIRSEQAVAFFTNIIHRFGVPNSIITNNGTQFTGRKFLDFCEDHHIRVDWAAVAHPMTNGQVERANDMILQGLKPRIYNDLNKFGKRWMKELPSVVWSLRTTPNRATGFTPFFLVYGAEAILPTDLEYGSPRTRAYADQSNQASREDSLDQLEEARDKALLHSARYQQSLRRYHARGVRSRDLQVGDLVLRLRQDARGRHKLMPPWEGPFVIAKVLKPETYKLANSQGEVYSNTWNIQ

SEQ ID NO: 49217 - protein, 185 aa, Zea mays
  Coding DNA Sequence Number=SeqID_7438
  Gene Ontology: Mol. function=alpha-N-arabinofuranosidase activity; Biological process=L-arabinose metabolic process
  Homolog annotation: Hit_ID=Q10M79; Match level="QueryCoverage=72%, HitCoverage=22%, E-value=2e-57, Identity=71%"; Hit description=Alpha- L-arabinofuranosidase C-terminus family protein, expressed
  Pfam annotation: Domain name=Alpha-L-AF_C; Domain location=21-180; Score=-8.9; E_value=2.5e-08; Accession=PF06964.2; Description=Alpha -L-arabinofuranosidase C-terminus
MSPTRSVFSWITCRKYSCGIYEPECPYKTFGSLHFRGIRIHLINDVVEIASCAPLFINDNDQRWNPDAIVFNSWQHYGCPNYWMLHFFKDSSGATLHPSTIQLPNYDQLVVNFGRKDVSLNIYVTGLETDIQTFGSIKTVLMSGWLRDENSFQQPDKVVPAASPITNAGKQISILVDERHVVVAN

SEQ ID NO: 49218 - protein, 145 aa, Zea mays
  Coding DNA Sequence Number=SeqID_7439
MAPVLGGGSARTGELRRPMSVLGGGSARTRELRRPTPVLDGSFARTGEGGALEDRRGRERSEARDGQATTTTMLGGGLARTREGERRLRNDRRGGERSERERKREKRPGLMRTLKIRCYVEIGRLPFSGRRGRSEGGKCPLSFNR

SEQ ID NO: 49219 - protein, 316 aa, Zea mays
  Coding DNA Sequence Number=SeqID_7440
  Gene Ontology: Mol. function=oxidoreductase activity; Cellular component=cytosol; Biological process=metabolic process
  Homolog annotation: Hit_ID=Q6K1Y8; Match level="QueryCoverage=94%, HitCoverage=98%, E-value=1e-113, Identity=73%"; Hit description =Putative carbonyl reductase 3
  Pfam annotation: Domain name=Epimerase; Domain location=41-261; Score= -67.1; E_value=0.095; Accession=PF01370.11; Description=NAD dependent epimerasedehydratase family
  Pfam annotation: Domain name=KR; Domain location=39-177; Score=-68.5; E_value=0.0022; Accession=PF08659.1; Description=KR domain
  Pfam annotation: Domain name=adh_short; Domain location=39-200; Score= 37.3; E_value=1.9e-08; Accession=PF00106.15; Description=short chain dehydrogenase
  Pfam module annotation: Pfam domain module=Epimerase::KR::adh_short; Domain location=41-261::39-177::39-200
MSSSSSSMDCVISSSKDNEKEITPPPLNSGAAAWWTGDTVAVVTGANRGIGHALAAHLAEQGLCVVVTARDEARGQAAAAALRHGAGPPRGAVRFRRLDVADPASIAAFASWLRDELGGLDILVNNAAVSFNEMDTNSVEHAETVLRTNFYGAKMLTEALLPLFRRSPATSSRILNVSSQLGLLNKVKDPQLRSMLLDEAALTEGDIEGMASRFLAQVADGTWRGRGWPEVWTDYAVSKLALNAYSRLLASRLAGRGVSVNCFCPGFTRTHMTRGLGNRTADEAGRVAAGLALLPPLHLPTGKFFKWRTPQLYSKL

SEQ ID NO: 49220 - protein, 189 aa, Zea mays
  Coding DNA Sequence Number=SeqID_7441
  Homolog annotation: Hit_ID=Q8LI32; Match level="QueryCoverage=35%, HitCoverage=13%, E-value=2e-16, Identity=71%"; Hit description =Putative oxidoreductase, FAD-binding
AATGEHRVQLDFSSSIVEQFLLRPFLAGIFFDPVLDKSSRLFELVFKRLSLGDNVLSEDDIDAIVAQLACPRVLGWGFEEWRHERRRRRPRCSPPWAPSPNKVLVGLTRLHAATTPDDVILSPPETATRMWMMGVPRMRGGWARGGGYTRGGMGRHRGDDAGSAHATADLLWRRWGGGVGDPRGGGSRG

SEQ ID NO: 49221 - protein, 514 aa, Zea mays
  Coding DNA Sequence Number=SeqID_7442
  Homolog annotation: Hit_ID=Q6UB39; Match level="QueryCoverage=94%, HitCoverage=51%, E-value=0.0, Identity=70%"; Hit description=SCC3
MVRKDPTEILHQGNYFSVALSARLILKIMLKINFKNLEDELVLKVRTAIKEVEAGDDEYSLLVNLKRLYELQLSKPVKNDSLFEDMYRILAHLRDMDNEVKSFLLLNMYLQVAWCLHAIDGENPSETCIDELLSKQSSLFDQLYYYLVVLPTYQKEGRSTTVLSCRVCIITAEMWCLFKKSKYSSTRLESLGYFPQPDMVQKFWKLCEQQLNISDETEDEDANEEHIEDTNRDAVMIAAAKLVLADTVSKDYLGPEIVSHYVSHGASTTEIIKHLITSLKKNANFDMGTLFFEALKRAYERYMAHVHDGENQILTGKSYSECQDLASRLAGSYVGAARIKNKSDILKIIRDDVEKRIQHINTTGDQSVWRPFFMFVEHLRDKHAKNEVLHEEEEKPVRKRGRPRKVREVPDVPDLRGARHVRGKKLFRDDGHNSSGEESIGASDHQDHGEDDDSNGDADQPLINTIRSSAAKLRSLKISQQGPSSQKGVPGPSGENNERRMFSFWVLPHPNRSM

SEQ ID NO: 49222 - protein, 226 aa, Zea mays
  Coding DNA Sequence Number=SeqID_7443
MAVDDGVPGKGDVGRAIVAQWARPFIVVLPWASTGKAGEGEGEADERREEEGAMVSHPWWSSTEDTSMVLWDAVGVRASDTKFWIEAVLRGTADARAATTSSPTACRWVAVVRVQLGYVGVRVGGAGECDMRGFSKGGRGGWQAMRVVRAPLGMRAGGAGQVDYAGLREMIGGTCWAEGGMTGGPTGHACYSYEAGARSSHRKEKKKIGRGKKREIFWMWKELEHL

SEQ ID NO: 49223 - protein, 278 aa, Zea mays
  Coding DNA Sequence Number=SeqID_7444
MKHVEMMMRGVVSNVGAPPSYSAWNLPPMAIVAAHKSLLQEERQTHFLMLVAANDSKIDIVLGMLADSQVESVEVKKKRRRLHHWSGLEPVNAHVAQNPGDSTVNTNIEDAVEGCAPGGAPAPEYPPTPEGAPTPESPSIGSLSTASMEVHVGSPMPRTDDVEMTSADLLVGLAGSAALEVSGHGTEDPMGAPRVEILMGDAHSLDYPIPLMPDPARDVASIGVLSSGKRCAQSQAELDQVTMFLDGARATNSSVHAKLDLEKEAHVVTKSTYRGVNR

SEQ ID NO: 49224 - protein, 297 aa, Zea mays
  Coding DNA Sequence Number=SeqID_7445
  Gene Ontology: Mol. function=motor activity; Cellular component =myosin complex; Biological process=signal transduction
  Homolog annotation: Hit_ID=Q5R216; Match level="QueryCoverage=63%, HitCoverage=11%, E-value=2e-71, Identity=73%"; Hit description =Myosin XI
  Subcellular localization annotation: CTP_CleavageSite=53; ConfidenceScore=5.14e-01
MNNRTLASRGYHLHGVHTGLYFSRNIRTLTTLRLRGDFNSLAPTFGFRFSLIVCGAPVAIPVDVRNEKPHTVRHPCDLSLGVNKILESGILGFEKCFKVIANISDIHPKDTEAPPDGVDDMTRLSYLHEPGVLDNLAVRYAKNIIYVSDALFLYGKHNYYTYTGNILIAINPFQRLPNLVDARTMEKYKGANLGDLDPHVFAIADVSYRQMINEGKSNSILVSGESGAGKTETTKLLMGYLAYLGGRSGTGERTVEQQVLESNPVLEAFGNAKTVRNNNSSISGNLIAALVKVMWHT

SEQ ID NO: 49225 - protein, 285 aa, Zea mays
  Coding DNA Sequence Number=SeqID_7446
  Gene Ontology: Mol. function=nucleic acid binding
  Homolog annotation: Hit_ID=P93802; Match level="QueryCoverage=70%, HitCoverage=30%, E-value=2e-37, Identity=70%"; Hit description=MURAZC
MPDPAPEPTSADAATEPVPTGVVVASQGFQVNGDGDMLEPTPANGDVLDNVQAPATRSSLGLVPLNSLHSMVDIDLVQPTPRVDWDTMIISDGWDNEGRHEVPCENEMYCQLGLLNEDEVERNRREEACRGGFISVEDNVEMTIVITLQTSLVKTIYQMRGRESSDSSRIRNEYYPMVGKLISSVVVLDDKHTCTSSGRRKTTTPTSGWVAFHALPLLMKKPHMEAKELQVTLQDTHNVTISHDVVWKGKEKALKDLFGSWEESFQLWFSWREAILAKCPGSVGD

SEQ ID NO: 49226 - protein, 131 aa, Zea mays
  Coding DNA Sequence Number=SeqID_7447
  Gene Ontology: Mol. function=identical protein binding; Biological process=negative regulation of enzyme activity
  Homolog annotation: Hit_ID=Q8H4X8; Match level="QueryCoverage=68%, HitCoverage=11%, E-value=3e-17, Identity=60%"; Hit description =Putative subtilisin-like serine protease AIR3
MTRPRPTSCRRHSSDLPEANLCERCGFDSPEANLGGRCSHGGGDGGDPWRDVDGGVVVGVGVSIRAYDRDVMDGDVEGGERDTLVEEGLGVVSERRVLAEGDRLMLMLSWMADSKPARTSAVAHFAGQQTF

SEQ ID NO: 49227 - protein, 199 aa, Zea mays
  Coding DNA Sequence Number=SeqID_7448
  Pfam annotation: Domain name=Dirigent; Domain location=15-190; Score=- 36.2; E_value=0.0039; Accession=PF03018.5; Description=Dirigent-like protein
  Subcellular localization annotation: CTP_CleavageSite=96; ConfidenceScore=5.22e-01
MLARIIFCVVVAAAVLAVVLLATVSPLPHRSGSRKGAAGQRTFTVYIHPTASTAVRQEQAQGRRQEASALVFHHRMTAGPESASRAVGAASGFLLPAGERGSAVASVFDTVHLTFDGSAGLSGSLCVEASNEKARRAARRRHGGEEEEVLRVVGGTGAFSFARGHAVLRGQWSRPGATAAALLLELSIFSAESDQLIAH

SEQ ID NO: 49228 - protein, 631 aa, Zea mays
  Coding DNA Sequence Number=SeqID_7449
  Gene Ontology: Mol. function=signal transducer activity; Cellular component=membrane; Biological process=response to light stimulus
  Homolog annotation: Hit_ID=Q7Y1F9; Match level="QueryCoverage=93%, HitCoverage=99%, E-value=0.0, Identity=58%"; Hit description =Putative NPH3 domain containing protein
  Pfam annotation: Domain name=NPH3; Domain location=220-482; Score =319.8; E_value=4.8e-93; Accession=PF03000.5; Description=NPH3 family
  Pfam annotation: Domain name=SurA_N; Domain location=466-565; Score= -102.5; E_value=0.1; Accession=PF09312.1; Description=SurA N-terminal domain
  Pfam module annotation: Pfam domain module=NPH3::SurA_N; Domain location=220-482::466-565
MSSSVRHGSSRGQAWFCTTGLPSDVVFEVHDMTFHLHKFPLMSKSLKIHRMLSEQEDQRPTRGRRQRRRQVRSSDGDDDGAAETEIEEEEAEPEQQQVRTEGEGDGQPYCIAFPDFPGGPGTFEAAAKFCYGVRVDLTPWNVAPLRCAAEYLEMTEDHAEDNLAARAEAYLDQAVLRHPGDATKALKSCEELLPLAEDLGIVSRCVEAIAARSSSASRSWFDDLAVLGLRMYKRVMAAMAARGDVRAEARESCLVSYARGTIPGLSRSMRRRLASAPVSSEVEQKELLEAVVASLPADKCSGRVVTAKFLFALLRTAHILRASDAARAALERKAATQLQQAALEDVLIPSYSGTAETLYDVDCVQRIVRYFLAEEELGGEASSSAAIEEEEAVAVARPSAVVMVQVGKLVDNYLAEVASDANLKPAKFCDLALSLPDHARIYDDGVYRAVDIYLKAHPRLTAEERDRVVGVVDCRKLTVEACTHAAQNERLPLRAVLQVLFFEQLQLRRAIAGTLLAPSAGAAPREAAAWRGATALAQDSQVLRLDMDSMASRVQDLERECSSMRRAIKKIDGRGGSGSGSRSPGGRSADGSRPAAGGWRARHGCKFSTQVCDSHARNVVASRASRMGMSP

SEQ ID NO: 49229 - protein, 69 aa, Zea mays
  Coding DNA Sequence Number=SeqID_7450
MEKGPGGGSTVSGHRQFVVFQGLGPSLLFSRGAKWTPDFVNLDDLTRKEVYLTLKIIGANMVSKLLKTH

SEQ ID NO: 49230 - protein, 205 aa, Zea mays
  Coding DNA Sequence Number=SeqID_7451
MADIVANLETALALCEGSAADGGGRGTDGFGNISSSASLCHRVETEKGNRRTVIEFIAYPGKLPDLKATTTGDAGSAGQSNQRGEPGSHLAAAVKFRWGRAWTGGEAWIGVWQARCEGRWGRVWTVRHVHCWILGVDGVRHVLPDPGRGAGTTGENDIVLPDPVGKGVDGVRRKRSRGFWIIVLERKKLKIDNFLFEIPFATAKV

SEQ ID NO: 49231 - protein, 209 aa, Zea mays
  Coding DNA Sequence Number=SeqID_7452
  Subcellular localization annotation: CTP_CleavageSite=36; ConfidenceScore=5.32e-01
MGGPAGQIRVQLGPRGGTRARLWARPRGGSRARPVVCERGPGGTAVSVPGPSARAERDSPAARENSSSFRGAGAAPGLTWRRRATQRGLGQPGASLCGHAGLATGVRPRPGPGAVSTLGVPLLGGRGLDGTGAAGMAPSGRGCPRRGHGPSSPGGVAWPQQPKRSGRETPLAQVLAGSATTVCPQDCSTHVCKNSAIADEDRQIHNKTE

SEQ ID NO: 49232 - protein, 108 aa, Zea mays
  Coding DNA Sequence Number=SeqID_7453
  Homolog annotation: Hit_ID=Q2QYH0; Match level="QueryCoverage=98%, HitCoverage=13%, E-value=1e-07, Identity=37%"; Hit description =Expressed protein
  Subcellular localization annotation: CTP_CleavageSite=25; ConfidenceScore=5.03e-01
MWNPMSSALNTKVRNHARISRHRALASSAVSLMLSVLLLHVLCLDGELGDTTTALDCTLAEAEGPCACFFDRIVVLDDSIENALGLLVVALLLVQEKGPVASFSNLRT

SEQ ID NO: 49233 - protein, 168 aa, Zea mays
  Coding DNA Sequence Number=SeqID_7454
MAKRRGSERSTTRERVGGRGASGMGGRGVVHGHDAPHISPRRLRRTPLASGPHQQAKAADGRASPTRGGGAGHCPRAHARGGRGRAAGVGHGGALQLGRGEKKGGWAAWGSKGSRAAAAKSAQAERGERCGEKWVGGDEDDDFGYDYGTGEDEVAEEDFQEFQEYDEF

SEQ ID NO: 49234 - protein, 704 aa, Zea mays
  Coding DNA Sequence Number=SeqID_7455
  Gene Ontology: Mol. function=ATPase activity, coupled to transmembrane movement of ions, phosphorylative mechanism; Cellular component=integral to membrane; Biological process=phospholipid transport
  Homolog annotation: Hit_ID=Q10M22; Match level="QueryCoverage=90%, HitCoverage=87%, E-value=0.0, Identity=75%"; Hit description =Phospholipid-transporting ATPase 1, putative, expressed
  Pfam annotation: Domain name=E1-E2_ATPase; Domain location=177-466; Score=-110.5; E_value=0.004; Accession=PF00122.10; Description=E1-E2 ATPase
  Subcellular localization annotation: CTP_CleavageSite=85; ConfidenceScore=5.78e-01
MDVPTRLPDPVASPILRHSSANSMRRTRSLRSLMADSPSVTFAANLRSGSKAESTASSLESFRFQRDGSASGTPAVFSRVSTRRSASERAGSQRDLRDEDARFVYINDADRTNAPPAGLPDNSIHTTKYSVVTFLPRNLYEQFHRVAYLYFLVLVALNMVPQLGVFTPAASVLPLAFVLGVTAVKDAYEDWRRHRSDRNENNRTASVLVGGVFVPKRWKEVQVGEVLRVVANETLPCDMVLLSTSDPTGVAYVQTINLDGESNLKTRYAKQETMPTPPEALAGVIKCEKPNRNIYGFLATVDLDGRRAVSLGPSNIVLRGCELKNTTWAIGVAVYTGRDTKVMLNSSGAPSKRSRLETRMNRETIILAVVLFVLCAIVSVLAGVWLGDHSDELGVIPFFRKRDFSVKDDPDATYKWYGMGAEVAFTFMKSVIIFQVMIPIALYISMEIVRVGQAFFMVQDRHMFDDKRQAKFQCRALNINEDLGQIKYVFSDKTGTLTENRMEFRCASVHGADFSDTAGAGADDGHSVIGEDGVALRPKTAVKTDPELVALLKEGGGGASADRARDFLLTLATCNTIVPIVVDDDDNDSAAAAARLLEYQGESPDEQALVYAAAAYGYTLVERTSGHVTVDVLGSRQRADITEETYCMRMDAYNTPGPSTPAELWPARWSAVHEGPDTAFFQARELEMATGTNPLGFAIPNLYP

SEQ ID NO: 49235 - protein, 1119 aa, Zea mays
  Coding DNA Sequence Number=SeqID_7456
  Gene Ontology: Mol. function=ATPase activity, coupled to transmembrane movement of ions, phosphorylative mechanism; Cellular component=integral to membrane; Biological process=phospholipid transport
  Homolog annotation: Hit_ID=P98204; Match level="QueryCoverage=98%, HitCoverage=94%, E-value=0.0, Identity=65%"; Hit description =Phospholipid-transporting ATPase 1
  Pfam annotation: Domain name=DUF1634; Domain location=286-355; Score=- 40.9; E_value=0.085; Accession=PF07843.2; Description=Protein of unknown function (DUF1634)
  Pfam annotation: Domain name=E1-E2_ATPase; Domain location=86-382; Score=-111.7; E_value=0.0047; Accession=PF00122.10; Description=E1 -E2 ATPase
  Pfam annotation: Domain name=Hydrolase; Domain location=407-838; Score=25.1; E_value=0.00025; Accession=PF00702.16; Description =haloacid dehalogenase-like hydrolase
  Pfam module annotation: Pfam domain module=DUF1634::E1-E2 _ATPase::Hydrolase; Domain location=286-355::86-382::407-838
MSASQKELGDEDAPRGCACRRPRATNERLDLAGNAVRTAKYSPLTFLPRNLFEQFHRLAYVYFLAIAVLNQLPQLAVFGRGASVMPLAFVLLVTAVKDAYEDWRRHRSDRAENGRLAAVLSPAAPGGAQFVPTEWKHVRVGDVVRVVSDESLPADMVLLATSEPTGVAYVQTLNLDGESNLKTRYAKQETLSTPPERLAGAVIRSERPNRNIYGFQANLELEGESRRIPLGPSNIVLRGCELKNTPWAVGVVVYAGRETKAMLNNAGAPKKRSRLETHMNRETLFLSAILVVLCSIVAALSGVWLRTHEEELELAQFFHKKDYLHRDKDNDYKNYNYYGIAAQIVFIFLMAVIVFQIMIPISLYISMELVRLGQAYFMIRDTRLYDESSNSRFQCRALNINEDLGQIKCIFSDKTGTLTQNKMEFRCASIDGIDYSDIARQRPPEKGDRIWAPKISVNTDPELVKLIRDGGDTERGTQTREFFLALACCNTIVPMIADGPDPKEKVIDYQGESPDEQALVSAAAAYGFVLVERTSGHIVIDVLGEKLRYDVLGLHEFDSDRKRMSVIIGCPDKSVKLFVKGADSSMFGVIDKTANSDVVQATEKHLHSYSSLGLRTLVIGMRELSQEEFQEWQMAYEKASTALLGRGNQLRNVAANIERNLRLLGATGIDDKLQDGVPEAIEKLREAGIKVWVLTGDKQETAISIGYSCKLLTRDMTQIVINSRSRESCRKSLEDAIAMVNKYQSFSTDPQLRVPLALIIDGNSLVYIFDTDWEEKLFEIAIACDVVLCCRVAPLQKAGIVDLIKKRTSDMTLAIGDGANDVSMIQMADVGIGISGQEGRQAVMASDFAMGQFRFLVPLLLVHGHWNYQRMAYMILYNFYRNATFVFVLFWYVLYTGFTLTTAITEWSSVLYSVIYTAVPTIVVAILDKDLSRRTLLKYPQLYGPGQRDENYNLRLFIFIMIDSVWQSLACFFIPYLAYRKSIIDGSSLGDLWTLSVVILVNIHLAMDVIRWNWITHAAIWGSIAATWICVMIIDSIPIMPGFWAIYKVMGTGLFWALLLAVTVVGMIPHFAAKAFSEYFIPSDIQIAREMEKSQDFHDVTHPEVQMSTAILSAVCKLS

SEQ ID NO: 49236 - protein, 60 aa, Zea mays
  Coding DNA Sequence Number=SeqID_7457
MCAVHRYAKGQPIFLGLLASYLGHSPEALLLLGLSWVFNVLLDRRQGICEQESEVTVVDL

SEQ ID NO: 49237 - protein, 146 aa, Zea mays
  Coding DNA Sequence Number=SeqID_7458
MAGHSYDRSRGANGAKDGAAAGGETIIPGVGRSESTEGNRWSSLMLVAASLGQNRTLDHQNASPEWKLRHAIARTVGSCRRGTKSLVSPQSSYFPRPPLRVEQFGEAYWSLGDQLAFTLVGSPPWEARRCCIGRLKMNGEVMAAGR

SEQ ID NO: 49238 - protein, 177 aa, Zea mays
  Coding DNA Sequence Number=SeqID_7459
  Homolog annotation: Hit_ID=Q9FHN0; Match level="QueryCoverage=39%, HitCoverage=8%, E-value=2e-10, Identity=50%"; Hit description =Similarity to endopeptidase
  Subcellular localization annotation: CTP_CleavageSite=42; ConfidenceScore=5.76e-01
MASLSPALLPGAGVTLLRAPPVFRVTASSSSSGSKKGKKPKSGSKGKDTKALEPPAPVVRRAPPGSASIFQQQKNEAASRAGGAGGKGPTEEELRQRQANENAFLLAWLGLGIIILVEGIALAASGFLPEEYDSFFVKYLYPSFTPTVVLFLAGTVGMFGAMMRVELANVLVMYEVA

SEQ ID NO: 49239 - protein, 328 aa, Zea mays
  Coding DNA Sequence Number=SeqID_7460
  Gene Ontology: Mol. function=tRNA (guanine-N2-)-methyltransferase activity; Cellular component=mitochondrion; Biological process=tRNA processing
  Homolog annotation: Hit_ID=Q8RU67; Match level="QueryCoverage=98%, HitCoverage=61%, E-value=1e-137, Identity=73%"; Hit description =Putative tRNA (Guanine-N2-)-Methyltransferase
  Pfam annotation: Domain name=TRM; Domain location=1-255; Score=20.7; E_value=2.1e-13; Accession=PF02005.7; Description=N2, N2 -dimethylguanosine tRNA methyltransferase
MLNQVDLDPYGSPAAFLDSAVQCVADGGILMCSATDMAVLAGGNAEVCFSKYGSYPLRGKHCHEMALRILLACIESHAIRHKRYIVPIISVHMDFYIRDKENIAVPNFRLTLPEVCSECGHQFVMGGPLWSYPIHDKVWAASILSDIHAMREAYPAYPKISAILSSVSEVMSFSSAVHNATDIDGKIGKIDHELLEAPLFVSLHNLCAILKCTTPTMVMLQCAIRNAGYQVSGSHVDPLALKTDAPMSVIWDIMRCWVKLHPVKHRPGNHPGNVILSQEPKFQAKFSRVLGASVTRKRARFMPNPEKYWGPGTKAGRNPRTFQMDNRN

SEQ ID NO: 49240 - protein, 210 aa, Zea mays
  Coding DNA Sequence Number=SeqID_7461
  Gene Ontology: Mol. function=RNA polymerase II transcription factor activity; Cellular component=transcription factor TFIID complex; Biological process=transcription initiation from RNA polymerase II promoter
  Homolog annotation: Hit_ID=Q6JAD5; Match level="QueryCoverage=69%, HitCoverage=65%, E-value=3e-40, Identity=48%"; Hit description=TATA sequence-binding protein 1
  Pfam annotation: Domain name=TBP; Domain location=121-207; Score =135.4; E_value=1.6e-37; Accession=PF00352.12; Description =Transcription factor TFIID (or TATA-binding protein, TBP)
MTSSPRCCCCLTACFIAGCSGGRLAAGSAPSDSDAMTVCIQSRVCVTSDDGFLFLSLGSFYDYDLEVTRLDADADAVTDKASGVNLDCKVDLQHVANSARNAEYNPRFARIVQKLGFPARFKDFKVQNIVGSCDLKFPIRLEGLALASGLSATYEPEIFPGLVYRMVDPKVVILVFVSGKIVLTGAKVQEEICAAFEKIHPMLVQFRKRS

SEQ ID NO: 49241 - protein, 135 aa, Zea mays
  Coding DNA Sequence Number=SeqID_7462
  Subcellular localization annotation: CTP_CleavageSite=51; ConfidenceScore=5.67e-01
MTAASAGHTATHPTARVFIPRASLAPRAIPPARRDARPTTPPTIPARRTSRARRPRQAPCPTTPPARAPPPAIPGHPALARHPRRGQHPACVARARHPASHPPPPTRRDDRRGGIPPTANRDGLHEMEGEIRGLI

SEQ ID NO: 49242 - protein, 77 aa, Zea mays
  Coding DNA Sequence Number=SeqID_7463
MGGWERDNVLAVGVPLANGDQGVEVGVPGGERKGGDGVAEGRGTVGWRRQVSQMGLTRSSKGRWEDAQVPRRRRARA

SEQ ID NO: 49243 - protein, 242 aa, Zea mays
  Coding DNA Sequence Number=SeqID_7464
  Subcellular localization annotation: CTP_CleavageSite=37; ConfidenceScore=5.31e-01
MSRLPNATKTELGTGRGRASTRTTRNPPTRRHRDTARSASRHGARAGRRCTGIQTEIYLVKGYLHVLITTVHQPSDSSHVVPHLQTAQTMALGSPRQSATGAKPTGAPDVLRFSRSAKRLRGDGRNAERPIPAAMTRQRRQWWTADLATERCSGKQHYSPCFDYCANHQGKANNSESRLLPSSASGATGISASPDPGLSLGLRRRSLPRPTSTSASGEVTASPDLGLGPTTLQGIHHYPTTS

SEQ ID NO: 49244 - protein, 1150 aa, Zea mays
  Coding DNA Sequence Number=SeqID_7465
  Gene Ontology: Mol. function=histone-lysine N-methyltransferase activity; Cellular component=nucleus; Biological process=chromatin modification
  Homolog annotation: Hit_ID=Q6K4E6; Match level="QueryCoverage=58%, HitCoverage=77%, E-value=1e-155, Identity=44%"; Hit description =Putative SET domain-containing protein SET104
  Pfam annotation: Domain name=Metallothio_2; Domain location=923-975; Score=-18.9; E_value=0.063; Accession=PF01439.8; Description =Metallothionein
  Pfam annotation: Domain name=Pre-SET; Domain location=881-978; Score =117.4; E_value=3.9e-32; Accession=PF05033.6; Description=Pre-SET motif
  Pfam annotation: Domain name=SET; Domain location=980-1136; Score =157.3; E_value=3.9e-44; Accession=PF00856.18; Description=SET domain
  Pfam annotation: Domain name=YDG_SRA; Domain location=695-857; Score =166.6; E_value=6.3e-47; Accession=PF02182.8; Description=YDGSRA domain
  Pfam module annotation: Pfam domain module=Metallothio_2::Pre -SET::SET::YDG_SRA; Domain location=923-975::881-978::980-1136::695 -857
  Subcellular localization annotation: CTP_CleavageSite=97; ConfidenceScore=5.85e-01
MPLLNPTGSSGGTSRVPSSAARFSSSTSSTPPLVESSEVMPHSARPPGTGANFNRARDQRGTRRVFLRRPPPPLRRPPHVTANGHRGEGGSGGGGARRSAGEEAGGRYTRRGGVADREVAVSASADPVGRNAATVATGGEAPPPREEDGGGRGGVLVSKRPSAAPVLPPPKRRAVSVTRQFPPASRWTSAAPAPLAGADADGGLRTRYEGQRENRASDAFKKPAVARPLAGLKDGVGVGVMSRAVSPKAAGTRVLKKPCARDGAAPMSNTDRHDAGLVKSSAAHDRGRGARIDELRGKKGPVTGARFPPKPEIISTTRTLLPGHGKDGGCHSKVHRPLESGRAHGSSLADGRAVEIVAACTGTSAGAVQDGKLENGEVPSKKAWGSQVSSDAVLLDPASYRDVSARDFPGLSGNFGRKTLSWALVKDRKVMNKYGRTSYRYNTVAASFSKNSSKKPVMGKIVSDSGRINRMISSDVAAEVSGEGTVLGSKDMFTNQSTVKPDNVVQKFVTDAQHIPFSKGKKETVRERWVTTNGIQDSVELTKDRVMQAPMSADMCPMPMTHKKKAATTRDFFGHKRMVKAKALGHQQRMFASGSKSKRDDEVASNLKIHDIFREIVLNERNLELYLNSSSGLPSVRCQRQYRYMNADARSRFKMLCRMFEFVCRTLVQTMEQRSLKMRIDNEAAKVMKALPGFTKHGPIVGQVPGVEVGDEFLYRAQLAIAGLHSEYRRGISTTTYRNGMLIAISIVASGGYPDELGCSGELIYTGSGGKSAVKKKDEDQKLKCGNLALKNCIKTKTPVRVIHGFKCRNTDRGSHSGAKLIPKYTYDGLYLVVDFWMDGKPGSRVFKYKLKKIHGQPELPMHIAKRLKSFKSRPGLCMTDISQGKEATPICVINTVDDVQPGPFQYTTRIRYPFGLTEKHNQGCDCTNGCSDSESCACAVKNGGEIPFDLSGAILNEKSVIFECGSSCKCPPSCRNRVSQHDMKIPLEVFRTTKTGWGVRSLWSIPAGSFICEYIGEVQHQKAADKRRNNNYLFDVGLNYDDENVSSVLLSNVSGLNSSSSCSQAMEDVRFTIDASVYGNIGRFINHSCSPNLQAQNVLRDHGDKRMPHIMFFAAETIPPLQELTYDYNNSEIDRVQAVAVQTTDFKPK

SEQ ID NO: 49245 - protein, 1068 aa, Zea mays
  Coding DNA Sequence Number=SeqID_7466
  Gene Ontology: Mol. function=RNA-directed DNA polymerase activity; Cellular component=intracellular; Biological process=RNA-dependent DNA replication
  Homolog annotation: Hit_ID=UPI00005A975E; Match level="QueryCoverage =95%, HitCoverage=59%, E-value=0.0, Identity=89%"; Hit description =PREDICTED: similar to Retrovirus-related Pol polyprotein from transposon 297
  Pfam annotation: Domain name=RVT_1; Domain location=56-225; Score =144.7; E_value=2.5e-40; Accession=PF00078.17; Description=Reverse transcriptase (RNA-dependent
  Pfam annotation: Domain name=RnaseH; Domain location=455-582; Score =8.9; E_value=8.6e-06; Accession=PF00075.14; Description=RNase H
  Pfam annotation: Domain name=rve; Domain location=780-939; Score =124.8; E_value=2.4e-34; Accession=PF00665.16; Description=Integrase core domain
  Pfam module annotation: Pfam domain module=RVT_1::RnaseH::rve; Domain location=56-225::455-582::780-939
MPGIPRDVAEHSLDIRAGARPVRQPLRRFDEEKRRVIGEEIHKLMAAGFIKEVFHPEWLANPVLVRKKGGKWRMCVDYTGLNKACPKVPYPLPRIDQIVDSTAGCETLSFLDAYSGYHQIRMKESDQLATSFITPFGMYCYVTMSFGLRNAGATYQRCMNHVFGEHIGRTVEAYVDDIVVKTRKASDLLSDLEVTFRCLKAKGVKLNPEKCVFGVPRGMLLGFIVSERGIEANPEKIAAITSMGPIKDLKGVQRVMGCLAALSRFISRLGERGLPLYRLLRKTECFAWTPEAEEALGNLKALLTKAPILVPPVDGEALLVYVAATTQVVSAAIVVERQEEGHALPVQRLVYFVSEVLSETKIRYPQVQKLLYAVILTRRKLRHYFESHPVTVVSSFPLGEIIQCREASGRIAKWAVEIMGETISFAPRKAIKSQVLADFVAEWVDTQLPTAPIQPELWTMFFDGSLMKTGAGAGLLFILPLGKHLRYVLRLHFPESNNVAEYEALVNGLRIAIELGVRRLDARGDSQLVIDQVMKNSHCRDPKMEAYCDEVRRLEDKFYGLELNHIARRYNETADELAKIASGRTTVPPDVLSRDMHQPSVKINDTPEPEVPSVQPEVPSAQPEASSVQPEVPSTPEGEALHVEEEQSGATPDRNWQTPYLQYLRQGELPLDQAEARRVARRAKSFVLLGDEEELYHRSPSGILQRCISIAEGQELLQEIHSGACGHHAAPRALVGNAFRQGFYWPTAVADATRIVRTCEGCQFYAKQTHLPAQALQTIPITWPFAVWGLDLVGPLQKAPGGYTHLLVAIDKFSKWIEVRPLNSIRSEQAVAFFTNIIHRFGVPNSIITDNGTQFTGRKFLDFCEDHHIRVDWAAVAHPMSNGQVERANGMILQGLKPRIYNDLNKFGKRWMKELPSVIWSLRTTPSRATGFTPFFLVYGAEAILPTDLEYGSPRTRAYNDQSNQASREESLDQLEEARDRALLHSARYQQSLRRYHAREVRPRDLQMGDLVLRLRQDARGRHKLMPPWEGPFVIAKVLKPGTYKLANNQGEIYGNAWNIKQLRRFYP

SEQ ID NO: 49246 - protein, 275 aa, Zea mays
  Coding DNA Sequence Number=SeqID_7467
  Gene Ontology: Mol. function=exonuclease activity; Cellular component= intracellular; Biological process=regulation of transcription, DNA -dependent
  Homolog annotation: Hit_ID=Q7F186; Match level="QueryCoverage=87%, HitCoverage=90%, E-value=2e-85, Identity=67%"; Hit description =Exonuclease-like protein
  Pfam annotation: Domain name=Exonuc_X-T; Domain location=95-231; Score=73.5; E_value=6.5e-19; Accession=PF00929.14; Description =Exonuclease
  Subcellular localization annotation: CTP_CleavageSite=53; ConfidenceScore=5.67e-01
MPGPTPSSTPPAAAANPSHNSRRKRKPRPKTAPPSALNPNWALLQSKLPHRPAATHLGKRKHDGATPAPAEPSPPPTAQEVRLEPTSDDTSLTKVVAIDCEMVGVGFDGGKSALGRVTLVNSFGNIVYDEYVRAVERIVDYRTWISGIRPKHMNKAKEFWAVQKEVAELIKGRILVGHALHNDLKVLLLSHPKKDIRDTSEYEVFRRLDGLGICCDMIILIEDARAAMLIYNKHKKAWEKNMKEQFRFKKKLKKRGKKKTTESNGNDPNVPTVLL

SEQ ID NO: 49247 - protein, 124 aa, Zea mays
  Coding DNA Sequence Number=SeqID_7468
MAGPTAPTTGSGSHRRAREGSARTESRRTGHHGRLRHPAEERGKRHTVHDSKNLRHGEKEGRIRNSDRSNSQVAHRTVRCPQKQKAANQGFSARALFNVRCTRRQKATRSFQMVLQQLLGPLGI

SEQ ID NO: 49248 - protein, 125 aa, Zea mays
  Coding DNA Sequence Number=SeqID_7469
MGTMFGVVSSTALDVSDAFERSFVCFGVLNDNPIKADRTEDEGKKNFEEPRERKKVKKIEVPKAKGEEDGLGRSQGYWSSNMANIIKLCRREDYESNPELKQTKKSKMVKTIKYTRKVLQKVQVK

SEQ ID NO: 49249 - protein, 381 aa, Zea mays
  Coding DNA Sequence Number=SeqID_7470
  Gene Ontology: Mol. function=protein serine/threonine kinase activity; Biological process=protein amino acid phosphorylation
  Homolog annotation: Hit_ID=Q8GVV7; Match level="QueryCoverage=84%, HitCoverage=83%, E-value=2e-84, Identity=54%"; Hit description =Serine/threonine protein kinase-like protein
  Pfam annotation: Domain name=Pkinase; Domain location=74-329; Score= -72.2; E_value=0.00029; Accession=PF00069.15; Description=Protein kinase domain
  Pfam annotation: Domain name=Pkinase_Tyr; Domain location=74-329; Score=-111.8; E_value=1.3e-05; Accession=PF07714.7; Description =Protein tyrosine kinase
  Pfam module annotation: Pfam domain module=Pkinase::Pkinase_Tyr; Domain location=74-329::74-329
  Subcellular localization annotation: CTP_CleavageSite=37; ConfidenceScore=5.31e-01
MHDAVVAAVHHTVVAGAAAALVALAVALALLWRKRRMAAARSPANGAAASGSSSSTKPLPVIPLADVERTTEGFHPSRVIGQGRHFAVYAAAPGIAAKRMHPHLVLGDPGGMRFPAAVRSLAVPPHPNVAAVIGLSEGPGERVILVERAPAGAVSLDRILGWGDDAHHVPALSWRQRAAIAAGAARGLAHLHAHGVAHGRVRPCNVLVNASSGGAARWRHATTRLTDYGLTGFLDRRDDARADDDVYMFGAVLLELLTGRRWDGGRLADWALPHIRGGASIEVFDVVRAGAPADKEEVRLLARAARVALACVGNDGRSRPGMAEVSAILSDVEAAYRRRDGALVGKEEEHDDDGDESRLSGCLLCPGRSIHKADMLLRPPL

SEQ ID NO: 49250 - protein, 169 aa, Zea mays
  Coding DNA Sequence Number=SeqID_7471
  Subcellular localization annotation: CTP_CleavageSite=66; ConfidenceScore=5.36e-01
MTARAAYTPLTARRRSRPPPARPRAAPCPPLGAKVPRPPDQPPDPAPPRRRPPARPTRRRSAARPSARRRGSPPPPSPAAIPPAPCPTPAPAALGLAPCPSPAPPRLAPSARPLGPSPRRRPGSPSARPLGPGRFNRPPGRFNRPGPSSPARFPVPASPDRIFARPRSR

SEQ ID NO: 49251 - protein, 70 aa, Zea mays
  Coding DNA Sequence Number=SeqID_7472
MMLALKGRVRNQTCDGAGVYGECGPPVEPEIRRGYFVTNKSVRAGTGTGRLSPDDHPQSQCSRAGRAVEE

SEQ ID NO: 49252 - protein, 122 aa, Zea mays
  Coding DNA Sequence Number=SeqID_7473
  Gene Ontology: Mol. function=heat shock protein binding; Biological process=protein folding
  Homolog annotation: Hit_ID=Q5VRK6; Match level="QueryCoverage=84%, HitCoverage=30%, E-value=5e-19, Identity=52%"; Hit description =Putative GFA2
  Subcellular localization annotation: CTP_CleavageSite=90; ConfidenceScore=5.16e-01
MRMQNRSFKRFSELMRLHLNYHLWKQFKDAAKRSTSKRLSRAKPAMFMQTGPFRMQSTCTKCGGSGKTVKPVAACFSLLKAQRSTAAALLAAKDDGASRCTTSGGTGDLLITAPFSEDQPNG

SEQ ID NO: 49253 - protein, 244 aa, Zea mays
  Coding DNA Sequence Number=SeqID_7474
  Subcellular localization annotation: CTP_CleavageSite=34; ConfidenceScore=5.02e-01
MWSPVLAPPSHLLPLSLLTAVLPAATLWPFLDIVCSGHRHLRLARRAPRSRTQTRAGFTIDFWRRQRDWELEHGEFGQLLGRRLQVEARSEWSGRRGFVSPFSHTLMQGIVATGTKFGHGVDGIKEWILPKLPLGTAYYPKFGATNPLDNKDKSGAKSSFSPSSMTKKEAMLTELLWLFIPEYADGIQNNTHSTLNTGTAIQSIAISYGSLIRRWLLNRTSVGQGMKCQNDSAKNYIFTFYVAD

SEQ ID NO: 49254 - protein, 190 aa, Zea mays
  Coding DNA Sequence Number=SeqID_7475
MPDRIPQAAPGDTEPTPTKLLLPLINGRPHPIGDPGSHALLATQIPPLQSPLEFADRRAHKHIICKLGRNDGQRLLLTDNWTRGSLGPHGEPVRFLQLRAAAPCYPLRREEGRMRAGSGRAKPSREEKEYTKARPSVRSSSVRCPPGPSGGLGSGDWGVEQDNKKGTALLQRQGKGYNRETGSELRTKNK

SEQ ID NO: 49255 - protein, 120 aa, Zea mays
  Coding DNA Sequence Number=SeqID_7476
  Gene Ontology: Mol. function=small conjugating protein ligase activity; Cellular component=ubiquitin conjugating enzyme complex; Biological process=protein modification process
  Homolog annotation: Hit_ID=Q10E03; Match level="QueryCoverage=89%, HitCoverage=93%, E-value=1e-43, Identity=60%"; Hit description =Ubiquitin-conjugating enzyme family protein, expressed
  Pfam annotation: Domain name=UQ_con; Domain location=18-118; Score= -46.2; E_value=0.077; Accession=PF00179.16; Description=Ubiquitin -conjugating enzyme
MEIILCSMAFSAVPRNFRLLEELERGEKGIGDGTVSYGMDDADDIFMRSWTGTIIGPPNVEPSLFPMLGKWEREHTMEDILTSLKREMSTPQNRRLYQPHEGNEDQRVEQKGVSLRCVIM

SEQ ID NO: 49256 - protein, 179 aa, Zea mays
  Coding DNA Sequence Number=SeqID_7477
  Gene Ontology: Mol. function=protein binding; Biological process =hypersensitive response
  Homolog annotation: Hit_ID=Q75HA6; Match level="QueryCoverage=90%, HitCoverage=26%, E-value=1e-59, Identity=73%"; Hit description =Expressed protein
MRLINLENRVAFARIFFPSEAKIVMRIAQADSTEEFVGITNFSKLKEVDLNETPTMQNTRLRERLDALTKTVELGRRYFPHCSDVLDKFLNEESTDLIFLETGSPEDQRLKRMRFSELKEDVRKAFTKDKAAVAAIASSASSSSSPRNSLENWSYQTSPKRGNLSAVTTDMNQITRPIT

SEQ ID NO: 49257 - protein, 229 aa, Zea mays
  Coding DNA Sequence Number=SeqID_7478
  Gene Ontology: Mol. function=nucleotide binding; Cellular component =membrane; Biological process=small GTPase mediated signal transduction
  Homolog annotation: Hit_ID=Q94IR3; Match level="QueryCoverage=88%, HitCoverage=96%, E-value=7e-93, Identity=86%"; Hit description=Small GTP-binding protein
  Pfam annotation: Domain name=Arf; Domain location=1-180; Score=-66.9; E_value=0.00013; Accession=PF00025.11; Description=ADP-ribosylation factor family
  Pfam annotation: Domain name=GTP_EFTU; Domain location=7-190; Score= -46.0; E_value=0.00066; Accession=PF00009.17; Description=Elongation factor Tu GTP binding domain
  Pfam annotation: Domain name=MMR_HSR1; Domain location=12-127; Score=- 8.5; E_value=0.006; Accession=PF01926.13; Description=GTPase of unknown function
  Pfam annotation: Domain name=Miro; Domain location=13-127; Score =81.4; E_value=2.8e-21; Accession=PF08477.3; Description=Miro-like protein
  Pfam annotation: Domain name=Ras; Domain location=13-182; Score =298.6; E_value=1.2e-86; Accession=PF00071.12; Description=Ras family
  Pfam module annotation: Pfam domain module=Arf::GTP_EFTU::MMR _HSR1::Miro::Ras; Domain location=1-180::7-190::12-127::13-127::13-182
MAANAGNKIRNAKLVLLGDVGAGKSSLVLRFVKGQFVEFQESTIGAAFFSQTLAVNDETVKFEIWDTAGQERYHSLAPMYYRGAAAAIVVYDITNPASFTRAKKWVQELQAQGNQNTIVALAGNKADMLDARQVPAEFGHTVNPFEAKAYAQENGLFFMETSAKTAINVNDIFYEIAKKLLQGQQAPSPQAGMVLNQRPNERTIYTWHRWGKQNSVLDLRYPDIHNFTD

SEQ ID NO: 49258 - protein, 59 aa, Zea mays
  Coding DNA Sequence Number=SeqID_7479
MAEPVPGTGAGAGGGHLGEAALAHGKAAVASRAAVMAGAKGGRGRLRHRRHLNCKSHEK

SEQ ID NO: 49259 - protein, 334 aa, Zea mays
  Coding DNA Sequence Number=SeqID_7480
  Gene Ontology: Mol. function=protein serine/threonine kinase activity; Cellular component=intracellular; Biological process =protein amino acid phosphorylation
  Homolog annotation: Hit_ID=Q2L391; Match level="QueryCoverage=88%, HitCoverage=66%, E-value=8e-64, Identity=48%"; Hit description =Cyclin dependent protein kinase
  Pfam annotation: Domain name=Pkinase; Domain location=37-292; Score =157.0; E_value=5e-44; Accession=PF00069.15; Description=Protein kinase domain
  Pfam annotation: Domain name=Pkinase_Tyr; Domain location=35-292; Score=-11.1; E_value=8.7e-12; Accession=PF07714.7; Description =Protein tyrosine kinase
  Pfam module annotation: Pfam domain module=Pkinase::Pkinase_Tyr; Domain location=37-292::35-292
MAASVKTAAAVCDPTAAVKPGLKRKRIAVGSMDQYEFEDTCCLGVGGFGAVFKARHRATGQTVAMKRYSPADHTAFREARFLEEANCGGANPFVVGYHGVVRDPVTGEMILVMECMAASLHDLLCQRPRGSPPLPEATVRAAMWQLLSGTKKMHDAHIIHRDIKPQNVLIGESHSVVKICDFGLAMSIDERLPYAPAGTLWYQAPEMLLGKPDYDEKVDSWSLGCVMAELINKGRPLFQGFHDDGQLCAIFDLLGVPDDSTWPWFSSTPFAREVMPELDMQLQRCNRLRNRFPETKLSTEGMRIRGAQWPAHMQSREEADGSRRAQAPMVRQGR

SEQ ID NO: 49260 - protein, 234 aa, Zea mays
  Coding DNA Sequence Number=SeqID_7481
  Homolog annotation: Hit_ID=Q8LD08; Match level="QueryCoverage=23%, HitCoverage=15%, E-value=8e-08, Identity=50%"; Hit description =Protein phosphatase-like
MASTDDSWNNPRVADVGNDHEVPLLDDGQRGTAALDRVQAAAALELVIHSGSCDHVGLLPEVELAVVKLLLVVDERRQPRRGLYVGMRMGMGFAGSGNEKGRTKNGLCGEEGMGKIEQEMKNSRTQNGTKELGYAIFRGEIFQQSLLVLSLGFAATSNGIVVCNVGSKSKDHEAHSELWSKDSEAKAASRSCTTERTVPEELSLSLFLSKGFTSNGNKDEGDLQRTEDNLSNVR

SEQ ID NO: 49261 - protein, 472 aa, Zea mays
  Coding DNA Sequence Number=SeqID_7482
  Gene Ontology: Mol. function=serine-type peptidase activity; Cellular component=integral to membrane; Biological process=proteolysis
  Homolog annotation: Hit_ID=Q67UZ3; Match level="QueryCoverage=97%, HitCoverage=97%, E-value=6e-77, Identity=60%"; Hit description =Chloroplast thylakoidal processing peptidase-like protein
  Pfam annotation: Domain name=Peptidase_S24; Domain location=319-392; Score=30.2; E_value=7.3e-06; Accession=PF00717.13; Description =Peptidase family S24
MAIRITVSYSGYLAQNLAASFGLRCTAAAAAGAGAAPGPGCRFLQDALSRPFCLFASSRHVDPHHDAEDQNHPKPGPKALSPAVAARGDGYSLLLPRSCSAKAPPPVDDPPASLAVGLLSVFASGMGSTGGIAGASSLVASPSISTGLNPASLLPFLQASKWLPCSDIVAAATTSRSSGRPAGATAAPTPRTAAPSPRPAPRAAAPSPRPAPCAAVPSPRHVPVPSPAVAAPSKVGIQALVDSASIASGSAGIGRGVIASGAAGMVKKSGASLPVGAGVGRKTGWLSRWVSSCSDDAKTVFAAVTVPLLYKSSLAEPRSIPSRSMFPTFDVGDRILAEKISYIFREPEILDIVIFRAPPVLQFIRAYYNKNNLCRHWATAQVRDGNLIVNGVVQEEEFVLEPADYEMDPLTVPEGYVFVLGDNRNNSFDSHNWGPLPVKNILGRSVLRYWPPSRITDTIYQHDMVQHTAVAS

SEQ ID NO: 49262 - protein, 481 aa, Zea mays
  Coding DNA Sequence Number=SeqID_7483
  Subcellular localization annotation: CTP_CleavageSite=35; ConfidenceScore=5.47e-01
MASSSLALPPISLLLALLLLSAPSPSACASLSFLTASSNGSASTSADPELEDLAPEPTFLEEVIDAVSEKYDWDPDAEVRVWPLDAGAVRVGSVQRYEFRARAGGSAALARFSDEAVEWRLPSAPAVEEVDGPDGVDVVPAEGAFGFDTGVRDVELVGPVELKLAGNQDGSLVELQLPSSLPLPVKNFTVLLMHKAIQGQRTHWRVVFNSLLLSKWFVDLQCFCERGQGNATYTRLKRIFVADGIALKVIGAQKVSVTHPHSIGLLSNGSLLASNNDLSQIWPLSYSTCAPLLQVGIVGSVVIVVHQTSVSGGHVKTFLRSHDTIELLSDKYKVHISNRLISEFLFSSISPRLIKLEKILKTWFSKRNQENSSVHFIEAKVTSIPLVKFRLEFERDVTEDDPIWEDVPEWKTRPMVQRVPVDIIARVEDDDRLKAISVKKVRRQFPVVDTTTWGSLTSNISFTKFLSFILPPEPLSLDVKW

SEQ ID NO: 49263 - protein, 115 aa, Zea mays
  Coding DNA Sequence Number=SeqID_7484
  Gene Ontology: Mol. function=ATPase activity, coupled to transmembrane movement of ions, phosphorylative mechanism; Cellular component=integral to membrane; Biological process=metabolic process
  Homolog annotation: Hit_ID=Q0KKZ5; Match level="QueryCoverage=43%, HitCoverage=5%, E-value=2e-13, Identity=82%"; Hit description=P-type H+-ATPase
MDGMLADPKEAMTGIREIHFLPFNPIDNRTALTYIDADGNYTVSARVLLNSKINRSNPIVEMKPPKIMRNQSFDLCSPIATSDGATPVASMGARKDGQLGNLLKAPKLLDTSTKS

SEQ ID NO: 49264 - protein, 115 aa, Zea mays
  Coding DNA Sequence Number=SeqID_7485
  Gene Ontology: Mol. function=ATPase activity, coupled to transmembrane movement of ions, phosphorylative mechanism; Cellular component=integral to membrane; Biological process=metabolic process
  Homolog annotation: Hit_ID=Q0KKZ5; Match level="QueryCoverage=43%, HitCoverage=5%, E-value=2e-13, Identity=82%"; Hit description=P-type H+-ATPase
MDGMLADPKEAMTGIREIHFLPFNPIDNRTALTYIDADGNYTVSARVLLNSKINRSNPIAEMKPPKIMRNQSFDLCSPIATSDGATPVASMGARKDGQLGNLLKALKLLDTSTKS

SEQ ID NO: 49265 - protein, 73 aa, Zea mays
  Coding DNA Sequence Number=SeqID_7486
MGDHVSGRVRRAICGQDHSGRPPTASCGWHHITGLIIISRSYMRCKMHMYEYNESSTKIAQDIPRHSGELNIN

SEQ ID NO: 49266 - protein, 45 aa, Zea mays
  Coding DNA Sequence Number=SeqID_7487
MATTVVVEAYRASRNCVATGTGAPEPGSVEPDDTVGLGLPLVIGS

SEQ ID NO: 49267 - protein, 34 aa, Zea mays
  Coding DNA Sequence Number=SeqID_7488
MGQIEVWPIMAFHDNIFSIYLLESKWPITTLIVQ

SEQ ID NO: 49268 - protein, 309 aa, Zea mays
  Coding DNA Sequence Number=SeqID_7489
  Gene Ontology: Mol. function=zinc ion binding
  Homolog annotation: Hit_ID=Q9ZU41; Match level="QueryCoverage=94%, HitCoverage=82%, E-value=7e-40, Identity=36%"; Hit description =Predicted by genscan and genefinder
  Pfam annotation: Domain name=DUF789; Domain location=13-304; Score =517.1; E_value=1.9e-152; Accession=PF05623.3; Description=Protein of unknown function (DUF789)
MGGQWLGEGMPPSNLQCFLDCTTPTVDTHILPKTNGRLPADAWHHAEMDSVEYFNLSDLWEQYYEWSAYGAGATVQLPGGERVVQYYVPYLSGMQLFTNKVLTASRSFGEDNGMDFWSDDEDNEKMSRSWSSTSDESLFNCDVVWPNRKRPGHLSFEFFEVGSPYGRVPFIDKVYELSQGFPGLTLLKSADLSPVSWMSVACVKDLSACFLTYHTISSSFQDYGLETMTNDCCHPVADGKQNGHMDKKSNTVSLPPFGLAAHKVHGSLWTNPMTGDHRKMDFLFSAADSWLKQLGVQHHDFNFFITHPM

SEQ ID NO: 49269 - protein, 258 aa, Zea mays
  Coding DNA Sequence Number=SeqID_7490
  Gene Ontology: Mol. function=hydrolase activity
  Pfam annotation: Domain name=Metallophos; Domain location=76-231; Score=17.5; E_value=0.015; Accession=PF00149.18; Description =Calcineurin-like phosphoesterase
  Subcellular localization annotation: CTP_CleavageSite=48; ConfidenceScore=5.76e-01
MTPHLPAVSSSSTTTTSRAAAAAAAPPSSPHQYRRRRRRRVPGCLRPRAASVRCCAAAAPAPQAAVPAAARAEATTRVFVVSDLHTDYPENMEWVRRLPAEVGAGKGEGVDALVVAGDVAETRDNFARTMEMLRDGFAAVFYVPGNHDLWLRREGGRYSFDKEKDVSSVRVPSLEMACKDFHACQWPSDLTNDDEALALYFDKLNDKNHDATEEVKSSSKQILTFSHFVPRGPRPTFLPIDTPLQSLTDLVTITSGID

SEQ ID NO: 49270 - protein, 89 aa, Zea mays
  Coding DNA Sequence Number=SeqID_7491
MATMEGTEIWGREGIAIEAKDAGAKFPRVTMEGAMGTAMREGRGCPARAGDDGRRRGRRDLFGEGAAATGGCAGAGKGGSNTVTYQSAG

SEQ ID NO: 49271 - protein, 183 aa, Zea mays
  Coding DNA Sequence Number=SeqID_7492
  Gene Ontology: Mol. function=transferase activity; Cellular component= Rab-protein geranylgeranyltransferase complex; Biological process =protein modification process
  Homolog annotation: Hit_ID=Q6Z8L7; Match level="QueryCoverage=91%, HitCoverage=59%, E-value=6e-76, Identity=86%"; Hit description =Putative Rab geranylgeranyltransferase, beta subunit
  Pfam annotation: Domain name=Prenyltrans; Domain location=55-99; Score=49.8; E_value=9.3e-12; Accession=PF00432.11; Description =Prenyltransferase and squalene oxidase re
MADEVELAADQHVRYIVTVEKKKDSFESLVMEHIRLNGAYWGLTTLDLLHKLHAVDAAEVVDWIMSCYHPESGGFGGNVGHDPHVLYTLSAVQVLCLFDRLDVLDVDKVADCSRILPYVPYHYCTVCIRLMCKKLWISLLAVRTWMADLELCQEGSLMLDKRYAEMALSDVDATSQNHDSTEK

SEQ ID NO: 49272 - protein, 57 aa, Zea mays
  Coding DNA Sequence Number=SeqID_7493
MQVQNNLCTPKNGPKTGTENEMHILVALASLLAMASNNPVRPNLPLLSTRARTWPRQ

SEQ ID NO: 49273 - protein, 362 aa, Zea mays
  Coding DNA Sequence Number=SeqID_7494
  Gene Ontology: Mol. function=DNA binding
  Homolog annotation: Hit_ID=O23142; Match level="QueryCoverage=50%, HitCoverage=52%, E-value=7e-48, Identity=60%"; Hit description=AT -hook protein 1
  Pfam annotation: Domain name=AT_hook; Domain location=154-166; Score =10.0; E_value=0.44; Accession=PF02178.9; Description=AT hook motif
  Pfam annotation: Domain name=AT_hook; Domain location=96-108; Score =16.7; E_value=0.03; Accession=PF02178.9; Description=AT hook motif
  Pfam annotation: Domain name=DUF296; Domain location=179-299; Score =216.6; E_value=5.7e-62; Accession=PF03479.5; Description=Domain of unknown function (DUF296)
  Pfam module annotation: Pfam domain module=AT_hook::AT_hook::DUF296; Domain location=154-166::96-108::179-299
  Subcellular localization annotation: CTP_CleavageSite=54; ConfidenceScore=5.24e-01
MEVRSEQGLMAGRDLFGMPKSPPAPVSGPPASAAMQSVRMAYTSDGTAVFAPMRSSAATPSYQPQGAAHGASMSAATIIGGNGAAAAPSMGEPVPKKKRGRPRKYGPDGSMALALVPVSAATGSPTTGQGSSGPFSPAGSNLTNSLLVASPDGFKKRGRPKGSTNKPRMDAAGSSGAGFTPHVITVQAGEDVSSKIMSFSQHGPRAVCVLSANGAISNVTLRQTATSGGTVTYEGRFEILSLSGSFLLVEDGGQRSRTGGLSVSLAGPDGRVLGGGVAGLLVAASPVQIVLGSFNSGGKKEAKKHAPSGPTPAPLKVAPPTTTRMGPNSSSPPSRGEKVVEPKVLHKNTLKAFGILDGMPNH

SEQ ID NO: 49274 - protein, 67 aa, Zea mays
  Coding DNA Sequence Number=SeqID_7495
MAMVDECLLERYQSKLQGLLVGFGLRGRAASCRVVCNRRTLGLSMEKVPDTQDPRVPAAYRFGSVGF

SEQ ID NO: 49275 - protein, 227 aa, Zea mays
  Coding DNA Sequence Number=SeqID_7496
MAEPAGKARERRVSIEEVAKKLSLWHTATFRPILTHAELEPILCAAGFVALPSAPATHQKQDERPGVAWREYAFLGGGNASPAAAAPRRWLGPRPRLPYPRVDGLHLKTYQAFLGAVEAYLGAHRVSNLFHVRLMPVTSPHDRAFDKVFRPMRNCSPEEDGLIVYREGTLDDLTVETCSRHAATGDDGAAGHVIPGISCSDLGCLRKVDGNCLEEGCKSRRGTARGP

SEQ ID NO: 49276 - protein, 120 aa, Zea mays
  Coding DNA Sequence Number=SeqID_7497
MELEEEESYAVGGRREKLGVQFIEKREGEEGSTGVMPLMAFKELEWRERNRRVESPLHAMKNGRGASGARRAVSGCSAGAAWAQVAASARLCRSAAGRSWCYSLQDPIFTTEVNGQGFTT

SEQ ID NO: 49277 - protein, 39 aa, Zea mays
  Coding DNA Sequence Number=SeqID_7498
MANEEGSVCDREDEDPDTQGPLGTRAISRVPLRKDLFTG

SEQ ID NO: 49278 - protein, 42 aa, Zea mays
  Coding DNA Sequence Number=SeqID_7499
MALLPPWSTCCEFCLVALVVGLKPVYVVSQFAIIKVMVADEK

SEQ ID NO: 49279 - protein, 64 aa, Zea mays
  Coding DNA Sequence Number=SeqID_7500
MNNLLQQHLAQAKQRMKSQADKRRSKRVFQVPIEILQKRVILRGVQAVSQGLIKWSSLPSSLAT

SEQ ID NO: 49280 - protein, 193 aa, Zea mays
  Coding DNA Sequence Number=SeqID_7501
MDAPGALATHQGPTVCHGCERACHTSGPQAVAPASRAQAGHAGPPLRRLAALADRRPPRRRATPSHRNADWSRPRPRRGRARAGAAQRAPRETGRRGRWRGRGASPPRGRRRLERLRGAGGDSVRLRAMWTREGALGDMGVRHEGRLGKTVLPSGPHWRWRRRLGRSRASVCGGGGPGGVGWAARALGAGAAR

SEQ ID NO: 49281 - protein, 185 aa, Zea mays
  Coding DNA Sequence Number=SeqID_7502
MTSFVLNSLRKQRNISRTLGRTVSYASTGLEHFSDGHLGHLLVSIKGDVQGLPRGGKASRGKGRSSPNRPSCLTPTSPSAPSLLHIALSRTESPPRPSKPLEPSPSPWWARPSPPQPSSPPRFSWCPLRGSGAGAASAQARRECGPGAGVTSRGGSVRPADVVACGRPARPVGVAAARRGQPARG

SEQ ID NO: 49282 - protein, 429 aa, Zea mays
  Coding DNA Sequence Number=SeqID_7503
  Gene Ontology: Mol. function=DNA binding; Cellular component=nucleus; Biological process=regulation of transcription
  Homolog annotation: Hit_ID=Q9ZQ25; Match level="QueryCoverage=49%, HitCoverage=71%, E-value=4e-72, Identity=62%"; Hit description=NAM (No apical meristem)-like protein
  Pfam annotation: Domain name=NAM; Domain location=69-200; Score =315.8; E_value=7.5e-92; Accession=PF02365.6; Description=No apical meristem (NAM) protein
  Subcellular localization annotation: CTP_CleavageSite=56; ConfidenceScore=5.01e-01
SEHDTTEATPTKPDATGAALTQPAAAGASAPVPNATGARPDPAGARFTGSSSGKLVVEGGKSKKEEESLPPGFRFHPTDEELITYYLRQKIADASFTARAIAEVDLNKCEPWDLPEKAKLGEKEWYFFSLRDRKYPTGVRTNRATNAGYWKTTGKDKEIFTGQLPATPELVGMKKTLVFYKGRAPRGEKTNWVMHEYRLHHSSRSVPKSNKDEWVVCRVFAKSTGAKKYPSNNAHSRLHHHPYALDMVPPLLQHDPFARHHNYPYMTSADLAELARFARGTPGLHPHIQPAPHPGTSASAYMNPAAAGAPPSFALSGGLSLNLGASPAMPPSLPPTAFHATMSMAMSGQTAAPSCAGTGNNHRHQVVAGEHQQQQMAAAGARRLRDRARSGRRVRRRRGRRGSVPELGRGAAGGEVLACRLPGLDSSSS

SEQ ID NO: 49283 - protein, 63 aa, Zea mays
  Coding DNA Sequence Number=SeqID_7504
MALAVKLASAIFCRSTKLTACLPEVHYSKRNNVRRPKPSDIRFKPSEISYLRRQCLISDGNDA

SEQ ID NO: 49284 - protein, 389 aa, Zea mays
  Coding DNA Sequence Number=SeqID_7505
  Gene Ontology: Mol. function=hydrolase activity, acting on ester bonds; Biological process=lipid metabolic process
  Homolog annotation: Hit_ID=Q2RB18; Match level="QueryCoverage=92%, HitCoverage=93%, E-value=2e-74, Identity=45%"; Hit description=GDSL -like Lipase/Acylhydrolase family protein, expressed
  Pfam annotation: Domain name=Lipase_GDSL; Domain location=30-359; Score=57.6; E_value=4e-14; Accession=PF00657.12; Description=GDSL -like LipaseAcylhydrolase
  Subcellular localization annotation: CTP_CleavageSite=44; ConfidenceScore=5.33e-01
MALLLLLVLLRSAASAGAGAEPHRSPATALFVLGDSTVGCAAATASSILSLNLTTTTTTLPSSLSGEPCLFFHEARLRVPDLLAAKMGLPSPPPISALNGTASAAARGVNFGGGGGQLLFYGGGGGVRGPASVFLTGAVGQQVRLASETLQLLRLEAAAPGEPSSSPAAVFVLSFGADAYARLLARGPAEAAAAAPKHGRRGLARLLADRVARAVSELYEAGARRVAVMGVPPLGCAPRVVWERSSPVRDGGAGCVEEANELIQGYNGRLAARLDELRLALAGADVVFCDVYKGMMEIISNPTTYGFEETREACCGLGPMRATVGCVSKEMACGAPERHVWWDIYSPTEAADALVTNWSWSSDGSGATSICGPISLQQLAAVSPSPPGA

SEQ ID NO: 49285 - protein, 276 aa, Zea mays
  Coding DNA Sequence Number=SeqID_7506
  Gene Ontology: Cellular component=cytoskeleton; Biological process =phagocytosis
  Homolog annotation: Hit_ID=Q2RB17; Match level="QueryCoverage=99%, HitCoverage=100%, E-value=3e-16, Identity=54%"; Hit description =Phagocytosis and cell motility protein ELMO1, putative, expressed
MASKAIKRRPISAETDTTGEKQMDTALSDPVTEPLLGNTPQEEKSKTYEPITRSGFWDGTAQECLRWTHLLAAFVAQSARNIVLLDSFIIFGQLFMSCHLDVADNDVSLIMMFLETSTYLTFLLKCFGQIVLKEPDFSLAVNVLSEFGYLLARLFGCSSASKSSQNGQTLPVNLSPLQEERLRLLRQRIDVPYDCSSVKHQDSFHRLLHKADGKMRTKAGVHFVQLLDDDGVAFDNLFCVAFQEVLKSTRGQLEQELTIGGISRIQDMPSFRMLRR

SEQ ID NO: 49286 - protein, 140 aa, Zea mays
  Coding DNA Sequence Number=SeqID_7507
  Homolog annotation: Hit_ID=Q9FFG4; Match level="QueryCoverage=70%, HitCoverage=25%, E-value=1e-15, Identity=42%"; Hit description =Arabidopsis thaliana genomic DNA, chromosome 5, P1 clone:MOP10
MEERSGGGSSAGGGLAYIFTDSDSDSDDEQCEKSHDDDNNTLSCPARDDSGTRYREGSHSASSSGLGEDTAIHRFVGSTVQNACHHGLVDPTVNLKEAMDDINGMFGRPLNLKCYRAKRKANALSDRRKAAPASGCFSPY

SEQ ID NO: 49287 - protein, 131 aa, Zea mays
  Coding DNA Sequence Number=SeqID_7508
  Gene Ontology: Cellular component=integral to membrane
  Homolog annotation: Hit_ID=Q2RB03; Match level="QueryCoverage=50%, HitCoverage=27%, E-value=2e-12, Identity=50%"; Hit description =Mpv17/PMP22 family protein, expressed
  Subcellular localization annotation: CTP_CleavageSite=72; ConfidenceScore=5.73e-01
MASALPLLLAPRAVFASAGPSSPHLRSRRLALRLPPPPRPAALSAPPAAVQPREARRVQPPRAASCCQDPAPAAGGGARDWRMFLAWYLMALDKNPIVTKAVTSAALTLAGDLICQDWNIYRNPKALIQPN

SEQ ID NO: 49288 - protein, 190 aa, Zea mays
  Coding DNA Sequence Number=SeqID_7509
  Gene Ontology: Cellular component=integral to membrane
  Homolog annotation: Hit_ID=Q2QXJ5; Match level="QueryCoverage=83%, HitCoverage=48%, E-value=1e-51, Identity=66%"; Hit description =Transporter, putative, expressed
  Pfam annotation: Domain name=DUF6; Domain location=28-157; Score= -0.6; E_value=0.072; Accession=PF00892.11; Description=Integral membrane protein DUF6
  Pfam annotation: Domain name=TPT; Domain location=10-157; Score =104.0; E_value=4.4e-28; Accession=PF03151.7; Description=Triose -phosphate Transporter family
  Pfam module annotation: Pfam domain module=DUF6::TPT; Domain location= 28-157::10-157
MSALKKSDKKAALDFAAWSFNVTTSVGLIMYVHFLQRKYSLNSFNLLGHTAPAQAGSLLLVGPFADYLLTGKRVDHFSFSSLALFFLALSCFIAIGVNLSQFICIGRFSAVSFQVLGHMKTVLVLSLGFLFFGKEGLNLQVVLGMVLAVLGMIWYGNASAKPGGKERRSVLPLRSASLKGSSEEKGGAEK

SEQ ID NO: 49289 - protein, 917 aa, Zea mays
  Coding DNA Sequence Number=SeqID_7510
  Gene Ontology: Mol. function=protein serine/threonine kinase activity; Cellular component=cell surface; Biological process =protein amino acid phosphorylation
  Homolog annotation: Hit_ID=O64477; Match level="QueryCoverage=65%, HitCoverage=73%, E-value=1e-157, Identity=46%"; Hit description =Putative receptor-like protein kinase
  Pfam annotation: Domain name=PAN_2; Domain location=187-254; Score =65.7; E_value=1.5e-16; Accession=PF08276.2; Description=PAN-like domain
  Pfam annotation: Domain name=Pkinase; Domain location=342-611; Score =198.5; E_value=1.6e-56; Accession=PF00069.15; Description=Protein kinase domain
  Pfam annotation: Domain name=Pkinase_Tyr; Domain location=343-608; Score=77.1; E_value=5.4e-20; Accession=PF07714.7; Description =Protein tyrosine kinase
  Pfam annotation: Domain name=S_locus_glycop; Domain location=44-170; Score=134.3; E_value=3.4e-37; Accession=PF00954.11; Description=S -locus glycoprotein family
  Pfam module annotation: Pfam domain module=PAN_2::Pkinase::Pkinase _Tyr::S_locus_glycop; Domain location=187-254::342-611::343-608::44 -170
TVVSGQWFGIDKITYEYQDSVSWKNQEDPAPGPFSYHADLVTMSQYVSIWNHSEVYWQSGNWTGKAFTSIPGMPLKSDYIYDFVNNSRELKFRWTTKDVSVITRVILSNNGQLQRLTWSNDSEEWITGWYFPAALCDVYSVCGPFGVCRTGSDEQCFCLPGFRPASSRSWRLGAWSQGCVRQTDIQCAESNISSAIKESDAFLKITNIKFSQNPVKLKVQSMEGCRSICLSNCSCTAYAHKQDCNIWNSELWDLKQLPNGNTDGSDMYIRLAASDHVVQDSEKKAHHLRLIVLFAVLGSIFMALCALSITVKMFQRTSSRKAFSDNYSLVVYDYSFLRHCTKNFSDRVGQGSFGSVFKGLLPDSKPIAVKKLQGMKQGEKQFHTEVRALGKIHHNNLVHLIGFCLRGAERMLVYDFMVNGSLDAHLFKDEKILDWNTRFLIILGVAKGLQYLHDECQECIIHCDIKPENVLLDVNFSPKLADFGLAKLMERHFSRALTTMRGTAGYLAPEWIGGLPITPKADVYSYGMMLFEIISGRRNSELMESGAIRYFPVWAAIRISEGDISEILDPRLSAVNFQELERACKVACWCIQDNEAHRPTMRQIVQILQDIQDVSAAPVPPHHLKQHLRLHVAKPHLHTHTRRREAKTTIEGDVVAEKNFNNDTFSKRVMSRTLPSLVQDGPNFHRKKTVLKNATPSTGEAASTSITVAETFAQEIPSTSSCQDLGTKHAAFAVILTSRTNPLEGHRHAGCRSSRKAAMITILSGWAHRLGTQNRATPGHVRHTVARAPEPMPTVGHRSQPAPPPCARPCRCRPTPPRRCRMQPNERTYRRHFGRLRSPADTPRQTTGRVLSARAPPRASTSKPCTRSAKTGQPRAPSRHRHRGPSPTIHSHLRQPCACTELLSALDSRVGVEPLPG

SEQ ID NO: 49290 - protein, 199 aa, Zea mays
  Coding DNA Sequence Number=SeqID_7511
MAAGDGSGWLEMALGVDASTVLVVGRFWQTSCRAWTSTLGEGRGRRGRVQWSGGVCRQGCATGQNGGDRSSRLVAYDSAGVALAGSGRAWRRVVVLVGFGGRQSASALARARQCGARGQPERMVIIAALRLLRQPACRCPSKGFVRDVRMTAKAACFVPRSWHDDVLGISWAKVSATVMLVDAASPVEGVAFFNTVFFR

SEQ ID NO: 49291 - protein, 211 aa, Zea mays
  Coding DNA Sequence Number=SeqID_7512
  Gene Ontology: Cellular component=chloroplast thylakoid membrane
  Homolog annotation: Hit_ID=Q6EPY8; Match level="QueryCoverage=77%, HitCoverage=77%, E-value=3e-27, Identity=41%"; Hit description=SOUL heme-binding protein-like
  Subcellular localization annotation: CTP_CleavageSite=74; ConfidenceScore=5.36e-01
MGTQALMLNTRWKVFRGDSSRQRDLMFSIVKPSMIQLRGNQMATSPLCSASPRLLRALGQPPRDVHSPRTVVVAAGTRVSRVEARASLVLALASHALSASQRRFAEHTDEASKYAFPSGRFEPRTLEEALIFMYFFAVPDLETVLFRILKCEAEYEIREVENTASEQMEMTTPIFTRKAKYGSNLPHPKDPSVTIKEVPRKIVTVAAFSGP

SEQ ID NO: 49292 - protein, 61 aa, Zea mays
  Coding DNA Sequence Number=SeqID_7513
MGGGWGESRGQGRALAAELYLTGTILVLAVHGGDGVHGPTRQRREAAAALAVGEEAVNGLR

SEQ ID NO: 49293 - protein, 128 aa, Zea mays
  Coding DNA Sequence Number=SeqID_7514
  Homolog annotation: Hit_ID=Q9LDG0; Match level="QueryCoverage=83%, HitCoverage=16%, E-value=2e-07, Identity=36%"; Hit description =Putative receptor-like kinase
  Subcellular localization annotation: CTP_CleavageSite=23; ConfidenceScore=5.64e-01
MAMVRRNRAAAQPAASSATRRVRLASASRMPPLKPLVERSSAWSAASLASPAGSTPEKALRWRWSPASTGRRRRSAGSGPNRLLERRLSSYSAVRQPSVPGWTAPKRPSPGRCSAMRRAPSGLQVTLV

SEQ ID NO: 49294 - protein, 167 aa, Zea mays
  Coding DNA Sequence Number=SeqID_7515
MATVAPFLAARICAGDRRPDYTEHLTSMSLAQNKGGNRTNMEVRCSPTIRAHRFPATVRCGTAARIDSGDKLPLLISSLAPQNAPVQTPDGSGNATTPPYSCYGCGQKTQRRRLSLTLWWRRQLVAALELHAGLRDGAKDGGSTPQLYRTDGFGGWTRDAWEDRAVV

SEQ ID NO: 49295 - protein, 179 aa, Zea mays
  Coding DNA Sequence Number=SeqID_7516
MGKNNKRKREPTPPSEDFGDSEYSEEEFSSESEGSPAPIPLRESSDDSDDSQGLAAEVWTYIRAVERSGLEGSDESEYSSDEEDSDGGGKDEDDEDDDDDEGGGGGDGDGSDRGGSSGSRDGDGGGSRGGSGGGGSSRGSNRGSRDGDGGGSRGGSGGGGSSRGSNRGGSGGGNNRASG

SEQ ID NO: 49296 - protein, 62 aa, Zea mays
  Coding DNA Sequence Number=SeqID_7517
MAAALCLQRQSLAANPFLFSAHGLRYRKLEVILTTNIDGLDGIDNHEPIKTKDKKFYERSEH

SEQ ID NO: 49297 - protein, 605 aa, Zea mays
  Coding DNA Sequence Number=SeqID_7518
  Gene Ontology: Mol. function=protein serine/threonine kinase activity; Cellular component=membrane; Biological process=protein amino acid phosphorylation
  Homolog annotation: Hit_ID=Q5F1Y3; Match level="QueryCoverage=99%, HitCoverage=83%, E-value=1e-163, Identity=50%"; Hit description =Putative wall-associated kinase 4
  Pfam annotation: Domain name=Pkinase; Domain location=376-594; Score =101.0; E_value=3.5e-27; Accession=PF00069.15; Description=Protein kinase domain
  Pfam annotation: Domain name=Pkinase_Tyr; Domain location=376-593; Score=35.6; E_value=1.2e-14; Accession=PF07714.7; Description =Protein tyrosine kinase
  Pfam module annotation: Pfam domain module=Pkinase::Pkinase_Tyr; Domain location=376-594::376-593
MARAPAKVHAAAGTGDGLLVIPTTASLSHCPSRCGDVQISYPFGIGPGCFRQGFELTCDQTAPSPRLFFMSGNSSIQVTSLDVGNNMGWASAVGFNVTMSAGVDTYTKSWEAPTATGASFYADNNNNLYTVGCGVYVYVLGDNMTDIIGYCTSICTDNREIMESANTGYGVCEGLGCCSIPIRGRQGFTLKLGRLNSTIPQFGEALSSVKIIVSQNYKFVTDDVYASWVNTSNVNEMIFYITIMDQPNCASAQSQENKDTYACTSESICYDVLPPAVSQGGYICKCSHGLQGNPYLQNNCTGIVIGLVCGLGSISFALGAIVLTGKWKKGIQRRIRREYFKKNQGLLLEQLISNENATTKTKIFTLDELEEATNKFDATRVLGHGGHGTVYKGILSDQRVVAIKKSKIVEQIEIDQFINEVAILSQIIHRNVVKLFGCCLEDEVPLLVYEFISNGTLYDILHENIATKCLLSLDDRIRIATEASGALAYLHSAAAIPIFHRDVKSSNILLDDNFTVKVSDFGASRSLSLDETHVVTIVQGTFGYLDPEYYYTGSLTEKSDVYSFGVILVELLTRKKPIFINESGAKQNLSHYFIERTTGKGLSWK

SEQ ID NO: 49298 - protein, 204 aa, Zea mays
  Coding DNA Sequence Number=SeqID_7519
  Subcellular localization annotation: CTP_CleavageSite=80; ConfidenceScore=5.34e-01
MYSNAVGNLMYDMICTRPNLAHTVSVPSPASGAIGSSASPDPRARPPSRPRMTNSASPDPRARTRTRLRKTTNSASPDPRARTQPRLRKTTNSASPDPRARTQPRLRKTTNSASLDPGLGLGLGSGRQQTLPRSTLGLGLSLGSGRRRTPPRPTRGSDSTSTSKDRLDLDLGRQTRPRPRRSHRLARPRARTDHVIRGPSLPYP

SEQ ID NO: 49299 - protein, 125 aa, Zea mays
  Coding DNA Sequence Number=SeqID_7520
MKDVWLGVSGQIRARVRSSASQLWTTQDVDARTERCERLWETTRERPPERGETRDKLLRPGANEPRPAALCWWGVTKIGGEQLGMQLLARETEMRCGQELQRLLRFIKVRITTFIPSYRKASEKT

SEQ ID NO: 49300 - protein, 279 aa, Zea mays
  Coding DNA Sequence Number=SeqID_7521
  Subcellular localization annotation: CTP_CleavageSite=44; ConfidenceScore=5.02e-01
MWSGAPDCPVCHRTLSGAPGPYRVQPSTLEKTRVRSAIIHRTVRCATGLSGALAGNGYPSVQRLTLMGATVQHSAQQKSERRSQRAPDCPVWHQTVRGHGKSLKMMARHIKICATKCYRATDDTDFDPATDTESQSSLGFLARAEIDIEAKTIVWMIGHRRYDATFTKFASANQLNYVVISAGCDLESSLVGFCGLDDNPINGLTCVLSVEKLHSAKLVEFNTSVQENITYVGLSVHVLETTEAKYGGKKSFEVSSAWDKIKEAEELKARGEEDLLSQG

SEQ ID NO: 49301 - protein, 107 aa, Zea mays
  Coding DNA Sequence Number=SeqID_7522
MATAAAGLAPAKEVVEKKVELLKEASTRLVVRCDLATVRVAIVSGGDQNKTTQLNQTSPSLLTPSISDERRLKDDVGHFSIVTCHRKQGNTKLRDKNLHPQDNTPSV

SEQ ID NO: 49302 - protein, 136 aa, Zea mays
  Coding DNA Sequence Number=SeqID_7523
  Subcellular localization annotation: CTP_CleavageSite=50; ConfidenceScore=5.57e-01
MLRPIQSATSHMGGPSRKRRPDRTARPSSSGFIVRDPLGISLRYEPTTTRVGRGSVRTLPSAKSRPSRPNGSSNFRICGRDKRTRLRPSGQSGLATQVAQDGGERRGPVCGQRTRLCGKLYKTISTQLSLQACFKC

SEQ ID NO: 49303 - protein, 43 aa, Zea mays
  Coding DNA Sequence Number=SeqID_7524
MARGRWLDGRWRQDLPMEMQRHGSMARRWIYTAQTLTPSGQPI

SEQ ID NO: 49304 - protein, 69 aa, Zea mays
  Coding DNA Sequence Number=SeqID_7525
MGENDEADRWARAARERERREREGGESLTSGAKLSARRAARGAEPPGPGRGEGKSGHAELVEYAHDEVF

SEQ ID NO: 49305 - protein, 150 aa, Zea mays
  Coding DNA Sequence Number=SeqID_7526
MGGLKRDLDISIGTPRTLSKAVDEKIAKLKALSESELCEAVHTSVKRVLAVIASHYEINHEWVCEGYILLKEDDLDEVEVRRLAGVVERSGSALARHFEEEVVPPVSPLGVGSYSTATPLDDKEGVASALLLLELFTLRGCNKLLSLLCM

SEQ ID NO: 49306 - protein, 141 aa, Zea mays
  Coding DNA Sequence Number=SeqID_7527
MWVPGVIHPTITTMQADSLALGPRIDHLSSSGTRVPLIDITSHTLASTFGHRLVGPYTQISRQSTCATAGLPFAMVGGRRHVYPGHRVRRHVRIKALCAVPRNGAVWPWSHRAGAGRGDRSGRRGEMREKGSTAIGCMTNG

SEQ ID NO: 49307 - protein, 209 aa, Zea mays
  Coding DNA Sequence Number=SeqID_7528
MGEVKPLLTPMSTTIVLDDDDDEGQRRLRRSDCCATRQSEAERQSGPASGTPDPGLGLGLSPGRRRTPLRPTQGSDSGSAPEDDELHSARPRAWTRAQPRKTANSAPPDLGLGLGLSPGRRRTPLRPTQGSDSGSAPEDDELRSARPQGSDSGSAPEDDELRFARPRARTQPWPQPTVSVSPDPGARTRPRPWKTDSTSTSEEPPHRPT

SEQ ID NO: 49308 - protein, 242 aa, Zea mays
  Coding DNA Sequence Number=SeqID_7529
  Subcellular localization annotation: CTP_CleavageSite=60; ConfidenceScore=5.41e-01
MVDPWNPARPTSGFLAAARFSAGFGWGDAIRSPRLPTILSPPSQSRLSHRQRCILRRALRAQSPAREAPSSIPHAPDRAQSASTSHASPSPLLALARRLDPGPNHTRTVAVLQPRAPRLHLSLAPARRFESGPDDTGAAADLNLTSCALVMASGAKAWLMSRHRISASRISGILGLFAHEERHDNGWERWADQLGEGAGREMLQVAELLWDASGEATACQDPEKHSAVETEVEGNVPVGGYA

SEQ ID NO: 49309 - protein, 1182 aa, Zea mays
  Coding DNA Sequence Number=SeqID_7530
  Gene Ontology: Mol. function=nucleoside-triphosphatase activity; Cellular component=nucleus; Biological process=proteolysis
  Homolog annotation: Hit_ID=Q8H6B2; Match level="QueryCoverage=99%, HitCoverage=98%, E-value=0.0, Identity=81%"; Hit description =Bromodomain protein 103
  Pfam annotation: Domain name=AAA; Domain location=398-588; Score =271.6; E_value=1.6e-78; Accession=PF00004.19; Description=ATPase family associated with various cellular activities (AAA)
  Pfam annotation: Domain name=AAA_2; Domain location=394-528; Score= -45.4; E_value=0.026; Accession=PF07724.4; Description=ATPase family associated with various
  Pfam annotation: Domain name=AAA_5; Domain location=398-534; Score =10.5; E_value=0.00028; Accession=PF07728.4; Description=ATPase family associated with various cel
  Pfam annotation: Domain name=Bromodomain; Domain location=874-961; Score=78.4; E_value=2.3e-20; Accession=PF00439.15; Description =Bromodomain
  Pfam module annotation: Pfam domain module=AAA::AAA_2::AAA _5::Bromodomain; Domain location=398-588::394-528::398-534::874-961
MEGKGDASVTPVRTSDRLRQRPKYYARGYMYYNPAMRKKVKSKKRTAASQIAKKLLRKPAARPPPADVGQPAGRSRGPTRHLIANRATIRTPNRSWSTSANLRRSTRKRRISVNLEGYDTDSSSMEDDDLMRPRYRSSKSLRPRRSLRGQRLHPYHESEDDQESSDEQGAEDQRENGNEIEEDVGDEEEVDGGDEAEGDGDDEDGEEEQEGRRRYDLRERSEVRRPSPRKEGKHRPQSPRRVLVHGIGPKNSKYLKKGGSRMHKRPRFSLPDDSDDSLLVDEPDEGPSMPWMRSGRGSMPWLMGGLDMHSPAAWGLSVGASGWGHQGDTSTSLMPGVQTAGPSSKGGADIQPLQVDENVSFKDIGGLSEYIDALKEMVFFPLLYPDFFANYHITPPRGVLLCGPPGTGKTLIARALACAASKAGQKVSFYMRKGADVLSKWVGEAERQLKLLFEEAQKNQPSIIFFDEIDGLAPVRSSKQEQIHNSIVSTLLALMDGLDSRGQVVLIGATNRIDAIDGALRRPGRFDREFYFPLPGYEARAEILDIHTRKWKDPPPKELKMELAASCVGYCGADLKALCTEAAIRAFREKYPQVYTSDDKFVIDVDSVSVEKYHFLEAMSTITPAAHRGSIVHSRPLSTVIAPCLKSHLEKIMEHISDIFPFLSSIDFSKFSALSYGSSIPLVYRPRLLICGGESVGLDHVGPAVLHELEKFSVHSLGLPSLLSDPSAKTPEEALVHIFGEAKRTTPSILYIPQFHLWWDTAHEQLRAVLLTLLNELPSNLPVLLLGTSSVVFTDLEEEYQVDQPSFDDRLRYFSILFESLLSFQMEESRNKSKKQKSAIDLPKAPKEVEGPKVSELKARAEAEQHAVRRMRMCLRDICNRILYNKRFNVFHFPVLEDEVPDYRSIIHKPMDMATVLQRVDSGQYLTRAAFIKDIDLIVSNAKTYNGDDYNGSRIVSRACELRDVIIVVVSNEPLFGQVQGMLSQMDPSLVSFCDKIASQGGPLQAVDDEDRAILQAAPVAQLVSGTRISARLRNVQPEVNLSQSYEVLRRQKKSAENEQSMTRDEKSPEDVDLSKPTDAEEAAKEPESNGTTKEANDSPAKEPEVSTSPEPMESDNGKIAAATGDDLLEQLEALKQRFMELTASYGVPQLERLYSKIMKGAIELTSKESNEDHRRYNTREY

SEQ ID NO: 49310 - protein, 108 aa, Zea mays
  Coding DNA Sequence Number=SeqID_7531
MAAAAGPYKEMLEVVNACAARIRWRLRPASKRRLLNECTDNHVEDRTLLVVDLSSFLENTQIALPSLNGIMDGFPKSVGGGGPNIPAGSHPAGGSQAAAGGGATQRTQ

SEQ ID NO: 49311 - protein, 259 aa, Zea mays
  Coding DNA Sequence Number=SeqID_7532
VVAGWVTSADQVMPCRAAHLDEQAARASWPRLQAAKGVREHGDAPQSRAGRADASRRTAGSSVGSELAVPGPSRTTSATGAARAQSRRRDRVPRQAPRTPGQRPRRGGRAGRADALRPRRAPPRRARGRASEAKARDAPASCGLGREAARRRGGSSAEPWRAMGGRTQAPWPRQGRAAAGRARRAKPGRNGAVAGAGDAGDAPGATPAPAAREGEGRDEGRKRRWGLPWNGVERTDATAAVSNDENNGERGKECHGGKG

SEQ ID NO: 49312 - protein, 43 aa, Zea mays
  Coding DNA Sequence Number=SeqID_7533
MAIRFMSSGGTSELEKRGSARLVEILLQGKEGRDPGEGDCDEN

SEQ ID NO: 49313 - protein, 130 aa, Zea mays
  Coding DNA Sequence Number=SeqID_7534
  Gene Ontology: Mol. function=sequence-specific DNA binding; Cellular component=nucleus; Biological process=regulation of transcription, DNA-dependent
  Homolog annotation: Hit_ID=Q84NC2; Match level="QueryCoverage=34%, HitCoverage=25%, E-value=6e-11, Identity=75%"; Hit description=MADS -box transcription factor 31
MAEDLASFSAQDLSNLEQQIEFSLYKVCLRKQELLDQQLLEIRQRNLAAATASGQHQQAGEMMGINPRPFLWWDVGASGSGSQSQQLLHGRDAAESSMMVLGLSPQMHRYRLQPRQPNLRQDTDVHGWLW

SEQ ID NO: 49314 - protein, 75 aa, Zea mays
  Coding DNA Sequence Number=SeqID_7535
MNHFILSIWTITFPIVDQYSGYLISRLQGYIKGVNFIYKTKELKEIGQKVDEVNRRIQCSIDRGCRSRKVIRFKQ

SEQ ID NO: 49315 - protein, 163 aa, Zea mays
  Coding DNA Sequence Number=SeqID_7536
  Subcellular localization annotation: CTP_CleavageSite=57; ConfidenceScore=5.43e-01
MAKGVALGGQRATQGGSATRSGDTTSSGVVKVPQQGLTEYRESSLKQQQPRRGRKVRVFTASALLPSGDSSFTPGGVLPSQPPGPPRHRSQPATPTDDEELSAREATAAMVVGRVKAAMGFKQSSAMPKPRASSSRKVPTPTPPQLHGSAAPEVLGLVSAVGE

SEQ ID NO: 49316 - protein, 486 aa, Zea mays
  Coding DNA Sequence Number=SeqID_7537
  Gene Ontology: Mol. function=protein binding; Biological process =defense response
  Homolog annotation: Hit_ID=Q6K2N9; Match level="QueryCoverage=42%, HitCoverage=39%, E-value=7e-52, Identity=53%"; Hit description =Blight resistance protein SH20-like
  Pfam annotation: Domain name=NACHT; Domain location=73-235; Score= -26.6; E_value=0.0067; Accession=PF05729.3; Description=NACHT domain
  Pfam annotation: Domain name=NB-ARC; Domain location=35-328; Score= -21.7; E_value=6.6e-09; Accession=PF00931.13; Description=NB-ARC domain
  Pfam module annotation: Pfam domain module=NACHT::NB-ARC; Domain location=73-235::35-328
MNLKGLSVFLISRTFLFPLSCLSINSVELQRYPFPDVERFDNEAFDRAAVVGRDNDKAKIKDMILQSNAQKFSIIPILGLVGLGKTTLARLIFLDQGEGWDFDLRIWISLNRKLNIKMIASDIISQCNHREEKLLDVRTDMEIQENFQLLKRCLQEALHEKHCLIVLDDLSSTDKNQLDELKEMLKGTNESIKVLVTTSSEITAELLHTIPPYKLCPLSEDDSWKIFSQKAFGNCDGDNTDLKKIGKEIVKSGWFPHHSACSTTAASALASADPLFTVRGDDLCHIRSTSTDAPRSYHVPLAGGCGFTPWLGPAPLHHLHAAVATTHSAASGARLSSEFRPSMSCCPRRQAPAVPALLDVQLPHTSPSPLSVQTPQCTVDSVANCQRNGLNWPTIQGRKWFGASFLLSSATGRRPDQEQVDINLIGDKIPWHHLALYARSKDLRHQDGKMIDDVNLDYIRWVALEQVLSFLMTSMTQEVMGQLAIY

SEQ ID NO: 49317 - protein, 65 aa, Zea mays
  Coding DNA Sequence Number=SeqID_7538
MEEYDVNLDGLLDCEEFAEFIRKHMHELVGIMFQERGNVCRLLKQEGGLRCAVTRGALDFYVYMA

SEQ ID NO: 49318 - protein, 104 aa, Zea mays
  Coding DNA Sequence Number=SeqID_7539
MWMLPPRSKSSLSSEAEVESEPLGRRAETSAEARAESEPWGRRRSSSSSGAEPSPSPGLGGGVRHLQGLSRVRALGRAEEFAVFRGLAESEPWVGRREFAVFRD

SEQ ID NO: 49319 - protein, 101 aa, Zea mays
  Coding DNA Sequence Number=SeqID_7540
  Subcellular localization annotation: CTP_CleavageSite=52; ConfidenceScore=5.49e-01
MAHRTVRCATGHCPENSAARSAPTAVSSTPATTDNKSRSTIEFSLGRNRKLRLARPQAPASGGGLRLARPPDSASTPVSRGIASSPDPGLDLKGSLRLDRP

SEQ ID NO: 49320 - protein, 45 aa, Zea mays
  Coding DNA Sequence Number=SeqID_7541
MRRVHASHLPRAEWSTVQWVRVTCSAGAGNFDDSPFTPATLYKQT

SEQ ID NO: 49321 - protein, 90 aa, Zea mays
  Coding DNA Sequence Number=SeqID_7542
MKNQEPRLDSEPRAGEKLEMTRESACPADDTGVSTWPGDPTVLHIEPQNEEGGFRRAEVNRGGPLSLDDESPISLLGVRLATAMAQGHGC

SEQ ID NO: 49322 - protein, 393 aa, Zea mays
  Coding DNA Sequence Number=SeqID_7543
MLVLQFIDVALMSVPRSKHTFIFRILVALIGSKNGSSILMKNQVLGNWFPITVICRPRLLILFESQLYLEQIWFLWLSGQGQAFFLSNSRFERLNIRSSLRGSRVRPWASRNLIWWPKKILKHHPEISGHKFVSSINGPPGPVMNDSRITWGNSISGNNRQLFGISGQNCRRPFDFFPSKFENVSWEYSSRPWFRASLPSPAGGPSPPPFFNNFGEFAQVVLTRSGSSPFTELALFTKPSSTSLSWKSPSPSSPHLCWECSSHLRLPPHEVFEEMVFHRVDPAPFLPHGFVAQQVDHREIMVRTMTRPQPSTHEDWGIVLVQPLPEHEVNFHIFDDIIGEYLMGVRHIQVRSIHRSHLGQALPQDEDPVPPYPHDGHQLPVEYFGMGQPVANF

SEQ ID NO: 49323 - protein, 127 aa, Zea mays
  Coding DNA Sequence Number=SeqID_7544
MAVAATTAGWGEGVGERRGRDPAAGSCTSHGGADAGHGLGSQLRLRRRVQATCEDDGAGATRCRCDPATGADAGAGCGLGGVSMDGLAQCGRARLGPDPSAGACDRPSPATGNRPSMAGSAPGGAQA

SEQ ID NO: 49324 - protein, 225 aa, Zea mays
  Coding DNA Sequence Number=SeqID_7545
  Homolog annotation: Hit_ID=Q52PU9; Match level="QueryCoverage=34%, HitCoverage=41%, E-value=2e-27, Identity=75%"; Hit description =Cyclin-dependent kinase inhibitor 1
  Pfam annotation: Domain name=CDI; Domain location=60-111; Score=42.7; E_value=1.3e-09; Accession=PF02234.9; Description=Cyclin-dependent kinase inhibitor
MATARSGQWQHGERAGDDCFSGGITKETTPCSLTNTQMTSTPRSTRSSHSCHHRVNAPPVHAIPSSREMNEYFAAEQRRQQQDFIDKYNFDPANDCPLPGRGAYRCGQRITCRRFRYPVGSARPPSDTSWGMIHQHRVEADLYVCVAMWRTGGEGSQGGWADRVIEKRMDLYGFDADAVAIDTAPVCRISDAGGSMGAPLWLWLPPRAPSSWSSPWATACRRRPA

SEQ ID NO: 49325 - protein, 93 aa, Zea mays
  Coding DNA Sequence Number=SeqID_7546
MVVAQARERVAALSWEQEHASMTALARQLEEDELLGGPPFETAPVEIALHYETLVVATLHALVAGVQNIRSLAHVVVNTNSYARYRDLVLFTL

SEQ ID NO: 49326 - protein, 90 aa, Zea mays
  Coding DNA Sequence Number=SeqID_7547
MAAGRERWAPLEPPQPEPRVDPSSALERENYNLGRSKVSLQRIKEVEALGCFPTRASRVVGLETVLRPVDEMVLYMQAKTSEKCVHKLHA

SEQ ID NO: 49327 - protein, 90 aa, Zea mays
  Coding DNA Sequence Number=SeqID_7548
  Subcellular localization annotation: CTP_CleavageSite=53; ConfidenceScore=5.39e-01
MTPVSAEWANQRGLGANRRIPTLLAKKRNSTRQRARQRLNGGRRTCDGASWARSQSEREGEGARLCVQLSGEGVFKSNSNHFKHEHQTKG

SEQ ID NO: 49328 - protein, 58 aa, Zea mays
  Coding DNA Sequence Number=SeqID_7549
MSCAFDDYYIEDCGIILASEVTQRRIDNSDQFVILATVRVLQEVAHETQYSAEALNES

SEQ ID NO: 49329 - protein, 169 aa, Zea mays
  Coding DNA Sequence Number=SeqID_7550
MTGASLDSVFIEISIKIYTLQRWYNITRNTCIPSSLGLYGPLNTTKGEIDGVVSTEQGTDRGFGVEQGSGAGVVDVGQGSGGVLRGRRSSDEGVAELQRRTMAREEEDGGFEEREGERAPGGRRNGRHNSIDGIHGGFEWREREGEMGGRRRSVDCPAPGSRSGTGSAA

SEQ ID NO: 49330 - protein, 86 aa, Zea mays
  Coding DNA Sequence Number=SeqID_7551
MADFEKGPEEMLDLSLVDSAILWIVKLLKTRFLLEAMATSQKEEERWEKMWRILDWLDHQLENREVGSRRATSTAYLTVDNLLRGI

SEQ ID NO: 49331 - protein, 437 aa, Zea mays
  Coding DNA Sequence Number=SeqID_7552
MATSKKEEKRWEKMWRILDLLDHQLENRDVGQHRLQGQAELVAATVRKTEERGSHNYVPVILGGTNFSVFGENYAEKMVWGRVFGSDSHGLVQQLAHGVGDEWHNNCDQDVVPNVPWMFVGMPQQASTYPVSSEMGLKVAWDGEMQFETHTHEGLLQQLAQGGEALEELAKKKGDVVDETSKSDQPSETVAMVMNGGSMEGLLPASVISVLEEGPEKEQNVENADATSAGGILSQDLVPELTHETNGASEIISAPKVDDEDWEILQVREISEEEVEDYLVVSKEGVVDEVMQVELADGGTGEEEMLFGKEVAGNLVQPSPFPRSIGTAMEDLEYVEGEAVVKNYYLSIEDVQIRVVDDIDLVDILFDFDHSLSLFGYSFKQILEAMADIWIGMDGFRVMMSHCLDIHGDGCKELPNMEFQELCHLYCRSKWTTIVAL

SEQ ID NO: 49332 - protein, 184 aa, Zea mays
  Coding DNA Sequence Number=SeqID_7553
  Gene Ontology: Mol. function=carboxyl- and carbamoyltransferase activity; Cellular component=ornithine carbamoyltransferase complex; Biological process=amino acid metabolic process
  Homolog annotation: Hit_ID=Q8SA97; Match level="QueryCoverage=55%, HitCoverage=19%, E-value=2e-15, Identity=47%"; Hit description =Ornithine carbamoyltransferase
MAPPVDVAGPRPRLGDVEAPPRSRSSPSFVAEAESEPQGRARRRLLAEARAEFESWGRAKRSSSSSGAEPKSEPWVGRSGVRRLPGLSPSPSPGSGGAEFAVFRGLARVRALGRAERRARVRIKVSGHLCIKCSCDLVGVASRRRQGLGRAGNVFAAGGGPRARRRSSELYADGGYQLRIRSLE

SEQ ID NO: 49333 - protein, 154 aa, Zea mays
  Coding DNA Sequence Number=SeqID_7554
MTAQARKGACVEPATARENVVVQVFSEHVARNRQQKLCTVGACGVLSSGRAGRRINQRQVSSLTHWTAQRGRETLAQDILPQAHSVYHVLYPYYIDKKHLALKSNHEKGKSKVQVDESSSDDDIDDVKLAFMAKKTTKYSRRHKILLNKEFLHK

SEQ ID NO: 49334 - protein, 87 aa, Zea mays
  Coding DNA Sequence Number=SeqID_7555
MTYSYPSKLHPSSPTLSAQALDQVHLSVWGYTSKRDNSRGGQSTAHIPMTRTPGPDHSKHVLGRDKYRSSQCWDYGRGLLGIPRLYG

SEQ ID NO: 49335 - protein, 380 aa, Zea mays
  Coding DNA Sequence Number=SeqID_7556
  Homolog annotation: Hit_ID=Q6K649; Match level="QueryCoverage=50%, HitCoverage=49%, E-value=2e-84, Identity=78%"; Hit description=Kelch repeat-containing F-box protein-like
  Pfam annotation: Domain name=F-box; Domain location=216-263; Score =21.8; E_value=0.0025; Accession=PF00646.23; Description=F-box domain
  Pfam annotation: Domain name=Kelch_1; Domain location=305-354; Score =44.9; E_value=2.7e-10; Accession=PF01344.15; Description=Kelch motif
  Pfam annotation: Domain name=Kelch_2; Domain location=305-354; Score =18.9; E_value=0.018; Accession=PF07646.5; Description=Kelch motif
  Pfam module annotation: Pfam domain module=F-box::Kelch_1::Kelch_2; Domain location=216-263::305-354::305-354
MAPPVDVVGPRPRLGDVEAPPRSRSSLSSVAEVESEPLGRARRRPSAEARAKSEPWVRRSGVRRLPGLSPSPSPGSGGADSRSGAGGAVLLSGRSVEWRSDCGHFGSVDWRTRVRIKLCADGGYQLRIRSLEGAKVFFGSFAGDQQHQILGPCVRAEAVPTASIRGVLLVLPGRSIPQPLKDLIILARARMQLKPPARPKLYSGLMPQEDLDPYRDLIPGLPEDLAKICLALVPRAHFPAMGAVSKRWMSFLESKELVAVRKEVGKLEEWVYVLVPDAGAKGSHWEILECSGQKQSPLPRMPGLTKAGFGVVVIGGKLFVIAGYAADHGKDCASDEVYQYDSCLNRWTVLAKMNVARCVFACAEVKGVIYVAGGFGPNGE

SEQ ID NO: 49336 - protein, 347 aa, Zea mays
  Coding DNA Sequence Number=SeqID_7557
  Gene Ontology: Mol. function=nucleic acid binding; Cellular component= intracellular
  Homolog annotation: Hit_ID=Q6K653; Match level="QueryCoverage=78%, HitCoverage=65%, E-value=1e-73, Identity=59%"; Hit description =Ubiquitin-associated (UBA)/TS-N domain-containing protein-like
  Pfam annotation: Domain name=UBA; Domain location=115-157; Score =13.4; E_value=0.098; Accession=PF00627.21; Description=UBATS-N domain
  Pfam annotation: Domain name=zf-C2H2; Domain location=43-67; Score =13.8; E_value=0.33; Accession=PF00096.16; Description=Zinc finger, C2H2 type
  Pfam annotation: Domain name=zf-C2H2; Domain location=6-30; Score =6.6; E_value=2; Accession=PF00096.16; Description=Zinc finger, C2H2 type
  Pfam module annotation: Pfam domain module=UBA::zf-C2H2::zf-C2H2; Domain location=115-157::43-67::6-30
MAGLSLRCGDCGAQLRSVEEAQAHAESTNHANFVESTEAVLNLVCSNCGKPCRSHTEVDLHTKRTGHTEFADKTAEAAKPIDLEAPLKPASDDATDVDASASATEETQETVVPEVNKEVLTDLEGMGFSTARATRGASLLCLGNSTIECAINWLSEHQEDADIDEMPLVPANSKTEVNKPSLTPEEMKIKAQELRERARKKKEEEERRMEREREKERVRIGKELLEAKRIEEQNERKRMIELRRLEKEEEKRAREKIRQKLEEDKAERRRKLGLPPEDPAAAKPSAPPPVEEKKISCHIDCTDVVTIDNDCRRNRDVKLFKQLSQPTTLCNCMCNNLILDHYTRMGL

SEQ ID NO: 49337 - protein, 160 aa, Zea mays
  Coding DNA Sequence Number=SeqID_7558
  Gene Ontology: Mol. function=nucleoside-triphosphatase activity; Cellular component=membrane; Biological process=protein transport
  Homolog annotation: Hit_ID=Q5VRN1; Match level="QueryCoverage=51%, HitCoverage=15%, E-value=5e-28, Identity=61%"; Hit description =Putative cell survival CED-4-interacting protein MAC-1
  Subcellular localization annotation: CTP_CleavageSite=11; ConfidenceScore=5.09e-01
MPPLPLVVSLLLAAEPPLSPPRRLSDPAASRLSWWMGGSGTTRVMMADILSISMHLSRTPLHVHSISLFVGREIHSEKLFGVRMQDGFLLFGPLGCGKTLIAKAVAHEAGANFIHIKVDSLTTKRGKEGGVVERLLNQLLIELDGDGQHKGVYVIGATNR

SEQ ID NO: 49338 - protein, 50 aa, Zea mays
  Coding DNA Sequence Number=SeqID_7559
MGALPSDYRVLAKKDWRCRIWDGHRGRDSIENRRACGRSPPWLLLIWARD

SEQ ID NO: 49339 - protein, 202 aa, Zea mays
  Coding DNA Sequence Number=SeqID_7560
  Gene Ontology: Mol. function=identical protein binding; Biological process=negative regulation of enzyme activity
  Homolog annotation: Hit_ID=Q8H4X8; Match level="QueryCoverage=63%, HitCoverage=22%, E-value=2e-20, Identity=43%"; Hit description =Putative subtilisin-like serine protease AIR3
MDSGKASKAYYIEGGAGQSQARFCFGFALYQFCLELGDRDVLTSNWGQPFGLFGYTTGTAKGDALRACIAACKVYWSVECVATTVLAGFEFAVHNGADVISVSFGQDASLANDAKSLFHAPVRDLPNVLTLGNSVHLRGRALGPPQCTSARSTRWSTSRAPPKPPPTLRRHQLWARHPGPCEGIAGGSIIDEGDNPNKLDRF

SEQ ID NO: 49340 - protein, 116 aa, Zea mays
  Coding DNA Sequence Number=SeqID_7561
  Homolog annotation: Hit_ID=Q8H4X8; Match level="QueryCoverage=57%, HitCoverage=8%, E-value=2e-10, Identity=67%"; Hit description =Putative subtilisin-like serine protease AIR3
MFLYEKNNGKWRMCVDYMGLNKRGMLLRFIVSEHGIKANLEMIIDITKGVIGRAYDGDVVYGGMEGVEHDRLVEEELGVIGEGRVLAEGTEMTTAPLWMVDSKPVRTVVAAHSTDQ

SEQ ID NO: 49341 - protein, 278 aa, Zea mays
  Coding DNA Sequence Number=SeqID_7562
  Gene Ontology: Mol. function=protein serine/threonine kinase activity; Cellular component=nucleus; Biological process=protein amino acid phosphorylation
  Homolog annotation: Hit_ID=Q5VP69; Match level="QueryCoverage=91%, HitCoverage=50%, E-value=1e-125, Identity=84%"; Hit description =Mitogen-activated protein kinase 16
  Pfam annotation: Domain name=Kdo; Domain location=18-209; Score= -84.7; E_value=0.058; Accession=PF06293.4; Description=Lipopolysacchar ide kinase (Kdo)
  Pfam annotation: Domain name=Pkinase; Domain location=22-268; Score =218.2; E_value=1.9e-62; Accession=PF00069.15; Description=Protein kinase domain
  Pfam annotation: Domain name=Pkinase_Tyr; Domain location=22-259; Score=17.1; E_value=1.6e-13; Accession=PF07714.7; Description =Protein tyrosine kinase
  Pfam module annotation: Pfam domain module=Kdo::Pkinase::Pkinase_Tyr; Domain location=18-209::22-268::22-259
MDEKKGSEEAPFFTDYGEASRYEVTEVVGKGSYGVVAAALDTLTGEHVAIKKINDVFEHVSDATRILREIKLLRLLRHPDIVQIKHIMLPPSRREFRDIYVVFELMESDLHQVIKANDDLTPEHHQFFLYQLLRGMKYIHAANVFHRDLKPKNILANGDCKLKICDFGLARVSFNDTPSAIFWTDYVATRWYRAPELCGSFFSKYTPAIDIWSLGCIFAEMLIGKPLFPGKNVVHQLDLMTDLLGTPSPESLSRVGSLFPTSRIRKTVTGLESWSLIF

SEQ ID NO: 49342 - protein, 278 aa, Zea mays
  Coding DNA Sequence Number=SeqID_7563
MSYRAKLGVGWLTVVEGRRLRRSWVAETTMPSGGGGGDAPVDEGRRIVGGEPTNMKEIVSDVRDNENVVEARAEVESGSSGAHRMGACRRQVAKEFRSWVQSGEPTPAQEDERRRSRGCRPTASLGRPRAGGTSTRRAATSASALAGVMVAVGGGGQTRGRKGGGKRTDRGPGQRGARVMAPGRRLTTRMSVVECWGWSGCLNRHGELLEVKLVPHDMEGGKQHDPLDESLQVAVPGAEATKKVEHQGAIGDRPAKIMERESTIPFIWRQYSSTESSH

SEQ ID NO: 49343 - protein, 108 aa, Zea mays
  Coding DNA Sequence Number=SeqID_7564
  Subcellular localization annotation: CTP_CleavageSite=33; ConfidenceScore=5.02e-01
MMVLWSHEMTTLSIWTHDGDNGAAGSSRTWSVRAKRPRPVALETEPGSSGDGGSSSSGRVGHDGEGAAGGAVGGHDGVGEVAAKGVVVGLIRAEGMAGSWGRARAREV

SEQ ID NO: 49344 - protein, 653 aa, Zea mays
  Coding DNA Sequence Number=SeqID_7565
  Gene Ontology: Mol. function=DNA topoisomerase (ATP-hydrolyzing) activity; Cellular component=chromosome; Biological process=DNA topological change
  Homolog annotation: Hit_ID=Q8RU34; Match level="QueryCoverage=99%, HitCoverage=71%, E-value=1e-175, Identity=54%"; Hit description=Bzip transcription factor-like
  Pfam annotation: Domain name=DUF632; Domain location=200-543; Score =271.4; E_value=1.8e-78; Accession=PF04782.3; Description=Protein of unknown function (DUF632)
MEDYTRGNLPTNSPNYAELRRMEGIPELEDEAELVGNAEASKPSTSGVSDQNKKGKGPIQDNAASNGDFSGDSKLQKKATSKADSSGGKLQRDATSISDSPGGKLQRKGSEPPPGGKLQGKGSEPTTDAKGEAGKPVSRNDSGPSNVSSKNKEGRKKNTMSLKGTVSSDIDGSSTSGKKKGVAFERERSIREAEGCGEIHGQSVVSSDPFSPSHHGTRDVREAINEVNELFDEAANCSTDVSRLLEVGKMPRSDTPRVLRYVSSRVMDPLGLAVSTSSCLPKSHGRKSRPSSSMARTSASLDAGSSNDVGHLSSTLEKLWVWEKKLYQEVKDEEKLRMKYEKYYRRLKSMDERGAESSTIDSTRLSARLVESKISINIRTANAFSLKIQEIRDEELYPQLVDLIQRFRSLWKDIMECHEKQLLAIQDSRIHWMKAMTVSESGVVSEASRDLERELTKWYRCFNKWMISQRSCAEALNEWLKKWLPESQEEVTADGAPPFSPGRLGAPPVFVVSNDWFQAIEMVSRTDVLKAIDQFSKVVRRFKKSQEDERRQRRRADHASKDYDRKRKDLEEELGLSTMESPRYSHDNRVVDLEKLRKRRDEESTRHDRVLNHAHVTASATLPVGLVPVLQQITSFFQRNQRVYMQIRTQQGA

SEQ ID NO: 49345 - protein, 62 aa, Zea mays
  Coding DNA Sequence Number=SeqID_7566
MESATHRRGTKLLCHRTKFGEDHGGSQQNRSGDHAMRGCFGNGRRDTVDHVGWGTSVWVRHM

SEQ ID NO: 49346 - protein, 259 aa, Zea mays
  Coding DNA Sequence Number=SeqID_7567
  Gene Ontology: Mol. function=DNA binding; Biological process =regulation of transcription, DNA-dependent
  Homolog annotation: Hit_ID=Q8LMR9; Match level="QueryCoverage=61%, HitCoverage=51%, E-value=5e-62, Identity=73%"; Hit description =Putative RAV-like B3 domain DNA binding protein
  Pfam annotation: Domain name=B3; Domain location=39-143; Score=109.0; E_value=1.4e-29; Accession=PF02362.12; Description=B3 DNA binding domain
MEFTTPPPATRSGGGEERAAAEHNQHHQQQHATVEKEHMFDKVVTPSDVGKLNRLVIPKQHAEKYFPLDAAANEKGLLLSFEDRTGKPWRFRYSYWNSSQSYVMTKGWSRFVKEKRLDAGDTVSFGRGISEAARDRLFIDWRCRPDPPVVHHQYHHRLPLPSAVVPYAPWAAHAHHHHYPADGHTEPVTPCLCATLVATEMRASSSQLSLTRSNLSRPPQPRIARVDGAQPRPSSSPRQPQSLWCRSCQPQPRRTADVP

SEQ ID NO: 49347 - protein, 67 aa, Zea mays
  Coding DNA Sequence Number=SeqID_7568
MTTSNSRVRSSVPLTGEREAEVREAAGQLAEEKELLEKHNLWTGAKDILHEKVIEGVMLSKGYYSCY

SEQ ID NO: 49348 - protein, 75 aa, Zea mays
  Coding DNA Sequence Number=SeqID_7569
MVVCYSRSGISGCGGTPITLSRFSEAARRGSNARWPFIHHVDESGEGGRGHRICDYSVDSHRVWEFVEGDGEQTR

SEQ ID NO: 49349 - protein, 127 aa, Zea mays
  Coding DNA Sequence Number=SeqID_7570
MMSRTEPRATKARDRQSPNDGTWVHIVSAVRNKEYRTAKRPHTCMSLPHTLQAPDGQPRHQSRSRSSDPFGSLDFSFDDEGEIVRAPEAQPPPLKNLGATTRASSDLCIGYAPVAAIRFGKLDLIFN

SEQ ID NO: 49350 - protein, 101 aa, Zea mays
  Coding DNA Sequence Number=SeqID_7571
MELSMSYYTEAASYYGGSSSGSNAFPPQLRHTPTAHLRYNSPDCPVCQRSNGYLRATVDSDSEQCRTVHVAEVRAVGQRGTGLSGVTPDYPVPHEDKATNG

SEQ ID NO: 49351 - protein, 260 aa, Zea mays
  Coding DNA Sequence Number=SeqID_7572
MGTGLDVPSAQRLGRDMQGARLAGEVERGCYGARHRRGWARCGQRRRDEGGRADSAKPRAMASERHADTAKGEEESGGERKGGELTSARHSEALRTRVLAIRTTTAATSLRAGRSSDGGDGEVEGEKLGEGRGFRPMLEASWAVAPLETRTSVSREKHSGRRLPDARAHLSSGGGRRTVHARSRACRARHGWAATGAERGTWRARAEPLRARVHGVGGAGSWAAMGGPMRGEGALAERGGREREKGAGVGGPNGPGKGGS

SEQ ID NO: 49352 - protein, 102 aa, Zea mays
  Coding DNA Sequence Number=SeqID_7573
MRLHPLSIMAFLPSFLGCPWRLPIAGHAVSRRMERKSEAEKEGAHEWAEQQRKDKKDRVEKKQWRAERQMRRDYITEADSINEDEDDDDNASSEPWAIPDAP

SEQ ID NO: 49353 - protein, 247 aa, Zea mays
  Coding DNA Sequence Number=SeqID_7574
MALVALIPSSAEPPAEQLLGAACMGSSSASDSLVVKPAYCHGLQCSPSKREAWPVLHLGATEARRTLESKAPLNLLLLCGVKLSVCLHWHGGGCGSRGTTPLLFHGEPRTVLPSYGGQPGIQLAPGCSIDDDDPLALCKELNEKNNVTKKVLRGGLICLLTVHQKLMSLAGTMAGRSRLLLNQREVWECSTSNLLVARNEDAVARARTVSIQNAYDALVRVARRDVESTSLACLEIVKKVYRLYTLE

SEQ ID NO: 49354 - protein, 190 aa, Zea mays
  Coding DNA Sequence Number=SeqID_7575
MGHLSAQLEPRRRGAFMKSRNPSVLYLVLPPASPALDATVLIGKLVYTDGATDVGRKSGERRCACCIVKRDLGNKPRSVARALHVRSKLHRGGVDARGPQNCSTEHFLRRVPPHDVSRATTTTVSSKDPYTRFMILSASYRLIRDCVRASARGSINSGDGAAALVGARCRSARLWDEGLWTVDSIVGSVD

SEQ ID NO: 49355 - protein, 378 aa, Zea mays
  Coding DNA Sequence Number=SeqID_7576
  Homolog annotation: Hit_ID=Q10MT6; Match level="QueryCoverage=42%, HitCoverage=29%, E-value=3e-29, Identity=47%"; Hit description =Expressed protein
  Pfam annotation: Domain name=TFIIS; Domain location=54-130; Score =10.2; E_value=0.00085; Accession=PF08711.1; Description =Transcription factor S-II (TFIIS)
MANEQSGLPLRRWKPFYSAFQAIDGAIEACGYPRAEYRDVRGEIVVLLRGATDDGVAEQLCAVLDDVMVESLKTLLVAPVPHDLLASTELARTVGALGSHGSSRIRSLARDVVRGWRVAVEASFATAVAVKKKLDNLSADQIPLPRAAVDEKKMLPAAAEVHNKKPHVPPAKTLPAAAAAAEVHSKRLQVPPAKMLPTAEEHKKQHYVPPTKTIPTAAILSNHQKNMSETKKSSVADNEKMEATKRKLREGYQKADGVKRRRSIQTIKEEEGKLLEQKQCKKDASHRMERGPVGCRTRTSTNIYINPPPVALPLGGGYGYEGSFFGGYEYSYGWSPFLFAPGPSVSVGVGGGFDTLILFLALGAIVGAVRRFLNRNYY

SEQ ID NO: 49356 - protein, 325 aa, Zea mays
  Coding DNA Sequence Number=SeqID_7577
  Homolog annotation: Hit_ID=Q10MT6; Match level="QueryCoverage=66%, HitCoverage=38%, E-value=5e-23, Identity=36%"; Hit description =Expressed protein
  Pfam annotation: Domain name=TFIIS; Domain location=67-143; Score =10.4; E_value=0.00082; Accession=PF08711.1; Description =Transcription factor S-II (TFIIS)
MAVVCSGVSGGREGKNEGRTRRARGSWHYMGAAGFTDGVIEACGYPRSEFRDVRGEIVVLLRGATDDSVAEQLCAALDDVMVESLKTLLVAPVPHDLLASTDLARTVGALGNHGSFRIRSLARDVVRGWRVAIEASRTTAVAVKKKLDSLCANKIPLPRAAVDEKKMLPAAAEVHNKNPHVPPAKTLPAAAAEVHSKRLQVPPAKMLPTAEEHKKQHYVPPTKTLPTAAILSNHRKNMSETKKSSVADNEKMVATKRKLREGYQKADGVKRRRSIQTIKEEEGKLLEQKQCKKHASHRMERGTVGCRTRTSSGVNRSRPPPSHVL

SEQ ID NO: 49357 - protein, 197 aa, Zea mays
  Coding DNA Sequence Number=SeqID_7578
  Gene Ontology: Mol. function=ion channel activity; Cellular component= integral to membrane; Biological process=ion transport
  Homolog annotation: Hit_ID=Q6ZHE3; Match level="QueryCoverage=99%, HitCoverage=34%, E-value=8e-54, Identity=50%"; Hit description =Putative cyclic nucleotide-binding transporter 1
  Pfam annotation: Domain name=Ion_trans; Domain location=5-188; Score =0.4; E_value=0.01; Accession=PF00520.21; Description=Ion transport protein
LAYVAPESRVVGAGDLVDEPKKVAIHYLRGYFLLDFFVVLPLPQVMILLVVPKVGLSAANYAKNLLRVTVLLQYVPRIIRFVPLLDDCGRGIGSGLYRQQWFNDSGAEACFNTGNDATFQYGIYEQAVLLTTEDSAVKRYIYSLFWGFQQISTLAGNLVPSYFIWEVLFTMAIIGLGLLLFALLIGNMQNFLQALGR

SEQ ID NO: 49358 - protein, 50 aa, Zea mays
  Coding DNA Sequence Number=SeqID_7579
MAPEDELSIGRDGDCARGRAQRRARQKFAPKARSAFPVVLDVPSGDDRRT

SEQ ID NO: 49359 - protein, 43 aa, Zea mays
  Coding DNA Sequence Number=SeqID_7580
MAMKLATLYTGSTKRIWATFSVETVNNSDLEYINSDLEYINSK

SEQ ID NO: 49360 - protein, 378 aa, Zea mays
  Coding DNA Sequence Number=SeqID_7581
  Homolog annotation: Hit_ID=Q10MT6; Match level="QueryCoverage=42%, HitCoverage=29%, E-value=3e-28, Identity=46%"; Hit description =Expressed protein
  Pfam annotation: Domain name=TFIIS; Domain location=54-130; Score =12.3; E_value=0.00054; Accession=PF08711.1; Description =Transcription factor S-II (TFIIS)
MADEQSGLPLRRWRPFYRAFQAIDGVIEACGYPRAEFRDVRGEIVVLLRGATDDGVAEQLCAALDDVMVESLKTLLVAPLPHDLLASTDLARTVGALGNHGSSRIRSLARDVVRGWRVAVEASCATAVAVKKKLDNLSADQIPLPRAAVDEKKMLPAAAEVHNKKPHVPPAKTLPAAAAAAEVHSKRLQVPPAKMLPTAEEHKKQHYVPPTKTIPTAAILSNHQKNMSETKKSSVADNEKMEATKRKLREGYQKADGVKRRRSIQTIKEEEGKLLEQKQCKKDASHRMERGPVGCRTRTSTNIYINPPPVALPLGGGYGYEGSFFGGYEYSYGWSPFLFAPGPSVSVGVGGGFDTLILFLALGAIVGAVRRFLNRNYY

SEQ ID NO: 49361 - protein, 473 aa, Zea mays
  Coding DNA Sequence Number=SeqID_7582
  Homolog annotation: Hit_ID=Q10MT6; Match level="QueryCoverage=58%, HitCoverage=53%, E-value=5e-31, Identity=35%"; Hit description =Expressed protein
  Pfam annotation: Domain name=TFIIS; Domain location=54-130; Score =10.2; E_value=0.00085; Accession=PF08711.1; Description =Transcription factor S-II (TFIIS)
MADEQSGLPLRRWRPFFGAFEAIDGVIEACGYPRAEYRDVRGEIVVLLRGATDDGVAEQLCAVLDDVMVESLKTLLVAPVPHDLLASTELARTVGALGSHGSSRIRSLARDVVRGWRVAVEASFATAVAVKKKLDNLSADQIPLPRAAVDKVHVPSAKMLPAAAEVHNKKPDIPPAKMISTATAAEAHNKRPHVPPAKTLAAAVAEVHNKRPQVPPAKMLSTAEEHKKQHYVPPTKTLPTTSILSNQQKNMSETKKPVVAESEKMEATKRKLRESYQEADGVKRRRSIQTIKEEGKLFGEGRRDNQGAPKLVGKGKPLPHLSSRRRHRWGLEKGAGFRQHTGISHVRIFEHENHVPWRNCSPECRGFQLPRKLCSAPRLRRYECLPCALRVPLTVLCVSNWVLDVVRELAPLTGENCRRSSVGVVVVGQRVGEEVPLGVESVLCIPDSTLGGESQLLKIWVVDHEYRFGNVGF

SEQ ID NO: 49362 - protein, 259 aa, Zea mays
  Coding DNA Sequence Number=SeqID_7583
  Homolog annotation: Hit_ID=Q10MT6; Match level="QueryCoverage=40%, HitCoverage=19%, E-value=5e-17, Identity=52%"; Hit description =Expressed protein
  Pfam annotation: Domain name=TFIIS; Domain location=161-236; Score= -7.9; E_value=0.044; Accession=PF08711.1; Description=Transcription factor S-II (TFIIS)
MAHGGRGRRIALVPRTPLLSCSARPDLPLSVPVGERRLFTATFDARSNGHDFFGTTWIGRSVLFPSEFNSKEISSSCTHSSTVRIRHAALAHIRRPYPSAGPRLYHSRRAERASPAEVEAILPRFRGDRWLIEACGYPRAEFRDVHGEIVMLLRGATDDGVAAEQLCAVLDDVMVESLKTLLVVFVPHDLLASTDLVRTVGALGSHGSSRIRSLTCDVVRGWRVAVEASFATAVAVKKKLDNLSDDQIPLPHVAVDKVH

SEQ ID NO: 49363 - protein, 98 aa, Zea mays
  Coding DNA Sequence Number=SeqID_7584
MEATKCKLHEGYLEADGVKRRRSIQAISVRERGPARCRTSSTSGSGEAEMAPEDELSVGRAHRRVRQKFAPEARSAFPIILDDPSGDARRCACTVARP

SEQ ID NO: 49364 - protein, 338 aa, Zea mays
  Coding DNA Sequence Number=SeqID_7585
  Homolog annotation: Hit_ID=Q10MT6; Match level="QueryCoverage=81%, HitCoverage=53%, E-value=3e-31, Identity=35%"; Hit description =Expressed protein
  Pfam annotation: Domain name=TFIIS; Domain location=54-130; Score =10.2; E_value=0.00085; Accession=PF08711.1; Description =Transcription factor S-II (TFIIS)
MADEQSGLPLRRWRPFFGAFEAIDGVIEACGYPRAEYRDVRGEIVVLLRGATDDGVAEQLCAVLDDVMVESLKTLLVAPVPHDLLASTELARTVGALGSHGSSRIRSLARDVVRGWRVAVEASFATAVAVKKKLDNLSADQIPLPRAAVDKVHVPSAKMLPAAAEVHNKKPDIPPAKMISTATAAEAHNKRPHVPPAKTLAAAVAEVHNKRPQVPPAKMLSTAEEHKKQHYVPPTKTLPTTSILSNQQKNMSETKKPVVAESEKIEATKRKLRESYQEADGVKRRRSIQTIKEEEGKLLEQKQCKNHASHRMERGPVGCRTRTSSGVSRSRPPPSHVL

SEQ ID NO: 49365 - protein, 62 aa, Zea mays
  Coding DNA Sequence Number=SeqID_7586
MNAPTTYHRGLQMAATETKCDTSRGRAKDEAELQSGDKSFDEMLRWKLRFLNRNNDDYDNDY

SEQ ID NO: 49366 - protein, 82 aa, Zea mays
  Coding DNA Sequence Number=SeqID_7587
  Subcellular localization annotation: CTP_CleavageSite=62; ConfidenceScore=5.63e-01
MDASPHPIVTPTLAFVPALALPSLLSAGSRLQPSMAGSPFLHPWTCLSLFLLAMGFIVNLVSSSPKFESSFVTVMSFAIHVG

SEQ ID NO: 49367 - protein, 115 aa, Zea mays
  Coding DNA Sequence Number=SeqID_7588
MASGGGRRWDAAGLRRDCGLGAGEVSGARRRAEVGGGERIWWRRFRRAQCSVWCYFLRLQYLQSSITQWVPNIQRMQIYGSKNRTNNYRLVWKHDEGALDVLDSSEVGANIDHLL

SEQ ID NO: 49368 - protein, 188 aa, Zea mays
  Coding DNA Sequence Number=SeqID_7589
  Homolog annotation: Hit_ID=Q38799; Match level="QueryCoverage=22%, HitCoverage=11%, E-value=9e-12, Identity=85%"; Hit description =Pyruvate dehydrogenase E1 component subunit beta, mitochondrial precursor
MDLGNRSSPTVLSARVDLIEVSIDGAIDHIINSAAKSNYMSAGQIYVHIVFTDPNGAVVGVGAQHSQQGLIAARLEDLGKKEERLQELPLLHDISELIEAYSYRKVGLNLVKLQKLILAANQTSPTEFMENMVWKFEREAWTVMQSRQHNVQWEFFLFSAQSATTTTSGSGVTLVIFDLLPPGGLGSL

SEQ ID NO: 49369 - protein, 201 aa, Zea mays
  Coding DNA Sequence Number=SeqID_7590
  Gene Ontology: Mol. function=cobyrinic acid a,c-diamide synthase activity; Biological process=selection of site for barrier septum formation
  Homolog annotation: Hit_ID=Q45RR7; Match level="QueryCoverage=73%, HitCoverage=47%, E-value=3e-45, Identity=66%"; Hit description =Plastid division regulator MinD
  Pfam annotation: Domain name=CbiA; Domain location=44-200; Score= -5.3; E_value=0.00021; Accession=PF01656.13; Description=Cobyrinic acid a,c-diamide synthase
  Subcellular localization annotation: CTP_CleavageSite=45; ConfidenceScore=5.65e-01
MAFAPPHLLPLPPPPAAASTRAVSARNHGGRTAPELSGPTPRVVVVTSGKGGVGKTTTTANLAASLARLGLPAVAVDADAGLRNLDLLLGLENRVHLTAADVLAGDCRLDQALVRHRALHDLHLLCLSKPRSKLPLAFGSKTLTWVADALRRSTSPPAFILIDCPAVSRYNELRNHLDGLNNPNLSGISTIQRYHYYCLIH

SEQ ID NO: 49370 - protein, 147 aa, Zea mays
  Coding DNA Sequence Number=SeqID_7591
  Subcellular localization annotation: CTP_CleavageSite=82; ConfidenceScore=5.00e-01
MDQIVHRGRTISKPPDQKTPQRPSGRRWSSSEDALRCAHRRRSLSSDATMDGHRSHHRSCLGRSSPPPPIAPREVAVVAIARASGRRDHRYSRLGQSRPSRHSHLGPTLADIAWDCRSHLAPQEVVVDVRPPLAPHAVAAVATLKVA

SEQ ID NO: 49371 - protein, 47 aa, Zea mays
  Coding DNA Sequence Number=SeqID_7592
MAAWKEQQKLRPFVQAPQSTAGCGIKMLADYHSSSSKLAQRGVDEGK

SEQ ID NO: 49372 - protein, 179 aa, Zea mays
  Coding DNA Sequence Number=SeqID_7593
  Subcellular localization annotation: CTP_CleavageSite=54; ConfidenceScore=5.65e-01
MAASQGHTAAGAGATPSSVNTRRRGKQGRRERGRAHRGARTTGRAVPRGRDGSRAAAGAREKGRGVGRQQVDLKKLDDEEAPCTTLRNMSIGDVCPQEPQEPTQTQDQSSSSTQASPQTQDEEQAQEDGEQVKDNGQFKDRRIHQGEMKKNNKIIRMIKINKYLRCLTQESIKQFKDTT

SEQ ID NO: 49373 - protein, 116 aa, Zea mays
  Coding DNA Sequence Number=SeqID_7594
  Homolog annotation: Hit_ID=Q6QP51; Match level="QueryCoverage=31%, HitCoverage=16%, E-value=2e-11, Identity=86%"; Hit description =Putative growth-regulating factor 1
  Subcellular localization annotation: CTP_CleavageSite=38; ConfidenceScore=5.58e-01
MDMRRSFGAAPTDFRVPFTITVAVLRRRLPSSSSQLVSTARGFSGLDISRGCEFGSMDLDLFGISPDFVAPLNSPDLHPGKQRRSPRSDCCASHPGKADDGKFSLRRNRKLRLTRP

SEQ ID NO: 49374 - protein, 38 aa, Zea mays
  Coding DNA Sequence Number=SeqID_7595
MEPCCLELKLVPWASLWWIAGLRILPVSWSEGAGAGQG

SEQ ID NO: 49375 - protein, 83 aa, Zea mays
  Coding DNA Sequence Number=SeqID_7596
MTHLFEFHEVKDPEHLFGEGKNWGVVRFDVVPLMGLGVCGSLCQEMFGLLVAMRLMVLGIDSGNGEDEAVEGDFQEFQGYDKF

SEQ ID NO: 49376 - protein, 80 aa, Zea mays
  Coding DNA Sequence Number=SeqID_7597
MHDLPLALELLGYSGWLLGQEGGLPGYSDAGTDFLQVGCLDGTAAAAAAAEEAASGTGADADAGASAGDQPILSGNSTAS

SEQ ID NO: 49377 - protein, 138 aa, Zea mays
  Coding DNA Sequence Number=SeqID_7598
MVQRRRCKQESFGVTAEGGTDLKTKRLFRPRQITIELLSSVKGMNDSGPTFSKALIPLMSHPVLEGKPNANHVKQYHKLTMITQKVNKDESKKRYLRTRIRKGEAQKIRRLTQRRSCEAVKLRHVRRRGNRLKDEKAI

SEQ ID NO: 49378 - protein, 244 aa, Zea mays
  Coding DNA Sequence Number=SeqID_7599
MEKTNTEKITNEMLAGLSEDSSDSDSFDVESENEDAKDRSWRLSHVVFGKSTMRVWLPRVVQASPRPAVVYAAVPHIISSLLPFTAASAPCLSNAKENRPPLHHGPPHCLVFKPLAVQPHSSPRDALTAMLRVATPGASCARDSPSSSSSQGEKSRDAASRTVPPAKPRLEFPWTRPSFIHGELAPFLSPYPSSSPLDVLGMTHTRRGQSPTEMAHGRARVCSTPASRCGARPARRPARHARDA

SEQ ID NO: 49379 - protein, 247 aa, Zea mays
  Coding DNA Sequence Number=SeqID_7600
  Subcellular localization annotation: CTP_CleavageSite=98; ConfidenceScore=5.09e-01
MTNSASPDPRARTPLWPLPNDLRLARPRGSGSASATEDRLDLSFGGAPTPLTSDAGPPRQQGTPSSSYPKPTRVTENKTGGRQQGLDRPDSCPSTRLRCSSDSHDITPAGCQDLSGCHIGMAFLEKVGRAGPRTGQALSWGRSLPSPAWTLVTPLLQAHPTWARDEHEGRGISTSLTPVSGHLASPPFALAHTLDPSGLGHAAHSLVGSGTPRSRNADNLIRLYFISYTSHVAINAYTINSYFVTYA

SEQ ID NO: 49380 - protein, 246 aa, Zea mays
  Coding DNA Sequence Number=SeqID_7601
  Homolog annotation: Hit_ID=Q6QP54; Match level="QueryCoverage=20%, HitCoverage=15%, E-value=2e-07, Identity=68%"; Hit description =Putative kinase
MVFPVDVAGPRPRSDGVGAPPKLRSSLSSVAEAEPEPLGRAEAEVVRQRPERSPSPRVGRGGVHRLLGLSPSPSPGSGGAEFTVFRVLARVRALGSGGAEFAVFRVLARVRALGSGGAEFAVFRVLARVRALGSGGAEFAVFRVLARVRALGSGGAEFAVFWVLARVRALGSGGAEFPMAPLARPDCLLDSLCRVALQSERRRRRCPSVRPLYADGGYQLRIRRLEGTPNYGPRHKYWRRHVCSRI

SEQ ID NO: 49381 - protein, 53 aa, Zea mays
  Coding DNA Sequence Number=SeqID_7602
MAENLDALRSIMMLEHVRHLELVEKLVRNMNGSILVTGHGSSDYLEDIQTGRD

SEQ ID NO: 49382 - protein, 96 aa, Zea mays
  Coding DNA Sequence Number=SeqID_7603
MLGEPEGEGGWVVRAKEEEGGQRKRRERGSRGEDDTAGDGSTPGRLRSSRAGGEGENVWGGSYLTFLYGNPVGWVDIGPSLVDQADQRANIGSKSW

SEQ ID NO: 49383 - protein, 102 aa, Zea mays
  Coding DNA Sequence Number=SeqID_7604
  Subcellular localization annotation: CTP_CleavageSite=35; ConfidenceScore=5.16e-01
MEDASSVIVYPGRAPSTTAQPPTAVPSPELMPLPPAVSGFAAAIWLRSAPPAAPKFTAKLHHTCLTVEDEYWVLGPTRQSTRELAHAETAKEAAEAERSQGG

SEQ ID NO: 49384 - protein, 136 aa, Zea mays
  Coding DNA Sequence Number=SeqID_7605
MGQEEEPTSSKPYAFACDEHNKMKGRMLQAQVKKRRKKKIMMKMNMIKPQHHPPRRKKQPDASERRGGAKAWRLQVSRLGMILQAKMNLQGLESTDPHHARHVCHINASWQEVKRVSHPLVMIVVVMRVKARESPP

SEQ ID NO: 49385 - protein, 335 aa, Zea mays
  Coding DNA Sequence Number=SeqID_7606
  Gene Ontology: Mol. function=zinc ion binding; Biological process =regulation of transcription
  Homolog annotation: Hit_ID=Q41801; Match level="QueryCoverage=91%, HitCoverage=96%, E-value=7e-60, Identity=48%"; Hit description=Dof3 gene
  Pfam annotation: Domain name=zf-Dof; Domain location=38-100; Score =129.9; E_value=6.9e-36; Accession=PF02701.6; Description=Dof domain, zinc finger
MGGALPDGGGDGGGGQVIGGPAKPMPMAERARLARIPLPEPGLKCPRCDSANTKFCYFNNYSLSQPRHFCRACRRYWTRGGALRNVPVGGGYRRHAKRAKPKQQPAGAGAGTGIAATTAALQQAPASSAAACTATTTATTTPLPGGGSGGGLSMLPPLFRLADFDAMSLGSSGFSGISSMTGKPSSVDAYAHSVSGHAPAPGGGLLEQWRVQQMQSFPFLHAMDQGLLGPPLAMAMAPAPGSGMFQLGLVDTTTSDNGRGGGGEDGWSSTRDQPLHVMQAAAATKKRESYPAPAPRGVYGYGDHHHHHLAAAADGGGYASYSTNAAAVNVNLHDW

SEQ ID NO: 49386 - protein, 77 aa, Zea mays
  Coding DNA Sequence Number=SeqID_7607
MQRTHWWGFDYKTGVKEERMAKVELQVGQGCSDEEFRLRGGGLRRARAWTSFSRARGISGTDVGVFNSSSNKVSNSN

SEQ ID NO: 49387 - protein, 54 aa, Zea mays
  Coding DNA Sequence Number=SeqID_7608
MGASLAEVQGKVASQTSPLAEARGKSPAAPGPAPGPSVGAPAPRASNDAVSPGD

SEQ ID NO: 49388 - protein, 561 aa, Zea mays
  Coding DNA Sequence Number=SeqID_7609
  Gene Ontology: Mol. function=hydrolase activity, hydrolyzing O -glycosyl compounds; Cellular component=cellulose and pectin -containing cell wall; Biological process=carbohydrate metabolic process
  Homolog annotation: Hit_ID=Q9AXL6; Match level="QueryCoverage=80%, HitCoverage=88%, E-value=1e-128, Identity=47%"; Hit description=Beta- glucosidase
  Pfam annotation: Domain name=Glyco_hydro_1; Domain location=43-506; Score=370.2; E_value=3.2e-108; Accession=PF00232.9; Description =Glycosyl hydrolase family 1
MGRKAPLGCATTLLLLLAAAVAPAELSVLGLGGGAAAASGAVTRADFPAGFVFGVGSSAYQVEGAVAEDGRKPSIWDTFTHEGYSLDNATGDVTADQYHKYKDDVKLLHEMGVDAYRMSIAWPRLIPADLICYNNPMLHVGIQPHVTIYHFDFPQALQDDSDPVASPKLKLVLTHLATFNLDDARREDFTAYADVCFSNFGDRVKYWSTVNEPNVETIGGYDQGILPPRRCSFPFGFGCEEGNSTTEPYVAAHHLLLAHASAVSLYRDRYQAAQGGRIGLTLLGWWYEPGTQTPDDVAAAARMNDFHIGWFMHPMVFGDYPPVMRRNVGSRLPTFTDEEAARVRGSFDFVGFNHYIVVYVKADLGRLDDQVRDYMGDAAVKYDMPFLKSRNQFPFGALTSDFMTSTPWALKKMLRHLRVTYKNPAVMIHENGAAGQPDPSGVNSYDDEFRNGSNVQGYFVWSFLDVFEYLFGYRLRFGVYGVEFNSTARTRLRNSEWQCVIDRFKKRLAMWKGSFRGDVLAQTLKIIAETRSSPRDSCDMSILRDGGNGDPCRNKKLTRFL

SEQ ID NO: 49389 - protein, 383 aa, Zea mays
  Coding DNA Sequence Number=SeqID_7610
  Homolog annotation: Hit_ID=Q7XHY2; Match level="QueryCoverage=79%, HitCoverage=78%, E-value=9e-15, Identity=26%"; Hit description=F-box domain containing protein-like
  Pfam annotation: Domain name=DUF295; Domain location=270-322; Score =49.5; E_value=1.1e-11; Accession=PF03478.8; Description=Protein of unknown function (DUF295)
MADWSLLPSYLVNRIADRILATDDLDYYMDLRAVCRRWRSSTADPKSRPLDTRFRPCQWAMLDEVHQSDARLFVNAGTGRFVRRDLPLLRRYNVVASAAGGLVVLAERSFPHAARVLNPFTGAMISFGAPVPCLCDAAAHVIGDSLPTLILLPNDSRTVYWANSGSKRFRHYKRPHAARMQRPLARLANECSVYAAAREGGPLESFFVPVASKVLDLAATHFAKYFTGSAVGLAGKKRCYHVESAGEMLVVFKLPRRVDVFKIDTGRGLLERVNNLGSRALFLGDCKCLSVDADKFASVEANCIYYVVEELSYGFDVFVYSLKDRTEVRAGPAIDSIYPNTLSAGPPFSEVQLLCCYTYENGLTPGFFGELAWLASEVFELGH

SEQ ID NO: 49390 - protein, 89 aa, Zea mays
  Coding DNA Sequence Number=SeqID_7611
MVGGGGGFLLETAILDSALFIGSTTGFGGTWSSNVSITGHLGVHGWRVGVRKPVSLPWAHNSAKLESLPWIPGVVTGTPESTSPSAIKS

SEQ ID NO: 49391 - protein, 173 aa, Zea mays
  Coding DNA Sequence Number=SeqID_7612
MAVAKKLSLKGTPDPDLVTLPRVLSGVRRENVGDGCPDAGVGCRLSVKRGAKSGGWGGHRLDSVGVVTSGRRRTIWHALTDETTVGLGVLALDGVNNRLLLLKSTGDVLGLLASRRNGCPSGGEDGGSVIRQGAQGGGDGGGLAVDGHRRRAVAHESPNHRAKRDRGKLDANS

SEQ ID NO: 49392 - protein, 139 aa, Zea mays
  Coding DNA Sequence Number=SeqID_7613
  Subcellular localization annotation: CTP_CleavageSite=32; ConfidenceScore=5.57e-01
MALYSVPRSAPFDSGAVPLHHTLAPPPSRALRQPTGSGGSWPRSRPQSQEWSRRPVGRLGQLSRWLSVALSLQPVDWHHPHVARAIRGPKSNEVVLMLNVGILNVVIVFFFFIAVFTIAGIIRVITSRSRGLSCWYRWC

SEQ ID NO: 49393 - protein, 205 aa, Zea mays
  Coding DNA Sequence Number=SeqID_7614
  Homolog annotation: Hit_ID=Q8SA97; Match level="QueryCoverage=45%, HitCoverage=21%, E-value=7e-14, Identity=49%"; Hit description =Ornithine carbamoyltransferase
MALPVDVAGLCPRQGDVGAPPKPRLSLSSVAEAEPEPWGRARRKSFGRGQGGVRALGSGEAEFRRLPARVRALGSGGAEFAVFRVLARVRALGSGGAEFAVFRVLARVRALGSGGAEFAVFRVLARVRALGSGGAEFAVFRVLARVRALGSGGAEFVVALLARPDCLSDSLCRVAPQSEWRRRRCPSVRLLYADGGYQLRIRRLE

SEQ ID NO: 49394 - protein, 205 aa, Zea mays
  Coding DNA Sequence Number=SeqID_7615
  Homolog annotation: Hit_ID=Q9LRF3; Match level="QueryCoverage=30%, HitCoverage=26%, E-value=2e-11, Identity=54%"; Hit description =Ethylene responsive element binding factor3
MSLTPVLDLDLFRWATAVNAVSIGGVMFPFKGYPIAHLTPHQYFFYKHAAVATVVVAGYQIIKKSEETKKKATAEKFTFGIESKVQEHPKMQEQPKVHEQPKVESAPVGTPRKEKRMANVLKLVLRPAKMASPAAPKVSEDIALESKTSIDVEIPFNSDKADLRDPLQQDMGLIVCQRREIYQHLKHCHLKIMSTLFAMLRGKID

SEQ ID NO: 49395 - protein, 192 aa, Zea mays
  Coding DNA Sequence Number=SeqID_7616
MDVAMFDAQMGLPPAADGGGEVADAYTAKGVAATVARQLRYLRSKRKRLEDKIERLRMQHTEAVRDKSMTENKIQNLLDKAQAACAEAQATQKCTTELELETVPFDKSEGEVETCFLWHFKAFDRSYKEFDLGAFQAMRDEEVEDLAGLESSVARQDVDAEVGTEEQSSLARVGSSDPGAAGTLQSYASMQV

SEQ ID NO: 49396 - protein, 952 aa, Zea mays
  Coding DNA Sequence Number=SeqID_7617
  Gene Ontology: Mol. function=ionotropic glutamate receptor activity; Cellular component=membrane; Biological process=ion transport
  Homolog annotation: Hit_ID=Q69L11; Match level="QueryCoverage=98%, HitCoverage=99%, E-value=0.0, Identity=67%"; Hit description =Putative Avr9/Cf-9 rapidly elicited protein 141
  Pfam annotation: Domain name=ANF_receptor; Domain location=45-398; Score=259.4; E_value=7.6e-75; Accession=PF01094.18; Description =Receptor family ligand binding region
  Pfam annotation: Domain name=Lig_chan; Domain location=579-867; Score= 88.6; E_value=2e-23; Accession=PF00060.17; Description=Ligand-gated ion channel
  Pfam annotation: Domain name=SBP_bac_3; Domain location=458-647; Score=-92.3; E_value=0.057; Accession=PF00497.10; Description =Bacterial extracellular solute-binding proteins, family 3
  Pfam module annotation: Pfam domain module=ANF_receptor::Lig _chan::SBP_bac_3; Domain location=45-398::579-867::458-647
MELAARTTSFVVFFILSFAQRAPTSEAATLNVGVILNLQSLVGKMARTSILMAMEDFYAVHRNYTTKLVLHIRDSSADSVQAASEAVDLLKNYNVRAIIGPQKSSEATFVANLGNKSQVPVISFTATSPTLTSGSMPYFLRATPSDTAQVNCIAALIKGYGWREVVPIYEDTDYGRGIIPYLVDSLQEFGASVPYRSVISVSASSDQVEQELYKLMTMQTRVYVVHMLSSIASTLFMKANELGMMSEMYAWVLTDGIANIIDSLNPSILDSMNGALGVKFYVPKSKELDDFTPRWTKRFKQDYPNDPSAQLGIFGLWGYDTIWALAQAAEKVNMVDDMFQKQQDKKPSTCFGTLGISTVGPKLIDAILHNTFRGLSGDFDLKKRQLQPSTFQIINIVGRSSQQIGFWTAKHGIIRTLDQNGSKTTNANSMPELNPVIWPGKVYVVPKGWQLPTNGNKLRVGVTSSGYPEFMKAERDPITNATIATGYAIDVFEEVLKGLPYAIPYEYVAFDFEGASYNDFVYQVHLGVYDVAIGDITIRYNRTSYVDFTLPYTESGVAMIVQVKDDTNKNTWVFLKPLTTDLWLGSIAFFIYTGIVIWLLERRINNAELTGSFFRQLGIAIYFSFFADRERIDSILSRLVVIVWVFVLLVITSSYTANLSSILTVQQLQPTVTDVHELIREGEYVGYHNGSYVGNLLEVLGFDRTKIRAYKTSEDFAMHSLKGAKMVVLLLSYMKFPTSSYFLQSIAKVTQWLDQFTNPKALALTSIKNKSDPNRDEKELEIILQNINSQAFPKRSPMINDFSRRILSITEGDVIIQIENKWIGDQHVCQTDGAIASPSSLNFRSFSGLFLVTGVASTSALFIALMMFLYKNKHKIRDSISRVQTRGGYGSAHANRQNQEREVDSNQAQSMHVTVPNDLEDDTCQQEIEVSIEITSPVLDSHRGQALHSVAQ

SEQ ID NO: 49397 - protein, 347 aa, Zea mays
  Coding DNA Sequence Number=SeqID_7618
  Homolog annotation: Hit_ID=Q69L12; Match level="QueryCoverage=59%, HitCoverage=56%, E-value=2e-60, Identity=58%"; Hit description =VirR/VirH-like protein
  Pfam annotation: Domain name=UPF0066; Domain location=136-253; Score =31.8; E_value=2.5e-08; Accession=PF01980.7; Description =Uncharacterised protein family UPF0066
  Subcellular localization annotation: CTP_CleavageSite=80; ConfidenceScore=5.48e-01
MAPPRSLAGAAIAATAAAIILSCNLSLFPHLIVSSSKFPASTSPPSPTCLSGYPTGLFYRRKCARLAARVRELEASLAVTAEKAAAERRGRVRAQQSLRALSQLEPGSDEARPTKAAASASYPLVPIGTVESCFSTRNGTPRQPLVVTLARATLVLDPARVPAAALEGLASYSHCWILYVFHLNTDLDKLWKDPARSKLKAKWILGLNELMESSAFSWKVEAVNGHTLLLSGVDLVDGTPVLDIKPYLPYSDSVKGAAVPSWLESFITTIDLRHPAVPTGYVNWHDNFTPLLLVRQPHSIAVNRCQHCLPEVKLADLRIHNTSRFPVSSVDTARTTAAACLHVGANP

SEQ ID NO: 49398 - protein, 193 aa, Zea mays
  Coding DNA Sequence Number=SeqID_7619
MFSTSEGWQVIFKLPRGLFSKKTRPKGYPTTLAVGSEIHDPDQKVSWLILNGLDLDRGSGFNLEEVCPRSDPSRTLYILRLARISPNPLFFPNQQGGDEAELHPGSSLDFLRPAHWRQNPNANGAKHWGKKGEVMDSILTGDRSDGSISASAHGDTPAPAEAPHGGGHGRPWIWHRVDHQAAGSNPNRVNDKQ

SEQ ID NO: 49399 - protein, 150 aa, Zea mays
  Coding DNA Sequence Number=SeqID_7620
MGKNNKRKREPTPPSEEFGDSEYSEEEFSSESEGSPAPIPLRESSDDSDDSQGLAAEVWTYIRAVERSGLEGSDESEYSSDEEDSDGGDDGEDDDDDDDNDDDDDDDDGGSGSGRGGGDGSRDSTKGDSSRDGTKGSSRGGGGGRGRASG

SEQ ID NO: 49400 - protein, 214 aa, Zea mays
  Coding DNA Sequence Number=SeqID_7621
MVADAWDTHSHEDVVERAVSPARSRTGETRVQTWGTHMCFGGNQRRHVASLQRPTPFARSRPTPAQQDRAHHDADLWDPPVSHPPMRVWPPIVWHVGPARQSPNAPVSLLGRAMANDPSEIRAGNCDHLPSCGRVTHLPIYPGCPRRYCLKPYCEAIAEKRLGEVRDPSSPQIVGIGRARSRDSPGGRPERSRPICEAVGHGIDRDLSGCSSVA

SEQ ID NO: 49401 - protein, 174 aa, Zea mays
  Coding DNA Sequence Number=SeqID_7622
MEEGYDRFLAKKIQLLICLRISFAELPGPLPLIFDFTNAQTLCQHTYLGQALVRFCYVYDRYNLIVIGPQQALGFTFNVIRHNEAWNFHALNFNRLIMWEADHSNITRLLLRARVTSLEEVPRFIVFCVSEGFKGFSWTIQCQPVAQVGFDLDLPQAEEENDPNEDNARWDECL

SEQ ID NO: 49402 - protein, 223 aa, Zea mays
  Coding DNA Sequence Number=SeqID_7623
MVEVERRGKGSLGIMSAIREVVPPGFGGEFTSMTMWVLYGREREGSRGRVRALGSGEAKFVVFRGRGRVRALGSGEAEFVVFRSRGRVRALGSGEAEFVVFRGRGRVRALGSGEAEFVVFRGRGRVRALGSGEAEFVVFRGRGRVRALGSGEAEFVVFRGRGRVRALGSGEAEFPMAPEAGLGCCQPLSVEWHSSRSGAGGAVFLSGRSVERQSDCGHFGSVD

SEQ ID NO: 49403 - protein, 113 aa, Zea mays
  Coding DNA Sequence Number=SeqID_7624
MANCGMWELEKQAAVKQHRFADQEKIPTLGEVHMQYTNTEHMYRLITISITDQNNIMILPTCLNTITMTRDKHQKPVRFAINRWFRARFRWFFTGFSQCPERDTMWSRAILDS

SEQ ID NO: 49404 - protein, 388 aa, Zea mays
  Coding DNA Sequence Number=SeqID_7625
  Gene Ontology: Mol. function=protein serine/threonine kinase activity; Cellular component=spindle pole body; Biological process =protein amino acid phosphorylation
  Homolog annotation: Hit_ID=Q84TC6; Match level="QueryCoverage=87%, HitCoverage=100%, E-value=1e-175, Identity=89%"; Hit description =Serine/threonine-protein kinase SAPK2
  Pfam annotation: Domain name=Pkinase; Domain location=53-309; Score =306.7; E_value=4.3e-89; Accession=PF00069.15; Description=Protein kinase domain
  Pfam annotation: Domain name=Pkinase_Tyr; Domain location=53-310; Score=8.2; E_value=5.7e-13; Accession=PF07714.7; Description=Protein tyrosine kinase
  Pfam module annotation: Pfam domain module=Pkinase::Pkinase_Tyr; Domain location=53-309::53-310
  Subcellular localization annotation: CTP_CleavageSite=47; ConfidenceScore=5.33e-01
MAHTIRQFRVPRGISKLNLRFSSRPATSDQCRRRAVRRGQGNKPVRKAAMERYEVIKDIGSGNFGVAKLVRDVRTKELFAVKFIERGMKIDENVQREIMNHRSLRHPNIVKFKEVVLTPTHLAIVMEYAAGGELFERICNAGRFSEDEARFFFQQLISGVSYCHSMQICHRDLKLENTLLDDSIAPRLKICDFGYSKSSVLHSQPKSTVGTPAYIAPEVLARKEYDGKVADVWSCGVTLYVMLVGAYPFEDPDEPKNFRKTLTRIISVQYAVPDFVRVSMECRHLLSRIFVAKPEQRITIPEIKNHPWFLKNLPIEMTDEYQMNLQLVDMNVPSQSLEEIMSIILEARKPGDGLKHAGQLPGLGSMELDDIDVDDIDVEDSGDFVCAL

SEQ ID NO: 49405 - protein, 445 aa, Zea mays
  Coding DNA Sequence Number=SeqID_7626
  Gene Ontology: Mol. function=nucleic acid binding; Biological process= metabolic process
  Homolog annotation: Hit_ID=Q656X7; Match level="QueryCoverage=94%, HitCoverage=85%, E-value=1e-139, Identity=57%"; Hit description =Putative calmodulin-binding protein
  Subcellular localization annotation: CTP_CleavageSite=83; ConfidenceScore=5.50e-01
MTLPTSPGAASAVDDDMPMPVRSPKLLRTNSSKKVAAASNLERALLSFKSWEATKPPAVPPSPVVRRIHGARPGRLALSSPTPATERDDGADDTAVLRSPLHDAAATRVQKMFKGHRTRRTLADCAIVIEELWWKLCDSASLDRTSISFFAATAGGGKQETAASRWVRAGKRIAKVGKGLSKDEKAQKLALRHWLEAIDPRHRYGHNLHLYYDMWFQSSSTEPFFYWLDIGGGREIHHPSCPRSKLNAQLVMYLGMAERAAYQVVVADGRLTYLHTGLPVHTTDDSKWIFVLSTTRSLYVGQKRKGQFQHSSFLAGGATSAAGRLVAKDGVLKAIWPYSGHYLPTEENFNEFIAFLRDNNVDLTDVKRCSVDDDECPLSKPAAGAVVAKWTSGAGARIGCVRDYPAELQSRALEQVNLSPRVQHTGAPPLKQQQGRQASHSDGSR

SEQ ID NO: 49406 - protein, 205 aa, Zea mays
  Coding DNA Sequence Number=SeqID_7627
  Homolog annotation: Hit_ID=Q6QP54; Match level="QueryCoverage=22%, HitCoverage=16%, E-value=5e-08, Identity=65%"; Hit description =Putative kinase
MALPVDVAGLRPRLGDVEAPPKPRSSLSSMAEAESEPLGRARRSGTAVGVVQAALSFCQAGQWSGDVTAVTSALPEGARQDKGVRSPLQMLLRLGRSVTVKLWHGAIISGYLPPHCECVCARAQQWPSHPVEHVAGVDGIAVLEAAIEEVVKPCVVALGHHQGHLLDVRHQGVAKEGLYNVERSDGDNNAKVKASPCLLRCPLLR

SEQ ID NO: 49407 - protein, 156 aa, Zea mays
  Coding DNA Sequence Number=SeqID_7628
  Gene Ontology: Mol. function=hydrolase activity
  Homolog annotation: Hit_ID=Q8S9P9; Match level="QueryCoverage=66%, HitCoverage=31%, E-value=1e-20, Identity=45%"; Hit description =Purple acid phosphatase-like
MCKWWRSLAPALLAAALAITVATLRPATEHADTKGQSPLRFGPGGAFKVALFVNLYYGEDTWTDWGPAQDAASWPPSSMPRTQDSGAQVGSEKGQRPAARGRGVPWATVFGNHDDMAFEWPPITELAHKAHDTFKKFSSQADSVPWPSIQDVMTLV

SEQ ID NO: 49408 - protein, 43 aa, Zea mays
  Coding DNA Sequence Number=SeqID_7629
MKDLQAMDRGATSVEEKVMSLQRFKVSIANAENSSSKTMNTTA

SEQ ID NO: 49409 - protein, 62 aa, Zea mays
  Coding DNA Sequence Number=SeqID_7630
MTDNLSVFAFFLAVVLKLLLPLSGPHFPVPPFLIADEKVTAPRFLETSNMFANEISVYPHEK

SEQ ID NO: 49410 - protein, 729 aa, Zea mays
  Coding DNA Sequence Number=SeqID_7631
  Gene Ontology: Mol. function=RNA-directed DNA polymerase activity; Cellular component=intracellular; Biological process=RNA-dependent DNA replication
  Homolog annotation: Hit_ID=UPI00004C1731; Match level="QueryCoverage =95%, HitCoverage=53%, E-value=0.0, Identity=79%"; Hit description =UPI00004C1731 related cluster
  Pfam annotation: Domain name=RnaseH; Domain location=309-436; Score =1.0; E_value=4.6e-05; Accession=PF00075.14; Description=RNase H
  Pfam annotation: Domain name=rve; Domain location=438-607; Score =98.6; E_value=1.8e-26; Accession=PF00665.16; Description=Integrase core domain
  Pfam module annotation: Pfam domain module=RnaseH::rve; Domain location=309-436::438-607
MKESDQLATFFITPFGMYCYVTMPFGLRNAGATYQRCMNHVFGEHIGRTVEAYIDDIVVKTRKASNLLSDLETTFKCLKAKGVKLNPEKCVFGVPRGMLLGFIVSERGIEANPEKIAAITNMGPIKDLKGVQRVMGCLAALSRFISRLGERGLPLYRLLRKTERFTWTPEAEEALGNVKALLTSAPILVPPATGEALLIYIAATTQVVSAAIVVERREEGHTLPVQRPIYFISELRHYFESHPVTVVSSFPLGEIIQCREASGSIAKWAVEIMGETISFAPRKAIKSQVLADFVAEWVDTQLPAALIQPELWTMFFDGSLMKTGAGVSLLFISPLGKHLRYVLHLHFPASNNVAEYEALVNGLRIAIELGVRRLDARGDSQLVIDQVMKNSHCRDTKMEAYCDEVRCLEDKFYGLELNHIARRCNETVDELAKIASGRTTVPLDVFSRDLHQPSIKTDDMPEPEKKAPRGYTHLLVAIDKFSKWIEVRPLNSIRSEQAVAFFTNIIHRFGVPNSIITDNGTQFTGRKFLDFCEDHHIRVDWAAVAHPMTNGQVERANGMILQGLKPRIYNDLNKSGRRWMNELPSVVWSLRTTPSRATGFTPFFLVYGAEAILPTDLEYRSPRTRAYDDRSNRTNREDSLDQLEEARDMALLHSARYQQSLRRYHARGVRSRDLQVGDLVLRLRQDARGRHKLTPPWEGPFIIAKILKPGTYKLANSQGEVYNNAWNIR

SEQ ID NO: 49411 - protein, 196 aa, Zea mays
  Coding DNA Sequence Number=SeqID_7632
  Gene Ontology: Mol. function=protein serine/threonine kinase activity; Cellular component=cytoplasm; Biological process=protein amino acid phosphorylation
  Homolog annotation: Hit_ID=Q8LR51; Match level="QueryCoverage=99%, HitCoverage=47%, E-value=1e-101, Identity=92%"; Hit description =Casein kinase I-like
  Pfam annotation: Domain name=Pkinase; Domain location=9-196; Score =18.7; E_value=1.1e-09; Accession=PF00069.15; Description=Protein kinase domain
  Pfam annotation: Domain name=Pkinase_Tyr; Domain location=9-196; Score=-133.7; E_value=0.00029; Accession=PF07714.7; Description =Protein tyrosine kinase
  Pfam module annotation: Pfam domain module=Pkinase::Pkinase_Tyr; Domain location=9-196::9-196
MEPRIGNRFRVGRKLGSGSFGEIYLGTNVQTNEEVAIKLENVKTKHPQLLYESKLYRILQGGTGIPNVKWFGVEGDYNVLVMDLLGPSLEDLFSCCNRKLSLKTVLMIADQMINRVEFVHSKSFLHRDIKPDNFLMGLGKRANQVYIIDFGLAKKYRDTSTHQHIPYRENKNLTGTARYASPSMAGPESWEQETEV

SEQ ID NO: 49412 - protein, 172 aa, Zea mays
  Coding DNA Sequence Number=SeqID_7633
  Homolog annotation: Hit_ID=Q656X7; Match level="QueryCoverage=79%, HitCoverage=26%, E-value=7e-20, Identity=53%"; Hit description =Putative calmodulin-binding protein
  Subcellular localization annotation: CTP_CleavageSite=55; ConfidenceScore=5.59e-01
PTRPRRWRRPATWSGRCSASSPGRPPSPPAVPPSPVVRRIHGARPGRLALSSPTPATERDDGADDTAVLRSPLHDAAATRVQKMFKGHRTRRTLADCAIVIEELWWKLCDSASLDSTSISFFSATAGGEQAGDAGVALGPHLTTRFSFPLQCLICMNVAGGAIPELCPTAGA

SEQ ID NO: 49413 - protein, 55 aa, Zea mays
  Coding DNA Sequence Number=SeqID_7634
MLNDASRNRPYHLAIDATVMDPTFRVIDIGFSAPKVGLDLAPAPKDDNAQPSKDE

SEQ ID NO: 49414 - protein, 71 aa, Zea mays
  Coding DNA Sequence Number=SeqID_7635
MSIHKSYMPIVFNTVISFTVGEVFNFGSLSYSVDQNGALHCVADVGTKDQRSPATTLTKKNPSPRPRATPA

SEQ ID NO: 49415 - protein, 239 aa, Zea mays
  Coding DNA Sequence Number=SeqID_7636
MAVGVELRRCGGASSLGRDICVRLGVLKPLAIVAGEEEARSEAYDDDQVEYLANAAINLALSPPTPTPTPTASGAPRAARPSMELTNTKETKAWEGLAIGAVTLARTFSTGSHRFCRSGSERRNHSRSGLLRRAFSMRRHPAGLLGAGDGYWRIHDMDGDSDRGGGGGTVVVEEHGEGEEGDEDEAAAAEEEVQKNKKTEQRDEDAAAGKGKEEAAAERRDKKKRRGGIFKACKKLFRL

SEQ ID NO: 49416 - protein, 191 aa, Zea mays
  Coding DNA Sequence Number=SeqID_7637
  Homolog annotation: Hit_ID=Q8SA97; Match level="QueryCoverage=33%, HitCoverage=10%, E-value=7e-07, Identity=52%"; Hit description =Ornithine carbamoyltransferase
MGQVCEPISRLTGCDQGQAREAIVWAQIRLDRIGRMQRTRCAPRRLTDPRISRSWFRRWGGPVMSAFRDRGVPGPTSEMSPRAPAQMGRRETEREGGKRQPERERWKSRGLRIRPAPRLGDVEARPRSRSSLSSEAEVESEPLGRARRRPSTEVRAESEPWGRAKRSSSSSGLSPSPSPGSGGAEFVVFRG

SEQ ID NO: 49417 - protein, 330 aa, Zea mays
  Coding DNA Sequence Number=SeqID_7638
  Gene Ontology: Mol. function=oxidoreductase activity; Cellular component=vacuole; Biological process=response to oxidative stress
  Homolog annotation: Hit_ID=Q5U1G9; Match level="QueryCoverage=84%, HitCoverage=85%, E-value=1e-110, Identity=70%"; Hit description =Class III peroxidase 124 precursor
  Pfam annotation: Domain name=peroxidase; Domain location=63-290; Score=364.0; E_value=2.3e-106; Accession=PF00141.13; Description =Peroxidase
MEDASSRVSSLLGLLLAAHCALLLLLRLAGAAHGHGYAPAPGGGVALSSAFYDESCPSAYDVVRRVIQDARVSDPRIPASLIRLHFHDCFVNGCDGSLLLDDDLPAIQSEKHVPANDKSARGFEVVDGIKSALEEACPGIVSCADILALAAEISVELAGGPRWRVLLGRRDGTTTNIEGANNLPSPFDPLDKLQEKFRNFNLDDTDLVALQGAHTFGKVQCQFTQENCTAGQPEETLENLDQVTPNVFDNKYYGNLLHGAAQLPSDQVMLSADPVAEMTTAPIVHRFAGNQEDFFRNFAASMVKMGNISPLTRNDGEIRKFCRRINSEGY

SEQ ID NO: 49418 - protein, 560 aa, Zea mays
  Coding DNA Sequence Number=SeqID_7639
  Homolog annotation: Hit_ID=Q6QP54; Match level="QueryCoverage=26%, HitCoverage=46%, E-value=5e-37, Identity=76%"; Hit description =Putative kinase
  Pfam annotation: Domain name=PB1; Domain location=62-188; Score=30.6; E_value=5.5e-06; Accession=PF00564.15; Description=PB1 domain
MAEIEDAMGAPPMVTTTESEGTTTDEDVHLSPTCICGGAGGAGGGGRIKILCSFGGRIVPRPHDGVLKYVGGETRVLAVPRSICFRGGCCSLSPCAVPRCVTCRRLALSRPRCLSLPCAELKKKVEDMFKTEVAAIKYQLLSLAEELDVLVSVTCDEDLVHMLDEYDRLEAKRSPTTSPRFRVYVFTPQATAPHPSAAAPTVPSSTRYAGLSRLHPHHHHHQQHRQFQPERYVATVPASPDGSPPFSAQPHGAVSAGNSPRANALGVGFGMQRVRSSPNLSTLDAAARRLHQHGVDGSISGYVSGSPRHAGAGPMLLQNNFHHYQHQYPTAPVPVPVPVPVPHHGGRYDARGYVRVGNYLAPMVPAARPLSRGGPAPHSDMVTPKKAQTWAKSRKTANSAPPDPGLGLALSPGRRRTPLCPTQGSDLGSAPEDDELRFARPRARTWAQPQRTTNSASPDPGLELGLSPRRRRTPLRPTQGSDSALASADGLRLARPRGSDSTSATEDRLHLDFGGASTSPNLGRRPATSTGGAIITLPQADSSHREQDRRPIWLAPPDRQ

SEQ ID NO: 49419 - protein, 164 aa, Zea mays
  Coding DNA Sequence Number=SeqID_7640
MAPPRRRASRPRCRTQGTATQASEQVALPYAGARARAQPLLLQAKPDIAAPASGRAAVAAPPLRHEGVAPLLLQRCADEQTRPHRDRAQAIAVAYEAHAIAAQASSHAPAAVPRQARKPSHCATSTNTQAPTATGDTTSKIRRLARAPPPRRLAGAPAGAAASE

SEQ ID NO: 49420 - protein, 137 aa, Zea mays
  Coding DNA Sequence Number=SeqID_7641
MAVVARAGLAMPPAVVPAAAAAAAAEEEMRWRQLDSGVSAVSFGFVATAILVSMFLAMAILEHFLRPPAHTLGHAPPRGIRRRLRFFLGRGGERGDAPGSDLEAARKLQGHAPLEVRLRHTVPARSPRLPPIHGATL

SEQ ID NO: 49421 - protein, 127 aa, Zea mays
  Coding DNA Sequence Number=SeqID_7642
MAVAGGQEQRSRRQPGSHPIRGQQENPLSRTGGVSGRRSGQRFAFAEITAPKKGPGKGDTPKRILPHEGTRLRASLLIRGSKAGPPKGSTAASDRVGPTPTTGQRFEGRPTEGFHGRLRLPGLRAHY

SEQ ID NO: 49422 - protein, 543 aa, Zea mays
  Coding DNA Sequence Number=SeqID_7643
  Gene Ontology: Mol. function=translation initiation factor activity; Cellular component=cytosolic small ribosomal subunit (sensu Eukaryota); Biological process=translation
  Homolog annotation: Hit_ID=Q2QWZ1; Match level="QueryCoverage=57%, HitCoverage=67%, E-value=1e-169, Identity=98%"; Hit description =Eukaryotic translation initiation factor 2 gamma subunit, putative, expressed
  Pfam annotation: Domain name=GTP_EFTU; Domain location=1-96; Score= -47.0; E_value=0.00077; Accession=PF00009.17; Description=Elongation factor Tu GTP binding domain
  Pfam annotation: Domain name=GTP_EFTU_D2; Domain location=125-208; Score=46.3; E_value=1e-10; Accession=PF03144.15; Description =Elongation factor Tu domain 2
  Pfam annotation: Domain name=eIF2_C; Domain location=217-308; Score =204.6; E_value=2.4e-58; Accession=PF09173.1; Description=Initiation factor eIF2 gamma, C terminal
  Pfam module annotation: Pfam domain module=GTP_EFTU::GTP_EFTU _D2::eIF2_C; Domain location=1-96::125-208::217-308
MDGALLLIAANESCPQPQTSEHLAAVEIMRLQHIIILQNKIDLIQESAAMNQHEAIQKFIQGTIAEGAPVVPISAQLKYNIDVICEYLVKKIPIPERNFTSPPNMIVIRSFDVNKPGSEVDEIRGGVAGGSILRGVLRVNQKIEVRPGIVMKDETGNIKCTPIYSRIVSLYAEQNELQFAVPGGLIGVGTTMDPTLTRADRLVGQVLGEVGSLPDVYVELEINFFLLRRLLGVRTKGTEKAGKVSKLTKGEILMLNIGSMSTGARVLAVKNDLAKLQLTAPVCTSRGEKVALSRRVEKHWRLIGWGQIQAGNKGAAQFPTSSELVITQFRLAATDGATPPPSATGRPPTRQRLTLASALRRAGQNSKLRLNKTFYKLQCRPKISFPQNNESKNPVATVDHDGRGRGESGDCEESDDALRRRLGAGRKLHLLRRTAPPARPRPRPRAAGGVSARLTSSRFPLPVGTRAPAALALLVRLGVACCRAAAPHQLHSGPARPVGDEDEEPPAAAAGPRGLGVPGRGPAAPGTGLVLGRVSPPHATVTC

SEQ ID NO: 49423 - protein, 724 aa, Zea mays
  Coding DNA Sequence Number=SeqID_7644
  Gene Ontology: Mol. function=protein-tyrosine kinase activity; Cellular component=integral to membrane; Biological process=protein amino acid phosphorylation
  Homolog annotation: Hit_ID=Q8H4T2; Match level="QueryCoverage=91%, HitCoverage=86%, E-value=0.0, Identity=58%"; Hit description =Putative leucine-rich repeat transmembrane protein kinase 1
  Pfam annotation: Domain name=LRRNT_2; Domain location=34-74; Score =24.9; E_value=0.00028; Accession=PF08263.3; Description=Leucine rich repeat N-terminal domain
  Pfam annotation: Domain name=LRR_1; Domain location=101-123; Score =10.4; E_value=3.3; Accession=PF00560.23; Description=Leucine Rich Repeat
  Pfam annotation: Domain name=LRR_1; Domain location=125-147; Score =9.9; E_value=4; Accession=PF00560.23; Description=Leucine Rich Repeat
  Pfam annotation: Domain name=LRR_1; Domain location=149-170; Score =10.1; E_value=3.7; Accession=PF00560.23; Description=Leucine Rich Repeat
  Pfam annotation: Domain name=LRR_1; Domain location=171-193; Score =4.7; E_value=38; Accession=PF00560.23; Description=Leucine Rich Repeat
  Pfam annotation: Domain name=LRR_1; Domain location=77-99; Score=4.8; E_value=37; Accession=PF00560.23; Description=Leucine Rich Repeat
  Pfam annotation: Domain name=Pkinase; Domain location=414-685; Score =23.8; E_value=5.6e-10; Accession=PF00069.15; Description=Protein kinase domain
  Pfam annotation: Domain name=Pkinase_Tyr; Domain location=414-685; Score=19.2; E_value=1.2e-13; Accession=PF07714.7; Description =Protein tyrosine kinase
  Pfam module annotation: Pfam domain module=LRRNT_2::LRR_1::LRR_1::LRR_ 1::LRR_1::LRR_1::Pkinase::Pkinase_Tyr; Domain location=34-74::101 -123::125-147::149-170::171-193::77-99::414-685::414-685
MGNPGRSRQLSALVASAAILLSLSALPICRPYTYEQDVFAINGLYTALGAPQLPNWTSNGGDPCNEGWQGVSCVASNITSIILSGANLGGQLGNTLGNFTSLITFFLSANQLSGSLPSTLSSLTLLTSMSLNSNHLTGAIPDVFSALTGLANLHIQNNQISGTLNVLQDLPFQDLNVENNLFSGPVPVKLLNLPNFKKDGNPFNTSIAPSAQPPIAPTPLPSIPPSSGHVPSKEPAHSSSVPGGSTSGSGKHTTLKLVGYILIGVVLAVVLVLIAMYCLSKYKEKRSRDDIYMKNKIGRVPQKLGEPKIKEPPLKLKNDAEKETSNVVYDPSPRDGQNLDSSPTEHVIDMEKADNFVEDQLHPPQPMALRTEKVTVNPSVRTRRGRVPSVEKVESTTTVKSFSIASLQQYTNSFSEENIIRDSRFGKVYLAKLPDGELLEILKIDSSNSKVPVDAFLELVVRISELRHPNILGLVGYCAEFEQRLLVYEYCSKMTLHDELRHVDDSSKPLSWNARLQVASEAAKALQHLHDGCQPPVVHQNFEPSVVLLNSTLVVHISECGLASLASKSVSQLSGHTLFHYEAPEVHESGSVSDRSDVYSFGVVMLELLTGRKPYDSSYPRAEQHLVRWATSQLYDIDAITKMVDPSIRGQCSDKALSRFADIISRCIQHEPEFRPPMSEVVQDLTRMMPLTTIDAVVGYFGQCKMGGTQWQDAETAPRFVHCQ

SEQ ID NO: 49424 - protein, 350 aa, Zea mays
  Coding DNA Sequence Number=SeqID_7645
  Homolog annotation: Hit_ID=Q7XIK6; Match level="QueryCoverage=14%, HitCoverage=12%, E-value=8e-20, Identity=86%"; Hit description =Putative lysine ketoglutarate reductase trans-splicing related 1
  Pfam annotation: Domain name=DUF707; Domain location=22-257; Score= -101.9; E_value=0.038; Accession=PF05212.3; Description=Protein of unknown function (DUF707)
MADLSQVGDAQVADLGRRGGGVWSRPGGAWRRSGRVGDEGGRRARTQRGGRVVRIRAPRSGRRDLGAAGAGALAMRSVGRGLLEELAGECRNGTAPRPIVAHDEVGRADEHHGGGEPEQDSERDEVEEEEHRLGGGTEGAPLGREGIASPGANDLIHGWGIDYKFGYCAQGDRTKNIGVVDSEFIVHRGVQTLGGSTITKAHLLDGVGDVRPGEGQGEGENGPNGGELEDGAEGLIVIDSRALGEAPKDPMGLVAVEGAIQDEVPGPHVVRVEARAVAFEPGEQPGWKNRIELKERVEINGWGGANKRKHIFVENHMTRDEYEVGDEVKTAIPLVVRGVTEEEATSGAQC

SEQ ID NO: 49425 - protein, 125 aa, Zea mays
  Coding DNA Sequence Number=SeqID_7646
  Gene Ontology: Mol. function=translation initiation factor activity; Cellular component=cytosolic small ribosomal subunit (sensu Eukaryota); Biological process=translation
  Homolog annotation: Hit_ID=O49736; Match level="QueryCoverage=58%, HitCoverage=15%, E-value=9e-30, Identity=79%"; Hit description =Translation initiation factor eIF-2 gamma chain-like protein
MTWSDSSFVGLFASKMRHLAEAGRWIKVLEVSLVKNRSCLEWGTIGHVAHGKSTVVKAISGVQTVRFKNELERNITIKLGYANAKIYKCEDDRCPRPMCYKNMGEGTTRFNVKADGDEHVVEAAN

SEQ ID NO: 49426 - protein, 134 aa, Zea mays
  Coding DNA Sequence Number=SeqID_7647
MDQLYGLRRKWAAVYRNSFTADMTTTQRSEALVAVLVVLTAAVACSAARPVPAQQQQQAGEDVKRPDTLHEGTVLIPGMGRYEIGSHYIPDIGGLDHSIPAATHGQFLPGADDTWVPNPGFEVPNPFMPGAATP

SEQ ID NO: 49427 - protein, 136 aa, Zea mays
  Coding DNA Sequence Number=SeqID_7648
MGKGNKRKREPTPPSEDFGDSEYSEEEFSSESEGSPAPVSPPASSNDSDDSQGIAAEVWTYIRAVERSGLEGLDESEYSSDEEDSPEEDGEGDDDGGDDGDGGGRGGNGDGKGGDGGSSMGSNGGGSSKGSNKASG

SEQ ID NO: 49428 - protein, 141 aa, Zea mays
  Coding DNA Sequence Number=SeqID_7649
MGKGNKRKREPIPPSEDFGDSEYSEEEFSSESEGSPAPVSPPASFDDSDDSQGIAAEVWTYIRAVERSGLEGSDESEYSSDEEDPPEDDGEGDNDDDGGDGGDDGDGGGRGGNGDGKGGDGGSSRGSNGGGSSKGSNKASG

SEQ ID NO: 49429 - protein, 149 aa, Zea mays
  Coding DNA Sequence Number=SeqID_7650
MRQRLSLYASAPSKIIRHHVGLGKSTVGTSCSTDFADSSGFTFLADREAMILTRCVHQFLETFAIIFGAAAWHVSVVRALSLMENGPYRILPISGLGRYLKKVGPIMDGSGWQVLELGSCPLREVDGEELDDEEVVFNSRHTTCEALLF

SEQ ID NO: 49430 - protein, 79 aa, Zea mays
  Coding DNA Sequence Number=SeqID_7651
  Gene Ontology: Biological process=regulation of transcription
  Homolog annotation: Hit_ID=Q75HX5; Match level="QueryCoverage=83%, HitCoverage=13%, E-value=6e-19, Identity=70%"; Hit description =Putative tubby protein
  Subcellular localization annotation: CTP_CleavageSite=56; ConfidenceScore=5.34e-01
MDADNISRSSSTYIGKLRSNFLGTKFMISNMQPPYNGAVVPHAGRTNRRFDSRNVSLREVSPKVPTGLQLGDASFYILE

SEQ ID NO: 49431 - protein, 130 aa, Zea mays
  Coding DNA Sequence Number=SeqID_7652
  Subcellular localization annotation: CTP_CleavageSite=40; ConfidenceScore=5.08e-01
MPSFPAAPKSRHGRGLPITGPSHFACPRQRRCPALDRDLRSQVEIPVRHCLRVLCVSAGGMQTHRRGADEVVVMEDDDGRQMWCPTGGDIGGGASSRSWTDASIPCSSIGSHAYTPSVFSPRTVSTPFLW

SEQ ID NO: 49432 - protein, 574 aa, Zea mays
  Coding DNA Sequence Number=SeqID_7653
  Gene Ontology: Mol. function=enzyme inhibitor activity; Cellular component=cell wall; Biological process=cell wall modification
  Homolog annotation: Hit_ID=Q6L4M3; Match level="QueryCoverage=93%, HitCoverage=91%, E-value=0.0, Identity=72%"; Hit description =Putative pectin esterase
  Pfam annotation: Domain name=PMEI; Domain location=28-184; Score =83.3; E_value=7.4e-22; Accession=PF04043.6; Description=Plant invertasepectin methylesterase inhibitor
  Pfam annotation: Domain name=Pectinesterase; Domain location=257-558; Score=646.7; E_value=1.9e-191; Accession=PF01095.10; Description =Pectinesterase
  Pfam module annotation: Pfam domain module=PMEI::Pectinesterase; Domain location=28-184::257-558
  Subcellular localization annotation: CTP_CleavageSite=69; ConfidenceScore=5.67e-01
MALHSAAAAAALSALLMLSFSGLTLSDTTPSTPVSPSAACNATTDPTFCRSVLPPRGKGDLYKYGRFSVAESLAGARMFAALVDRYLARHRHLSSSAIGALRDCQLMADLNVDFLTAAGATIKTTDTLLDPQADDVHTLLSAILTNQQTCFDGLQAASGSWSDRGGLDAPIANGTKLYSLSLSLFTRAWVPTAKPAHSHKGGSNDPHHGHGHGHGDKNKKHPAASAARRGLFDVTDDEMVRRMAIEGPEATVEVNTVVTVDQSGAGNFTTIGDAVAAAPRNLNGSTGYYVVYVLAGVYEENVVVPKHSKYIMLVGDGIGQTVVTGNRSVVDGWTTFQSATFAVVGQGFVAVNMTFRNTAGPAKHQAVAFRSGADLSAYYGCSFEAYQDTLYTHSLRQFYRGCDIYGTVDYVFGNAAVVFQGCTFYSRLPMQGQCNTVTAQGRSDPNQNTGTSIQGCSLVAAPELAANTAFTTLSYLGRPWKNFSRTVVMESYVGALVDPSGWMPWSGDFALSTLYYAEYNNTGPGADTSRRVAWPGFHVLGDGTDAGNFTVSSMVLGENWLPQTGVPFTSGLIP

SEQ ID NO: 49433 - protein, 85 aa, Zea mays
  Coding DNA Sequence Number=SeqID_7654
MVRTIQTTRVNTNYIPLPQHVLVYPVVVEEVPVDLHHFPVENGVILEDSSEENSGDDPDDSGDDEDDEEEEEEEEENNNEEANDE

SEQ ID NO: 49434 - protein, 72 aa, Zea mays
  Coding DNA Sequence Number=SeqID_7655
MARAHMSVANVGGKSLVILTARSHRIGRAEATETRILGAQWGPPGSGRLGLVYIIGFGNMVKIDMDEMDYMI

SEQ ID NO: 49435 - protein, 84 aa, Zea mays
  Coding DNA Sequence Number=SeqID_7656
MAITGEGRGRRKNRRRGGFWQRPSALDLAARNRAYPFAAAVLHIRSSVLLKLTRRPKRMCSVSGMSYTKAPAFLRFNASSPEPI

SEQ ID NO: 49436 - protein, 181 aa, Zea mays
  Coding DNA Sequence Number=SeqID_7657
MSSPELRESSARMLEVTGGRWPRNVPIPWATSEDMFTSRLAREMKIFPYGRNIADVVSAVMDKDRQDAKRKRRAFTRVRDPSREVKKARGIAKSVALGSSKPSPVAKPAVPGPSKPSSGVKANSLYQARSRSGFDSLLSIPIQGDQETNHGDQVDSFCLPISSASWSEHHAAHASAGYACI

SEQ ID NO: 49437 - protein, 277 aa, Zea mays
  Coding DNA Sequence Number=SeqID_7658
  Gene Ontology: Cellular component=extracellular region; Biological process=cellulose and pectin-containing cell wall organization and biogenesis
  Homolog annotation: Hit_ID=Q6QFB1; Match level="QueryCoverage=84%, HitCoverage=87%, E-value=4e-79, Identity=62%"; Hit description =Expansin EXPA2
  Pfam annotation: Domain name=DPBB_1; Domain location=77-161; Score =109.4; E_value=1e-29; Accession=PF03330.8; Description=Rare lipoprotein A (RlpA)-like double
  Pfam annotation: Domain name=Pollen_allerg_1; Domain location=173 -262; Score=72.8; E_value=1.1e-18; Accession=PF01357.11; Description =Pollen allergen
  Pfam module annotation: Pfam domain module=DPBB_1::Pollen_allerg_1; Domain location=77-161::173-262
MDTSASSSSSPPPSSFAAAVAALLLLLLLPALSSGGDDWQQWQDAHATFYGDETGAETMQGACGYGDLFQQGYGLETTALSVALFNEGWSCGGCYEVRCQGSAYCASGSAVTVTATNLCPANYSKPSGNWCNPPQRHFDLSKPMFLRLVTDFRVGIVPVRYRRVACGGRRGGVRFEMRGNRWWVAVLVFNVAGAGEVRAVAARRDDDDSGGARQGQYYWADMARSWGQVWTTGDGSWSVGQGLSFRVVAGDGRALVIDGAVPPGWAFGQSFEGKGQF

SEQ ID NO: 49438 - protein, 158 aa, Zea mays
  Coding DNA Sequence Number=SeqID_7659
MGKNKKDGGSSHHSGDKRKREPSPPSEDFGDSEYSEEEFSSESEGSPVYASPPVSSNDSDDSQGIAAEVWTYIRAVERSVLKASDESEVFSDEENSSDSSEEGSGGDDDEEGDSGDGGDGGDDGDDDGKGDGGDGGKGDDNGKGSGDSSRASGKAPLA

SEQ ID NO: 49439 - protein, 226 aa, Zea mays
  Coding DNA Sequence Number=SeqID_7660
  Homolog annotation: Hit_ID=Q6YXT7; Match level="QueryCoverage=19%, HitCoverage=8%, E-value=2e-13, Identity=77%"; Hit description =Endoglucanase 19 precursor
MCWLGAVVGGPDARDGFVDDRDSYGQTEPATYINAPLVGVLAYFAGTTNVGAPEQKAWSSSPVSSAGGDSACAQHLEEEFEVEVEGELVPPSETSQTEVVTEGPPEEGQRRLRHSDCSTTRQSESDRQSGLDKGATANSAPPDPRARTRAKTRKTANSAPPDPRARTRAETRKTANSAPPDPRARTRAKTRKTANSAPPDPRARTRAETRKTTNYRSARPQGSDSG

SEQ ID NO: 49440 - protein, 48 aa, Zea mays
  Coding DNA Sequence Number=SeqID_7661
MTIELSGAVQAVLVNMTRLCSSLPVRMVDRLPGLPGAVQSPPRVVQQV

SEQ ID NO: 49441 - protein, 195 aa, Zea mays
  Coding DNA Sequence Number=SeqID_7662
  Gene Ontology: Mol. function=transcription regulator activity; Cellular component=nucleus; Biological process=regulation of transcription
  Homolog annotation: Hit_ID=Q10G91; Match level="QueryCoverage=85%, HitCoverage=31%, E-value=2e-27, Identity=47%"; Hit description=Helix- loop-helix DNA-binding domain containing protein, expressed
METVTQRGRKDNKDSIVSLRWCSEEDDLIELLWCNSHAIMQSQRHWKVLPMLEKAAVVAAPLAPASVPQEDEGGLWFPFTLADSLDKDIFSEFFCEAPTPADAAPAASSGGTGTEAGDKSRGVDVPAAEDDRRGGSGACAMSAGDPCDLILPPKSTPASCSRQHTMMSLANGGDNAGGDLPGLVRAGWRPARRRC

SEQ ID NO: 49442 - protein, 124 aa, Zea mays
  Coding DNA Sequence Number=SeqID_7663
MPAFLLFIYTSDKDAQAEAPRSANCNGSASGPPWCPAVPGEPRRAVVGGADERTEPSPPSMTATLTAAHGGRSVELGKRATDARESSVDASESSVDCCCGREHGQHGAIARTAAHVAAREEKVP

SEQ ID NO: 49443 - protein, 363 aa, Zea mays
  Coding DNA Sequence Number=SeqID_7664
  Gene Ontology: Mol. function=RNA-directed DNA polymerase activity; Cellular component=intracellular; Biological process=RNA-dependent DNA replication
  Homolog annotation: Hit_ID=UPI00004C1732; Match level="QueryCoverage =96%, HitCoverage=24%, E-value=0.0, Identity=88%"; Hit description =UPI00004C1732 related cluster
MPDIPRDVAERSLDIRAGSRPVKQPLRRFDEEKRRAIGEEIHKLMAAGFIKEVFHPEWLANPVLVRKKGGKWRMCVDYTGMQGATYQRCMNHVFGEHIGRTIEAYDDDIVVKTRKASDLLSDLEVTFRCLKAKGVKLNPEKCVFGVPRGMLLGFIVSERGIEANPEKIAAITSMGPIKDLKGVQRVMGCLAALSRFISRLGERGLPLYRLLRKAECFTGTPKAKEALGNLKALLTNAPILVPPAAGEALLVYVAVTTQVVSAAIVVERQEEGHALPVQRPFYFISEVLSETKIRYPQVQKLLYAVILTRWKLRHYFESHPVTVVSSFPLGEIIQCREASDRIAKWAVEIMGETCGGTVRIIPT

SEQ ID NO: 49444 - protein, 40 aa, Zea mays
  Coding DNA Sequence Number=SeqID_7665
MEKGSAPAMALALAMLLACSSIAAVTAQETERIEDNQNAG

SEQ ID NO: 49445 - protein, 220 aa, Zea mays
  Coding DNA Sequence Number=SeqID_7666
MQARGTRVARARVQARARPRAGDQGPGPGAGHDRWGARRGRSRRGTAGEQGLTVGAGSAGRGHAGRGRAAGAGRGRAGGRGRGAGGGGLTGEGGSPGRGAGHGRGAARREARRARWEVAEGAARWGREGAGLGRGAAQPRGLAGRETGRGSPGAAEPPPGRGTGRGARGRGGRGRGRRRARGQEGRAGKKKGRGWRERKGKGREKLTSGDPNSGDLDSKP

SEQ ID NO: 49446 - protein, 88 aa, Zea mays
  Coding DNA Sequence Number=SeqID_7667
MATVIDRGSQPHRVLGGWSHNLFGAPRPWSQSVQAGIGHRCSGFLADGGGAPLFLPQSMDRQLHRLIAGLNEAESEGANRRMCTSGSD

SEQ ID NO: 49447 - protein, 73 aa, Zea mays
  Coding DNA Sequence Number=SeqID_7668
  Subcellular localization annotation: CTP_CleavageSite=16; ConfidenceScore=5.16e-01
MACPPCFSSVASLPISAAPSSVVPGSSLVLAWLRPLALDHGTLINRVMPKISQVDPKHGLIRKIKLMDQLEDG

SEQ ID NO: 49448 - protein, 149 aa, Zea mays
  Coding DNA Sequence Number=SeqID_7669
MRQRWSFAYGSDEGPYHGRTVMNDSDMGGGARTRQASHTQGWSDAVRDRSHACRTDCAEDPARRTPSATSTTAERVAPTAPRAELATLATTRRPRYRAERQPRRGRRRKEDGCELTTVTNNDSGKASLDADEDGGARQRCRAGWEGRFG

SEQ ID NO: 49449 - protein, 386 aa, Zea mays
  Coding DNA Sequence Number=SeqID_7670
  Gene Ontology: Mol. function=sequence-specific DNA binding; Cellular component=nucleus; Biological process=regulation of transcription, DNA-dependent
  Homolog annotation: Hit_ID=Q6VBA4; Match level="QueryCoverage=99%, HitCoverage=100%, E-value=1e-76, Identity=46%"; Hit description=Heat shock factor RHSF13
  Pfam annotation: Domain name=HSF_DNA-bind; Domain location=32-246; Score=105.1; E_value=2e-28; Accession=PF00447.8; Description=HSF -type DNA-binding
MDGLHTDLALGLLGCGGVGVGSSGRGEQLQTAPFVAKTYQMVCDPRTDALVRWGSENNSFVVVDPAGFSRLLLPCFFKHRNFSSFVRQLNTYVSAPVSEARLPQPWILRSLTASHAVLYTYLEPWSSGCMQGFRKVHPDRWEFAHESFLRGQTHLLPRIVRRKKRGEGACTSSGGDAQAQYAAAAAGCCISMGGEDHRTEGEAEAAVLEEVQRLRQEQTAIGEELAQMSRRLQATERRPDQLMSFLARLAEDPDGVTRHLVEQAAEKKRRRMMQLASQPVRRLPPPPPPPPVLHHPLLALGGAAAAAAKGLDGGCQWAEQKKPSVVLTAAFDHPAASYCGAQHAVPNLGGGNGGGGINGMGLTADETAVETTTTPFPFCLLGQGFF

SEQ ID NO: 49450 - protein, 113 aa, Zea mays
  Coding DNA Sequence Number=SeqID_7671
MDAGPDAAVPCIKVATPLPLRFLHGGTFKILAVVRASLAAVQLLAAAAARDLDHGVTVAAVDPRDGVGDHGAYHHQQQTRQKLLKSLTFVFSLCGLENDEPYWEEKEDTIELI

SEQ ID NO: 49451 - protein, 125 aa, Zea mays
  Coding DNA Sequence Number=SeqID_7672
MSGGSAKREMETATSHGKAPSKEFGAKGREESPPRVKSHRSGDKKKNVTEPPKAILSIEKPFYKNRISRRVIKFKEGPYQRGLATERGRLRLAGDRERGELVLRRLWLKLGLGIEATRPSTSLMW

SEQ ID NO: 49452 - protein, 735 aa, Zea mays
  Coding DNA Sequence Number=SeqID_7673
  Gene Ontology: Mol. function=binding; Cellular component=clathrin coat of trans-Golgi network vesicle; Biological process=protein transport
  Homolog annotation: Hit_ID=Q5ZEA1; Match level="QueryCoverage=97%, HitCoverage=86%, E-value=0.0, Identity=82%"; Hit description=Beta adaptin-like
  Pfam annotation: Domain name=Adaptin_N; Domain location=26-545; Score= 231.4; E_value=1.9e-66; Accession=PF01602.10; Description=Adaptin N terminal region
  Pfam annotation: Domain name=HEAT; Domain location=131-167; Score =14.9; E_value=0.3; Accession=PF02985.12; Description=HEAT repeat
  Pfam annotation: Domain name=HEAT; Domain location=248-283; Score =8.3; E_value=4.1; Accession=PF02985.12; Description=HEAT repeat
  Pfam module annotation: Pfam domain module=Adaptin_N::HEAT::HEAT; Domain location=26-545::131-167::248-283
  Subcellular localization annotation: CTP_CleavageSite=6; ConfidenceScore=5.07e-01
MAPTVPSAAKSASPSQPSGKSEVADLKQQLRQLAGSRAPDADDQRRDVFKRVISCMTAGIDVSAAFGEMVLCSATSDVVTKKMCYLYVGSHARAHPDLALLTINFLQRDCRDQDPTIRGLALRSLCSLRVPNLVEYLVTPLTTGLKDPSAYVRTIAAVGAAKLYHISATACIDADLPASLKALMLSDPDAQEIWTLEAANSEAAAREIETLYSKPVVFYLLNKIKEFSEWAQCIVLELASKFLPSDNNEIFDIMNLLEDRLQHANGAVVLATIKVFLHLTMSMTDVHQQVYERIKAPLLTLVGAGSPEQSYSVLCHLHLLVMRAPMLFSSDYKSFYCQFSDPSYVKKLKLEMLTAIANESNTYEIVTELCEYAGNVDVPIARESIRAVGKIALQQYDVNAIVDRLLQFLEMDKDYVTAETLVLVKDLLRKYPQWSHDCIAVVGNISSKNIQEPKGKAALIWMLGEYSQDMHDAPYILESLVENWDEEHSPEVRLHLLTAVMKCFFKRPPETQKALGDTLAAGLSDTHQDVHDRALFYYRLLQYSPNVAERVVNPPKQAVSVFADTQSSEIKDRIFDEFNSLSVVYQKPSYMFTDKEHRGPFEYSEDLTGLTEDPENVISAQRYQENDNDLLLSTSDKEDNGTRASNGSSTSTYNAPSDLISPSLISSQAPAETSLVNTGGTYSSQSNFSLDDLLGLSVTEAPALPQPTLALNSKPVLDPGTFQRKWGQLALALSQ

SEQ ID NO: 49453 - protein, 116 aa, Zea mays
  Coding DNA Sequence Number=SeqID_7674
KEKSAKKFQHVIPAYIEQLAEMFHGIVVDGSSSCIPRDVHRPSQEVYEEQEGEDGYGEEFLNSNLAVESGADKELDEYFVATKLFKDEYNKTIFNRFDTTTQRMKWLQRFCKEYCG

SEQ ID NO: 49454 - protein, 315 aa, Zea mays
  Coding DNA Sequence Number=SeqID_7675
  Gene Ontology: Mol. function=potassium ion transporter activity; Cellular component=integral to membrane; Biological process =potassium ion transport
  Homolog annotation: Hit_ID=Q69RI8; Match level="QueryCoverage=93%, HitCoverage=34%, E-value=1e-125, Identity=77%"; Hit description =Probable potassium transporter 14
  Pfam annotation: Domain name=K_trans; Domain location=1-315; Score= -24.5; E_value=4e-20; Accession=PF02705.7; Description=K+ potassium transporter
MAEKVPSVELERSLKIKERLETSSMLKKLLLMLVLFGTSMVIADGVVTSAMSVMSAVNGLKVGIASVNEGEVVMITVAFLIVLFSLQRFGTSKVGLAVGPALFVWFCCLAGIGMYNLRVYGPEVLQAFNPVYIYYYFERNPTEAWMSLGGCLLCATGSEAMFADLCYFSVKSVQLTFVFLVLPCLLLGYLGQAAFLMENLDKSQQVFFLSIPSQAFWPVVFIATLAALIASRAMTTAIFSTIKQATALGCFPRLKIIHTSRKFMGQIYIPVMNWFLLVSCLAFVAVFGSINEIGNAYEKGNQGGEYVKDVTKEQS

SEQ ID NO: 49455 - protein, 90 aa, Zea mays
  Coding DNA Sequence Number=SeqID_7676
MRNASSMPVAAAAVRVMTNAMLPMITRIHAMETVVYFSKEEFVAFMERIAGTLQLAKLHNKRPSMLSNDDLMRLLSLFIKRRAAELPCHI

SEQ ID NO: 49456 - protein, 367 aa, Zea mays
  Coding DNA Sequence Number=SeqID_7677
  Gene Ontology: Mol. function=potassium ion transporter activity; Cellular component=integral to membrane; Biological process =potassium ion transport
  Homolog annotation: Hit_ID=Q69RI8; Match level="QueryCoverage=69%, HitCoverage=24%, E-value=2e-45, Identity=66%"; Hit description =Probable potassium transporter 14
  Pfam annotation: Domain name=K_trans; Domain location=1-262; Score= -536.6; E_value=0.092; Accession=PF02705.7; Description=K+ potassium transporter
MHSMIIFVCIKWVPVPVVPQNERFLFRRVCPKNYHMFRCIARKGHRLVLFLECAVVLLPPLKFCSAEFALIVNPDAFILIEVISSFHLLIFAGTVIMLLRVLFMKWYGYKDVRKENHQAFEQLLIESLEKFIRREAQERSLERSLESDHNDDKDSEEEIASSSSRVIDESGGADNSALGSSMSLEEGSSMDNELSFIHKAKESGVVYLLGHGDIRARKESFFVKKLVINYFYAFLRRNCRRGIATLSIPHTRLMQQGNKPAAAHTYSSYPDVPGGFCLAACAERREQTLILIAQLRLSGFEIGVLSCACIPQTGPASTLAWLTYTCPPAGAAEAPDHIAIAGLRGGWMDGWQGEALVSPRISGNCET

SEQ ID NO: 49457 - protein, 148 aa, Zea mays
  Coding DNA Sequence Number=SeqID_7678
MGWPVIRAGESRDCGERRGVGRGQPDLARRGGDLRRDMGGDHADECGSTARRAEVGSTASLPSTERERGHRASPSPGLDAAPPPGMGLGAGAAMARSLAPAPWLGPGTSRQPRAAAPVPPWSRAGRACAPGLPRMRPRPVAGVCHTKS

SEQ ID NO: 49458 - protein, 196 aa, Zea mays
  Coding DNA Sequence Number=SeqID_7679
MGKSKKGGSSYQHSGDKQKREPTHPLEDFGDSKYSEEDFSSESEGSPVPASPPASSDDLDDSQGIVAEVWYDGTSQGSDQVFITAKKHSAPTLPARTPVTQCQLGHGGAIPATAMVGHGKEGCYMWTYIRAVERARLKGSDESEVSSDSSEDGGGDGDGEGDDDGGDGEGDEGGGKDDGKGDGSKGSSKGSNKASG

SEQ ID NO: 49459 - protein, 166 aa, Zea mays
  Coding DNA Sequence Number=SeqID_7680
  Gene Ontology: Mol. function=structural constituent of ribosome; Cellular component=intracellular; Biological process=protein modification process
  Homolog annotation: Hit_ID=Q7XHS4; Match level="QueryCoverage=77%, HitCoverage=88%, E-value=1e-44, Identity=71%"; Hit description =Putative ubiquitin / ribosomal protein CEP52
  Pfam annotation: Domain name=Ribosomal_L40e; Domain location=85-136; Score=65.7; E_value=1.5e-16; Accession=PF01020.8; Description =Ribosomal L40e family
  Pfam annotation: Domain name=ubiquitin; Domain location=6-74; Score =129.2; E_value=1.1e-35; Accession=PF00240.13; Description=Ubiquitin family
  Pfam module annotation: Pfam domain module=Ribosomal_L40e::ubiquitin; Domain location=85-136::6-74
MQIFVKTLTGKTITLEVESSDTVANDKAKIQDKEGIPPDQQRLIFAGKQLEDDRTLADYSIQKDSTLHLVLRLRGGGRGGYPLMSVPWDLINLARKHNEDKMICRKCYARLPPRSKNCRKKKCGHSNEMFDLEHSIVSDELSMAMDEVDHTILALAVDHRIAIDKV

SEQ ID NO: 49460 - protein, 343 aa, Zea mays
  Coding DNA Sequence Number=SeqID_7681
MSLMVSDARQPVRESGHRGAGTSDSEGEDATPEPAVSSWGFLGSWRKPCLEQTKRRRVTVCLRPHARGRWGASASVSSARAEVGAVRARLVAAASAAPEEWEEEPEDVEDDGEDSPERREGSPAVDIRVCARVWRKEEGEGNLWGGGIACGGGRCGLMCAVEPPTAHGGDRVGLRRGHGLMATSYPGTQQLAPLHPKAELSHLLRLRFDRRVGAVEPAPASCVSPCLSLRLVIPCSGIVLPEELWVWPDARDDSNEYLLAAAATMAHASAALVLQRVSAALSCAQPLTSSVTNIKKVGPGPGPPTTASRTGSDWFLSLGLISCIIVLEKQDKRNLLPLYVIDR

SEQ ID NO: 49461 - protein, 784 aa, Zea mays
  Coding DNA Sequence Number=SeqID_7682
  Gene Ontology: Mol. function=zinc ion binding; Cellular component =nucleus; Biological process=regulation of transcription, DNA -dependent
  Homolog annotation: Hit_ID=Q8H344; Match level="QueryCoverage=92%, HitCoverage=87%, E-value=1e-147, Identity=39%"; Hit description =Putative far-red impaired response protein
  Pfam annotation: Domain name=FAR1; Domain location=66-313; Score =82.6; E_value=1.2e-21; Accession=PF03101.5; Description=FAR1 family
  Pfam annotation: Domain name=SWIM; Domain location=579-626; Score =26.4; E_value=0.0001; Accession=PF04434.8; Description=SWIM zinc finger
  Pfam module annotation: Pfam domain module=FAR1::SWIM; Domain location=66-313::579-626
  Subcellular localization annotation: CTP_CleavageSite=41; ConfidenceScore=5.53e-01
MKAIPPPHRFPSPSSFLQTLAQTLMSTAGDPSRLSGESSPSSSTRRCPPPPPRVGTYFETEDDAYEFYKAYAARLGFVVRKSNKSKNSRHTVTRRLFVCSKQGFRQEPKKPQDETAGSGVASSPSLSLVPAPRCPDSRTGCLASLTIKLIPSANAFRVTDFVADHNHPLASSSPRCVTSLAVAELFTPQHCSSGQLARTQGMGRGPICILRQRRMHMSSITDMPNIVHKLRSHKMRARAHELGAGEMHRRKQGKGVQLGDVGAALQYLEELQVENPSVYYAVGVGPDGKSAVNFFWADAKSIIDYRSFGDVVCFDTTYALNIYGRPFALFVGVDNHKQLLVFGAALLYDESIQSLKWVFEVFADAMHARHPQTILIDERPECAIAAAEVWPGTNHCTGVWHIYHNSKRHLKQVFESSKSFSNALNHCLFECEDEIEFLSAWEKLVEKHDIGESEWLSRLYLEKEKWALPYQRTMFSADILSTLRKDNMINELRRDLSEQEDILQFFRRYESILEEHRSKKLHADVDGSQVTLPIPSLRMLKQSSNAYTPEAFKMFQGEFEAYMNCMSFPCGVVGTISEYKIVLDEKPSESFVKFDALDGSTTCSCKKFEAVGIQCCHVLKVLDLKNIKELPEQYILKRWRKDARSVQIGEEPTYGSGSVMRSTSEARFSNMCRLASLIASRAAKSEDVMSYIESQSNAIQKHLDDILHTSYPDMGNHTVASSSQAISFVGTQHPDHSTPVVVAQTTNGIYSIMFEYFQHIIIFTALLNFTWVNGRPDGALTAHI

SEQ ID NO: 49462 - protein, 479 aa, Zea mays
  Coding DNA Sequence Number=SeqID_7683
  Gene Ontology: Mol. function=oxidoreductase activity, acting on the CH-OH group of donors, NAD or NADP as acceptor; Cellular component =mitochondrion; Biological process=malate metabolic process
  Homolog annotation: Hit_ID=P37221; Match level="QueryCoverage=90%, HitCoverage=69%, E-value=0.0, Identity=72%"; Hit description=NAD -dependent malic enzyme 62 kDa isoform, mitochondrial precursor
  Pfam annotation: Domain name=Malic_M; Domain location=306-472; Score =26.1; E_value=3.1e-13; Accession=PF03949.5; Description=Malic enzyme, NAD binding domain
  Pfam annotation: Domain name=malic; Domain location=116-304; Score =425.6; E_value=6.8e-125; Accession=PF00390.9; Description=Malic enzyme, N-terminal domain
  Pfam module annotation: Pfam domain module=Malic_M::malic; Domain location=306-472::116-304
MSSISRNLRRSLAPDRLRRLSQHPREYVTSECHRPVVLHKRGPDILHDPWFNRGTAFSMTERDRLGLRGLLPPNVVSSQQQIDRFMLDLKRLQRYARDGPSDTYPLAKWRILNRLHDRNETMYYKVLIDNIEEYAPIVYTPTVGLVCQNYSGLFRRPRGMYFSAEDRGEMMSMVYNWPADQVDMIVVTDGSRILGLGDLGVHGIGIAIGKLDLYVAAAGINPQRVLPVMIDVGTNNEKLLKDPLYLGLQEHRLEGDEYVSVIDEFMEAVFTRWPNVIVQFEDFQSKWAFRLLQRYRKTYRMFNDDVQGTAGVAIAGLLGAVRAQGRPMIDFPKQRIVVAGAGSAGIGVVNAASRTMARMLGNNDVAFESARSQFWIVDAHGLITEDREDIDPDARPFARRKSELGHQGLSEGASLVEVVKKVKPDVILGLSAVGGLFSKEENNLANWSNVSNPRPTTKTQYQRDSNSMAAAEFHKEDSC

SEQ ID NO: 49463 - protein, 691 aa, Zea mays
  Coding DNA Sequence Number=SeqID_7684
  Homolog annotation: Hit_ID=Q5ZDL5; Match level="QueryCoverage=93%, HitCoverage=92%, E-value=0.0, Identity=69%"; Hit description =Putative transcription factor X1
  Pfam annotation: Domain name=XH; Domain location=555-689; Score =224.6; E_value=2.2e-64; Accession=PF03469.5; Description=XH domain
  Pfam annotation: Domain name=XS; Domain location=168-286; Score=36.8; E_value=1.4e-09; Accession=PF03468.5; Description=XS domain
  Pfam annotation: Domain name=zf-XS; Domain location=64-107; Score =70.9; E_value=4e-18; Accession=PF03470.5; Description=XS zinc finger domain
  Pfam module annotation: Pfam domain module=XH::XS::zf-XS; Domain location=555-689::168-286::64-107
MDLDLDDYVDPYEEAEAEAAAAEDGSDDPDEDDSDAESDYEEESFGLLKSGKHRVRNPDGTFRCPFCPGKKKQGYKIKDLLQHADGIGVSSKHRRHGRERANHRAFARFVRTEPSFAEDLVGITGIQGAIKPTPANRDGSTNGDGKAKANVDTAGSSSVAAKVGLPREVERFSWPWACVLAAGAGFNTEDFAGRVAMFSSVEVVPLFVDEVEVAETFAVVRFTNDWSGFSDALTLENHFSINKLGKKEFEMRDNGIGSVEGDGGEGEVKVYGWVARAEDYDSPSVVGRFLRKHTVLKTIDEVSKTELEKSGEMVAILASKIEEKNRHLQDLETKKNATELSISRLEEDNRKLHEAYNEEMRNLHRRARENALRIFQENENLRIDLESKKRELNLRAKELDKISTENANDRKTLDNEKQKAKYDNSELELASIEQQRADADVLKLLADQEREKEDVLARMLQLEKELHEKQQLELEVERLNGTLQVMKHLEGDDDGGDIHEKMEKLSERFEREKKRLEELSGDLVRKERESNDELQEARKELIKGLEEELNGRTAIGVKRMGELDEKPFQNACKTKYGKDEYEIKAAELVTSWQDELKKPSWHPFKMVEVNGENKEILDDDDTKLKFLWIEYGDDVCNAVKTALMEINEYNPSGRYVVPELWNFRKGRKATVKEVLKYLFSQMDTTTKRRRG

SEQ ID NO: 49464 - protein, 589 aa, Zea mays
  Coding DNA Sequence Number=SeqID_7685
  Gene Ontology: Mol. function=RNA-directed DNA polymerase activity; Cellular component=mitochondrion; Biological process=RNA-dependent DNA replication
  Homolog annotation: Hit_ID=Q8S463; Match level="QueryCoverage=99%, HitCoverage=33%, E-value=0.0, Identity=80%"; Hit description =Putative prpol
  Pfam annotation: Domain name=RnaseH; Domain location=213-340; Score =3.2; E_value=2.9e-05; Accession=PF00075.14; Description=RNase H
  Pfam annotation: Domain name=rve; Domain location=497-589; Score= -9.7; E_value=0.038; Accession=PF00665.16; Description=Integrase core domain
  Pfam module annotation: Pfam domain module=RnaseH::rve; Domain location=213-340::497-589
MGPIKDLKGVQRVMGCLAALSRFISRLGERGLPLYRLLRKAECFTWTPEAEEALGNLKALLTNAPILVPPAAGEALLIYVAATTQVVSAAIVVERREEGHALPVQRPVYFISEVLSETKIRYPQVQKLLYAVILTRRKLRHYFESHPVTVVSSFPLGEIIQCRGASGRIAKWAVEIMGETISFAPRKAIKSQVLADFVAEWVDTQLPTAPIQPELWTMFFDGSLMKTGADAGLLFISPLGKHLRYVLRLHFPASNNVAEYEALVNGLRIAIELGVRRLDARGDSQLVIDQVMKNSHCRDPKMEAYCDEVRRLEDKFYGLELNHIARRYNETADEQAKIASGQTTVPRDIFSRDLHQPSDKIDDTPEPEAPSAQSEAPSAQSEAPSARPEAPSVQPEVPSAPEGETLSVEEERSGVTPNRNWPTPYLQYLHRGELPLDRAEARRLARRAKSFVLLGDGKELYHRSPSGILQRCIPIAEGCQFYARQTHLPAQALQTIPITWPFAVWGLDLVGPLQKAPGGYTLLLVAIDKFSKWIEVRPLNSIRSEQAVAFFTNIIHRFGVSNSIITDNGTQFTGRKFLDFCEDHHIRVD

SEQ ID NO: 49465 - protein, 223 aa, Zea mays
  Coding DNA Sequence Number=SeqID_7686
MAGVMHSRWDVGRWWFCALDGDEGIGLIPSMAARHGLCLGRGGYGRGIRGAWEERLGGVVLRVVAMGFLRVDCCELSPASGTIGSSASPDPRARAQPRRWTTDSASPDPRARTQPRPRKTVSASPDPGLGLNLNAGRRTPPRPTPGLGHNLGLGKRSPPRPTQGSDLTSTSEDGLRLARPQGSDSASTSEDGLDLDLGGASALPDLGLGSTTSQGGHHYPTPS

SEQ ID NO: 49466 - protein, 122 aa, Zea mays
  Coding DNA Sequence Number=SeqID_7687
  Subcellular localization annotation: CTP_CleavageSite=54; ConfidenceScore=5.53e-01
MAAPDPAREFPSAVSLPASSSPVSWPSRRLYSLAVRCRAHAPDTPVPLYALVARAELRPSQLAGFSCRTPPAVPSYPVSSTRPQCHSRGARGTIIDRVMRKTSQVDPKRGLLRMEMLINEPT

SEQ ID NO: 49467 - protein, 251 aa, Zea mays
  Coding DNA Sequence Number=SeqID_7688
MDTPEWDVAATAAAGDCGGGMDVDGDSDGEKPRRRLMRQQRWPQMQTGWQQFNAGHSRGHQRSLMQSLIARKKTTSATAMSWQPSKKCPRGNPNSTSGAGAAHQADQACPGSCSKRGAQQHGAAARRATSDLGGSWHFWLRARPAQGAWSKKLVQRSLKEEEKLQHMLANLPSGMRKNDFANQHEQSSSRMLPHFNSSFTEANECELKIKDEPVAAPRLHIFILRRGEFKVQEVQYNNHPMVASNKHNESS

SEQ ID NO: 49468 - protein, 436 aa, Zea mays
  Coding DNA Sequence Number=SeqID_7689
  Gene Ontology: Mol. function=asparagine-tRNA ligase activity; Cellular component=cytoplasm; Biological process=tRNA aminoacylation for protein translation
  Homolog annotation: Hit_ID=Q8GTK9; Match level="QueryCoverage=99%, HitCoverage=79%, E-value=0.0, Identity=78%"; Hit description =Putative asparaginyl-tRNA synthetase, chloroplast/mitochondrial
  Pfam annotation: Domain name=tRNA-synt_2; Domain location=75-432; Score=169.2; E_value=1e-47; Accession=PF00152.11; Description=tRNA synthetases class II (D, K and N)
VNDGSCLSNMQCVLTPETEGYDQIDSVTTGASVLVEGVVASSQGGKQKVELKVSKITVIGKSDPTSFPIQKKRASREFLRTVAHLRPRTNTFGAVARVRNALAYATHKFFQDNGFVWVSSPIITASDCEGAGEQFYVTTLNFLKVAPVKYPVYGSPRNGIPGLLLDKLSNSTEGGSLLKDIPATKDGRVDWSQDFFCKPAFLTVSGQLNGETYASALSDIYTFGPTFRAENSNTARHLAEFWVKYILENCKEDMDFFNTWVEKGIIDRLNDVVEKNFVHLSYTDAVELLLGSKKKFEFPVKWGLDLQSEHERYITEVAFDGRPVIIRDYPKEIKAFYMRENDDGKTVAAMDLLVPRVGELIGGSQREERLDYLEARLDEQNLNKESYWWYLDLRRYGSVPHAGFGLGFERLVQFATGIDNIRDAIPFPRVPGSAEF

SEQ ID NO: 49469 - protein, 1064 aa, Zea mays
  Coding DNA Sequence Number=SeqID_7690
  Gene Ontology: Mol. function=protein serine/threonine kinase activity; Cellular component=integral to membrane; Biological process=protein amino acid phosphorylation
  Homolog annotation: Hit_ID=Q6YVY8; Match level="QueryCoverage=98%, HitCoverage=96%, E-value=0.0, Identity=77%"; Hit description =Putative receptor-like protein kinase
  Pfam annotation: Domain name=LRRNT_2; Domain location=23-64; Score =56.0; E_value=1.2e-13; Accession=PF08263.3; Description=Leucine rich repeat N-terminal domain
  Pfam annotation: Domain name=LRR_1; Domain location=119-138; Score =16.2; E_value=0.12; Accession=PF00560.23; Description=Leucine Rich Repeat
  Pfam annotation: Domain name=LRR_1; Domain location=142-164; Score =16.1; E_value=0.13; Accession=PF00560.23; Description=Leucine Rich Repeat
  Pfam annotation: Domain name=LRR_1; Domain location=166-188; Score =5.7; E_value=24; Accession=PF00560.23; Description=Leucine Rich Repeat
  Pfam annotation: Domain name=LRR_1; Domain location=192-214; Score =17.0; E_value=0.067; Accession=PF00560.23; Description=Leucine Rich Repeat
  Pfam annotation: Domain name=LRR_1; Domain location=216-238; Score =10.0; E_value=3.8; Accession=PF00560.23; Description=Leucine Rich Repeat
  Pfam annotation: Domain name=LRR_1; Domain location=240-262; Score =15.9; E_value=0.15; Accession=PF00560.23; Description=Leucine Rich Repeat
  Pfam annotation: Domain name=LRR_1; Domain location=307-329; Score =0.2; E_value=2.6e+02; Accession=PF00560.23; Description=Leucine Rich Repeat
  Pfam annotation: Domain name=LRR_1; Domain location=331-353; Score =10.5; E_value=3.1; Accession=PF00560.23; Description=Leucine Rich Repeat
  Pfam annotation: Domain name=LRR_1; Domain location=355-377; Score =9.0; E_value=5.8; Accession=PF00560.23; Description=Leucine Rich Repeat
  Pfam annotation: Domain name=LRR_1; Domain location=378-397; Score =5.1; E_value=32; Accession=PF00560.23; Description=Leucine Rich Repeat
  Pfam annotation: Domain name=LRR_1; Domain location=520-542; Score =9.8; E_value=4.1; Accession=PF00560.23; Description=Leucine Rich Repeat
  Pfam annotation: Domain name=LRR_1; Domain location=544-566; Score =11.9; E_value=1.7; Accession=PF00560.23; Description=Leucine Rich Repeat
  Pfam annotation: Domain name=LRR_1; Domain location=568-590; Score =12.6; E_value=1.3; Accession=PF00560.23; Description=Leucine Rich Repeat
  Pfam annotation: Domain name=LRR_1; Domain location=592-614; Score =12.6; E_value=1.2; Accession=PF00560.23; Description=Leucine Rich Repeat
  Pfam annotation: Domain name=LRR_1; Domain location=616-638; Score =15.7; E_value=0.17; Accession=PF00560.23; Description=Leucine Rich Repeat
  Pfam annotation: Domain name=LRR_1; Domain location=640-660; Score =6.1; E_value=21; Accession=PF00560.23; Description=Leucine Rich Repeat
  Pfam annotation: Domain name=Pkinase; Domain location=782-1053; Score= 124.4; E_value=3.2e-34; Accession=PF00069.15; Description=Protein kinase domain
  Pfam annotation: Domain name=Pkinase_Tyr; Domain location=782-1053; Score=86.9; E_value=6.1e-23; Accession=PF07714.7; Description =Protein tyrosine kinase
  Pfam module annotation: Pfam domain module=LRRNT_2::LRR_1::LRR_1::LRR_ 1::LRR_1::LRR_1::LRR_1::LRR_1::LRR_1::LRR_1::LRR_1::LRR_1::LRR_1: LRR_ 1::LRR_1::LRR_1::LRR_1::Pkinase::Pkinase_Tyr; Domain
  Pfam module annotation: Domain location=142-164::166-188::192 -214::216-238::240-262::307-329::331-353::355-377::378-397::520 -542::544-566::568-590::592-614::616-638::640-660::782-1053::782- 053
MAARTLLLVLLLLLLGDATSASVSGQREALMKFKAAVTADPGGLLRGWSPASGDHCRWPGVSCGASGEVVALNVTSSPGRALAGALSPAVAALRELRVLALPSHALSGPLPPAIWTLRRLRVLDLSGNRLQGGIPAVLVCVSLQTLDLAYNQLNGSVPAALGALPVLRRLSLACNRFGGAIPDELGGAGCRNLQFLDVSGNMLVGGIPRSLGNCTELQALLLSSNNLDDIIPPEIGRLKNLRALDVSRNSLSGPVPAELGGCIQLSVLVLSNPYAPTAGSDSSDYGELDDFNYFQGGIPDTIATLPKLRMLWAPRATLEGELPGNWSSCQSLEMINLGENLFSGGIPKGLVECENLKFLNLSMNKFTGSVDSSLPVPCMDVFDVSGNQLSGSLPVFMSKKNCLSSQAPRDDLVSEYSSFFTYQALAGFMSSPSPLDAHLTSYHSFSRNNFTGPVTSLPLATEKLGMQGSYAFLADGNHLGGQLQPSLFDKCNSSRGLVVEISNNLISGAIPTDIGSLCSSLLVLGVAGNQLSGMIPSSIGELSYLISLDLSRNRLGGVIPTSVKNLLHLQRLSLAQNLLNGTIPPDINQLHALKVLDLSSNLLMGMIPDALADLRNLTALLLDNNKLTGKIPSGFANSASLTTFNVSFNNLSGPVPTNGNTVRCDSVIGNPLLQSCHVYTLAVPSAAQQGRGLNSNDSNDTTPSNSQNEGANNSFNAIEIASITSATAIVSILLALIALFIYTRKCAPRMSARSSGRREVTLFQDIGVPITYETVVRATGSFNASNCIGSGGFGATYKAEIAPGVLVAIKRLSVGRFQGAQQFDAEIKTLGRLRHPNLVTLVGYHLGESEMFLIYNYLSGGNLERFIQERSKRPVDWKMLHKIALDVAKALAYLHDTCVPRILHRDVKPSNILLDTNYTAYLSDFGLARLLGNSETHATTGVAGTFGYVAPEYAMTCRVSDKADVYSYGVVLMELISDKKALDPSFSPYGNGFNIVAWACMLLRQGRAREFFIDGLWDVGPHDDLVETLHLAVICTADSLSIRPTMKQVVQRLKQLQPPIREHR

SEQ ID NO: 49470 - protein, 325 aa, Zea mays
  Coding DNA Sequence Number=SeqID_7691
  Gene Ontology: Mol. function=glycerophosphodiester phosphodiesterase activity; Cellular component=periplasmic space; Biological process =glycerol metabolic process
  Homolog annotation: Hit_ID=Q6YVY7; Match level="QueryCoverage=96%, HitCoverage=73%, E-value=1e-123, Identity=68%"; Hit description =Putative glycerophosphoryl diester phosphodiesterase
  Pfam annotation: Domain name=GDPD; Domain location=49-312; Score =60.0; E_value=7.8e-15; Accession=PF03009.8; Description =Glycerophosphoryl diester phosphodiesterase family
WDGAPSRSDTTLDGTTDVADHPEFVGRRRTLEVQWANVTGYFVSTWTVRRPLHASCRSVVCFTSVSLSIHLVVNTKPTVAADFTLVELKTLRAKQRWDFRDKSHNGVSPIITFDEFIDVALNAKRVVGIYPEMKNPVFMNKHVQWADGKKYEDKFIATLKKYGYGGKYMSPAWRARPVFVQSFAPTSLVRAAGLTDSPLVFLVDDVTVRTEDTNQPYDEITSGEHLDYMKRYVVGIGPWKDTVVPPTKDNRLATPSDLVAMAHARGLQVHPYTYRNENKFLHFDFRQDPYAEYDYWINDVGIDGLFTDFPASLRRFQEWTAKNKD

SEQ ID NO: 49471 - protein, 202 aa, Zea mays
  Coding DNA Sequence Number=SeqID_7692
MEARKALRYRVHGRRSKRLRNPKPGVKKKTCKAKVDRVKKRTNLSQIQKTKGSPAERPVGYLLRVHQTVRCALDSVRCALDSVRCPNCSTSELAALVNRWGAVAKIHRTVQCAPDCPVNQQRPRKRSTAQSAGNAWPEPTVSWRTGLSGVHWTVFGAPKGPRAQRSTSPEKKGDRAPDKLLFMSGGAPDCSMRHPTECKDSF

SEQ ID NO: 49472 - protein, 363 aa, Zea mays
  Coding DNA Sequence Number=SeqID_7693
  Gene Ontology: Mol. function=catalytic activity; Biological process =cellular metabolic process
  Homolog annotation: Hit_ID=Q7X6N6; Match level="QueryCoverage=95%, HitCoverage=96%, E-value=1e-118, Identity=62%"; Hit description =Putative NADPH HC toxin reductase
  Pfam annotation: Domain name=3Beta_HSD; Domain location=8-318; Score=- 114.5; E_value=0.00015; Accession=PF01073.9; Description=3-beta hydroxysteroid dehydrogenaseisomerase family
  Pfam annotation: Domain name=Epimerase; Domain location=7-294; Score =16.3; E_value=2.7e-07; Accession=PF01370.11; Description=NAD dependent epimerasedehydratase family
  Pfam annotation: Domain name=NAD_binding_4; Domain location=9-278; Score=-49.9; E_value=2.1e-05; Accession=PF07993.2; Description=Male sterility protein
  Pfam annotation: Domain name=adh_short; Domain location=5-189; Score=- 57.8; E_value=0.035; Accession=PF00106.15; Description=short chain dehydrogenase
  Pfam module annotation: Pfam domain module=3Beta_HSD::Epimerase::NAD _binding_4::adh_short; Domain location=8-318::7-294::9-278::5-189
MGGGTVVCVTGGSGYLGSWLVRKLLGRGCVVHATLRSLADEKKTGLLRALPGAAERLRLFEADMYDADTFEPAIAGCHFVFLMGAGAGAAPGTTRTRRSAARVYILQYKNTTEAAVDAARIILRQCALSGTVKRVIHTASVTAASPLKEDGSGYKDFADESNWTPLNLSYEFTNAYLDDYVRSKTLSEKELLSYSSFSSSSSSSSSSKEDDRPQALEVVTLACGLVGGDSIQTYLWGSYAAIVAPLTGQAVSHNALLFLQALLGSVPLVHVEDVCEAHVFCMEQESMAGRFLCAAGYPNMRDMVDHFAAKHPDLKIQLTQVTGEGVRIQPNTSKLEDLGFRFKYGVEETLDCSVECAKRLGEL

SEQ ID NO: 49473 - protein, 400 aa, Zea mays
  Coding DNA Sequence Number=SeqID_7694
  Homolog annotation: Hit_ID=Q2QQ97; Match level="QueryCoverage=18%, HitCoverage=28%, E-value=2e-22, Identity=68%"; Hit description=RNA recognition motif family protein, expressed
  Pfam annotation: Domain name=GRP; Domain location=100-227; Score= -28.7; E_value=0.066; Accession=PF07172.2; Description=Glycine rich protein family
  Pfam annotation: Domain name=RRM_1; Domain location=65-133; Score =87.5; E_value=4.1e-23; Accession=PF00076.12; Description=RNA recognition motif. (a.k.a. RRM, RBD, or
  Pfam module annotation: Pfam domain module=GRP::RRM_1; Domain location=100-227::65-133
MNTEVTGIVWSACASRQLKNELGHICYFLMGLSSRQGRGLRTGKPTLRSAKPEAATTLDRSPTHTGLSFATDETTLKDAFSEFGNVLEARIIIDRESGRSRGFGFITFTSTEEASAAMTSMDGKELQGRNIRVNHANERAGGIRGGGGFGAGGGYGGGGGYPTGGYGGGGYSSGGGGGYSSGGGGGYSSGGYAANGYGVGSGSGYGGTYSNASGGGYSGSDGYGNGAASGGYANNLSSGYNSNGRYNTIGSSDGNTGGYNSSPNPYGVGNYNTGGSSSSGGTLGEFGGGGFGGNNFAGNVTGGFSGGGASYGANKPQYNGDDDLLGEGFFDKEVAEQGTQILRALNSPELPLGHAARLAKKAECRAIFIFGAEERSLHNIRDLVEAARHTLGLLNRGRLP

SEQ ID NO: 49474 - protein, 188 aa, Zea mays
  Coding DNA Sequence Number=SeqID_7695
VIEAGMFIQLSAPPASLQDIYAYDCGAEYSSLACISNFKPDQTPCSNPKPSSLFSQQTHLLSAPPPTALCPPKASSGHLALARASKMHRQLSLSASPKQQQPPPDGTSTGGGDAAKAMAAAEDESSASHSSSKASRGWSARDERAIHLVPLLTFLCFLLLFLCSHDPSPAASLEAAAEEEERDLGTGG

SEQ ID NO: 49475 - protein, 121 aa, Zea mays
  Coding DNA Sequence Number=SeqID_7696
MPPKKNTHPSPPSNNEDAKISLAAKKGKVALASNHSPPPNLKATTDTQGEGYTAKPKQNAVSTEQDDSQDPPLNPKILPYQANIWPELTRNLPLAPPGFDAAACHHHHLFGMLIEDDNIDL

SEQ ID NO: 49476 - protein, 811 aa, Zea mays
  Coding DNA Sequence Number=SeqID_7697
  Homolog annotation: Hit_ID=Q6K2T0; Match level="QueryCoverage=83%, HitCoverage=60%, E-value=8e-52, Identity=32%"; Hit description=Extra- large G-protein-like
MGSDLKEMKYRRRIGAEERPQCSDRRGGAGWAALQQDPVELLRKLDELRDQIARSCNVVAQRREPRRASRRAVSMLPAEHLEEPPPLPGYHRSRHGGRFGPGLPPPGPYAPPRPEHGERYVRQSSGHYRQYPGRQWENGGMGPGSFHHYGCACPHCLHGQRTSPQEENIPMARYFARQHESYRFERSPSVSSDYDRRSVASSLYSHRSVSKRRAEYFRKKAEHICRPVDGAAPFSVCSSCYKLLQMPTEKCIGRKQNRFQCGSCCQIVSLKHDEENGIPFAPSLSLYAPETEQSSSDQMRRDTVHQHHEDFNSMFYNSNDHSNMQNNMDSTDDNSLSSTMSNDRIGKDCGSTRSIQSKAEDLPFSPSRSVDNGSPKDILCERDTDCKVEPSVGGPVSPRSPALEDKLVDPLCAQEKCNDEDDQGMAMAYKSDLTCKGEYDVNDQYDGGISTRSKQESNEDDKDATEDEISCRSYEQKSKEDNSCNIEDSSKTYEQNSGEDDTSSLVNGSEKYQCMNIKDEDSSPGGEDTCNKYESKVKRDENYVLGAESIRKNCDENNADVMETGSISERHDGLKIEEDNEKLQQPFIEDANSQTGSGSSVNERTNSGFSRGSSEAGLDEDQSSTGKSGDSSFFAGFLKKGFKDLSLLNKSMDNVKVSINGHPISEKALKKAEKKAGPVDPGTYWYDYHAGFWGVMGRECIGIVPPFIREFNYPMAKNCAGGDTGVFVNGRELHQRDLDLLVGRGLPRTSGMSYSIEMSGNVIDEATGKKLRSLGKLAPTFGYYNMVTYLLLNRIEKLKRGFGMHVPEEFR

SEQ ID NO: 49477 - protein, 104 aa, Zea mays
  Coding DNA Sequence Number=SeqID_7698
  Gene Ontology: Mol. function=transporter activity; Cellular component= integral to membrane; Biological process=transport
MSTFYFFTDGIMELLGVVALFPRSWRLLYVMAPLTPSLALAVVVVPFVFQSLSWYLVRLCLDDALWVISAIVTTNNRSTLRISCPSSTTRTRMIMGARARRRGQ

SEQ ID NO: 49478 - protein, 91 aa, Zea mays
  Coding DNA Sequence Number=SeqID_7699
  Subcellular localization annotation: CTP_CleavageSite=25; ConfidenceScore=5.49e-01
MASSRIPGLATCLATRPPAARAWARASSRSVTRFAERRHTASPSVVETTPVYPVYLVYPLHRARVHVVRTGKEEGVEADLQEFQDFGEFED

SEQ ID NO: 49479 - protein, 783 aa, Zea mays
  Coding DNA Sequence Number=SeqID_7700
  Gene Ontology: Mol. function=ligase activity; Cellular component =cytoplasm; Biological process=response to auxin stimulus
  Homolog annotation: Hit_ID=Q6I581; Match level="QueryCoverage=73%, HitCoverage=99%, E-value=0.0, Identity=77%"; Hit description =Probable indole-3-acetic acid-amido synthetase GH3.5
  Pfam annotation: Domain name=GH3; Domain location=133-692; Score =940.3; E_value=7.7e-280; Accession=PF03321.4; Description=GH3 auxin -responsive promoter
MHRVSDFDVVGSFIYNTVNKTSMHKLGYNRPKTIIELMAISSDQTSGEEVVGVIFSDRTKGHLDYEVEPHVPRYRIVGLGRVGSERLPPGRGGYKSSGKLLEASSPRTQQAHPHKQLQGSDLQVPMTICSSEEIIDEFELLTRDARRVQQDTLRKILELNGDAEYLNRFNLGRRTDSKSFKSCIPLCVHSDIESYIQRIADGDDSPVLTGKPITSLSLSSGTTQGKPKFLPFNDELLESTFQIFRTSYAFRNREYPIVNGKALQFVYGSKQVFTQGGILAATATTNLYRSQRFKEAMKDVMTQCCSPDEVIFGPDFHQSLYCHLLCGLINSDEVQFVFSPFAHSLVHAFHSLEEVWEDLCADIRDGVLSKRVTAPSIRQAVSKILRPNPELASSIYIKCQSLSNWYGVIPTLWPNVKYIYGIMTGSMEPYLKKLRHYAGHLPLLSADYGASEGWVGSNINPTLPPEEVTYAVLPNIAYFEFIPLEKPKWEETEICSSVHYIESEPVGLTEVEVGKIYEVVITNFAGLYRYRLGDIVKIAGFHNATPELQFICRRSLVLSVNIDKNTEKDLQLAVEAAEKLLAAEKLEVVDFTSLVDRSSEPGHYVIFWELSSDDGASEDVLSGCASCMDLAFADAGYVGSRKTQTIGALELRVLRKGAFAQVMNHYLSLGGAVSQFKTPRFVSQSNSKVLQILSRNVTRSYFSTALAEVRAADNDEVHVLLALRACSSYWRPTATPEKGLADTLPTAVAELCSLTGLYLHYNALSRSSFNPPPIPHLRVESPP

SEQ ID NO: 49480 - protein, 711 aa, Zea mays
  Coding DNA Sequence Number=SeqID_7701
  Gene Ontology: Mol. function=protein-tyrosine kinase activity; Cellular component=integral to membrane; Biological process=protein amino acid phosphorylation
  Homolog annotation: Hit_ID=Q9AXB6; Match level="QueryCoverage=91%, HitCoverage=94%, E-value=0.0, Identity=65%"; Hit description =Phytochrome / protein kinase-like
  Pfam annotation: Domain name=DUF1221; Domain location=21-236; Score =429.1; E_value=6.1e-126; Accession=PF06760.2; Description=Protein of unknown function (DUF1221)
  Pfam annotation: Domain name=Pkinase; Domain location=237-502; Score =53.6; E_value=6.5e-13; Accession=PF00069.15; Description=Protein kinase domain
  Pfam annotation: Domain name=Pkinase_Tyr; Domain location=237-502; Score=48.1; E_value=2e-15; Accession=PF07714.7; Description=Protein tyrosine kinase
  Pfam module annotation: Pfam domain module=DUF1221::Pkinase::Pkinase _Tyr; Domain location=21-236::237-502::237-502
MEQLRQLGEVVGAIDALMAFEPELRVNPRQCRLLADACARALAAVTGEVRAHLRFEERGAKWRAVEPALRELHRAFRDAEGYVRQCLDPRGGGSWWGRAAAAAHCTDCVEQHLHGILWCVAIAVEAVEAAAEIAGHDADETARRRLVLANKYDSRSMLEPRLFQHAYGKLYLVSQELVARMDTVWKEDRWLLLQLLDEMKSPAAPKPLTKSEQRLADVLAAPRGKLHSASVLLNGDYSVRRRLGGNLKEAHWMGESFAVKHFIGDSEAEVSMLSSVAHPNVAHAAYCFHDEERKEYFVVMDQLMVKDLASYVKEMSSPRRRIPFPLVVAVDIMLQIARGMEHLHSKKIYHGELNPSNVLVKPRQPDGYVHVKVAGFERRGAVTNGAKASANGSGNASAAGSGGDDTCIWYAPEVLEHQESRDRHTEKADVYSFAMICFELLTGKVPFEDNHLQGDKTSKNIRAGERPLFPFQAPKYLVALTKRCWHADPAQRPPFASVCRVLRYVKRFLVMNPEQQQGQADAPPAVPAADYLDIEAQLLRRIPAWQRGQGAPPRVVDVPFQMFAYRAVEREKTAGAHASRDRVTDSGSEEDSLCGDENGVGATTPDDDASTVSNGTVRSRPDSCDGKKTPVRKADVKAPPRQGGALHPVATSSSRKLERTDSEHGTSGFSAGSQQKVKPASAVKPPPATRKTVGVKPEHPARRPKSGHASD

SEQ ID NO: 49481 - protein, 135 aa, Zea mays
  Coding DNA Sequence Number=SeqID_7702
MALGPGGRRARLSGARGLELARRGHGPGLGTGAAPAQARPVDVAVARCGPPAWRPAAGQCSQSASRRPDVASLHAASRPVLAITAVCHSSVYVALVVAKVNVVYLSSSTHGRSPLSPRWCVRATRRSSRVVTCGT

SEQ ID NO: 49482 - protein, 128 aa, Zea mays
  Coding DNA Sequence Number=SeqID_7703
MGSTGGSPFHTEYADGHGCLLPAEVHSILLGDWELTVAELVSLDIASTGGLALHSGNILCLLALGLSGCSDWLLGQEGEVSGCSSSSTDFFPIDCAGGTTAAAEGTASGIATNVGAGSGADIPEGDSA

SEQ ID NO: 49483 - protein, 204 aa, Zea mays
  Coding DNA Sequence Number=SeqID_7704
MDPYFGVIFLDTEITCLSVNIDDAKVSTLHDDVASMRPELSVNRRGVEVPKSVFNGLYISPPKSHYLATVVEYIGGDDEWFNTSPCLFCTLPRFDLWQVDPGTRAFFPVATETPSLFPIAGNPTAMGAQHRDRGASIRAMIHYYPYIGSREQLAAATMEPHQASAIGEHDMVRELRRVTLGRIELSSEEWGATEAWDSSLWTLL

SEQ ID NO: 49484 - protein, 78 aa, Zea mays
  Coding DNA Sequence Number=SeqID_7705
  Subcellular localization annotation: CTP_CleavageSite=59; ConfidenceScore=5.25e-01
MGGRHKRATKCSSMFCASRTIRLALPVQDRMSTPNSGDQAQVQQGCQTSQPQRLTNQVGDMERKCPRAREQQMEISSR

SEQ ID NO: 49485 - protein, 193 aa, Zea mays
  Coding DNA Sequence Number=SeqID_7706
MAPRPSHGDSLPERGQRLPSEQIVFGKRVKQNSSTNKLDSRVLPWHSLVVRPVHAAWPSAAEAGQWRAILGLHGAHSSEESSIRPSVTRRSSLTISCSPIADAGGVPWWWPPTALGSLCCAPIAVGFPAMGKREGVLGSHLYAGKAGNHNNFIPYWPVKIKSCGELCCNWEEGPGVGVHLLEIEAGKGAEEIR

SEQ ID NO: 49486 - protein, 71 aa, Zea mays
  Coding DNA Sequence Number=SeqID_7707
MTTRHDKLKYGRVNMRLDSESSDTESKARCDKVTGSLEGANSVAVLRSRWRRRPPKLGELGAEHEDNRRCT

SEQ ID NO: 49487 - protein, 159 aa, Zea mays
  Coding DNA Sequence Number=SeqID_7708
  Subcellular localization annotation: CTP_CleavageSite=51; ConfidenceScore=5.55e-01
MAWTAAEPPPPVFPLFRAPSPGVPTRSISAWPWSSPLARIPAPRSLFAPARLAAAQPPRLLLPQLVSPAPPVVLVLSSKLAQLWWSSPPPRPEHRHGVRPFQTSSYLVAPAFLPLPIAQQWRCASSSSSLVVELRAQPEHHPCPRELDWIPTFATSPSI

SEQ ID NO: 49488 - protein, 330 aa, Zea mays
  Coding DNA Sequence Number=SeqID_7709
  Gene Ontology: Mol. function=2 iron, 2 sulfur cluster binding; Cellular component=chloroplast; Biological process=aromatic compound metabolic process
  Homolog annotation: Hit_ID=Q0GH73; Match level="QueryCoverage=61%, HitCoverage=57%, E-value=1e-109, Identity=84%"; Hit description=CMO protein
MGSNKTGVVPVNKLRSKEFEKQEGKIRTQTYRLICGKGVQADTKHTNVDLWIDGRHCDMDRRQWPQTHSLAAAATDPPIIGRQLQSATDDHISIATAATSPRLIRRRLQSMNGSHRPHGGGTNRRLDFGLIPIKVATWGPFVLIRFDDESTEDNVYDTVGNEWLGSASDLLGTNGIDTSLPHICRREYIINCNWKVFCDNYLDGGYHVPYAHGDLASGLQLQSYETLVLSVNPFSRYGPWMDTNLAVPLDSTRCKVVFDYFLDKSLLDDQCFIKKSLEDSEQVQIEDIALCEGVQRGLESPAYSVGRYAPSVEMAMHHFHRLMHANLSEY

SEQ ID NO: 49489 - protein, 250 aa, Zea mays
  Coding DNA Sequence Number=SeqID_7710
MSVVAAVGPGAAVAAYGHGHGHGQPLCGGGARKRKDVRDHEVGLPGSDGRAAARRGAGLFVLETVEEEEEEEGADAERSSSVGAASEDDAEEEEDGDGDEVDSGGTRWTAGRRRRREGGALEAAMDMGALDDALPIKSRSFANLLDAASAVGSARDLAKPENPFNKRRRVLRCCSVVRRAASTTSLAALPPIAGDDDNDDDGRSGSGTRTEIDDVRRAAYAWTSRVALPDLIRFCSHSQGFPVFGDRKVD

SEQ ID NO: 49490 - protein, 126 aa, Zea mays
  Coding DNA Sequence Number=SeqID_7711
  Homolog annotation: Hit_ID=Q6H4V6; Match level="QueryCoverage=80%, HitCoverage=81%, E-value=2e-19, Identity=50%"; Hit description=Auxin responsive protein-like
  Pfam annotation: Domain name=Auxin_inducible; Domain location=4-112; Score=89.0; E_value=1.4e-23; Accession=PF02519.5; Description=Auxin responsive protein
MKRLLRRLSRTVSVSVAGEDGGPAARPSSKHKHRRRRKGKKAGAVPEGHVPVCVGEEGGPAERFAVRAELLGEPPLAALLRRAAQEYGYAHPGALRIPCPVDDFRRLLLRLSHGPSSPAPDAMPRA

SEQ ID NO: 49491 - protein, 279 aa, Zea mays
  Coding DNA Sequence Number=SeqID_7712
  Gene Ontology: Mol. function=thiosulfate sulfurtransferase activity; Cellular component=mitochondrion; Biological process=sulfate transport
  Homolog annotation: Hit_ID=Q94C43; Match level="QueryCoverage=99%, HitCoverage=100%, E-value=1e-98, Identity=58%"; Hit description =Thiosulfate transferase
  Pfam annotation: Domain name=Rhodanese; Domain location=161-265; Score=60.9; E_value=4.1e-15; Accession=PF00581.10; Description =Rhodanese-like domain
  Pfam annotation: Domain name=Rhodanese; Domain location=9-132; Score =43.6; E_value=6.5e-10; Accession=PF00581.10; Description=Rhodanese -like domain
  Pfam module annotation: Pfam domain module=Rhodanese::Rhodanese; Domain location=161-265::9-132
MAQDDPVVSAQWLHEHLGMPDVKVAHIPGALFFDLDGIVDRTTDLKYRYSDDFPRIVVVHTSFCKSHLPHMLPSEEAFAAAISELDIKNQDKVIVYDGKGFFSAPRVWWMFRVFGHKKVWVLDGGLPQWQASGFNVEKASPDDDAVLKSIAANRAVKRVYNGEQVAQNVTAKTYQQIDARAKGRFDGVAPKPREGVRSGHIPGSVCVPFPEVGMVQGLFGISLDRPIVVTCGSGVTACILALGLYRIGKRDVPVYDGSWTEWEGQSDSDYPKVTAPGTA

SEQ ID NO: 49492 - protein, 65 aa, Zea mays
  Coding DNA Sequence Number=SeqID_7713
  Subcellular localization annotation: CTP_CleavageSite=29; ConfidenceScore=5.21e-01
MVVGSVTATRGSGVMAKTARKTLTRGGPCAMHRRVMKGLARLWASAGCEVPNWADRGKKRPKCTG

SEQ ID NO: 49493 - protein, 145 aa, Zea mays
  Coding DNA Sequence Number=SeqID_7714
  Subcellular localization annotation: CTP_CleavageSite=65; ConfidenceScore=5.26e-01
MAEPVGALHLTVVALNLLLVPLPLHHRHGVSLSSPLKTSAVWALAARSRRSGIRLAPRRWLCDVVAFSIVVDDPREVHRLALLPHHDLLPPIDRDLTSVLGASTPNFEVGSEEIAWVVEAVSSGGLATPCPIRGGEGAGREWVIT

SEQ ID NO: 49494 - protein, 129 aa, Zea mays
  Coding DNA Sequence Number=SeqID_7715
MAWPRCATTLLRRRYHDVKLPPDHPAKCPQIPDNPLRAPVSTPGPRLVLHRPVRAMRWRVLHPPMARHGCKKFQGEDGLTARGPRGSVQARAQTPAEAADLWATRHGEPPRGRKGGNSGEARCARSGPK

SEQ ID NO: 49495 - protein, 212 aa, Zea mays
  Coding DNA Sequence Number=SeqID_7716
  Subcellular localization annotation: CTP_CleavageSite=59; ConfidenceScore=5.14e-01
MVKMMAPWPSIRGSAIGITRGTPTDGPYTLAPSSSHARHCNKFRVRTLPQQTKETPLKSASGKANGRLLPLGIYVSALCPNRHQSREDVRLRSASHDWSERRSGYTGIPVFVVVWSPIGGGGSSPWGCKHPDGVRGSQKPPMRDIAERAGKSPKGAAIDASGARWSRNRSAKISGGWLAGVCAGVGKQRRRSVPSEGGRSTVFVDLVWDDHD

SEQ ID NO: 49496 - protein, 239 aa, Zea mays
  Coding DNA Sequence Number=SeqID_7717
MPSGLFHHSGNIHGLLLVLELLGCSDWLLGQEGEVPGCSVADTGFLPIGCSSGTNAAAEGTVSSTAVDADIDTGVGVDVLKVFHLPTLSLSHDSSIDQMLKGREVDVEVEVAVATPIAWLPESGQSLGLVESTSERSARLSLGVVVATAVGVPHPVVPTTLAGHAFHLDSDSIDLGLQVYLGPTVRDAISMITTGRRVHTVLQSPPKPCPTHQGVVLLGVENGDQVHHVAQSKIAPTNW

SEQ ID NO: 49497 - protein, 72 aa, Zea mays
  Coding DNA Sequence Number=SeqID_7718
MPGAGAAGLFPHASSGGGVWEAALPYASARDQWEATCLVRRLDDDLWGAEAYSEHYFITKRDTAEASMQDAA

SEQ ID NO: 49498 - protein, 54 aa, Zea mays
  Coding DNA Sequence Number=SeqID_7719
MNGYRVPQREREKDTQWYTDPGAPGLVAQDLRLENGSNSRDSIPPSRFDPHRRS

SEQ ID NO: 49499 - protein, 84 aa, Zea mays
  Coding DNA Sequence Number=SeqID_7720
MAGVVWVGTSMVTREAFARGLALAFMDKGEAATRLSRTSFSWGLSVKTISTHLPHLFWMITEVDWTQQRRMSAYYNFGGPQRHR

SEQ ID NO: 49500 - protein, 99 aa, Zea mays
  Coding DNA Sequence Number=SeqID_7721
EDHQEYARDLNKIHNNVFLRLLGKGCSALTLSDSSHNDLGGRKSRYEGGVSSSDIEAESMSPETSSTQGASQGWVSNGTRMVKSWWATPMLKTVALGPP

SEQ ID NO: 49501 - protein, 368 aa, Zea mays
  Coding DNA Sequence Number=SeqID_7722
  Gene Ontology: Mol. function=protein serine/threonine kinase activity; Cellular component=membrane; Biological process=protein amino acid phosphorylation
  Homolog annotation: Hit_ID=Q9LJU5; Match level="QueryCoverage=84%, HitCoverage=67%, E-value=2e-79, Identity=49%"; Hit description =Receptor protein kinase-like protein
  Pfam annotation: Domain name=Pkinase; Domain location=3-318; Score= -17.9; E_value=1.7e-07; Accession=PF00069.15; Description=Protein kinase domain
  Pfam annotation: Domain name=Pkinase_Tyr; Domain location=3-315; Score=-31.0; E_value=1.4e-10; Accession=PF07714.7; Description =Protein tyrosine kinase
  Pfam module annotation: Pfam domain module=Pkinase::Pkinase_Tyr; Domain location=3-318::3-315
MLLARLQTVAIKQLDKHGFQDNNAFLSGVAKLSKLHHENLVDIIGYCADGDQRLLVYESVPAGTLEDHLFGTRATRPQFSISGSCRIVSCISICKAAYTHGAFLLRAPDLPADKKPMDWCTRMKVAHGAAQGLEYLHETANPPVVYGEFKASHILLDERSTPKLSDFGLAQLGQAGGSMPVASPMMGSFGCCAPEYDRTGQATMKSDVYSFGVVLVQLISGRRAVDTSKPVDEQNVVTWLLCIFALLSRIGICGTTPFQAMPMFKDQKRYHELVDPLIKKEYAAKALNQVVAMAAMCLQEEDSVRPLMADVVMTLGFLTAMPPDPPAPAAPPAAASEPKKDKAESDHSDSSSSSSDDEEDEEEETEEQ

SEQ ID NO: 49502 - protein, 292 aa, Zea mays
  Coding DNA Sequence Number=SeqID_7723
  Subcellular localization annotation: CTP_CleavageSite=81; ConfidenceScore=5.26e-01
MASHGIGAAAGSDAPHAEVVTMGQTNPSPYPPVSSSHHSWSSATGSVSWNNTVDKLSQDTVYYDPQRDVSVSGGNQNVGSSAPHVAQASMGITDAAHSHVPYSSSDQHGYNPVEYANYYYSYPQAANDSSVQQGANQHPGAAYQPLTSFQNSGSYIDPTSNTYYNAGDHQTVPGYGSSSYYFQNNTWNGGSTGNNFAQSYQNYSPSDTNAQQSSTSVPANSLPYQQQYNQWPYYYNQSVPSASSNPVAGNSTTDNLAVNTPSSYSYPNSQPPPPGTTSWKSNSSASVAPPMQ

SEQ ID NO: 49503 - protein, 133 aa, Zea mays
  Coding DNA Sequence Number=SeqID_7724
MGKSKKGRGSSPRSGDKRKREPTPPSEDFGDSEYSEEEFSSESEGSPAPVWTYIWAVERSGLEGSDESEYSSDEEDSSDSSEEDSGGDGDDGGDDGGDGDGGGDSGRGGDDDSKGDHGSGSKGSSKGSNKTSG

SEQ ID NO: 49504 - protein, 456 aa, Zea mays
  Coding DNA Sequence Number=SeqID_7725
  Gene Ontology: Mol. function=receptor activity; Cellular component =integral to membrane; Biological process=ion transport
  Homolog annotation: Hit_ID=Q6L517; Match level="QueryCoverage=89%, HitCoverage=89%, E-value=1e-156, Identity=68%"; Hit description =Putative lung seven transmembrane receptor 1
  Pfam annotation: Domain name=Lung_7-TM_R; Domain location=146-434; Score=45.9; E_value=2.3e-11; Accession=PF06814.3; Description=Lung seven transmembrane receptor
MSAPVGRLLLLVSAVAVGLALPVAAEIKKESFREDPRSSIMFEKFGFSRSGEVRIIISGASVSSPVARADLKQLGFFLVSDESLLDAIDEAREEGPTPEKLVAASDDDPDDGAAAGCVLDSPSPYVRKLFTFKNMKGGHYNRSFPVTRPDEYALFFANCAPGSLVSMTVRTEMYNVGADGSKDYLPVGQAPLPAIHGVFALCYAAFLAAWGYLTLSSVSAQQIHHLMSGLLAARLLYCVSAAEDQHHVRATGTPHGWDHVALYLFQLVKGVVLFALVGTGWCFLKPVLQGREKKVLVAVIPLQVAANVAAAVVGEAGPSLLLQGWATWWNRTLLLVDVACCCAVLFPVVWSHSHRETSSKTDGKAARNLSRLTLFQRFYAAVIGYLYFTRVVVYALRTAASYRYRWASVLAEETAALAFYLFMFHTFRPAEKSHYFCLHDDDDDDEMVLREEELEL

SEQ ID NO: 49505 - protein, 156 aa, Zea mays
  Coding DNA Sequence Number=SeqID_7726
MGKDKKGRSSPRRSSDKRKREPNPPSEDFGDSEYSKEELSSESEGSPVYASPPALSDDSNNSHGIAAEVWTYIRSVERAGLEGSDESEVSSDEENSSGLSEEGSGGDNDDEGDDSGGGGDGDDGGKGGGGGNDGGRSGDDGKGGNSSKASGKAPLA

SEQ ID NO: 49506 - protein, 270 aa, Zea mays
  Coding DNA Sequence Number=SeqID_7727
  Homolog annotation: Hit_ID=Q6K4E0; Match level="QueryCoverage=87%, HitCoverage=84%, E-value=3e-97, Identity=73%"; Hit description=WD-40 repeat protein-like
  Pfam annotation: Domain name=WD40; Domain location=201-239; Score =35.3; E_value=2.1e-07; Accession=PF00400.22; Description=WD domain, G-beta repeat
  Pfam annotation: Domain name=WD40; Domain location=90-130; Score =28.0; E_value=3.3e-05; Accession=PF00400.22; Description=WD domain, G-beta repeat
  Pfam module annotation: Pfam domain module=WD40::WD40; Domain location=201-239::90-130
MATAAAQSHPASMDARRWDESSYRRGILRARDLSSRTLFRAVFFDHSDDPDTDILLAAASSDGSLASFSLSSCISACSATSQVETAATLVDPVCIVQAHSGPAYDVRFYPDQQQPLLFSCGDDGRIKGWRWHEMQSCLVPLSLQGDHLEPALDLVNPQHEGPWGARSPVPENNAIAINKQDGSILAAAGDACAYCWDVETSKCKITFKGHADYLHSIAVRESNRQVVTGSEDGTARIWGAGFKPSSFPVLCIVFFFSRKSAGGLRTHILK

SEQ ID NO: 49507 - protein, 167 aa, Zea mays
  Coding DNA Sequence Number=SeqID_7728
MPGASSGALTLLTPHVAWEALAPPTPHTIGQVTPASSDLPLVGWEGPVTSWQDLSALPRAGGQPSVFNPIPFHPSFDTGSFTSLYAGFPFPSGCLDSEEEDGPGPRLDFFGLRDLEAMLQFLFVCDKLLSDGSDDYNANEEGYEPTRECFHTGHEEHDGPTRHVSGE

SEQ ID NO: 49508 - protein, 157 aa, Zea mays
  Coding DNA Sequence Number=SeqID_7729
MNKDKVHDKETHGTSSDITEKTPVETVKGPNLLERAKEEIEALAGAVHTKMEHHSSPHAKKDESHKEGKEGSLHKIKAHTDETHGTSADINENTPVDKVKGPNVFERAKEEIEAIVEAIHPKNGSDRHYIVPPTRHGLEVVIRVIMKQGINLLLVLF

SEQ ID NO: 49509 - protein, 193 aa, Zea mays
  Coding DNA Sequence Number=SeqID_7730
  Gene Ontology: Mol. function=drug transporter activity; Cellular component=membrane; Biological process=multidrug transport
  Homolog annotation: Hit_ID=Q5GAV3; Match level="QueryCoverage=95%, HitCoverage=14%, E-value=2e-10, Identity=27%"; Hit description =Putative integral membrane protein
MDPQFKLALEAQTKLFLAELDKKFVAHDANWEARIVDLEHAAVSASDKFYDLKADIHTDVAAQLEFHLTTAADRADRVSTVIETRVAALESASVAFDSWCPVIESTIDDIKHGVDSVQAVVARIASPSRLEPRDPPHLQPGILDAYGSAAARTPAGPMTDSPMGHCGDSQRREAGFGHVFAQTHLPHNGRLPP

SEQ ID NO: 49510 - protein, 72 aa, Zea mays
  Coding DNA Sequence Number=SeqID_7731
MEARFWELRLAFGNCPSSSRLLLELASLLCKEYGFMLVRYEQWVLTGYSYGSHYLYYLSSVPRKLSEVRVVL

SEQ ID NO: 49511 - protein, 101 aa, Zea mays
  Coding DNA Sequence Number=SeqID_7732
  Subcellular localization annotation: CTP_CleavageSite=36; ConfidenceScore=5.04e-01
MSPTLAVSDLIVRWGYRSKVQPGTIHSMKASVMLMRCSQWSSDSTVFEEYLRCSAPHRRLIPERPTRNGSGEMARVACTLCGKRLDGGVSVLSVGVNPIWS

SEQ ID NO: 49512 - protein, 107 aa, Zea mays
  Coding DNA Sequence Number=SeqID_7733
  Gene Ontology: Mol. function=DNA binding; Cellular component=nucleus; Biological process=regulation of transcription, DNA-dependent
  Homolog annotation: Hit_ID=Q8W511; Match level="QueryCoverage=74%, HitCoverage=49%, E-value=3e-19, Identity=66%"; Hit description=HMG -like nucleosome/chromatin assembly factor D
  Pfam annotation: Domain name=HMG_box; Domain location=53-107; Score= -9.3; E_value=0.087; Accession=PF00505.9; Description=HMG (high mobility group) box
MVASTTLGRRRKRAPIYVAVATATCEEKKQEGAQALGGCVAGKRKKVATSGKPKHPPSTFFVFMSGFRQEYQVQHPGNKSVATMSSLFVLVDQVSKAAREKWHAMSD

SEQ ID NO: 49513 - protein, 204 aa, Zea mays
  Coding DNA Sequence Number=SeqID_7734
  Homolog annotation: Hit_ID=Q10KZ6; Match level="QueryCoverage=90%, HitCoverage=31%, E-value=1e-31, Identity=42%"; Hit description =Proline-rich family protein, putative, expressed
MPRVLAPNFTPTGCVPTVTASTDAKRIIDEERSNARLEIGIEVLKLLYKKFNQHLKSRKNFLTELGSSISSQLSIDMSYYGNLKLLVSIDKMQMDVDELKEEVQEAPRVKMLHCPSKAMDIENEIQVLCDQLAKKSSDSLRLLKELELHRSYGENDMPLYELKGLETLGSTLHIVVHDCASVDFWNSSIQWFRIQPEGSKKEII

SEQ ID NO: 49514 - protein, 338 aa, Zea mays
  Coding DNA Sequence Number=SeqID_7735
MEITIKVNNQHHISNISTWENTQAAQAPPGRRGPHCQPQGRGGPGAPARPSGLRASAKAGRPTCRPTRGQVLLAPNKKGRRLGFRPMPSRRRRMVGCPAVPALSSRRQWGRACAGGGGGSLARALRRAEPAAPRGSPAPAGVEVGRALCRVAERPLPGPNRAERPQPARPSLVCARAVRSGDVCAEHRPQPGSAGSARSRHGRGRAPATSVPCVARNRAASAAGLAGAARSPAEAPVPGAAEEPDAPPLPDVRAPRPHATRGPPAPTGVAKPEADAGSPRPRAQGSQTGATSAPATTALDRTCRVRQRPRTEKCHGSIVCNNLAESLKRKRNHLIRAP

SEQ ID NO: 49515 - protein, 77 aa, Zea mays
  Coding DNA Sequence Number=SeqID_7736
MARTYLYMKTSRSRGDALLAEVAGLETTHPWVYVASMSAAIDYVRAVPELVALNGYEITEEDLVDLRFPLGLRQQTE

SEQ ID NO: 49516 - protein, 136 aa, Zea mays
  Coding DNA Sequence Number=SeqID_7737
MAACSKREHVRAISDGVSACRRLYLHLQQRRLKSARIRWTTIAINTNTRRHGGLSYRVPSQVPTGFTHGGSRPKMVIVKMRHHLYDSHHLFGTKQQRTLEPSRDELALRCGRRGGRRWVTRLPGGARCGGTEGPQL

SEQ ID NO: 49517 - protein, 57 aa, Zea mays
  Coding DNA Sequence Number=SeqID_7738
MGTPLTDSLSSAGQQTLGKGQGQILQDEEHEGCRDGFVRGLGRRLPVNYGCWIVVFV

SEQ ID NO: 49518 - protein, 469 aa, Zea mays
  Coding DNA Sequence Number=SeqID_7739
  Gene Ontology: Mol. function=RNA-directed DNA polymerase activity; Cellular component=mitochondrion; Biological process=RNA-dependent DNA replication
  Homolog annotation: Hit_ID=Q8S463; Match level="QueryCoverage=85%, HitCoverage=21%, E-value=0.0, Identity=83%"; Hit description =Putative prpol
  Pfam annotation: Domain name=rve; Domain location=192-340; Score =100.1; E_value=6.7e-27; Accession=PF00665.16; Description=Integrase core domain
MHQPSVKTDDTPEPEKALAQPEATSAQSEVPSAQSEAPSARPEVPSAPEGEALRVEEERSGVTPNRNWQTPYLQYLHRGELPLDRVEARRLARRAKSFVLLRDGKELYHRSPSGILQRCISIAEGQELLQEIHSGACGHHAAPRTLVGNAFRQGFYWPTAVADATRIVRTCEGCQFYARQTHLPAQALQTIPITWSFAVWGLDLVGPLQKAPGGYTHLLVAIDKFSKWIEAVAFFTNIIHRFGVPNSIITDNGTQFTGRKFLDFCEDHHIRVDWAAVAHPMTNGQVERANGMILQGLKPRIYNDLNKFGKRWMKELPSVVWSLRTTPSRATGFTPFFLVYGVEAILPTDLEYGSPRTRAYVDQSNQANREDSLNQLEEARDMALLHSARYQQSLRRYHARGVRSRDLQVGDLVLRLRQDARGRHKLTPPWEGSFDIAKVLKPGTYKLANSQGEVYNNAWNIQQLRRFYP

SEQ ID NO: 49519 - protein, 127 aa, Zea mays
  Coding DNA Sequence Number=SeqID_7740
MVSPSLVDTQLIQALEHQTWVILAELDAGALESQAVDSDQHRDEFSSALRADVEAHLLADDADLLDRIYWEASTGGAASRHDMAFEDCDINEQLAGACGCLDNLTTTSSATVALCCMMTLRLELKSL

SEQ ID NO: 49520 - protein, 277 aa, Zea mays
  Coding DNA Sequence Number=SeqID_7741
  Homolog annotation: Hit_ID=Q9FK74; Match level="QueryCoverage=63%, HitCoverage=82%, E-value=1e-34, Identity=41%"; Hit description =Arabidopsis thaliana genomic DNA, chromosome 5, P1 clone:MRA19
  Pfam annotation: Domain name=DUF1264; Domain location=72-238; Score =272.0; E_value=1.2e-78; Accession=PF06884.2; Description=Protein of unknown function (DUF1264)
MPRSSSRRHVLDGWLAHEPRARQYKATFIPAEPVTQFLAPSEVSWGDEEMSSSDQNPAATPASSGPAEPSPPGRPTAVSSRVLDMGAQLAQALKPVRQMKQHACSFALYAHDLHRQVEVHHFVARLNQDVLQCAVYDSDKPSARLIGVEYIVSDTIFEGLAPDEQRLWHSHAYEVKAGLWTDVGRAGGAAELGDGEPRKDAAEPGRVRGELVRGRDERYGIDSSAGGLKAARVEMDEPEWINPNADYWRLHGKGFALQSKKSTCVAASTPILAIGFD

SEQ ID NO: 49521 - protein, 225 aa, Zea mays
  Coding DNA Sequence Number=SeqID_7742
  Gene Ontology: Mol. function=carboxyl- and carbamoyltransferase activity; Cellular component=ornithine carbamoyltransferase complex; Biological process=amino acid metabolic process
  Homolog annotation: Hit_ID=Q8SA97; Match level="QueryCoverage=70%, HitCoverage=21%, E-value=2e-13, Identity=73%"; Hit description =Ornithine carbamoyltransferase
  Subcellular localization annotation: CTP_CleavageSite=13; ConfidenceScore=5.10e-01
MAPPVDVVGPSPRLGEVEAPPRSSPGPWVGRGGDRRPRPGLSPSPGVGRSGVRRPSGLSPSPSPGVGRSGVCRLLGLSPSPSPGVGQSGVRRLPGLSPSPSPRVGRSGVHRLPGLSPSLSPGVGRSGVRCLPGPSPSPSLGVGRSGIRRLPGLSPSPSPGVGRSGPHSAEWHSSRSGAGGAVLLSDRSVERRSDYGHFGSVDWGACVRIKLCADGGYQLRFRSLE

SEQ ID NO: 49522 - protein, 358 aa, Zea mays
  Coding DNA Sequence Number=SeqID_7743
  Gene Ontology: Mol. function=ATP binding; Cellular component=nucleus; Biological process=negative regulation of signal transduction
  Homolog annotation: Hit_ID=Q2QM63; Match level="QueryCoverage=90%, HitCoverage=99%, E-value=1e-128, Identity=72%"; Hit description =Transducin family protein, putative, expressed
  Pfam annotation: Domain name=WD40; Domain location=210-246; Score =8.0; E_value=4.3; Accession=PF00400.22; Description=WD domain, G -beta repeat
  Pfam annotation: Domain name=WD40; Domain location=251-296; Score =20.5; E_value=0.006; Accession=PF00400.22; Description=WD domain, G -beta repeat
  Pfam annotation: Domain name=WD40; Domain location=36-74; Score=38.2; E_value=2.9e-08; Accession=PF00400.22; Description=WD domain, G-beta repeat
  Pfam annotation: Domain name=WD40; Domain location=78-119; Score =11.6; E_value=1.6; Accession=PF00400.22; Description=WD domain, G -beta repeat
  Pfam module annotation: Pfam domain module=WD40::WD40::WD40::WD40; Domain location=210-246::251-296::36-74::78-119
  Subcellular localization annotation: CTP_CleavageSite=50; ConfidenceScore=5.13e-01
MALVAGSYERFIWGFSLKTLTSPSATGASPSETLTLAPLFSYPAHTGPVRCVAAAPRAGLVASGGADDSVRLYDLPSAADLGPLLDPSAAVSALAFYSRGPVPRNLLAACDDGSLHIYDADGFALLSTLRAFPRHEAAEALAVHPSGRVALAVGRAGALAMLNLVRGRRSFACRLEHPASAIAYAEDRDGGDRFVMAAENKVSVHDSVDARVIHDMDCGKKVLAMAPAKSGVLYTGGEDRCITAWDLSSGKVSSRIEGAHATRVKGVVVFGNSNDGSQLSNLISSASSDGVIRIWDIRTIGNGKPTPLAEANTKARLTCLAGTSLKCAVVRDVIFVGEGFPYPFPRPHSCGSLRQPPL

SEQ ID NO: 49523 - protein, 317 aa, Zea mays
  Coding DNA Sequence Number=SeqID_7744
  Gene Ontology: Mol. function=catalytic activity; Cellular component =cytosol; Biological process=metabolic process
  Homolog annotation: Hit_ID=Q8LHP3; Match level="QueryCoverage=89%, HitCoverage=94%, E-value=2e-97, Identity=64%"; Hit description =Ripening-related protein-like
  Pfam annotation: Domain name=Hydrolase; Domain location=26-228; Score= 28.0; E_value=3.4e-05; Accession=PF00702.16; Description=haloacid dehalogenase-like hydrolase
MDCCSCFFCLLVVLAILLLKENKNASALARADMDDTLYPLSLGINLACRKNIQEYMLNKLRIEESQVPRMCLDLYREYGTTMAGLKVLGYGFDYDDFHACVHGTLPYEKVKPDPVLRQLLLSLPQRKIIFTNSDKAHAARVLEKLGLQDCFQGIVCFETLNPRPPTETEKNSSGSAGTILCKPSLASMEAVIEIAKLDAERTVFFDDSARNIAAGKAAGFRTVIVSVFSVSSPRVVRACVLQSTADADNRQPSMHGNLRMQVGSSALVPGADVALESIHNIKEALPELWEVAAAAAAGDRVDAVLRSTTAVETTVIA

SEQ ID NO: 49524 - protein, 452 aa, Zea mays
  Coding DNA Sequence Number=SeqID_7745
  Homolog annotation: Hit_ID=Q8LP97; Match level="QueryCoverage=57%, HitCoverage=72%, E-value=1e-60, Identity=53%"; Hit description =Transcription factor PCF8
  Pfam annotation: Domain name=TCP; Domain location=184-377; Score =115.8; E_value=1.3e-31; Accession=PF03634.4; Description=TCP family transcription factor
MESPQSFPAEPFVRYRLLFFTEKAAGVAAPARVLRCPLPLHSGPAACCSGTGRRISPAGKAGRRGGELSTARALPSPSLAGQIDRSPSGSRLRSLLYFRFARFPFQKEPIGLLLDRCARLDFFWEFNRRMGRDGGRVRMSRVLATGDERGMGEVAGVERAACKRPRGALDGGGSGSAAAWPACRVARAAAGGKDRHSKVVTARGLRDRRVRLSVPTAIQFYDIQDRLGVDQPSKAIEWLIRAAAAAIDGLPSLDCSFVFPHAAASPPGGAADDAELSTSETSKSSVLSLANAPVDNTAAHSQQDSHAYNNNAAAGGGAFADLILHCSANNSSKPVQQQPTLAYYATQPPNAHSASAISFETMLPHFSFLQEQPHHAIAFDRGTLQSNAAVAAPLWPTSQHACLLQRFAASPADATGLPSFFLGSGAAGASPVVPANAEPRLQLWDFKQERKT

SEQ ID NO: 49525 - protein, 123 aa, Zea mays
  Coding DNA Sequence Number=SeqID_7746
  Homolog annotation: Hit_ID=Q8SA91; Match level="QueryCoverage=79%, HitCoverage=4%, E-value=3e-18, Identity=46%"; Hit description =Putative gag-pol polyprotein
MDQAQFEGWRPDVEKRLDNLSLELNRANKFMERDTFASDFAKPGIIPSSGSVFRRPYVGISGVDGPDGHHMDHNHRECEFGRISSQTHDLVKGKLHETSPMTICNFLRVTGPDGSRGGYDSPP

SEQ ID NO: 49526 - protein, 137 aa, Zea mays
  Coding DNA Sequence Number=SeqID_7747
MATLFSNPLGCQRIPHSMCSPCIPHGQRVQNGLGMEVGQRETGLVAETTNLVAPNKDIRSATSGSVNGFCMMRTRKLQKAGLLSIYAEKYKYEPVAGVSQATAKPAAAALSSLDKITENLSSLPLCSRPVISNDKVF

SEQ ID NO: 49527 - protein, 379 aa, Zea mays
  Coding DNA Sequence Number=SeqID_7748
  Gene Ontology: Cellular component=cellulose and pectin-containing cell wall
  Homolog annotation: Hit_ID=Q153F8; Match level="QueryCoverage=82%, HitCoverage=99%, E-value=1e-123, Identity=60%"; Hit description =Pectin acetylesterase
  Pfam annotation: Domain name=PAE; Domain location=31-360; Score =604.2; E_value=1.2e-178; Accession=PF03283.4; Description =Pectinacetylesterase
MASSWVLALVLALSAGASLARGSEPWWNETQVYATTANSGGGNGVFVGLTLIQSAAAKGAVCLDGSLPGYHLHRGFGSGANSWLVNLEGGGWCNDRSSCVFRKGSRRGSSNHMERQLQFTGILSNKPEENPDFYNWNRVKVRYCDGGSFTGDGSDAAAGLYFRGQRIWQAAMDDLMAQGMRYANQLFRGHFHVPDAIYRIPGPSFWMLCRCVDVSGRREMRSFFNGIVRLQCFFPQNVLPTIRTPTFVLNTAYDVWQLQQSVAPRTADPQGLWSKCRTNHAFCNSNQLQFLQGFRNQMLDAVRGFSASRQNGLFINSCFAHCQSERQDTWYANNSPRLGNKKIADAVGDWFFERGNAKYTDCPYPCDGTCHHLVFRGDH

SEQ ID NO: 49528 - protein, 76 aa, Zea mays
  Coding DNA Sequence Number=SeqID_7749
  Subcellular localization annotation: CTP_CleavageSite=48; ConfidenceScore=5.15e-01
MSQCPSSEWSCRRASSQATSLNTNKNSGCWNWLTTISRNGAKICCVVSGAAVSGGQPREDDNILGEDDEGGDLPLR

SEQ ID NO: 49529 - protein, 47 aa, Zea mays
  Coding DNA Sequence Number=SeqID_7750
MDVSTANTSGALDMFGAPNLGHQECPNCRLGMWCQLAYEPSSLDLTQ

SEQ ID NO: 49530 - protein, 91 aa, Zea mays
  Coding DNA Sequence Number=SeqID_7751
  Homolog annotation: Hit_ID=Q9FJZ1; Match level="QueryCoverage=51%, HitCoverage=11%, E-value=2e-10, Identity=68%"; Hit description =Arabidopsis thaliana genomic DNA, chromosome 5, TAC clone:K1F13
MANIRLVGMVNSKVEQETDVTFTLDNSTGRLDFNKWNEHFLDFARAEVESEMETVIAAKNFEIARLSDRVQYYEAANRGMSQRNQEAIDWF

SEQ ID NO: 49531 - protein, 48 aa, Zea mays
  Coding DNA Sequence Number=SeqID_7752
MALDLCLPCRLIGLCNTVSVQFDFRAADQYYAVQVRRAASCLVSTTSS

SEQ ID NO: 49532 - protein, 43 aa, Zea mays
  Coding DNA Sequence Number=SeqID_7753
MGVGLVGGLLPILSALPDALLVVRDILDLEYVHICYITDALDM

SEQ ID NO: 49533 - protein, 80 aa, Zea mays
  Coding DNA Sequence Number=SeqID_7754
MALDLPVCPAGRLMGSARSMETARVCFVWNAFRVGCLILIIITCPAAPSQSTPTATIQPFVFFCQLEANNKNDRALFGVL

SEQ ID NO: 49534 - protein, 98 aa, Zea mays
  Coding DNA Sequence Number=SeqID_7755
MRASGGRPEDEVAVHRHGRLRSPLRHNLDEGGGAGHCVLAVIANVTSDFIEESGPLPFNQVRLSDCAYVAKNTVKVEALAAKGAHQPLKSSLHRLLLG

SEQ ID NO: 49535 - protein, 1025 aa, Zea mays
  Coding DNA Sequence Number=SeqID_7756
  Gene Ontology: Mol. function=protein kinase activity; Biological process=protein amino acid phosphorylation
  Homolog annotation: Hit_ID=Q0WP97; Match level="QueryCoverage=71%, HitCoverage=70%, E-value=1e-153, Identity=40%"; Hit description=COP1 like protein
  Pfam annotation: Domain name=WD40; Domain location=752-789; Score =13.2; E_value=0.98; Accession=PF00400.22; Description=WD domain, G -beta repeat
  Pfam annotation: Domain name=WD40; Domain location=837-875; Score =17.0; E_value=0.07; Accession=PF00400.22; Description=WD domain, G -beta repeat
  Pfam annotation: Domain name=WD40; Domain location=880-917; Score =30.7; E_value=5.2e-06; Accession=PF00400.22; Description=WD domain, G-beta repeat
  Pfam annotation: Domain name=WD40; Domain location=985-1023; Score =7.7; E_value=4.6; Accession=PF00400.22; Description=WD domain, G -beta repeat
  Pfam module annotation: Pfam domain module=WD40::WD40::WD40::WD40; Domain location=752-789::837-875::880-917::985-1023
MEGAAAAEVGGGGEDVQIKGAKESGQPAAAAQQPPPLPSGSEALEMPATPLPRDMDWSEHFSFFTSPGGFAGSSDGARGLASVGLSNSESRPDSVTQRGVDHGAEERVEELTLKNCISADAAQPEASAGGSTSGGDRPAVIKGLWGNFTRMARRTSYLASRENAALSYGDIASSRAGDASSRENLATSLANNIISRNNDVSGNEAPTSRVGYVNNEFKTPFHSQQILLSPWSNQDNALKVSSFSNRILDQMRSKTVAPPSGVLGSPLKSKSKGKGVAYQRAREEIRVQANARPRDPLDKIPTIPTSIHDSVARVDMLFSTSGDVSKSHSEGTSLRELIKPGRQTMSKFEKLHLFKQILDLVDNCHAQGFTLQHLRPSYFTILSSNQVKYIGSYTTQDLPTSIKQEFAREDLVSRKRAFGHRIDYQDSNGHGNLMLKHQKVGEQGLVAVRRLANTFLTDKIRDNQIEDNDPGISRQENFSYTTREHFKFVESYGSNMSSAQHVSSSGTQQPAFELRNIEESWYKSPEELSQFKGTPPSNIYSLGVLLFEKVPRRLASAFGYCIQILVQDQKQNKSPVSISEDDTESSLLLNFLSQLKEEKEMQAAKLSAELGSLQTDITEIDRRHSAGMRLSLEDMDVLPSSSLPGASVSALQGALLSGLLPASCKSSIYEERVMRNLVQLENAYYSMRSSVDTCETNVIKRPDNEALRVRENFHQRHSDSDAKGEKTDRLGCFFDGLCKYARHNRFEVRGILKNADVLSSPNVICSLSFDRDEEYFAAAGVSKKIKIFEFDALLNDRVDIHYPLVEMPSKSKLSCVCWNSYIKNYLASTDYDGTVQKNSIDTIRNVANVCCVQFSPYSSRMLAFGSADYKIYCYDLRNTRIPWCTISGHGKAVSYVRFLDPETLISASTDNTLKIWDLNQTNCSGLSADSCSLTLNGHSNEKNFVGLSVHDGYITCGSETNEVFSYYKDFPMPITSHRFGSIDPITGQVTNEDNQQFVSSVCWRGKSNMVVAANSSGSIKVLELV

SEQ ID NO: 49536 - protein, 45 aa, Zea mays
  Coding DNA Sequence Number=SeqID_7757
MARCGIVVAEQLRREIAASQRAQHPETFLQLRYMKDIVNIREMIR

SEQ ID NO: 49537 - protein, 53 aa, Zea mays
  Coding DNA Sequence Number=SeqID_7758
MRKLHFVGPPLKLPPESRVLIKPSGKTWIDDSLIGTGHYRKKRYKFPEDGSYD

SEQ ID NO: 49538 - protein, 42 aa, Zea mays
  Coding DNA Sequence Number=SeqID_7759
MDVLMIRYLGEDQQGLGKGQGISLRGEVIRVSWVITNGALLS

SEQ ID NO: 49539 - protein, 138 aa, Zea mays
  Coding DNA Sequence Number=SeqID_7760
MGRGKRGKGWPLRADDKRKHPPSPPLEDFGGSEYSEEEASSEYDRSPAPASPAASSEDSNDSMGLSTHAGLGGSDDSKDTSSEEVEDSSDSEEWSGGEGDDVEDDDNSGDDDGKGGGNNDDEDGNGEANDDSKGDDKG

SEQ ID NO: 49540 - protein, 69 aa, Zea mays
  Coding DNA Sequence Number=SeqID_7761
MATSASTSGEWLKGALQELRERKGSSLEFDSDLISGLVSFCELAPPSDATSYLECLGHNEMLIIVLLLV

SEQ ID NO: 49541 - protein, 329 aa, Zea mays
  Coding DNA Sequence Number=SeqID_7762
  Gene Ontology: Mol. function=peptidase activity
  Homolog annotation: Hit_ID=Q60D39; Match level="QueryCoverage=70%, HitCoverage=71%, E-value=1e-79, Identity=60%"; Hit description=CAAX amino terminal protease family protein, putative
  Subcellular localization annotation: CTP_CleavageSite=37; ConfidenceScore=5.57e-01
MASSSLSSPPLSLILLRPLPCIPVLLLRQRKPFPAVRVEARSQQRLQRRPVTGQWRRSCRRGGGYACFSYNAKNKTPPPSDKMHFAYSNFHHVFVVTGVDLVTLSVPKQSSDEWAIVRRWDVPWEWQTVVLSMVGCGVSFVLTGLVEQLALQELGFKAVEATIDEKAEILFFGQLSVTVVVLGVIFGITNTFRPFPDDVFRYDIKEPFKLQNGWLLWAGIGLFGAVISIALAGAAMTYLNGETPARETDSLVLLLPLIGSSTTSTAFLVGITGVLAPLLEETLFRGFLMVSLTKWFPTPACVLVSAAVFALAHLTPGQFPQLFILGNSL

SEQ ID NO: 49542 - protein, 419 aa, Zea mays
  Coding DNA Sequence Number=SeqID_7763
  Gene Ontology: Mol. function=DNA binding; Biological process =regulation of transcription
  Homolog annotation: Hit_ID=Q6Z538; Match level="QueryCoverage=85%, HitCoverage=92%, E-value=1e-105, Identity=52%"; Hit description =Putative NAC domain protein
  Pfam annotation: Domain name=NAM; Domain location=15-143; Score =303.2; E_value=4.7e-88; Accession=PF02365.6; Description=No apical meristem (NAM) protein
MDDDRADTNKPDEVLLPGFRFHPTDEELISFYLRRKIQQRPLSVELIRQLDIYKYDPWDLPKLSSSGEKEWYFYCPRDRKYRNSARPNRVTGAGFWKATGTDRPVYSSEGAKCIGLKKSLVFYKGRAAKGIKTDWMMHEYRLPSLGDPSRPNKTPKDKNIPADDAWAICRVFKKPNSVAQRVLSRSWGPASIATADPELLPALQSIQASRFALETSTCSANRFNSQQQQNLSSSQDGSSCKVITFNRSPYLPSEKDIHSSSVVILPLEIQSQQKSSDVTSALLSMAPGILSSANEAIPNTEFGLLGPSNGYPIDWATDTSGGIVNSDDDPYKRKSGNGYSSGYECGIPRKIKFPFNLGNDMMFLMVHGGEVIIDGGTKSSMGGGRRAWNSSQQIWSDIAPYDLDGRLIESRWLEDVNSL

SEQ ID NO: 49543 - protein, 164 aa, Zea mays
  Coding DNA Sequence Number=SeqID_7764
MKPCTARRELNANWNLGTRAHRSTTAKCQRAEQDATQRSNARGMNESSRGAQRLHGEAERAQETWPGRGFQGQAEKTGHEPSSATHRKMKKKRLGWEIGDRLGREDACRLYRGWELEGAASGRARPGTRRRAQGLRDASREKATAMATSSKQREVDGLVEQGGS

SEQ ID NO: 49544 - protein, 164 aa, Zea mays
  Coding DNA Sequence Number=SeqID_7765
MKLCTARRELNASWNLGTRAHRSTTAKCQRAEQDATQRSNTRGMNESSRGAQRLHGEAERAQETWPGRGFQGQAEKTGHEPSSATHRKMKKKRLGWEIGDRLGREDACRLYRGWELEGAASGRARPGTRRRAQGLRDASREKATAMATSSKQREVDGLVEQGGS

SEQ ID NO: 49545 - protein, 278 aa, Zea mays
  Coding DNA Sequence Number=SeqID_7766
  Gene Ontology: Mol. function=RNA-directed DNA polymerase activity; Cellular component=intracellular; Biological process=RNA-dependent DNA replication
  Homolog annotation: Hit_ID=UPI00004C1732; Match level="QueryCoverage =99%, HitCoverage=18%, E-value=1e-139, Identity=88%"; Hit description= UPI00004C1732 related cluster
MVAGFIKEVFHPEWSANPMLVKEKGGKWRMCVDYTGLNKACPKVPYPLPRINQIVDSTAGNAGATYQRCMNHVFEEHIGRMVEAYVDDIVVKTRKASDLLSDLEATFSCLKAKSVKLNPEKCVFGVPRGMLLGIIVSEQGIEANPEKIAAITNMGPIKDLKGVQRVMRCLAALNRFISRLGEKGLPLYRLLRKAERFTWTPEAEEALGNLKALLINVPILVPPAAGEALLIYVAATTQVVSTAIVVERQEEGHALLVQRPVYFISEVLSETKVRYPQI

SEQ ID NO: 49546 - protein, 113 aa, Zea mays
  Coding DNA Sequence Number=SeqID_7767
MASAVFGFAVEDKADEVGPQISGRENEKGLGEEVKPGRARGENGSGPNGWSAAQRLHIFTHKSCYPSAKRLPIPYTSTEEARQGIPRRTAIAAKSTQGPPYTDHSLTALAPFG

SEQ ID NO: 49547 - protein, 74 aa, Zea mays
  Coding DNA Sequence Number=SeqID_7768
MNRVFDAIGFVYTDYRYPLWGQGKKRKAVASATPVEPMPKGKKLKSTEEPVIMLKLPSVKLVEMKADKDKGLNS

SEQ ID NO: 49548 - protein, 79 aa, Zea mays
  Coding DNA Sequence Number=SeqID_7769
MAHRSFSGPPETFSQPFYPLCPWIHGLFTTTEFVVAPSSPLPISGDPGDTLACASLNSGELTTAERSGTARSRLFPRSQ

SEQ ID NO: 49549 - protein, 115 aa, Zea mays
  Coding DNA Sequence Number=SeqID_7770
MEGLVPLLYKAIKERRSNAGGRRGYRTGGALPSSAPVDLDDSEQRRQWLQLQELRSPAHAAAAVAVAETEGSLLHRRNLSLEELAGEVGFSPDRRLRVPLPKARSVRAFACMGAA

SEQ ID NO: 49550 - protein, 48 aa, Zea mays
  Coding DNA Sequence Number=SeqID_7771
MREIDGGGRKVVEGSQGSGGELILFLLYDALNGSDIGVLVEQPQPMAI

SEQ ID NO: 49551 - protein, 482 aa, Zea mays
  Coding DNA Sequence Number=SeqID_7772
  Homolog annotation: Hit_ID=Q2R358; Match level="QueryCoverage=19%, HitCoverage=33%, E-value=1e-09, Identity=36%"; Hit description =Expressed protein
  Pfam annotation: Domain name=zf-CCHC; Domain location=331-348; Score =5.4; E_value=0.13; Accession=PF00098.13; Description=Zinc knuckle
  Pfam annotation: Domain name=zf-CCHC; Domain location=350-367; Score =14.8; E_value=0.0036; Accession=PF00098.13; Description=Zinc knuckle
  Pfam module annotation: Pfam domain module=zf-CCHC::zf-CCHC; Domain location=331-348::350-367
  Subcellular localization annotation: CTP_CleavageSite=46; ConfidenceScore=5.40e-01
MGNTPSCIPLAPAGGGGASSSSSAAATTTKVIHADGAVTRLARPVRASELMLEHPGQFVCDPRRLAVGCRVPGVAAAELLQPRRAYFLLPMDMLYSVLTDEEMAALSESHSHAASSWKRIAAAARRHHGRLRRSGKDEACGGGARVCPMLGLLETGGLGADNSKRDELRASPAGKSGGGGAGLRRHRSWQPVLDTIEEDTKIWDRMCLPPLCPPPPLHPDAQTSQSPTPTSAPGPTTTTLPSPASGSPSPSLSPPSLPASRSNAQRWSDGGGNHDGRLPSYKDVLVSSSSTPLPLTLAGDDWVTVVNRRARWRRPCPLKPPPRPVPADLRGKCFNCFSPSHHAVVCHRPVRCFVCRLLGHRAHMCPRRRTTPPRPRRSKVWRPVSHALPPMDTSDCAASDHEGGSGAGSSGGAGSGSGGGGHRRTRRGHRRQRASSAAGTDGHGDPSDGLPPSPLWRTFVPILCPLPRLVVSSNAPGGIDGQ

SEQ ID NO: 49552 - protein, 187 aa, Zea mays
  Coding DNA Sequence Number=SeqID_7773
MDITSNMDIAKVILECVARRQLIKPRTEARRASRYQVHGRRSRRLRNPKPRVKKKACKVKAKIQLSLVHRTVSGGAPDSVRCARLNSVEKVALGRSLATYVYNSPDCPVVHRTVRHRTVSGGAPDCPVRHPTEGKICLPGLLPTAPRPLVPIKGTPRRLKQGHFETGSSIPLQPTRRVFSFHCVLSL

SEQ ID NO: 49553 - protein, 110 aa, Zea mays
  Coding DNA Sequence Number=SeqID_7774
MGGSEAATCPEKVAYSKASTVGSDPHGRAPDPRIYNLDPQGWSRTPGHTVQTPKVGLGPPRVQAGPLEWDPDPPYGVRASHRGVPRSQDRTYLGLEQDPSGGPVPTCVQT

SEQ ID NO: 49554 - protein, 56 aa, Zea mays
  Coding DNA Sequence Number=SeqID_7775
  Subcellular localization annotation: CTP_CleavageSite=22; ConfidenceScore=5.22e-01
MWFDGGGRSTARNFPALQQSPTVDNPSNMFPRRVVYHYIKRKKVSSDSSRNRSGPE

SEQ ID NO: 49555 - protein, 173 aa, Zea mays
  Coding DNA Sequence Number=SeqID_7776
AGRATTSRFSGGAKHDRAITIGRIIFGTGTSRDEPDVAQRSGGELAVTAEVGDDGGSLDAAESRAGKGRGGSPERGRARGRPSRGAAGRGRARRDRAGSGWGGAGAAKPGHGETGPAEVGARRGGLAGRLAEQPGERGRGREKGKGEGRRGGLTAAGEGGAAAALGRERRRRR

SEQ ID NO: 49556 - protein, 157 aa, Zea mays
  Coding DNA Sequence Number=SeqID_7777
MARCSPARNHAFWCTTTYVYTWDSVFATPQNTRQVHGCRHKDGGASERAVAHFVGLPSQSRQIECHARDAGWVRGGAWGGGMGEHRDDDAAASRGQRQGRRGWLSRLGERVGHVVDADYGSGVSKMETPPMDRRRCARIEGGRGWKGAGITVWHAVR

SEQ ID NO: 49557 - protein, 209 aa, Zea mays
  Coding DNA Sequence Number=SeqID_7778
MASGAAAPVKMSTAVTACILLAVLLPMAPKLVMDDVCSDRCGTLCDTFADGFCTGNANDPGLCPTALEEPCKPTLVTGGGFHAGPQLSQTPQRDCGIIVAAMWARTVSPPSTSHRRICRVDFLPRISLRLLGLPENPACDGHWGGDSLASLGYKIVPRHSLDPPSKEPEDLTRVLHHQIIVRSWACDWVFGHGTAVLESYAAPAIAVEY

SEQ ID NO: 49558 - protein, 105 aa, Zea mays
  Coding DNA Sequence Number=SeqID_7779
MASGAAAPVKMSTAVTACILLAVLLPMAPKLVMGDCSGSCVTLCDTFADGFCTGNADPAFCPPEVQEQCKPTNKGECKSSQQASSPCIRTLQRELREEACNKLPR

SEQ ID NO: 49559 - protein, 103 aa, Zea mays
  Coding DNA Sequence Number=SeqID_7780
MPWTTVHILVFAIVPFSTIRPRDRDCGVASAGRLSSISFEATNGVPEQLEQQAGVSMPTYIWDATSGLCTAAANAVASTSTTIPCVNSLMSDAFAKPSDIRFP

SEQ ID NO: 49560 - protein, 49 aa, Zea mays
  Coding DNA Sequence Number=SeqID_7781
MSVASCASVFARPSGPVLALLGNPSPPGDRVCLVSGDLTAVKETTPATK

SEQ ID NO: 49561 - protein, 95 aa, Zea mays
  Coding DNA Sequence Number=SeqID_7782
  Subcellular localization annotation: CTP_CleavageSite=40; ConfidenceScore=5.06e-01
MAWPRPAVGLDSGLARPADAGRVPRAGRRRLLARSGSSVTCDSEFGLWSSHMHNCYRAKSEEAMDECKGWKEEWGWSMSMIRIRSAAIGLGGDLP

SEQ ID NO: 49562 - protein, 793 aa, Zea mays
  Coding DNA Sequence Number=SeqID_7783
  Gene Ontology: Mol. function=protein serine/threonine kinase activity; Biological process=protein amino acid phosphorylation
  Homolog annotation: Hit_ID=Q5ZC61; Match level="QueryCoverage=67%, HitCoverage=96%, E-value=0.0, Identity=61%"; Hit description =Putative receptor serine/threonine kinase PR5K
  Pfam annotation: Domain name=Pkinase; Domain location=263-533; Score =146.5; E_value=7.1e-41; Accession=PF00069.15; Description=Protein kinase domain
  Pfam annotation: Domain name=Pkinase_Tyr; Domain location=263-533; Score=79.0; E_value=1.5e-20; Accession=PF07714.7; Description =Protein tyrosine kinase
  Pfam module annotation: Pfam domain module=Pkinase::Pkinase_Tyr; Domain location=263-533::263-533
AASAADSSSGCWPKTCGDLNVTYPFWVEEPVRPPCGPPSFQLMCNGSRAFLSRSVYQAYQVLGIFPENNSFHVVDHNFPLVTGCPAPTMNISLPGAFVFSRANKELLFLGKCTGFPPAESAGFRSLPCDNSSFVRLGDGRNFSSQSIQGGVPQGCLFTVLPTLGAPDGNGDDYVASMKNGFLVDWEAVPGDCPKCMARGGECTYGGPDAEFACDCSGGKQKLEFFLCKKTSSAIEENIEALILAHGSLAPKRYRYSEVTKITSSLNIKLGEGGYGMVFKGRLDDGRLVAVKFLHDSKGDGEEFVNEVMSIGRTSHINIVSLFGFCLEGSKRALIYEYMSNGSLDKYIYTENPKAVLGWDKLYTIAIGIARGLEYLHHSCNTRIVHFDIKPQNILLDQNFHPKIADFGLAKLCHMKESKLSMTGARGTPGFIAPEVHSRTFGVVSTKADVYSYGMMLLEMVGGRKNVNSAAQESSEKYFPHWIYDHFGQEDGLQACEVTRENEGIAKKLSVIGLSCIQILPMHRPTIGKVMEMFERGSDELDMPPRQNFSQIFEDPVHSLNAETMSMISGTKAKAYSEVLKMKEISVTAVVVVAALLLHLSALPRLGLATATADTNQTSGNDTSCTSARCGNLSVTYPFSLAGVQPIYCGFPSVLPDDMRRRQPHLPQQDVQGSPLQRPPHILRQQPTGLWWSPSRPLLPATANAASRTSTCLPASTSCPSTSVPQTRSSLSSTAAMSLRGYDFNRHATTRQHYSGSVHLRRRRAVPRFDELQQRERAVHVHLPRREALPTFSR

SEQ ID NO: 49563 - protein, 231 aa, Zea mays
  Coding DNA Sequence Number=SeqID_7784
  Gene Ontology: Mol. function=protein serine/threonine kinase activity; Biological process=protein amino acid phosphorylation
  Homolog annotation: Hit_ID=Q5ZC62; Match level="QueryCoverage=80%, HitCoverage=29%, E-value=8e-42, Identity=49%"; Hit description =Putative receptor serine/threonine kinase PR5K
MASTSFVWSVWTVVSLTLTLASASADDQEGGAHCPPVLCGGVKIAFPFGVVPEQATATNCGAIGFQVRCVNGTPYLGYSRYDHWLQVLSVFYNNASLIVADSHELETLGASDGGGSVVCRIPENNSSTKVGLPFSISPLNQDLILYNCTKAPAPDEEGLVEMTRCGNRTFARIGGRYGEPDGGGYSLDGCGATVVPVLVKDDGKANASDYEQLISGGFLLTWQWQTRNRPV

SEQ ID NO: 49564 - protein, 329 aa, Zea mays
  Coding DNA Sequence Number=SeqID_7785
MEGRYNTPTAAWGRGARKLSAARHARTSVAVVIIANISRNKIAFANLAEQETTSRPARTRRQLVRRHRRGGRIHECHLQPNPPTTEFRGRNSVGRSHTHAKEGTTAEISSADSAPNHPGLGRQRGNAAAATSRARNLAAAPATIRQGRARWCECAAGCLAAAAPTTLARTTPERAQARPALGRPPPPRARTLLHHPVHKSGTWTSCAIRRPSPLHCLSPADDNAPATQRTAPALADADVLLRRPVQLYATDCGAGRPTAARRRWSSPAVSAGGGSSSTPELKHSRGVAAVAGCSAGSARGDPEHDACESRLPLRLRIPHQNLTIVVKFY

SEQ ID NO: 49565 - protein, 678 aa, Zea mays
  Coding DNA Sequence Number=SeqID_7786
  Gene Ontology: Mol. function=protein serine/threonine kinase activity; Cellular component=nucleus; Biological process=protein amino acid phosphorylation
  Homolog annotation: Hit_ID=Q5N7Q8; Match level="QueryCoverage=44%, HitCoverage=42%, E-value=1e-103, Identity=62%"; Hit description=Wall- associated kinase 4-like
  Pfam annotation: Domain name=Pkinase; Domain location=363-620; Score =92.4; E_value=1.4e-24; Accession=PF00069.15; Description=Protein kinase domain
  Pfam annotation: Domain name=Pkinase_Tyr; Domain location=363-620; Score=72.1; E_value=1.7e-18; Accession=PF07714.7; Description =Protein tyrosine kinase
  Pfam module annotation: Pfam domain module=Pkinase::Pkinase_Tyr; Domain location=363-620::363-620
MGCGSVLVAARLSLVSWVWMAAWPWQWHCHPVPPVTLCPPTRRGGVSIALPFGLVPDHAMEASCGVIGFHGGCNATVVPMLARTGDVDPANYREFVREGFLLTWQLPPRSSPPSPAGVDHDRSKAFSPSSSYPSSGRLAGLFHSVFGSGGCWPKTCGHLNVTYPFWVEEPGRAPCGPPSFQLKCNGSGAFLSISVYQAYQVLDIFPENSSFHVVDHNLPLATGCPAPTMNISLFSPGTFVFSGLNRELLFLGKCTGFPPAESAGFRSLPCDNSSFVRLGDGRNFSSQGIQGGVPHGCLFTVVPVLGAPDGNGDDDDYVASMRNGFLVDWKAVPGDCPKCMARGGECTYGGPDAEFACDCSGGKCGKLRDGRVVAVKRLYKNNYKRVEQFINEVDILSRLLHQNLVILYGCTSRSSRDLMLVYEFIPNGTVADHVHGSRASERGLTWPRRMSIAIETAEALAYLHAVEIIHRDVKTNNILLDNSFHVKVADFGLSRLYPPEVTHVSTVPQGTPGYVDPVYHQCYKLTEKSDVYSFGVVLVELVSSKPAVDMGRSHSEINLANMALNRIQNHEVGQLVDPELGYETDGETKRSIDLVAELAFRCLQLERDSRPSMKEVVEALNRIRNGDSLENNKTDRSSSSPKEDARLLTSSIQYSPDSVIHRFHSQSTTHSAASNASG

SEQ ID NO: 49566 - protein, 130 aa, Zea mays
  Coding DNA Sequence Number=SeqID_7787
  Subcellular localization annotation: CTP_CleavageSite=43; ConfidenceScore=5.38e-01
MSPTVAKWFVPDARGTMDSRRSSPLSPRGLRLPSLCVSRLMGLAAEVWTYIRAVERSGLASSDESEYSSNEEDSSEEDGGGDGEGDDDDDDDDDGGDGGGDDGDDGSRGSNGSSRGGSGGGGRGGNKASG

SEQ ID NO: 49567 - protein, 145 aa, Zea mays
  Coding DNA Sequence Number=SeqID_7788
MNEIKGLSSPGCGSGKWKTRMMTERTRMTEALRGSPVTRANRWGLERLTVEVFCPIAAPYSPSTIGEVGRCSVRTPDSLMNYSGRTLRKPESDQFMRCLGLGTGQCPVRRWMHHLLVFAPYFVEFPNSFSLLVYVELYAPEINDN

SEQ ID NO: 49568 - protein, 124 aa, Zea mays
  Coding DNA Sequence Number=SeqID_7789
MEHRHTIRNQRGRRRRRSYPAPSSQRAPPLPTRSVFLPCASWHSCPDRGPPPPCTMGVEFSPVPVQHASAVADSCRGPPPLAAPASTTTFTRPPASLTVHPALPRGSRRRAHLGSCTGAAVLRA

SEQ ID NO: 49569 - protein, 137 aa, Zea mays
  Coding DNA Sequence Number=SeqID_7790
MVQGGEGPRSGQLCHDTHGRKTERVGKGGARWLLGAEYDLLLLLPLWFLMVWRCSIFLCLLSLDDGARRMAASRRGGVLIYMPQLNPNYPRGTRINTVGSNNRRSARDFVEIRLSEGKNTATLWPTRHTREKLHMQG

SEQ ID NO: 49570 - protein, 220 aa, Zea mays
  Coding DNA Sequence Number=SeqID_7791
  Gene Ontology: Mol. function=structural molecule activity; Cellular component=protein complex; Biological process=microtubule-based movement
  Homolog annotation: Hit_ID=P28551; Match level="QueryCoverage=65%, HitCoverage=29%, E-value=2e-16, Identity=39%"; Hit description =Tubulin beta chain
  Pfam annotation: Domain name=Tubulin_C; Domain location=15-139; Score= -20.1; E_value=0.079; Accession=PF03953.7; Description=TubulinFtsZ family, C-terminal domain
MTSVKCCLRVLEQRNSYLQKFAVNLISFSHLLFVVVGFHSLTSRYSQQYCVLIVPELIQQMWDSKNVMCAKMDKSSCYEVVLLGTITRVQQLLQDLFNGKELCKHIIFDEMEFREVESNMICVCLHEEDHVILWETPRLENWFCRTKIFLKLLINGQKCQSSLCGQIFMQRRLVSLILPCLGTSKFWRGGICHGRYLDAGQTSRRGCSPTAKGNGERDTL

SEQ ID NO: 49571 - protein, 125 aa, Zea mays
  Coding DNA Sequence Number=SeqID_7792
MDAAAAALHAVAGEHAGADRCHRCRKQAQGRGLPPRAHEHERRRHTGPRVRKRVDADAAPRLNGVPPPSQVTPGGGPISFLAGPAQAPARLDPPCRVPSFFVAFVGSVAAAASSAGSTAVVTFPG

SEQ ID NO: 49572 - protein, 173 aa, Zea mays
  Coding DNA Sequence Number=SeqID_7793
MGWPRLPPPTGGPNGPRSGRHVGRLGGEGGEWRDKPRRGRCTAQKVGTRRGSAGEARARRSAPPRRSARARTSPQRGHGEGLTLGDCGRGYATRPRARSDVLAAGTASGQAPGLAAGRARARQRPAHGAAARPGVGGSGQGTCLARSARHSAGAWRGLRGANSLALSDLGQGA

SEQ ID NO: 49573 - protein, 90 aa, Zea mays
  Coding DNA Sequence Number=SeqID_7794
  Subcellular localization annotation: CTP_CleavageSite=35; ConfidenceScore=5.34e-01
MAARPHRRQVGTASGQKSVPTSSQARDLFPRVVIRASPGANHNADVNPGARVTDGEGKILMNLEIQSSKVVLIPLKFRVSYLGVLGSFCN

SEQ ID NO: 49574 - protein, 232 aa, Zea mays
  Coding DNA Sequence Number=SeqID_7795
  Gene Ontology: Mol. function=protein binding; Cellular component =spliceosome; Biological process=mRNA processing
  Homolog annotation: Hit_ID=UPI0000DA43ED; Match level="QueryCoverage =93%, HitCoverage=99%, E-value=5e-22, Identity=34%"; Hit description =PREDICTED: similar to keratinocytes proline-rich protein
MAPPVDVVSPCPSLGEVEAPPRLRSSPSSKVEVEFEPPGRTRRRPSADAKAESGPWGRAKRSSSSSGAEPESEPWGRAKRSSSSSGAEPESEPWGRAKRSSSSSGAEPESEPWGRAKRSSSSSRAEPEAKPWGRAKRSSSSSGAELESEPWGRAKRSSSSSGAEPESEPWGRAKRSSLWRLRPNLVAVSLTLSSGTAVGTAQAALSSCQTSQWSGEVTAVTSALSAGGRASG

SEQ ID NO: 49575 - protein, 262 aa, Zea mays
  Coding DNA Sequence Number=SeqID_7796
  Gene Ontology: Mol. function=ubiquitin-protein ligase activity; Cellular component=ubiquitin ligase complex; Biological process =protein ubiquitination
  Subcellular localization annotation: CTP_CleavageSite=27; ConfidenceScore=5.36e-01
MASPAGANSGASSSRGTPLPLPFPFPAAAHFPSRGAGPFLSQHYHPPSTSDGDDEVEEDEGSMDDGSAEEDDAELSDGGALGSPRRRAFSAPGIGRMEINGGNGVRSIQEGQQWHLCNHGIEIGRPSPGGDEPGTIPRDVRVENGHGVVGRRDGGPASSYWDLLRAHLSDPLTLIGWMATGLKPAVEVLETCTCGCGFNIKPTPVPVTCDRGVLMDDALILSCGHSYGSSGMQHVYRMKACGKCGMPITEAAIRPNLGMDLN

SEQ ID NO: 49576 - protein, 221 aa, Zea mays
  Coding DNA Sequence Number=SeqID_7797
  Gene Ontology: Mol. function=structural constituent of ribosome; Cellular component=ribonucleoprotein complex; Biological process =translation
  Homolog annotation: Hit_ID=P49216; Match level="QueryCoverage=55%, HitCoverage=62%, E-value=7e-27, Identity=54%"; Hit description=40S ribosomal protein S26
  Pfam annotation: Domain name=Ribosomal_S26e; Domain location=1-150; Score=198.7; E_value=1.4e-56; Accession=PF01283.9; Description =Ribosomal protein S26e
MTFKRRNGGRNKHGRGHVKYIRCSNCAKCCPKLCVYYDIVILEPNPAFCVLGYFDLRCNIWAQLSVETVVENDKAIKRFLVRNIVEQAAVRDVQEACVHDGYVLPKLYAKVHHCVSCAIHAHIVRVRSRENRRNRRSLLLECTHWYIISTHFGMPLFVQFPVVLHVSLVLDKAISVVLMMAQGQVRAHRAQVLLPQQLPLLPLLVPKFRNAIRGLVLSPMG

SEQ ID NO: 49577 - protein, 171 aa, Zea mays
  Coding DNA Sequence Number=SeqID_7798
  Homolog annotation: Hit_ID=UPI0000E24E2A; Match level="QueryCoverage =36%, HitCoverage=44%, E-value=3e-07, Identity=44%"; Hit description =PREDICTED: similar to large glycine-rich repeat low complexity protein, possible ...
  Homolog annotation: Hit description=cryptosporidium-specific paralog
  Subcellular localization annotation: CTP_CleavageSite=44; ConfidenceScore=5.02e-01
MPGRSPSPGVGRSGVRRLLGLSPSPSPRSGEAEIVVFWDLARVRALGRAEFAVFRDLARVRALGRAEFAVFRDLARVRALGRAEFAVFRDLARVRALGRAEFAVFRDLSFLWCLRPGLVACQPHSVEWHRSRSGAGGAVFLSGWSVERRSDGGHFGSGGARQDKGVRPPLH

SEQ ID NO: 49578 - protein, 392 aa, Zea mays
  Coding DNA Sequence Number=SeqID_7799
  Gene Ontology: Mol. function=DNA binding; Cellular component=nucleus; Biological process=regulation of transcription
  Homolog annotation: Hit_ID=Q75HE5; Match level="QueryCoverage=79%, HitCoverage=98%, E-value=1e-122, Identity=85%"; Hit description =Putative NAC-domain protein
  Pfam annotation: Domain name=NAM; Domain location=96-222; Score =296.2; E_value=6e-86; Accession=PF02365.6; Description=No apical meristem (NAM) protein
MSVPAAATEKQVQCTGTRPQPALTPDSDGGTTRPRDGERSQSAKATHRFYPPIGVAAASIVGFSSIQIHRQQASKQAGAMGLPMRRERDAEAELNLPPGFRFHPTDDELVEHYLCRKAAGQRLPVPIIAEVDLYRFDPWDLPERALFGAREWYFFTPRDRKYPNGSRPNRAAGNGYWKATGADKPVAPRGRTLGIKKALVFYAGKAPRGVKTDWIMHEYRLADAGRAAAAKKGSLRLDDWGAVPAVQQEERVGEDAAGEDRRRRASAPPRRRRWTWSTSHTHSHSQSHSHSWGETRTPESEIVDNDPFPELDSFPAFQDPAMMMTVPKEEQVDGCSAKSGNLFVDLSYDDIQGMYSGLDMLPPPGEDFYSSLFASPRVKGNQPAGAAGLGQF

SEQ ID NO: 49579 - protein, 378 aa, Zea mays
  Coding DNA Sequence Number=SeqID_7800
MAKPPRAPRPKLQTPRAPARRLLGLGGLGVAAAAYVGVDYLRHLSPAWHGRLQPALWAVLALAAAARAPFYRHWSAELRAALPFLGSIAFMLAAFLCEAISVRFVSAVMGLHWHRSLLLILPRLPSPSDGLLLWVLFDCIKAPGLGIATRYMFTMAIGRKYYVPYASDSNAIRRVITQDMAYAAVQAYPDEYKPDWGRMSFLVDILRPTPGEGPSWYHLLKKASGGCNDLMYSGHMLVAVLTAMAWTEAYGGWISVAIWLLVLHSAQREVRERHHYSVDCVAAIYVGVLLWRMTGFIWSARDLARARRLAKLEEVQSRLVHAAKDSDIDEIRGLLKEVELSGQERQGFSQRAILAFAAGTIIFTLSCVLIAFTATSDG

SEQ ID NO: 49580 - protein, 147 aa, Zea mays
  Coding DNA Sequence Number=SeqID_7801
  Subcellular localization annotation: CTP_CleavageSite=6; ConfidenceScore=5.07e-01
MLGQPSVSLVSSTKPTVTRPLKVGVVLSGGQTPGGHNVIYDIFRDPIFFCMMQGLTPTPVFPLIVGVYVVALAISRSLCQGLLLSYSDESHGATFGNYGLNDLYQRDVFCADYKEELGKRRLGELDMKKDYEYASVNPIAHRDITLY

SEQ ID NO: 49581 - protein, 67 aa, Zea mays
  Coding DNA Sequence Number=SeqID_7802
  Gene Ontology: Mol. function=structural constituent of ribosome; Cellular component=intracellular; Biological process=translation
  Homolog annotation: Hit_ID=Q7Y1I5; Match level="QueryCoverage=72%, HitCoverage=12%, E-value=6e-11, Identity=63%"; Hit description =Putative 60S ribosomal protein L1
MEKVGKERDPHIQGNRAEENIERDPPQLKLRRLASDKAAGKAWYKTMVSDSDYTEFKNFSKWLGVTQ

SEQ ID NO: 49582 - protein, 404 aa, Zea mays
  Coding DNA Sequence Number=SeqID_7803
  Gene Ontology: Mol. function=N-acetyltransferase activity; Biological process=metabolic process
  Homolog annotation: Hit_ID=Q8W5G4; Match level="QueryCoverage=94%, HitCoverage=95%, E-value=1e-168, Identity=78%"; Hit description =Putative acetyl transferase
  Pfam annotation: Domain name=Acetyltransf_1; Domain location=72-167; Score=63.7; E_value=5.8e-16; Accession=PF00583.14; Description =Acetyltransferase (GNAT) family
  Pfam annotation: Domain name=FR47; Domain location=89-176; Score= -8.9; E_value=0.09; Accession=PF08445.1; Description=FR47-like protein
  Pfam module annotation: Pfam domain module=Acetyltransf_1::FR47; Domain location=72-167::89-176
MVEAPAVVVVVRAYDAARDRVGVEEVERACEVGCSGGGKMCLFTDLLGDPLCRIRHSPDSLMLVAETATGPNSTEIAGVVRGCVKTVVSAGTTTTQQANKDDPIYTKVGYILGLRVSPSHRRKGVGKKLVDRMEEWFRQRGAEYSYMATEQDNEASVRLFTGRCGYAKFRTPSVLVHPVFRHALRPSRSAAIVALEPREAELLYRWHFAGVEFFPADIGAVLSNALSLGTFLALPSSPARWEGAEAFVAAPPASWAVLSVWNCMDAFRLEVRGAPRLMRAAAGATRLVDRAAPWLGIPSIPNLFAPFGLYFLYGLGGAGPDAPRLARALCRSAHNMARDGGCGVVATEVGACEPVRAGVPHWARLGAEDLWCIKRLADGYGSGPLGDWTKAPARRSIFIDPREF

SEQ ID NO: 49583 - protein, 92 aa, Zea mays
  Coding DNA Sequence Number=SeqID_7804
MEAVCGNLKRLVNLSETYSYAYSGRGLVAFVCRRVTYGELSSSGAPVKVLLEINGESLEVSLFRLAPDVDNLALAELARRQQDVISIEGPRL

SEQ ID NO: 49584 - protein, 68 aa, Zea mays
  Coding DNA Sequence Number=SeqID_7805
MAWATRHRSRDGGQFALRWDGFPELPFGAPVLLPNMASPKAGEFRSTLPTDDLTRLTSREMVRLHVLG

SEQ ID NO: 49585 - protein, 318 aa, Zea mays
  Coding DNA Sequence Number=SeqID_7806
  Homolog annotation: Hit_ID=Q2R1N0; Match level="QueryCoverage=28%, HitCoverage=18%, E-value=6e-21, Identity=57%"; Hit description=UDP -glucoronosyl and UDP-glucosyl transferase family protein, expressed
MLAGLLVELRDTTRLVAFVTDQFGITFFTAAHDASVTAQCLFMPMNLHALSLVLHLPEQASFMPGEFRDLAEPVRLPDCVSIPGPNIVLPFQSLWTRTGPGLPSTPSVAVETRAERARRRWSSGRCMRAGAEGRGRPGRRGARASAPTVFRASRRRGGGMDLCGAVAECGRRRGWLWTRRSDGGVGEWTYADAGGAGRGWGSGARGLPWIGAICGLASHKERGSGARGKPTLLGERGKAATPSHDLWAFSPISRRARKGEPGARAAMDGSWRCSRGWGSGARGLPERGTGLWSRVAQKGRMRCKGRTVHQRKYGRLHY

SEQ ID NO: 49586 - protein, 123 aa, Zea mays
  Coding DNA Sequence Number=SeqID_7807
MSGVMMIPFLPCRHDNYLKTTKVKIETHPDSSRRARDGPTKLPMSRKLGDRAIGHLLVFTSPFIGKTDQRADTRLNKEGLNEMPPAGRAPQRDCSLTLNPTKGWSDLTWITRLQLCDLLPCAD

SEQ ID NO: 49587 - protein, 118 aa, Zea mays
  Coding DNA Sequence Number=SeqID_7808
  Subcellular localization annotation: CTP_CleavageSite=59; ConfidenceScore=5.18e-01
MTVGEGFCRMAHRTLSGAPATSPGRWVPTVGASDNGATGQSGGASDRRSSDPCSLMGQRAEAGLGSMSVCPSPSLYRGADVELKWLLQCSAWSLARFTREYMAFNALLLGQLVEAELG

SEQ ID NO: 49588 - protein, 251 aa, Zea mays
  Coding DNA Sequence Number=SeqID_7809
  Gene Ontology: Mol. function=protein serine/threonine kinase activity; Cellular component=nucleus; Biological process=protein amino acid phosphorylation
  Homolog annotation: Hit_ID=Q9M598; Match level="QueryCoverage=98%, HitCoverage=74%, E-value=1e-94, Identity=57%"; Hit description =Protein kinase MK5
  Pfam annotation: Domain name=Pkinase; Domain location=1-246; Score =94.2; E_value=4e-25; Accession=PF00069.15; Description=Protein kinase domain
  Pfam annotation: Domain name=Pkinase_Tyr; Domain location=2-244; Score=-130.5; E_value=0.00018; Accession=PF07714.7; Description =Protein tyrosine kinase
  Pfam module annotation: Pfam domain module=Pkinase::Pkinase_Tyr; Domain location=1-246::2-244
MGEGTFGQVLECWDRESKEMVAIKIVRSVKKYSDAAMIEIDVLQKLAKNDAAGKHCVQIRNWFDYRSHICILIHTDLKPENILLVSSDYVKLPDPKDGSFSRKLPKSSAIKLIDFGSAAYHHQDRSYIVSTRHYRAPEVILGHGWSYPCDIWSVGCILVELCSLFAFRILSQHAEKYVRKGGLNWPQAITTVESVRAVLKLPRLQNLVMQHVDHSAGDFIDLLKRLLAYEPSGRLTAQEALGHVFFTRYRQ

SEQ ID NO: 49589 - protein, 175 aa, Zea mays
  Coding DNA Sequence Number=SeqID_7810
PDCPVCQAEQRSSTPTVVCNAIVNSEQRTYAQKSEQAPEGALDSEQDLSGSGEFQEAGERSIGEPRFLKQKLGVRRICEMRATAPAARRSSCVRAGSQVPQPFHLPRLHAFVCSAQRARPPPSAGASPPRPSGTAQAPGTHTGTAQARPWLCLYGQLVYLLVSSLTYSFRSLLGL

SEQ ID NO: 49590 - protein, 211 aa, Zea mays
  Coding DNA Sequence Number=SeqID_7811
  Homolog annotation: Hit_ID=Q6JAD1; Match level="QueryCoverage=78%, HitCoverage=79%, E-value=3e-50, Identity=64%"; Hit description =Putative lateral organ boundaries (LOB) domain family
  Pfam annotation: Domain name=DUF260; Domain location=31-131; Score =226.8; E_value=4.7e-65; Accession=PF03195.5; Description=Protein of unknown function DUF260
MRDAAVVVAVPGPGAATRGGGAKPGAAGAAPCAACKLLRRRCAAGCVFAPYFPPGEPHKFASVHKVFGASNVSKLLQEIPAQHRGDAVSSMVYEANARVRDPVYGCAGAVSSLQQRVEALQAQLALAQAEVVRLRMSNDYVLRRLKAAGAGAGAGGGSSSSYAGSPSSMSSLKTAAAAEPDARCRATTPELLVLDMVVDQPGMDDAHFWSY

SEQ ID NO: 49591 - protein, 175 aa, Zea mays
  Coding DNA Sequence Number=SeqID_7812
MAWVFPPLIPLLWAPPRPQPQIESADPLWSRASSQNEAHRMGGRRTQPPPSFLLEGPASGELLFPGARGKTIAMARNDRFGRFNPGATLRPWHVDLGASLDPRGCMRGLSGGDYPLGSPRLLVNFIHCHRSVVKPSGHAGCPLPVAVTVTGVCAAVSLGALPLQGIRLGKNDANR

SEQ ID NO: 49592 - protein, 175 aa, Zea mays
  Coding DNA Sequence Number=SeqID_7813
MAWVFPPLIPLLWAPPRPQPQIESADPLWSRASSQNEAHRMGGRRTQPPPSFLLEGPASGELLFPGARGKTIAMARNDRFGRFNPGATLRPWHVDLGASLDPRGCMRVLSGGDYPLGSPRLLVNFIHCHRSVVKPSGHAGCPLPVAVTVTGVCAAVSLGALPLQGIRLGKNDANR

SEQ ID NO: 49593 - protein, 157 aa, Zea mays
  Coding DNA Sequence Number=SeqID_7814
  Gene Ontology: Mol. function=metal ion binding
  Homolog annotation: Hit_ID=Q6EPN1; Match level="QueryCoverage=41%, HitCoverage=29%, E-value=1e-08, Identity=46%"; Hit description =Putative BRH1 RING finger protein
  Pfam annotation: Domain name=zf-C3HC4; Domain location=93-134; Score =8.3; E_value=0.022; Accession=PF00097.15; Description=Zinc finger, C3HC4 type (RING finger)
MTFPLVCYCYAVPRPVAALLKLLHAAVLVFVLLLSFLGLYEFSYDPEDHAPPAINGGRPRPEAVKRRLPLVEFLELVDSSSSPSSGLGAEPTCRVCLEWLEAKDEVRRLGNCTHAFHTRCIDRWIDLGEAGGARPVRAQMPLGTGAGWGQTMRPTVN

SEQ ID NO: 49594 - protein, 149 aa, Zea mays
  Coding DNA Sequence Number=SeqID_7815
  Subcellular localization annotation: CTP_CleavageSite=58; ConfidenceScore=5.41e-01
MPRLPLCARLSPTPSITQATPAPDADQRRSPVPCTASPSALPTPFTVHAPPALDADPRRSHRPGQPRDAANCSPDLVTPLPFPDFRCTLSRSLICAISKVDGSSTVASLPKMWLVPPPKSVHPMPLLPHLQAKWGTYKGAEPRHTGPGT

SEQ ID NO: 49595 - protein, 291 aa, Zea mays
  Coding DNA Sequence Number=SeqID_7816
  Homolog annotation: Hit_ID=Q8S236; Match level="QueryCoverage=21%, HitCoverage=31%, E-value=9e-10, Identity=48%"; Hit description=Zinc finger (C3HC4-type RING finger) family protein-like
  Pfam annotation: Domain name=zf-C3HC4; Domain location=223-269; Score= 43.1; E_value=9.3e-10; Accession=PF00097.15; Description=Zinc finger, C3HC4 type (RING finger)
  Subcellular localization annotation: CTP_CleavageSite=40; ConfidenceScore=5.17e-01
MGNASPSPSPFTRRGRTFPHLHRRGEETSPSPSPNRGIPRGESGIGSPLPSLSPTDWRLQRATSAIDVPVVAAYKEAPVASKNSTQAAARGCARSGISDVLPQPTAYVSPMSNPSFDHSYELPLRRNLLLLRDLLDLLRFIAGVILDRLGVAPCQGEVHLPGQALGGVGEHVNDVDLERLLEAMLWETVTRSLTAPRYRRRRVAQPADVQLDAEGDAEGAAVCAICLAGLEQGDFQAVVELCGCSHAFHAACIDAWVRSGDGAATCPLCRAPMLPTAWDDVQSSFGARRGD

SEQ ID NO: 49596 - protein, 105 aa, Zea mays
  Coding DNA Sequence Number=SeqID_7817
MELRVSQLGEAPTSGGASSGGDSMADRVAQRVTFKVENSVTKSTTTNIQQQHQPLLTESASGVHNDTNEADDESDTIDGQLDDIFSGGVSKGSNYRIVHRIQRQK

SEQ ID NO: 49597 - protein, 351 aa, Zea mays
  Coding DNA Sequence Number=SeqID_7818
  Gene Ontology: Mol. function=oxidoreductase activity; Cellular component=proton-transporting two-sector ATPase complex; Biological process=flavonoid biosynthetic process
  Homolog annotation: Hit_ID=Q9ZSA8; Match level="QueryCoverage=97%, HitCoverage=97%, E-value=1e-117, Identity=58%"; Hit description =F3H7.16 protein (Putative Fe(II)/ascorbate oxidase)
  Pfam annotation: Domain name=2OG-FeII_Oxy; Domain location=198-297; Score=168.9; E_value=1.3e-47; Accession=PF03171.10; Description=2OG -Fe(II) oxygenase superfamily
MAPAISKPLLTDLVAQIGKVPSSHIRPVGDRPDLANVDNESGAGIPLIDLKKLNGPERRKVVEAIGKACESDGFFMVTNHGIPAAVVEGMLRVAREFFHLPESERLKCYSDDPNKAIRLSTSFNVRTEKVSNWRDFLRLHCYPLQSFVDQWPSNPPSFRQVVGTYATEARALALRLLEAISESLGLERSHMVAAMGRHAQHMAVNYYPPCPQPELTYGLPGHKDPNAITLLLQDGVSGLQVQRGGRWVAVNPVPNALVINIGDQMQALSNDRYKSVLHRVIVNSESERISVPTFYCPSPDAVIAPADALVDDGHPLAYRPFTYQEYYDAFWNMGLQSASCLDRFRPGGSLE

SEQ ID NO: 49598 - protein, 143 aa, Zea mays
  Coding DNA Sequence Number=SeqID_7819
  Subcellular localization annotation: CTP_CleavageSite=84; ConfidenceScore=5.12e-01
MLHRFSPAGAERPTRRRPTPIPRLQPRRAADSSTANSHVLPPAAWHSKQEAASKNQRSVGRTTASRKQHRRLHPTDSKSVISIVAELKPSETNPLSPNASHLMDDEVACYLMLPARLLPIICKYLYICILKCRNMTGIVIPNS

SEQ ID NO: 49599 - protein, 110 aa, Zea mays
  Coding DNA Sequence Number=SeqID_7820
MWCEEAASQAPAADAGASKRQGVIVVALPMPMNISRRTAACYREAEAEAEADRWATPPTRSRGAWALRIRISTRGGMQKPAAWRPCVAVDGYGQTGRGAPSSKASGRRKQ

SEQ ID NO: 49600 - protein, 487 aa, Zea mays
  Coding DNA Sequence Number=SeqID_7821
  Homolog annotation: Hit_ID=Q0PMR8; Match level="QueryCoverage=32%, HitCoverage=100%, E-value=1e-64, Identity=69%"; Hit description =Putative E2 SUMO conjugating enzyme
  Pfam annotation: Domain name=DUF1191; Domain location=27-312; Score =165.5; E_value=1.4e-46; Accession=PF06697.3; Description=Protein of unknown function (DUF1191)
  Pfam annotation: Domain name=UQ_con; Domain location=338-480; Score =190.9; E_value=3.1e-54; Accession=PF00179.16; Description=Ubiquitin -conjugating enzyme
  Pfam module annotation: Pfam domain module=DUF1191::UQ_con; Domain location=27-312::338-480
MTTGVLRPEGFLLLLLLQATVALAVPQQQVLQLQDTVLIDDVVQEAAEEWYHGRHRRTGVAYPLSLPGSLSGVEATVARFRAGSLRRYGVRRFGEFSVPPGLAARGRAAHLIAVRVNLGNLSSVYDEYAVGAGYRLASPVLGLMFYGLARHNGTAALEIDLTGAAIRVNFSVAIPALQPGAAPLCLAVGLNGSVTVTNVEDGTNTCHASDQGHFALVVGGAGDGDGGGGGGEEADIGEVSKWKLALFGAALGAGGTVLLGMVAVAVVSIQRRKSEMAEMERRAYEDEALRVSMVGHVRAPSAAGHTLARTEASCVYHPPIHALLSSAGMASGGVARARLAEERKSWRRSHPHGFMAKPATLPDGSVNLMLWNCVVPGKQGTDWEGGHFPLTLHFDEDYPSRPPHCKFPAGFFHVNVYNTGSVCLSILGDAWKPSITVRQTLIGIQDLLDNPNPASPAQNLSYVLFTQNMPEYASRVRQQAKRYPSLV

SEQ ID NO: 49601 - protein, 353 aa, Zea mays
  Coding DNA Sequence Number=SeqID_7822
  Gene Ontology: Mol. function=nucleic acid binding; Cellular component= plastid chromosome
  Homolog annotation: Hit_ID=Q8H902; Match level="QueryCoverage=80%, HitCoverage=26%, E-value=1e-115, Identity=77%"; Hit description =Putative DNA binding domain containing protein
  Subcellular localization annotation: CTP_CleavageSite=34; ConfidenceScore=5.78e-01
MATPSTSAPSPSPSSAFPLTTTTRFPRSCSCPVRASALAERRRTRRRRAPDGGGAGGDRSAAAGAVEKGLRLVFLEQLAERARAADATGVADTIYDMVAAGLSPGPRSFHGLVAAHVLAGNAEGAMQSLRRELSSGVRPLHETFVALVRVFAKKGLSTRGMEILAAMERYKYDIRKAWLILVVVFIETEELVKNHYLEDANTVFLKGAKGGLRGTDDIYDLLIEEDCKAGDHSNALTVAYQMEAYGRMATTFHFNCLLSVQATCGIPEVAFATFENMEYGGEVLLPGVACVNPSCVHGYVVLVVSLDRCSVLFCFEHDTAFPPSLSDYMKPDTESYNWVIQAFTRATSYDRYT

SEQ ID NO: 49602 - protein, 236 aa, Zea mays
  Coding DNA Sequence Number=SeqID_7823
  Gene Ontology: Mol. function=transferase activity, transferring glycosyl groups; Cellular component=membrane
  Homolog annotation: Hit_ID=Q8LMZ1; Match level="QueryCoverage=61%, HitCoverage=28%, E-value=1e-32, Identity=54%"; Hit description =Putative exostosin family protein
MKRHNAGELPLSSPPGDGRRLLPKEEAEDKMDKYDKGRVRCSRLCFLFALAATVSILARHCYDAGLAGGDGAGVVRIETVPPSVRRERKIVPIARGSGPSESGHSHSAPVDASGAGHGPELRQAVSVDGHVQGTIAGWYDTDEHALDIVFHERIKRYECLTDDPSLAAAVFVPFYAGLDVARHLWGNNASARDELALDLAGLLAKSPEWRAMGGPRPLLRGRPRHVGLPAEGRRPC

SEQ ID NO: 49603 - protein, 619 aa, Zea mays
  Coding DNA Sequence Number=SeqID_7824
  Gene Ontology: Mol. function=unfolded protein binding; Cellular component=mitochondrion; Biological process=cellular protein metabolic process
  Homolog annotation: Hit_ID=P29185; Match level="QueryCoverage=93%, HitCoverage=92%, E-value=0.0, Identity=89%"; Hit description =Chaperonin CPN60-1, mitochondrial precursor
  Pfam annotation: Domain name=Cpn60_TCP1; Domain location=56-602; Score=561.6; E_value=8.1e-166; Accession=PF00118.14; Description=TCP- 1cpn60 chaperonin family
  Subcellular localization annotation: CTP_CleavageSite=46; ConfidenceScore=5.20e-01
MYRAAASLASKARQAGSSSAARQVGSRLAWSRNYAAKDIKFGVEARALMLRGVEELADAVKVTMGPKGRNVVIEQSFGAPKVTKDGVTVAKSIEFKDRVKNVGASLVKQVANATNDTAGDGTTCATVLTKAIFTEGCKSVAAGMNAMDLRRGISMAVDAVVTNLKGMARMISTSEEIAQVGTISANGEREIGELIAKAMEKVGKEGVITIAAIRLWLYGPFCFHYMGSPLALVSKDGNTLYNELEVVEGMKLDRGYISPYFITNSKAQKCELEDPLILIHDKKVTNMHAVVKFRNGSKVLVLWGPLLILFFFILCWKQKQRPLLIVAKNGESEALGTLIINKLRAAIKVCAVKAPGFGENRKANLQDLAILTGGEVITEELGMNLENVEPHMLGSCKKVTVSKDDTVILDGAGDKKSIEERADQIRSAVENSTSDYDKEKLQERLAKLSGGVAVLKIGGASEAEVGEKKDRVTDALNATKAAVEEGIVPGGGVALLYASKELDKLQTANFDQKIGVQIIQNALKTPVHTIASNAGVEGAVVVGKLLEQGNTDLGYDAAKDEYVDMVKAGIIDPLKVIRTALVDAASVSSLMTTTESIIVEIPKEEAPAPAMGGMGGMDY

SEQ ID NO: 49604 - protein, 498 aa, Zea mays
  Coding DNA Sequence Number=SeqID_7825
  Gene Ontology: Mol. function=nucleic acid binding; Cellular component= plastid chromosome
  Homolog annotation: Hit_ID=Q8H902; Match level="QueryCoverage=99%, HitCoverage=55%, E-value=0.0, Identity=72%"; Hit description =Putative DNA binding domain containing protein
  Pfam annotation: Domain name=SAP; Domain location=144-178; Score =45.7; E_value=1.5e-10; Accession=PF02037.17; Description=SAP domain
MANDNQSIAPRAMILNRKYRTLVSSWIEPLQEEADVGFEIDYVARYIEEGGLTGERKRWVPRRGKTPLDPDEFGFAYSNPIETSFKQRCFEELKLYHRKLLITLRNEGPGILGDVSEEDVRRVIERLKKLVVGPKKNVVKPKAASKMVVSELKTELEAQGLPTDGTRQVLYQRVQKARRINRSRGVPLWVPPVEDEEEVDEDLDELISRIKPEDGNTEFWKRRFLGETRNYLCEEDSKEDGQDLDDELEDDDDNDDDEDDDESVKEAEEDEIDDEEVVEQTENQVGDDTKDKPAKEPNHHLQMIGVQLLKDIERTPVSSKKLKRMPEIDDDEDWFPEDPIEAFKVMREERMFDVSDMYTTADAWGWTWEREIKNKMPRKWSQEWEVELAIKIMHKVIELGGTPTIGDCAIILRAAMRAPLPSAFIPILQTTHSLGYKFGSPLYDEVVLLCLDLEEIDAAIAVVAEMETCGVKVPDETLDKVLASKRSGNSALPPPTEE

SEQ ID NO: 49605 - protein, 58 aa, Zea mays
  Coding DNA Sequence Number=SeqID_7826
MEHQPTSKWWIWMESRRRRVRALARPKTSVLFLLAGQGIPLNNSSFQPLTLVGKLLLD

SEQ ID NO: 49606 - protein, 265 aa, Zea mays
  Coding DNA Sequence Number=SeqID_7827
MSTSGNLDFLWMRTNICINLRWLGSRFSSRVLRLSFKEASQHDLSLNWRIVSHFIHSIEGAEVLQIADQLSSKDRSDEYVNWFVDRSQTSLYANGKTELSIRKDQKMHIENSEISLISNHCVHFGKDKFANRVRQSQKTVGNPGNQKVLQGRDYPNRDCLRAKQRFRLRLRSHGGGCLCCKGNSFGGSDLAHWRWFKHSKFGWTTGSQGSKREKFPNRPNSIVRDLRKADGKSWDEQVVRNVCLRCDADDILKIDSSTAGEAPRT

SEQ ID NO: 49607 - protein, 38 aa, Zea mays
  Coding DNA Sequence Number=SeqID_7828
MRRGSLGFLLVEKEGMGVTFLQTEIEELVLEPSHPIGV

SEQ ID NO: 49608 - protein, 117 aa, Zea mays
  Coding DNA Sequence Number=SeqID_7829
MQRSASFIPGDPTAAGKVTGIRPSFLKEWKTWRYCIPIPSLFGSSWHSTPQMLSIHYWKKNSISLCANGNATVFSERKGENRAYPDRDSTSGEANTWDGLHTLMTKTSKVSGEKTDS

SEQ ID NO: 49609 - protein, 121 aa, Zea mays
  Coding DNA Sequence Number=SeqID_7830
  Gene Ontology: Cellular component=mitochondrion
METRMLTRKRQLYLLAYQLVICDYPLARDPDHGDMQIFNTELPYPSLYKFAVCPLPYDMMMKLLLMKDYGVCRRSVKEWIATKLYSCQAFLPRGIYILQRAKPRISVIGKPFVGQPAYPSL

SEQ ID NO: 49610 - protein, 89 aa, Zea mays
  Coding DNA Sequence Number=SeqID_7831
MNPFSAQQAKSSTEQVYEDGRMTKLPAEQVCETGRTIKFPAEQVYETEWMTKSPVEQVCEAGWTTNPRRASRLGGTFDPTSVERDQAVG

SEQ ID NO: 49611 - protein, 368 aa, Zea mays
  Coding DNA Sequence Number=SeqID_7832
  Gene Ontology: Mol. function=transferase activity, transferring glycosyl groups; Cellular component=membrane
  Homolog annotation: Hit_ID=Q10RW1; Match level="QueryCoverage=84%, HitCoverage=62%, E-value=1e-117, Identity=63%"; Hit description =Xyloglucan galactosyltransferase KATAMARI 1, putative, expressed
  Pfam annotation: Domain name=Exostosin; Domain location=67-368; Score= 249.6; E_value=6.7e-72; Accession=PF03016.6; Description=Exostosin family
  Subcellular localization annotation: CTP_CleavageSite=53; ConfidenceScore=5.05e-01
MVKPSAVSRPCFLLVTAAALWALTLYLRLLALMSVPVAFTGRVASFVPDDTTNASVAGDDPCRGRYLYVHDLPPRFNADIVRGCAEANDRWQDMCEDMRNAGLGRPLSGGALTGARGWYATHQFALDAIFHGRMRQHGCLTNDSSAAAAVFVPFYAGFEFARHVWGYDSAARDAASLDLVRWLVQRPEWRRAGGRDHFLVAGRTGWDFRRDRNSTWGTNLFLLPAVKNMTFIVVETATMGWGNDMAVPYPTYFHPRTDFDVLSWQQRIRNSDRWWFMSFVGAARPSDPRSIRSQVMAQCGASPACRQLGCAFGSAQCHYPGDIMVLFQSSTFCLQPPGDSASRRSTFDAMVAGMHPRVLPAAVGVPPV

SEQ ID NO: 49612 - protein, 58 aa, Zea mays
  Coding DNA Sequence Number=SeqID_7833
  Gene Ontology: Mol. function=transferase activity, transferring glycosyl groups; Cellular component=membrane
  Homolog annotation: Hit_ID=Q10RW1; Match level="QueryCoverage=88%, HitCoverage=10%, E-value=2e-09, Identity=53%"; Hit description =Xyloglucan galactosyltransferase KATAMARI 1, putative, expressed
MRKEVIKLVPRLLYADPRYKLETMKDAFDVTVDGVLERMAETDDSQTGSYWRIYFDLR

SEQ ID NO: 49613 - protein, 144 aa, Zea mays
  Coding DNA Sequence Number=SeqID_7834
  Homolog annotation: Hit_ID=Q10NP6; Match level="QueryCoverage=33%, HitCoverage=16%, E-value=2e-09, Identity=79%"; Hit description =Splicing factor 3A subunit 2, putative, expressed
  Subcellular localization annotation: CTP_CleavageSite=60; ConfidenceScore=5.10e-01
MYRGGLDRFEKAQALEPFSVKSKTGTKKAPAAAGTTKALALLTLPQNSNFLPGPQQPSIRETPRKKIQLSTETINIFSSRMLNLDNCCLEGQQMHNVPDATQQRGELPGKRRQTNLAKRAAYEAKDAPAQLLPNKVKIAPKSGA

SEQ ID NO: 49614 - protein, 158 aa, Zea mays
  Coding DNA Sequence Number=SeqID_7835
MTTPLLGTRRTPTGIHPRMVVMEAVNNLCNIHCKGVADLVTDVLFRGKPAAFTLLCLIEAFLSIVSNLLDFKFGSKVIWLLVFSVACFGGMSLIMGRVSAIEERLGVTITIIILQLVFLKFDRKILLLIDSPSRIWDINTISYLVTIICFLVTSNCEK

SEQ ID NO: 49615 - protein, 470 aa, Zea mays
  Coding DNA Sequence Number=SeqID_7836
  Gene Ontology: Mol. function=transferase activity, transferring glycosyl groups; Cellular component=membrane
  Homolog annotation: Hit_ID=Q8H038; Match level="QueryCoverage=85%, HitCoverage=73%, E-value=1e-104, Identity=46%"; Hit description =Xyloglucan galactosyltransferase KATAMARI1 homolog
  Pfam annotation: Domain name=Exostosin; Domain location=91-425; Score= 326.3; E_value=5.2e-95; Accession=PF03016.6; Description=Exostosin family
MKPMKPSFQKDGADKVDGGTGGVLWPSRICYLVVLATTLWAVASILFPPSAFPHPLVSSVTVSHHPAPHDSASEDNRTATETADRCAGRYIYVYRLPPRFNDDIARGCRTLRPWMDMCPYMPNCGLGRLLGDEGGVFPGRGWYATDQFMLDVIFRCRMRRYECLTGDPARAAAVFVPAYASLDGGRYLWNSTATRDALALDLVAWLARRPEWRATGGRDHFLVAGRTAWDFLRKTDGDDDWGTKLLSIPAVRNMTALVLEIDPWTRSNNLAVPYPTNFHPATAADLRAWQEKARALDRRWLFSFAGAARPGSNKTVRAQIFQQCGASSRCGMFRCKKGSECEASPGAMMRLFESSTFCLQPRGDTTTRRSTFDAVVAGYADHIPADPERWSVLIMHTDVTDRNVSIEEALAKIPPAAVKAMREEVIRLIPRLVYADARSARADFKDAFDIALDVVLDRVAKRRRRDVDGR

SEQ ID NO: 49616 - protein, 488 aa, Zea mays
  Coding DNA Sequence Number=SeqID_7837
  Gene Ontology: Mol. function=hydrolase activity, hydrolyzing O -glycosyl compounds; Cellular component=membrane; Biological process =carbohydrate metabolic process
  Homolog annotation: Hit_ID=Q93Z08; Match level="QueryCoverage=96%, HitCoverage=98%, E-value=0.0, Identity=70%"; Hit description =Putative glucan endo-1,3-beta-glucosidase 6 precursor (EC 3.2.1.39) ((1->3)-beta-glucan ...
  Homolog annotation: Hit description=endohydrolase 6) ((1->3)-beta -glucanase 6)
  Pfam annotation: Domain name=Glyco_hydro_17; Domain location=23-342; Score=311.6; E_value=1.4e-90; Accession=PF00332.9; Description =Glycosyl hydrolases family 17
  Pfam annotation: Domain name=X8; Domain location=362-447; Score =112.2; E_value=1.5e-30; Accession=PF07983.3; Description=X8 domain
  Pfam module annotation: Pfam domain module=Glyco_hydro_17::X8; Domain location=23-342::362-447
MGWITVTIRIVCLFTLLWSVNGIGVNWGTQASHLLPPDTVVRMLRENGIQKVKLFDADYGILKALGKTGIEVMVGIPNDMLASVGGSMKAAEKWVAKNVSEHISSNNVNIRYVAVGNEPFLETYNGSYLHITLPALSNIQSALIKAGIGSQVKVTVPLNADVYASSNTYPSGGDFRTDIFDPMLKIVKFLNDSNSPFTVNIYPFISLYTDSNFPVEYAFFDGNATPLNDGGTLYYNMFDANLDTLAHALQKNGFGNLPIIVGEIGWPTDGDRNANIEYARRFNQGFMSHISGGKGTPMRPVPIDAYLFSLIDEDEKSIDPGNFERHWGIFYFDGQVKYPLNLGTTNSGALIPAKGVQYLERKWCVMKPSAPLDDPQVAQSVSYACGLADCTSLGYGTSCGNLDARGNISYAFNSYFQKNNQFEKACEFPNVSVITKTDPTPTKSWVFTLPGRFFEKLREWTVFDKTLLVGVVFKENSKTLPAGSVFPL

SEQ ID NO: 49617 - protein, 511 aa, Zea mays
  Coding DNA Sequence Number=SeqID_7838
  Gene Ontology: Mol. function=binding; Cellular component =intracellular; Biological process=protein kinase C activation
  Homolog annotation: Hit_ID=Q6K9T2; Match level="QueryCoverage=92%, HitCoverage=92%, E-value=1e-112, Identity=45%"; Hit description =Pentatricopeptide repeat-containing protein-like
  Pfam annotation: Domain name=PPR; Domain location=184-218; Score =47.9; E_value=3.4e-11; Accession=PF01535.11; Description=PPR repeat
  Pfam annotation: Domain name=PPR; Domain location=285-319; Score =37.4; E_value=4.9e-08; Accession=PF01535.11; Description=PPR repeat
  Pfam annotation: Domain name=PPR; Domain location=320-354; Score =10.8; E_value=0.4; Accession=PF01535.11; Description=PPR repeat
  Pfam annotation: Domain name=PPR; Domain location=356-390; Score =11.7; E_value=0.31; Accession=PF01535.11; Description=PPR repeat
  Pfam annotation: Domain name=PPR; Domain location=54-88; Score=23.8; E_value=0.00061; Accession=PF01535.11; Description=PPR repeat
  Pfam module annotation: Pfam domain module=PPR::PPR::PPR::PPR::PPR; Domain location=184-218::285-319::320-354::356-390::54-88
MSQIKQMHSHLIVSASRLDPFAAGKIISLFAVSSNADISHAYKLFLSLPHRTTFIWNTIIRIFVEKNENATALSLYKNMLQTGFLPNNYTFSFVLRACTDNSPVGLASHAQVIKLGWESYDFVLNGLIHLYANWSSVEAARKLFDVSTCRDVITWTALINGYVKSGHLEFARELFDQMPERNEVSWSAMITGYVHMGMFREALELFNDMQLTGLRPNHAGIVGALTACSYLGSLDHGRWIHAYVDRNGTELDRVLGTALVDMYAKCGCIEIACSVFEKMPDKDVFAFTSLISGLANHGQSADAIQLFGRMQSEKVIPNEVTFICVLSACSRMGLVDEGLRIFNCMSVVYGIEPGVQHYGCMVDLLGRAGLLEEAKRLVREMPMEPDSYVLGALLNSCRVHGDVELGKETVESLVERGLDHGGVLVLLSNMYASSNQWDWVVKVRKEMGAKKVSKVPGCSSIEIDGSVSEFIAGDMSYLRVEDVMLVLLGIDNHLKFLLLADDNTNSNMIAY

SEQ ID NO: 49618 - protein, 40 aa, Zea mays
  Coding DNA Sequence Number=SeqID_7839
MEVEDIRNALCKKGHFKANCKEWKEYLATKGKGVRGNERP

SEQ ID NO: 49619 - protein, 57 aa, Zea mays
  Coding DNA Sequence Number=SeqID_7840
MGRSQRRRNRKNESGDVMMAVELVATRGVAVGLGQVADGTCGGSTRCGARVSDFLKP

SEQ ID NO: 49620 - protein, 365 aa, Zea mays
  Coding DNA Sequence Number=SeqID_7841
  Homolog annotation: Hit_ID=Q9SK32; Match level="QueryCoverage=39%, HitCoverage=28%, E-value=1e-16, Identity=33%"; Hit description =Expressed protein
MQLGLPIHGTPITGVSLFTDPAALCYQLLRDLPEDEESNFTSLKFTWLKAKFGQLSANATEGELMCAARVYIMHILGGVLMPDANNNKVHMMYLPLLADLSNIHSYSRGSVVLAVLYRELYRTTKPDVVEMGGCLTLLQSWALYRMPFLESVSHQPWSLYPGIGRSHTVPTYRLMIEQHVEEGLYRCHTVGQKLQMWYPRLHTFILTYGQSTVVPPHMQRPGRSYPAAPIEAESVAYYAPEPEPEQEPQSDPEQSYSHVDPHSYHPDLAGSDYISSFSRGEYAYKFELFGSYLRQYCMPGPYPQHHGTLSGSSSSMPNEPQDFSSMFATPPRAPNDDVGRHEHPEHDRQPPNRYTPRTTPSNHQF

SEQ ID NO: 49621 - protein, 273 aa, Zea mays
  Coding DNA Sequence Number=SeqID_7842
MTTPEYDEWRVRRINDNIPKSSHEGSQSLEEHLKVVPSELEILKQDFERRTTELEKQIEQMEEEKMNLRLDADVQKLEAERLKKRKARAEEDLDSLKTDYKKLRLSIRTAGLGKSSEQWRKEIQEEKNKADEWERRFQEIQAQNETLKRSLSENQKEKGELENRVTELEGSLHRHRNRNSVMELRASLNRIEEMKERIEELEAALRNCEIQIEYLESNEDRQAKQLHYFQNQVRDRDHIMGEAVLQIREVADHLQTLAVQADVLSVKYELESS

SEQ ID NO: 49622 - protein, 227 aa, Zea mays
  Coding DNA Sequence Number=SeqID_7843
MDDKFFVYVYFDGVILTTSVGCVLECRQQIAMRFNRNVSLDGMKARINAKILRRCGRRISKIFYKFPVSTNSIKFTKMELVDDEDVETMVALYCGNGSDKNAPIHLFAELAGMEQNEDVNASDEEHGAQELWMVALISYVDSESTMGGIGIDLNITPDIDVVGGEEEGGSDHWEKEVDSDDDPDVDDVPDDIDDEDVNNDGNINASSVGDQMRRILIHNNLGPHIRS

SEQ ID NO: 49623 - protein, 353 aa, Zea mays
  Coding DNA Sequence Number=SeqID_7844
  Homolog annotation: Hit_ID=Q7XIK7; Match level="QueryCoverage=17%, HitCoverage=5%, E-value=2e-10, Identity=60%"; Hit description =Putative guanine nucleotide-exchange protein GEP2
  Subcellular localization annotation: CTP_CleavageSite=12; ConfidenceScore=5.11e-01
MPCLFLTTSPPRSRLAADCSPPWSHHPLNPHATPSSSCPCLVFILVSPPHPEVVLLAQSQLVPLPHPIVFLPGPTPLPPPLAHASPRLSWSRIKRARARTRGGWELAQAPVVALTVMLIEAKEYGEMMESVNEVMFTLDGLRPIAQKRMRRASLSATLPSVATCYGPKGECIEGAYFPCAQLRTSIGFLLIFLGNFDQKIEKRDVEEEQGLGPEAREEGHNVTVTLASFIISCLLLVAHEDFGLLCLVSILKSLADWEQLQRYSLKQGSIVESHEEDASRRVITDETESQEDGQDQFERAKTQNMETAISEIMLLWSIYMMSLEPWRLEHIVKQEYQSVSYDMLRYLKICSVD

SEQ ID NO: 49624 - protein, 130 aa, Zea mays
  Coding DNA Sequence Number=SeqID_7845
  Homolog annotation: Hit_ID=Q6AU28; Match level="QueryCoverage=77%, HitCoverage=14%, E-value=2e-07, Identity=33%"; Hit description =Putative FAR1 protein
MSIFGLSPMYATSARSLFLQLVPSTPMPHQELVDPRISDKFVPTFDMHFDNMVEAYDFYETYTMLAGFDVRKNRKRKGGRAQDFECSFAGKFIDSIGADRDRAKTSKNKDCKVMVCTMMAKDGGRVFLKR

SEQ ID NO: 49625 - protein, 896 aa, Zea mays
  Coding DNA Sequence Number=SeqID_7846
  Gene Ontology: Mol. function=transferase activity
  Homolog annotation: Hit_ID=Q2RBE2; Match level="QueryCoverage=91%, HitCoverage=87%, E-value=0.0, Identity=52%"; Hit description =Nucleotidyltransferase family protein, putative, expressed
  Pfam annotation: Domain name=PAP_assoc; Domain location=302-392; Score=14.7; E_value=0.0011; Accession=PF03828.9; Description=PAP25A associated domain
MVDIIDAYPAVPEPAPAHPDPSSIPRDAWRRFESAALGILYTIQPSATSEHLRAAIIDYVQRLLASHSGVQVMESKSGFHAGCVPAAELLAAILAIPFLCTVIIASMRFSARNRCQVFIGGDEYKRVTVWIYFVGCALESPCDLVGMTFNVFPFGSVPLKTYLPDGDIDLTTFGPAISDEKLANEVCAILKSEEHRKDSEFDVKDVQYIHAEVKLVKCVVQNIIVDISVNQIGGLCTLCFLEKVDENFGKKHLFKRSVMLIKDWCYYETRILGAHHGLISTYALEILVLYIFHIFHKSLNGPLAVLYRFLDYYSQFDWDAKGISLFGPVSLSSLPDLVTDPPVIHDDGFLLREKFLRECADAFSVPPRNSEKDAQLFSRKFLNIVDPLKQSNNLGRSVSRGNFYRIRSAFDFGARKLGKILQRPVCYTVDEVNQFFGNTLKRNRIGFRQDVLVSSSDDGTLTYHATNGSLSLGLDCKRVNNCSAPLYSNPCGDFSYRFNNINISDSINHDDSIKQKQCNSIAGEKAIKSISDGLLDSEGSSHASTDDSVSVRNSGDFYEALTTISPSGRRYAPHQFYQLENGKVVVRHNTNMSHHGMPTKQFTSRSYHSFEDAKYHNEFSGSFLPPIEHNAYSSAGFVNVLATSNSACTHENSQLGGANNNILKDLTGDFETYFHNLQYAQGFQQDNPVNPFSSGRPAPPSLQCQNTCPSNGRGRKNPYSYASMNGAVPCPPYPSGYLVWSPFIQPDDPMAMRTRGTGTYFSDRKLRKNRPPTGRVERGRNQFASNNYQRFHHHVRTDMPADMGSGLELRHELPQIHIPGATDHGMPSPMSIPMSSSSLNSPRDQLKIMFCAEFTAFITTSDPALYNSQGWRSIISPQGQQRLPPTVQLNVDGGTL

SEQ ID NO: 49626 - protein, 481 aa, Zea mays
  Coding DNA Sequence Number=SeqID_7847
  Gene Ontology: Mol. function=amino acid transporter activity; Cellular component=integral to membrane; Biological process=amino acid transport
  Homolog annotation: Hit_ID=Q5JKI7; Match level="QueryCoverage=98%, HitCoverage=99%, E-value=1e-160, Identity=53%"; Hit description =Putative GABA-specific permease
  Pfam annotation: Domain name=AA_permease; Domain location=45-479; Score=-73.5; E_value=0.00089; Accession=PF00324.11; Description =Amino acid permease
MNWKKSPPAVSDGAPDDADDGRLRELGYKQELKRHLSVLSNFSISFTVISVLTGVTTLYNTGLAFGGPATMTLGWFVAGAFTMAVGLSMAEICSAFPTSGGLYYWSARLSGRRWAPFASWITGWYGTASIDFSLAQLIQVIVLLSTGGNNGGGYLASKHVVFAFHAGILLSHAAINSLSITWLSLLGQFAALWSMLGVLVLMIAVPVVATERASAKYVFTHFNTDNSAGIHSNLYIFVLGLLMSQYTLSGYDASAHMTEETKNAGRNGPVGIITAIGVSLVVGWGYILGITFAVKDIPALLSTGNDAGGYAIAQVFYLAFKGRMTYAFSRDGAMPFSSVWHKVNEQEVPVNAVWLSAFVSLCMALPSLGSLVAFQAMASVATTAVYIAYALPILFRVTLARSRFVPGPFSLGRYGVLVGWTAVLWVATITVLFSLPVSYPVTKDTINYTPVAVAGLFALILSSWIVAARRWFTGPVTNLGG

SEQ ID NO: 49627 - protein, 109 aa, Zea mays
  Coding DNA Sequence Number=SeqID_7848
MALPATSFDSSHVAVDRRTQQLIFLCAEDKPHEIPTQAARPLRRTASRHHGFCESENFEPVHVSAQQLVIMFLAEGRASTHSSAHGKQQKAELQTSGKSKGWLATPTTF

SEQ ID NO: 49628 - protein, 125 aa, Zea mays
  Coding DNA Sequence Number=SeqID_7849
MAPPPASNQDDPTRWSGLCEAPELPIWLVFSVPAHGAPEVFLRASTVPPHHSISRTREHDTRFIRLLDLSTKSSLSSTSSRSSKSPPESSWAMPMQNPSASADDFEAWMNISGSSFGGTKDLDVA

SEQ ID NO: 49629 - protein, 183 aa, Zea mays
  Coding DNA Sequence Number=SeqID_7850
  Gene Ontology: Mol. function=protein phosphatase type 2C activity
  Homolog annotation: Hit_ID=Q2QWE3; Match level="QueryCoverage=96%, HitCoverage=40%, E-value=7e-20, Identity=43%"; Hit description =Protein phosphatase 2C containing protein, expressed
MLHGARFLCSAVARLAHALIRSILLLMPLCSPTSTSAIPAPTWQQPARAAPYMKVHPAGPLMALDDPKDQLTALSSSAQPAVVVVVPALKHQQPAERVAETKTAKAARGRPTRLAIPPPLPCAPGVDPFGAVEAELATELEVQGEGFCLASRRGVRHAMEDGYGVVITDHGASQLVRYAHFIS

SEQ ID NO: 49630 - protein, 149 aa, Zea mays
  Coding DNA Sequence Number=SeqID_7851
MWQYGGESDPDCHSIEVLSKGEVEAHVNKVTLGVTSDFMDVGGSCRGVDEGRLGSINPSLPPIPEDISLKAERKWKREKDEETLAPCKKSRQARKKKKVEHVARAGRALPSTWGLLLPFFNACLEFLFCHLLNAYMSWKTMKDVAFVTK

SEQ ID NO: 49631 - protein, 262 aa, Zea mays
  Coding DNA Sequence Number=SeqID_7852
  Gene Ontology: Mol. function=protein phosphatase type 2C activity; Cellular component=protein serine/threonine phosphatase complex; Biological process=protein amino acid dephosphorylation
  Homolog annotation: Hit_ID=Q2QWE3; Match level="QueryCoverage=77%, HitCoverage=42%, E-value=2e-38, Identity=50%"; Hit description =Protein phosphatase 2C containing protein, expressed
  Pfam annotation: Domain name=PP2C; Domain location=4-251; Score=-3.4; E_value=9.4e-06; Accession=PF00481.12; Description=Protein phosphatase 2C
MLTYKRFIPSQISFLSNLILGLLGTVQGLKNLHVLHYIADTRNLHMIITNRTPVCYECIITKGVRDGACAVTALVKDGELFVANVGDCRAVLGSHSGIATALTSDHTAAREDERRRIESSVCGDRDGHAGIAQVIPSRTSFSGSRAGRVRELRQQWRVACAGSPARVARVRRRVHEGPGSPVSRRSRGAASPRDCRFLVVASDGLWNKVSCQEAVDVVVSAPPGGAGASSSVESCKDLVALARKRGSRDDITVMLVDLQRFI

SEQ ID NO: 49632 - protein, 203 aa, Zea mays
  Coding DNA Sequence Number=SeqID_7853
ASTLNLVHGSAYRAADPPPSFPLLPAINGESDAFDKMFRREVRCLEACRGHPCLVELHAAHHVSHSSPSCPSLRLCARICARPPPFLRLCARRPHRLSLRLCSTSPAAHNHASSPPRPASTVTWLPPPLTSSSPTPPSATDGDRDEVGCGVVPLDALCSSPTLAQRRTFPNRDDRSSSTHPRAPPPPWVPLCSSCPAVEQPHN

SEQ ID NO: 49633 - protein, 72 aa, Zea mays
  Coding DNA Sequence Number=SeqID_7854
  Homolog annotation: Hit_ID=O22523; Match level="QueryCoverage=75%, HitCoverage=13%, E-value=4e-08, Identity=54%"; Hit description=DNA -binding protein GBP16
MGIAFPTSIVVYETVCHFSPLATDDAVLEEFDMVKMIYGIICSPNAVATLVISTRIFDQTIKGVFECTRANS

SEQ ID NO: 49634 - protein, 140 aa, Zea mays
  Coding DNA Sequence Number=SeqID_7855
MAQNTSCSAAATVAAPPGELAVTPPVSTASCYAYFEDLDPLPSPSPLRHPDAPWTPSSNRCEMPHALPPLLNKRTRPGNPQQRRRGRAAREDFASCPFLFFLLPPLSLAPHPSALLRIVLDPNQYYDSPPRSKAEGEGRK

SEQ ID NO: 49635 - protein, 72 aa, Zea mays
  Coding DNA Sequence Number=SeqID_7856
MADKWGQGSSEPGQADRQGPGAETRVREKRGAADQEGGRGSWAEVANERGEVGEQGAGLKRGEGAQTWPKNA

SEQ ID NO: 49636 - protein, 78 aa, Zea mays
  Coding DNA Sequence Number=SeqID_7857
MDVLDELDGVLCRLEPDIGCNESCDVSDDEENQEGEINNNNVGDGMEDDNSIICHKIDDHNTMIGCEHALKLITAGNQ

SEQ ID NO: 49637 - protein, 109 aa, Zea mays
  Coding DNA Sequence Number=SeqID_7858
MTKVDACRMWSERVHRRKNRNDNKLQKYLRLERRQKYKRNSKTDAKSARTLRLCSILCIACASSHYDFDSSPKGPSSKMTVADSWRLVHQTQSGAHRTVRCTTGQSGEL

SEQ ID NO: 49638 - protein, 187 aa, Zea mays
  Coding DNA Sequence Number=SeqID_7859
  Homolog annotation: Hit_ID=Q6QP51; Match level="QueryCoverage=84%, HitCoverage=83%, E-value=6e-15, Identity=41%"; Hit description =Putative growth-regulating factor 1
MTASKKGPGKGDTPKRILLREGNRPRASLLIRGSKAGPSEGFNSRLRARGLRTHYWSEVRRPAPRKGSTAASGHSGSAPTTDQGGNDLVTESHQREASSPRTPSKGDRVRQITRSAACAAPTAGPFDRVRLTAARPDLRRHRKLRFARPQGSDSGSAPEDDELRFARPQGSDSGSAPEDDELRFARP

SEQ ID NO: 49639 - protein, 386 aa, Zea mays
  Coding DNA Sequence Number=SeqID_7860
  Gene Ontology: Mol. function=oxidoreductase activity, acting on the CH-OH group of donors, NAD or NADP as acceptor; Cellular component =mitochondrion; Biological process=isocitrate metabolic process
  Homolog annotation: Hit_ID=Q9XGU7; Match level="QueryCoverage=99%, HitCoverage=100%, E-value=0.0, Identity=85%"; Hit description=NADP -specific isocitrate dehydrogenase
  Pfam annotation: Domain name=Iso_dh; Domain location=7-375; Score =328.0; E_value=1.7e-95; Accession=PF00180.10; Description =Isocitrateisopropylmalate dehydrogenase
MAFEKIKVSNPIVEMDGDEMTRVFWQSIKDKLILPFLDLDIKYYDLGILHREATDDKVTVEAAEATLKYNVAIKCATITPGTVFREPIICKNVPRLVPGWTKPICIGRHAFGDQYRATDAVLKGPGKLKLVFEGKEEQIDLEVFNFTGAGGVALSMYNTDESIRAFAEASMTTAYEKKWPLYLSTKNTILKKYDGRFKDIFQEVYEADWKSKFEAAGIWYEHRLIDDMVAYALKSEGGYVWACKNYDGDVQSDFLAQGFGSLGLMTSVLVCPDGKTIEAEAAHGTVTRHFRVHQKGGETSTNSIASIFAWTRGLAHRAKLDDNARLLDFALKLEAACVETVESGKMTKDLAILVHGSSSVTRSHYLNTEEFIDAVATELRSRLGAN

SEQ ID NO: 49640 - protein, 86 aa, Zea mays
  Coding DNA Sequence Number=SeqID_7861
MDSDANTTIVGISDVGYGEWATALSPLRWNLRLCGGYRMQEMVEVAGDAGCGFARLMNGLGFAAGLRGTWEKATGDEEGGRSVSIE

SEQ ID NO: 49641 - protein, 79 aa, Zea mays
  Coding DNA Sequence Number=SeqID_7862
MKNEVQINKKNQRKEKGKRSWLEAAKTLLGLAHRTVRWCTGQCPGERLQVVEIPRKRERVKERKNTVVFKSIIGSLERG

SEQ ID NO: 49642 - protein, 721 aa, Zea mays
  Coding DNA Sequence Number=SeqID_7863
  Gene Ontology: Mol. function=zinc ion binding; Cellular component =nucleus; Biological process=chromatin modification
  Homolog annotation: Hit_ID=UPI000034F123; Match level="QueryCoverage =87%, HitCoverage=70%, E-value=1e-60, Identity=35%"; Hit description =protein binding / zinc ion binding
  Pfam annotation: Domain name=PHD; Domain location=372-436; Score =21.3; E_value=0.00042; Accession=PF00628.19; Description=PHD-finger
  Pfam annotation: Domain name=PWWP; Domain location=207-294; Score =5.7; E_value=0.0041; Accession=PF00855.8; Description=PWWP domain
  Pfam module annotation: Pfam domain module=PHD::PWWP; Domain location= 372-436::207-294
MPRTAEARTRGGGGPRPRKRRRGDEFFPVDLLGDVPASSIPYAAFGLRWSEAPEAPPEAAQPPPAARPPVVRSSRGRTLVLPSRFNDSVLTDPWKKEKPARPPPPVKTEHLARRNELLHKKGANFDSSVALSEVDDDDEEEAMVERYRARRSFGASRKHLASWSTLTSVHDEPYSNHHRKEVKLRHYYEEDEEEEEEKEDIFHCTEELVYGDIVWAKLGKRQPMWPGVVVDPTQQAAADAMPPQPRGVAVLCVMLFGWRTEFSGEKKYVWVRQGLIFPFSDYMNRFQGQTELSSCKPADFRRAVEEAFLADQGFSEVVVHCSTKGQSVQCRRVLQCESCGNCFPNKDTNKMVYVMEQLACRLCARILALKKYCGICLKNLQHKYGGRRLQILTGISNDQVCCHGCESWVHAECDENCSNLKDLQDKKYHCPYCRVKMNSTLPGKNTKISDVRKDSSAQKGSKPDKVALVCFDMEGTYEPDLELISCHCGPCKGQKFLFNEWERHAGCRSKNWRSSIKLKGSLMPFGKWIDRHQPGVCPTNPPKRSSQKMKKQKLIDLLNGSICFEIWWKSEAATNNTHVQMSDSSSSGMLWCEGCSTYYHAICASRAGYRMELHCLEKNGRQTTKKISYCAQHRSPNPDNVLIIQTPAGTFSSKKLVHSNGKVAASRLIRKDIPLDLPSEVKISENLSAARCRVYVRKDLKGLWLEIIVAIQPMLEKLFDT

SEQ ID NO: 49643 - protein, 171 aa, Zea mays
  Coding DNA Sequence Number=SeqID_7864
  Homolog annotation: Hit_ID=Q5JM97; Match level="QueryCoverage=58%, HitCoverage=27%, E-value=7e-31, Identity=67%"; Hit description =Senescence/dehydration-associated protein-related (ERD7)-like
MSCTATPWLGVYFCGSVDCHLFHALRLNPCQVFRVSPSEIRPWHVAARGIHEETLLRVPGASVHLLASSSDGPVELVRGDLAVVRLTKDDVAVATAVRVGRDLGWPLARDEPVVRLDPLHYLFTLPADKDVTFLNYGVSFNAVANASALVSGAGPGVVHEYSLNAQIFGDL

SEQ ID NO: 49644 - protein, 326 aa, Zea mays
  Coding DNA Sequence Number=SeqID_7865
  Gene Ontology: Mol. function=DNA-directed RNA polymerase activity; Cellular component=nucleus; Biological process=transcription
  Homolog annotation: Hit_ID=Q9LSZ5; Match level="QueryCoverage=57%, HitCoverage=84%, E-value=1e-29, Identity=33%"; Hit description =Arabidopsis thaliana genomic DNA, chromosome 5, P1 clone:MQM1
  Pfam annotation: Domain name=RNA_pol_Rpc34; Domain location=35-323; Score=-83.9; E_value=2.6e-06; Accession=PF05158.3; Description=RNA polymerase Rpc34 subunit
MGQGAARSPPETTSMGGGAEDGGGVTVYGRKEIMMGEQCQSMDFSGWEWDGEEVKGGDGEVQSSYGLRHQHYGYTPRGPFSLDGWMKLRELLDKNDFWSQHNLTVPEGSFCNLNLRFKVGLPPEAVYNIIIEAGNKGLWMLDILKKLLMAPNIATKVVRTLVASGLLKEVSDVRHRSRKIFMATDFQSFAEITGGTWYHDGRLDTDAVSTARRCCQAQVERLGAATAQMIHHDILKEDPRAGYTIDKVKDIIKTMVLEEVKSTGTRDFSAVMAGTMCYRLVTGAPQGGMMEGIHCGICPRTHECSPEGIISPSTCVYYKKWLQMDF

SEQ ID NO: 49645 - protein, 72 aa, Zea mays
  Coding DNA Sequence Number=SeqID_7866
MGGVDNFLLEMALLSGAVVVSGTTSIGSTSGSGISIGSIGGHGGKMGCRRVGQGRNATFYDTMKTYRKWVMY

SEQ ID NO: 49646 - protein, 70 aa, Zea mays
  Coding DNA Sequence Number=SeqID_7867
MTLEKKQNELKRLQNVKGAAVVVAVGAEAKKLVNGLPKQQKQQVGCPLILADPHVFLRSPCRLCPLELVA

SEQ ID NO: 49647 - protein, 196 aa, Zea mays
  Coding DNA Sequence Number=SeqID_7868
  Gene Ontology: Mol. function=catalytic activity; Biological process =metabolic process
  Homolog annotation: Hit_ID=Q7F1X5; Match level="QueryCoverage=59%, HitCoverage=14%, E-value=8e-17, Identity=45%"; Hit description =Putative 4-coumarate-CoA ligase
MGETAILMDRFDFIAALRAIERGGSQRVHFLSSYRFSHQWKFVSLRKPKKLSALHTIERYRVTLLPTAPLVLVAMIKSEEAHRCDLSSLLFIGIGGAPLSREVAERFAAIFPNIELIQVPCLKGEVISEEKSLEFGTDKISLILWHFRIDLDLDAVDSAVMFSKFGADADGNKKKCVFRLLRLRWVEWRSRWAILD

SEQ ID NO: 49648 - protein, 263 aa, Zea mays
  Coding DNA Sequence Number=SeqID_7869
  Gene Ontology: Mol. function=nucleotide binding; Cellular component =membrane; Biological process=small GTPase mediated signal transduction
  Homolog annotation: Hit_ID=P40392; Match level="QueryCoverage=73%, HitCoverage=95%, E-value=1e-100, Identity=96%"; Hit description=Ras -related protein RIC1
  Pfam annotation: Domain name=Arf; Domain location=59-229; Score= -51.4; E_value=8.1e-06; Accession=PF00025.11; Description=ADP -ribosylation factor family
  Pfam annotation: Domain name=MMR_HSR1; Domain location=69-184; Score =5.9; E_value=0.00029; Accession=PF01926.13; Description=GTPase of unknown function
  Pfam annotation: Domain name=Miro; Domain location=70-184; Score =91.6; E_value=2.3e-24; Accession=PF08477.3; Description=Miro-like protein
  Pfam annotation: Domain name=Ras; Domain location=70-231; Score =366.5; E_value=4.3e-107; Accession=PF00071.12; Description=Ras family
  Pfam module annotation: Pfam domain module=Arf::MMR_HSR1::Miro::Ras; Domain location=59-229::69-184::70-184::70-231
MGATKDVLSLYAVNHLCAVAQLFSTSAGAEAQASDKLSNPKQLGPFVAETKQPPPPETRVAWPSCDYLFKLLLIGDSGVGKSCLLLRFADDSYLESYISTIGVDFKIRTVEQDGKTIKLQIWDTAGQERFRTITSSYYRGAHGIIVVYDVTDQESFNNVKQWLNEIDRYASENVNKLLVGNKCDLAENRVVSYEAGKALADDIGIPFLETSAKDATNVEKAFMTMAGEIKNRMASQPAASGASRPATVQMRGQPVSQQSSCCS

SEQ ID NO: 49649 - protein, 143 aa, Zea mays
  Coding DNA Sequence Number=SeqID_7870
MTVRTSVQVASSITCAIQFSTSGLHFERPFCSTLTPIVHEKRSASHFGDVLSSSNHQKWSLEGCLSHGAPDSPVRHRTLFGAPATSAGRWVLTVGALTGGASGLSGGAPDRSCRLSGAPSARALTLVCTVAHLMRLQSTVGAK

SEQ ID NO: 49650 - protein, 80 aa, Zea mays
  Coding DNA Sequence Number=SeqID_7871
  Subcellular localization annotation: CTP_CleavageSite=40; ConfidenceScore=5.11e-01
MQQGVESVVEVTTASGVTSDGSDDPSLRLLVLRRLHVVARATTVVVSVGVSSSRWGALWWCRGHLKLGPRGGCLLDSNSY

SEQ ID NO: 49651 - protein, 72 aa, Zea mays
  Coding DNA Sequence Number=SeqID_7872
MHVVTEDDSTWIFELFNVARGFDLVCKESIWVVNLDFGGRGDLARDVVGARDLEEGLKERGRKALACSLARG

SEQ ID NO: 49652 - protein, 386 aa, Zea mays
  Coding DNA Sequence Number=SeqID_7873
  Gene Ontology: Mol. function=protein serine/threonine kinase activity; Cellular component=cytoplasm; Biological process=protein amino acid phosphorylation
  Homolog annotation: Hit_ID=O81637; Match level="QueryCoverage=93%, HitCoverage=50%, E-value=1e-168, Identity=81%"; Hit description =Mitogen activated protein kinase kinase
  Pfam annotation: Domain name=Pkinase; Domain location=25-299; Score =179.2; E_value=1e-50; Accession=PF00069.15; Description=Protein kinase domain
  Pfam annotation: Domain name=Pkinase_Tyr; Domain location=25-256; Score=-4.3; E_value=3.3e-12; Accession=PF07714.7; Description =Protein tyrosine kinase
  Pfam module annotation: Pfam domain module=Pkinase::Pkinase_Tyr; Domain location=25-299::25-256
MAPSFDPSAQQSPDPFPCIFPLSLSQFSDVLGKGASKIVYKAFDEYQGMEVAWNQVKLHDFLQSPEDLERLYCEIHLLKTLKHRNIMKFYTSWVDVSRRNINFITEMFTSGTLRQYRQKHRRVNMWAVKHWCRQILSGLLYLHSHNPPIIHRDLKCDNIFVNGNQGEVKIGDLGLAAILRKSHAVHCVGTPEFMAPEVYEEEYNELVDIYSFGMCVLEMVTFEYPYSECTHPVQIYKKVISVRRSLDPMSHLAAIVILGTKPEALYKVKDPMLRRFVEKCLVSSSQRLSARELLEDPFLQGDDVAVSLDGGDYHVPTKYVRQPSYLGHTYSNGSMVSNGFSESMDEDALSEDCEDDDMKGQDGIDLFNENEDEPLGNVDITIKGRK

SEQ ID NO: 49653 - protein, 358 aa, Zea mays
  Coding DNA Sequence Number=SeqID_7874
  Homolog annotation: Hit_ID=Q6ZL19; Match level="QueryCoverage=76%, HitCoverage=57%, E-value=1e-129, Identity=82%"; Hit description =Putative carboxyl-terminal proteinase
  Pfam annotation: Domain name=DUF239; Domain location=220-358; Score =160.8; E_value=3.4e-45; Accession=PF03080.5; Description=Arabidopsis proteins of unknown function
  Subcellular localization annotation: CTP_CleavageSite=47; ConfidenceScore=5.17e-01
MAAARACIVALALVAALFVAGSAAAAAGNAGGRPQLSLRQRRRQLLRQRQVRSHLKRLNKAPLATIESPDGDIIDCVHISNQPALDHPFLKNHTVQQQLFYPSLWQQHSNMHAPPAPLQMRPAYHPEGLYDDESKVASQRNAQTITQMWHQNGRCPEGTIPIRRTKEEDVLRASSVRRYGKKKRRSAPNPMSVDPDMLNESGHQVSREQHAIAYVEGDKYYGAKATINVWQPKIEQANEFSLSQLWILGGSFGQDLNSIEAGWQVSPDLYGDNNTRLFTYWTSDAYQATGCYNLLCSGFIQINNQIAMGASIFPISNYGGSQYDINILVWKARFSQGLTTVALAPSPSLFVDALAVAE

SEQ ID NO: 49654 - protein, 106 aa, Zea mays
  Coding DNA Sequence Number=SeqID_7875
MADGMALVLVFELCSGMASGMALVLVSELCSGMVGGMALVLRVEAGFGNMGMRPSPSLHRAQMRRFPNWPRPGSGEAEISPKAEAETEAEIRFVSSFIDFGTLSGA

SEQ ID NO: 49655 - protein, 126 aa, Zea mays
  Coding DNA Sequence Number=SeqID_7876
  Subcellular localization annotation: CTP_CleavageSite=48; ConfidenceScore=5.39e-01
MDIRQADAAAAVPDSASQPAGSRSARSFHALIRSRRIMPPLEPAPVSVAQHVECRLSLGMRVQLSFVCRVFQRLPAQHLHGLNWLLLRAWHSSAGLLHDTTAFRNTMMVLAPRLIRGARRGRCFLG

SEQ ID NO: 49656 - protein, 92 aa, Zea mays
  Coding DNA Sequence Number=SeqID_7877
MHDRLAPASYVLQLGIITIVLRSSNLFRDEIDHQNAMLNNTFPSRLQRMCSRKTQAEVGIRELIYGRLRYIPSPTKAAKHSITKSFNDCNFH

SEQ ID NO: 49657 - protein, 96 aa, Zea mays
  Coding DNA Sequence Number=SeqID_7878
MGSGRASSGAQPPYCRHRGALLAAIVTHQPCRRELVAERECFDAADTAIAMRWVTGVPEAHAAAGSTHCAIMGNDLILVFLIFFALCGYVELGRDH

SEQ ID NO: 49658 - protein, 144 aa, Zea mays
  Coding DNA Sequence Number=SeqID_7879
MAHEGLESDDLADQECGTAVATASSSPGVLEAGCDRVGEVARGREWWHGGASASCDDDDMRRGCGGSGRQQWGGNGGTTGTRAPWLRDSRRRRGGGAMGATARRRDIAVARPRATTVAAGLGRCVCVLGKREWEWAVREWECER

SEQ ID NO: 49659 - protein, 96 aa, Zea mays
  Coding DNA Sequence Number=SeqID_7880
MAQPTVEDLEPLAHRTLSGAHWTVRCPHQTVGSATRHVRIARPTVGLPDSPVLDSPVNFSPFENKDQHNTILRNTILSSLRGTQSKSIEVIKSCLC

SEQ ID NO: 49660 - protein, 400 aa, Zea mays
  Coding DNA Sequence Number=SeqID_7881
  Gene Ontology: Mol. function=DNA binding; Cellular component =chromatin; Biological process=DNA integration
  Homolog annotation: Hit_ID=O24587; Match level="QueryCoverage=99%, HitCoverage=41%, E-value=0.0, Identity=77%"; Hit description=Pol
  Pfam annotation: Domain name=rve; Domain location=152-299; Score =105.3; E_value=1.7e-28; Accession=PF00665.16; Description=Integrase core domain
MTGEKKMFTFYVKNRDSQDTIIFGDGNQGKVKGLGKIAITAEHSISNVFLVESLGRSDGSLAFKGVLDDKLYLVDFSKENTDLDACLIAKTNMSWLWHRRLAHVGMKNLHKLLMGEHVLGLIDVWFEKDRPCAACQAGKQVGSTHQSKNIMMTSRPLELLHMDLLGPIAYPSIWGSKYGLDKSETQETLKRFLRRAQNEFDLKVKKIRSDNGSEFKNLQVEEYLEEEGIKHEFSAPYTPHRNGVVVRKNMTLIDMARTMLGEYKTPERFWSEAANTACHAINQLYLHHLLKKTSYELLTGNKPNVSYFRVFGSKCYILVKKGRHSKFAPKAVEGFLLGYDSNTKAYRVFNKSSGLVEVSSDVVFHETNGSPREQVDLDDVNEDEVPTVAMRIMAIGDVRP

SEQ ID NO: 49661 - protein, 480 aa, Zea mays
  Coding DNA Sequence Number=SeqID_7882
MARPSANPSAPDAVALSACSVAATTGTKGDTGALEDPWSKFCVGSKITSIVAAKGVAASVAQPLKYAVRDKSATKNKSRNLLEKLTAAETEKEDLIYRLAEEREGAEKARVEAQAAGAEADAACAEVSLALKRAADAELGLKSLRSYTEKMEASTRARVERAHTLFVDAYHDLGARTAPFDRSSKEVGLCFLGWLQEELESLSSIMMGLMSYASLVTYEGVANALSREGCRHFEVFDWPTEDLDHGIFQVEEEMMNEEEVKDFAGLDSSMIRTDGAKARAKGHLAPQAGPVEDPAAASAPAQVLTSGPTQATPDDVDTNILTAANATPFNGNVFEGSEPRSWSSDGEDFGSPFSCIEESSEEDLDYFVVLDLAALESPQQPDAREVSATPARATIEDTRGRRVVSKQSIGGTSRSGRHRRMGMDRSRLRLDRGNQRDLLSSTSGMCIGEGDLRNLFEGEEFRMMLFNFWEAGLIPKAEPM

SEQ ID NO: 49662 - protein, 105 aa, Zea mays
  Coding DNA Sequence Number=SeqID_7883
MDPKGKGMVINDKEKETLYVDEPKGDKPTDSGSSHKKRDGKKKRHIKKIIYYDNDTSSSSPRDDDDKDSSSKKKTINHYYSFDYYHIPYLKGSFVIYSTQKTPTL

SEQ ID NO: 49663 - protein, 198 aa, Zea mays
  Coding DNA Sequence Number=SeqID_7884
MASSTSRPQPRQDGLPAATQHADQDEGCGEESYRFPEGSSVGRTAATVSILRHGRDLVVAWWAPTVVGVGGGCPAASGLGMGGRRPAFAALLEGGGSQAGVRRLKSCWRAGGRFDGLGRWSRGSEPQLYSSRVRFQGYTQPNLNNLGPDSLSPTSQHPIGKQSSSSGEKPGEWDPPDGDLARVGTFGQTGFNLHATSS

SEQ ID NO: 49664 - protein, 388 aa, Zea mays
  Coding DNA Sequence Number=SeqID_7885
MDDFSMISDHSMLLQGHGMLGAEGCLGTRGSSGVLPTGGRRTVPVPALQLQDDRNNKGEDMFFSDWPELASFDDLEASLRNFDPTFEIGSSYFDDMLWPSNCSPGAQLARNGYSDDIDFSIDQKDSNSTPKVNTTKTKQQSRRNGASGGSSGTASNHEAHASSSSGLSDAELFLHPFDDTTALASQTWEEDLQAILCSIPETRAVVPAASTAMCADGSSTCCSGPDIVAAHHVPRSATATTKDAAFSGSPDTILEEMAENPLDMYFPPLPTTSGQSGTMMMSDTTWAPEHRFREEFAGSCALGCAELRFCSEDVASAGVFHKQPGSATAVVLDAVPVKDLSFQKLQHGMNQLDLATRGRIRDSLYRLANRLEQTHCVARTSGRMGSNR

SEQ ID NO: 49665 - protein, 613 aa, Zea mays
  Coding DNA Sequence Number=SeqID_7886
  Gene Ontology: Mol. function=RNA-directed DNA polymerase activity; Cellular component=mitochondrion; Biological process=RNA-dependent DNA replication
  Homolog annotation: Hit_ID=UPI00004C1731; Match level="QueryCoverage =89%, HitCoverage=41%, E-value=0.0, Identity=81%"; Hit description =UPI00004C1731 related cluster
  Pfam annotation: Domain name=RnaseH; Domain location=242-369; Score =12.1; E_value=4.3e-06; Accession=PF00075.14; Description=RNase H
  Pfam annotation: Domain name=rve; Domain location=371-546; Score =71.9; E_value=2e-18; Accession=PF00665.16; Description=Integrase core domain
  Pfam module annotation: Pfam domain module=RnaseH::rve; Domain location=242-369::371-546
MSGAHRTVRCTPDSPVPPSSRWLGHVSRADRAADRWPGRPLAHRTVRCTLDSPKWPKGTFPFQYRLLRKAECFTWTPEAEEALGNLKALLTKAPILVPPAAGEALLVYVAATTQVVSAAIVVEKQEEGHALPVQRPVYFVSEVLSETKIRYPQVQKLLYAVILTRRKLRHYFESHPVTLVSSFPLGEIIQCREASGRIAKWAVEIMGETISFAPRKAIKSQVLADFMAEWVDTQLPTAPIQPELWTMFFDGSLMKTGAGAGLLFILPLGKHVRYVLRLHFPASNNVAEYEALVNGLRIAIELGVRRLDARGDSQLVIDQVMKNSHCRDPKMEAYCDEVRRLEDKFYGLELNHIARRYNETADELAKIASGRTTVPPDVFSRDLHQPSIKIDDTPEPEAPSAQPEKAPGGYTHLLVAIYDFFKWIEVRPLNSIRSEQAVAFFTNIIHRFGVPNSIITDNGTQFTGRKFLDFCGDHHIRVDWAAVAHPMSNGQVERANGMILQGLKPRIYNDLNKFGKRWMKELPSVVWSLRTTPSRATGFTSFFLVYGAEVVLPTDLEYGSPRTRAYTDQSNQASREDLLDQLEEARDKALLHSTRYQQSLRRYHARGVRSRDL

SEQ ID NO: 49666 - protein, 258 aa, Zea mays
  Coding DNA Sequence Number=SeqID_7887
  Gene Ontology: Mol. function=calcium-dependent phospholipid binding; Cellular component=plasma membrane; Biological process=cell differentiation
  Homolog annotation: Hit_ID=Q43864; Match level="QueryCoverage=99%, HitCoverage=100%, E-value=1e-123, Identity=76%"; Hit description =Annexin p35
  Pfam annotation: Domain name=Annexin; Domain location=15-80; Score =95.6; E_value=1.5e-25; Accession=PF00191.10; Description=Annexin
  Pfam annotation: Domain name=Annexin; Domain location=189-254; Score =92.6; E_value=1.2e-24; Accession=PF00191.10; Description=Annexin
  Pfam annotation: Domain name=Annexin; Domain location=87-152; Score =65.2; E_value=2.2e-16; Accession=PF00191.10; Description=Annexin
  Pfam module annotation: Pfam domain module=Annexin::Annexin::Annexin; Domain location=15-80::189-254::87-152
MATLTVPSSVPAVAEDCEQLHKAFEGWGTNEKLIISILAHRNAAQRRAIRRGYAEAYGKELLRALGDEIHGKFERAVILWTLDPAERDAVLANEEAKKSHPGGRALVEIACARTPAQLFAVKQAYHDRFKRSLEEDVAAHVTGDFRKLLVPLVSAYRYDGPEDLKADPKDEFLSTLRAIIRCFTCPDRYFEKVIRLALGGMGTDEDDLTRVVTTRAEVDLKLIKEAYQKRNSVPLERAVAKDTTRDYEDIMLALLGAE

SEQ ID NO: 49667 - protein, 583 aa, Zea mays
  Coding DNA Sequence Number=SeqID_7888
  Gene Ontology: Mol. function=binding; Cellular component=thylakoid; Biological process=photosynthesis
  Homolog annotation: Hit_ID=Q1T1X0; Match level="QueryCoverage=71%, HitCoverage=80%, E-value=1e-98, Identity=42%"; Hit description=IMP dehydrogenase/GMP reductase
  Pfam annotation: Domain name=TPR_1; Domain location=246-279; Score =17.2; E_value=0.048; Accession=PF00515.18; Description =Tetratricopeptide repeat
  Pfam annotation: Domain name=TPR_1; Domain location=280-313; Score =34.0; E_value=5.1e-07; Accession=PF00515.18; Description =Tetratricopeptide repeat
  Pfam annotation: Domain name=TPR_1; Domain location=408-441; Score =12.2; E_value=0.19; Accession=PF00515.18; Description=Tetratricopepti de repeat
  Pfam annotation: Domain name=TPR_1; Domain location=454-487; Score =8.4; E_value=0.54; Accession=PF00515.18; Description=Tetratricopeptid e repeat
  Pfam annotation: Domain name=TPR_1; Domain location=488-521; Score =40.5; E_value=5.7e-09; Accession=PF00515.18; Description =Tetratricopeptide repeat
  Pfam annotation: Domain name=TPR_1; Domain location=522-555; Score =6.6; E_value=0.87; Accession=PF00515.18; Description=Tetratricopeptid e repeat
  Pfam annotation: Domain name=TPR_2; Domain location=246-279; Score =22.3; E_value=0.0017; Accession=PF07719.7; Description =Tetratricopeptide repeat
  Pfam annotation: Domain name=TPR_2; Domain location=280-313; Score =29.1; E_value=1.6e-05; Accession=PF07719.7; Description =Tetratricopeptide repeat
  Pfam annotation: Domain name=TPR_2; Domain location=408-441; Score =25.2; E_value=0.00023; Accession=PF07719.7; Description =Tetratricopeptide repeat
  Pfam annotation: Domain name=TPR_2; Domain location=454-487; Score =19.4; E_value=0.013; Accession=PF07719.7; Description=Tetratricopepti de repeat
  Pfam annotation: Domain name=TPR_2; Domain location=488-521; Score =27.0; E_value=6.5e-05; Accession=PF07719.7; Description =Tetratricopeptide repeat
  Pfam annotation: Domain name=TPR_2; Domain location=522-555; Score =13.9; E_value=0.58; Accession=PF07719.7; Description=Tetratricopeptid e repeat
  Pfam annotation: Domain name=TPR_4; Domain location=280-305; Score =8.2; E_value=3.9; Accession=PF07721.5; Description=Tetratricopeptide repeat
  Pfam annotation: Domain name=TPR_4; Domain location=362-387; Score =9.9; E_value=2.5; Accession=PF07721.5; Description=Tetratricopeptide repeat
  Pfam annotation: Domain name=TPR_4; Domain location=408-433; Score =17.8; E_value=0.04; Accession=PF07721.5; Description=Tetratricopeptid e repeat
  Pfam annotation: Domain name=TPR_4; Domain location=454-479; Score =1.8; E_value=23; Accession=PF07721.5; Description=Tetratricopeptide repeat
  Pfam annotation: Domain name=TPR_4; Domain location=488-513; Score =4.4; E_value=11; Accession=PF07721.5; Description=Tetratricopeptide repeat
  Pfam module annotation: Pfam domain module=TPR_1::TPR_1::TPR_1::TPR _1::TPR_1::TPR_1::TPR_2::TPR_2::TPR_2::TPR_2::TPR_2::TPR_2::TPR _4::TPR_4::TPR_4::TPR_4::TPR_4; Domain
  Pfam module annotation: Domain location=488-521::522-555::246 -279::280-313::408-441::454-487::488-521::522-555::280-305::362 -387::408-433::454-479::488-513
  Subcellular localization annotation: CTP_CleavageSite=9; ConfidenceScore=5.18e-01
MSGARRRCVASLVVNQDQTPSTPPGCLSIFGTAPHIVPCLPPAPTQHSAGRGRAAANVATVMVAMTEPRDPPTGCALFGIYNGMFRRRRSASMTSLHRINGAEAEAEAAAPPNQKPAAHRDSSLARRPSAMPVPAAAQNGRSRPAAKAAPAAEPAAEYSGMAAELDRMILDHQRVKGTAQLVRATSGNMMLHRNLGNLNAGGRAANERKAPHGYASSGMGNIVREPRPAPAAGGQLCRALSHRTDPEKLKEMGNEEYRQGHYAEAVALYDQAIIMDASRPAYWSNKAAALAALGRLIEAVADCKEAVRIDPSYDRAHHRLAGLYLRYRSRIARSNDARRLKNWITVLQEAQAAVADGADCAPQVMALQAEALLRLQRHDEADSLLSGAGAPRFGVDESTKFFGTFGHAYFLIVRAQVDMAAGRFEDAVATAQTAFQLDPSNREVSVVQRRAKAAAAARLRGNDLFKAAKFAEACAAYGEGLDREPGNAVLLCNRAACHAKLGRHEKAVEDCSAALDVRPSYSKARLRRADCNVKLERWEASLRDYQVLVQELPENEDVKKALSEVEAKLKGQRHGAAAARSQH

SEQ ID NO: 49668 - protein, 44 aa, Zea mays
  Coding DNA Sequence Number=SeqID_7889
MSLGSSTAALRAICPPGWRLLHVSAGTPGAIFGLPYENFTGPEK

SEQ ID NO: 49669 - protein, 124 aa, Zea mays
  Coding DNA Sequence Number=SeqID_7890
MGKNNKREPTPPSEDFGDSEYSEEVFSSESEGSPAPIPLRESSDDSDDSRGLRRRSGLTSGPSSASGSEGGGGDGDDDDDDGGGGNDGDGGDDGDGDDSKDGDGGSSRGSNRGGSGRGNNRASG

SEQ ID NO: 49670 - protein, 193 aa, Zea mays
  Coding DNA Sequence Number=SeqID_7891
  Gene Ontology: Cellular component=integral to membrane; Biological process=response to nematode
  Homolog annotation: Hit_ID=Q6K5X9; Match level="QueryCoverage=99%, HitCoverage=100%, E-value=1e-69, Identity=83%"; Hit description =Transmembrane protein-like
  Pfam annotation: Domain name=TPT; Domain location=16-157; Score =116.3; E_value=8.6e-32; Accession=PF03151.7; Description=Triose -phosphate Transporter family
MAPGSKAERKAALDAGAWMFNVVTSVGIIMYVHHLQWKYSLGSFNLLGHTAPAQAASLLVLGPFVDFWLTNKRVDAFNYTSIVTFFIVLSCIIAVGTNLSQFICIGRFTAVSFQVLGHMKTVLVLTLGFFFFGKEGLNFHVALGMFLAVIGMIWYGNASSKPGGKERQVYSTPSEKTQKHGVLSSQSELDQKV

SEQ ID NO: 49671 - protein, 51 aa, Zea mays
  Coding DNA Sequence Number=SeqID_7892
MAPRTLRDDGSSQPPYGSKRTQFRASAIAYLGRYRFAELGSSSCDVVDLGL

SEQ ID NO: 49672 - protein, 60 aa, Zea mays
  Coding DNA Sequence Number=SeqID_7893
MADRSRGVRSCGPGLVHRHTEIHGGRTLTIDPCINDLDLVWAYLLCGQIRTVDLQACGQN

SEQ ID NO: 49673 - protein, 167 aa, Zea mays
  Coding DNA Sequence Number=SeqID_7894
  Gene Ontology: Mol. function=two-component response regulator activity; Cellular component=nucleus; Biological process=two -component signal transduction system (phosphorelay)
  Homolog annotation: Hit_ID=Q6H805; Match level="QueryCoverage=65%, HitCoverage=15%, E-value=4e-15, Identity=46%"; Hit description =Putative response regulator 9
  Pfam annotation: Domain name=Response_reg; Domain location=71-167; Score=23.3; E_value=5.5e-05; Accession=PF00072.14; Description =Response regulator receiver domain
MSTPPRSTNRKQIGRPIDSRDGDSRESRSEVSNYVVHAIARESTPRGRGYSVSTGGEDGEEMDVKTFPAGLRVLVVDDDRVCLKVLERQLKCCNYNVMVVTDARTALEMLRERKDDGDQFDLVISDVVMPNMDGFELLELIGVEMDLPVISKALALPIFMHGILLII

SEQ ID NO: 49674 - protein, 115 aa, Zea mays
  Coding DNA Sequence Number=SeqID_7895
MASDRGQHHPHERIFFVPDLSSTKVARTLVYKLFIVKEFRTHNRRGNGGSDWEGHDSDRSSHEDGDLAKGTMDLAGKATAMVDLARKAMTATDPTKATMNKGDVDGAVLAGQRPA

SEQ ID NO: 49675 - protein, 468 aa, Zea mays
  Coding DNA Sequence Number=SeqID_7896
  Gene Ontology: Mol. function=two-component response regulator activity; Cellular component=nucleus; Biological process=two -component signal transduction system (phosphorelay)
  Homolog annotation: Hit_ID=Q6H805; Match level="QueryCoverage=62%, HitCoverage=47%, E-value=2e-46, Identity=40%"; Hit description =Putative response regulator 9
  Pfam annotation: Domain name=Myb_DNA-binding; Domain location=193 -243; Score=35.9; E_value=1.4e-07; Accession=PF00249.21; Description =Myb-like DNA-binding domain
MGVRHSRSVVHSSAQRVHVALEYVRWVFTGARAQGSLINVQVCKWDRLPSNGLSFWVELGCEQCPFMKLFEMTKGANDYKNSTAGVLSANSETRTIMKGIKHGACDYIVKPVRLEQLRGIWTHVVKNSRTDPRTSIIDSGSDDDVQKLPSGDGGEGDKVGANRRKKKCSKKNKPAVDVAGGHSENTSAQKKPRVQWCGQLHRKFVEAVHQIGIDKAVPKKILEAMNVEGITRENVASHLQKYRIYLRKLIEGTLGNSNSFADETEALWRYLNVPSFITSPSSSNHFTNAGSSSAIRTQTLLPPQPPVHVMSSQKNLSTPRSDMPPLTSNMWFSSSRSCSSYASILRGKILGSSRGIPFEDTPDGEMLAPGNLSSQSPELQSVWAGSASTRSDLQIDNSTQALNGGGASDNSLREGGSTVDQQAVVSDQVNNINAESDGLDDFLAYMVNRRDFINNGDSFILGDQDFAP

SEQ ID NO: 49676 - protein, 192 aa, Zea mays
  Coding DNA Sequence Number=SeqID_7897
MASRYAPSLGACVRILLLAYVMYHRSRGSIGTPPEWEQESRVYTAEVLESAHGKQPMGATRIPWQKSGHVAALDASRPKVQIASYRHGTAPSQGSEKCPGLDMSSTGLHTWQYWTPLSLGAGDTYRRSGQPFARPPPTVAVEGPYSLGYMAAPKPLCRGFRVLTVDVGPSPEGSVPSWWPYPLSQDRLPLAL

SEQ ID NO: 49677 - protein, 104 aa, Zea mays
  Coding DNA Sequence Number=SeqID_7898
  Gene Ontology: Mol. function=protein serine/threonine kinase activity; Cellular component=integral to membrane; Biological process=protein amino acid phosphorylation
  Homolog annotation: Hit_ID=Q9FP13; Match level="QueryCoverage=88%, HitCoverage=14%, E-value=9e-33, Identity=72%"; Hit description =Putative somatic embryogenesis protein kinase 1
  Pfam annotation: Domain name=LRRNT_2; Domain location=1-33; Score =27.6; E_value=4.3e-05; Accession=PF08263.3; Description=Leucine rich repeat N-terminal domain
  Pfam annotation: Domain name=LRR_1; Domain location=37-59; Score=1.2; E_value=1.7e+02; Accession=PF00560.23; Description=Leucine Rich Repeat
  Pfam annotation: Domain name=LRR_1; Domain location=61-83; Score =15.6; E_value=0.18; Accession=PF00560.23; Description=Leucine Rich Repeat
  Pfam module annotation: Pfam domain module=LRRNT_2::LRR_1::LRR_1; Domain location=1-33::37-59::61-83
MTIKNTLKDPHGVLKNWDQDSVDPCSWTIVSCSLENFVTGLEVPGQNLSGLLSPSIGNLTNLETILLQNNNITGLIPAEIGKLTKLTNHALNSVQSILTKFFLE

SEQ ID NO: 49678 - protein, 99 aa, Zea mays
  Coding DNA Sequence Number=SeqID_7899
MFSGSVSSTRRAEQVKQQQVREDYCGAALWEAGPQAQLPQATIQLTQTKNFFKLLKVVQYGILELVLLEIVGNDTPPIIFGDLESLDFGKKLLGTLEML

SEQ ID NO: 49679 - protein, 216 aa, Zea mays
  Coding DNA Sequence Number=SeqID_7900
  Gene Ontology: Mol. function=structural molecule activity
  Homolog annotation: Hit_ID=Q1RWT2; Match level="QueryCoverage=78%, HitCoverage=86%, E-value=5e-41, Identity=54%"; Hit description=PAP fibrillin
  Pfam annotation: Domain name=PAP_fibrillin; Domain location=43-208; Score=65.0; E_value=2.4e-16; Accession=PF04755.3; Description=PAP _fibrillin
  Subcellular localization annotation: CTP_CleavageSite=29; ConfidenceScore=5.36e-01
MAPLLFVPNKTLAPPILHARHRFAPRPPSAAAFLRRFFPTRPPAAKADLLRLIADQGRGLETQSAPSRLADIISCIDALAAVSPGADTVSDAAKLSGTWRLLWTTEQEQLFIVRNAPFFRTAAGDVLQVIDVASGALNNVITFPPSGAFVVNGDIEVHTRCSEREQLGGSFSAVWKRMVLKLLLFDTVYLDDDIRVAKDIRRDYLVVERAPYSWDV

SEQ ID NO: 49680 - protein, 186 aa, Zea mays
  Coding DNA Sequence Number=SeqID_7901
  Subcellular localization annotation: CTP_CleavageSite=62; ConfidenceScore=5.31e-01
MLLLLTLSLTYSLKRRHPRALTVAAVPYLRAGRARPPCPIARRRRPPVRHRRRGSRRRARARAASAPSPPRSRAAARPRRPHARRSRVRRARARRVVARARRAVPLVVSRPRPSSCPSPNPSPLPVPPPRPRPPPPPVPPPHSSSVVTPPFPRRALARQAPRPRPDASPATRRLARAPSPRPCQNL

SEQ ID NO: 49681 - protein, 287 aa, Zea mays
  Coding DNA Sequence Number=SeqID_7902
  Gene Ontology: Mol. function=membrane alanyl aminopeptidase activity
  Homolog annotation: Hit_ID=Q6SJQ9; Match level="QueryCoverage=99%, HitCoverage=16%, E-value=2e-22, Identity=45%"; Hit description=TFIID component TAF2
MAKARKQKGDGSGTGGGATVLHQKLCLSIDMENQLIYGYTEIKALLAENDTFALHADNMTIRSILVDGETVEFDYSPHWKNETDQPNWSSISCLNTVADAACSTYTSSLNREATPNLIVSSERSIKSMIEQQLDENSEKYEENSGRLEKHGGKTIQTSYDQIVNGCNGSAVEEGIENSAVEEGKKKEKEKEKEEKNGNEKSKENGNETENEKVKNIKLVHIDYILEKAETGIHFVGNVMHSSNQIRRAHCWFPCVDTATQRCPFDLEFTVSTDFIAVSNGDLLYQLL

SEQ ID NO: 49682 - protein, 53 aa, Zea mays
  Coding DNA Sequence Number=SeqID_7903
MAIWPRLLLREAWASSEPKCRHVSCQYVVNRQHPLIALPDADRLIDEVLESLG

SEQ ID NO: 49683 - protein, 78 aa, Zea mays
  Coding DNA Sequence Number=SeqID_7904
  Subcellular localization annotation: CTP_CleavageSite=58; ConfidenceScore=5.12e-01
MAGWYIKITRVLMQKALAEGVSSTVDHTIKNGRTGLKQSPSNRRSTTSGLLPTSGQPVAAASPTAEPHSEPPELIPPK

SEQ ID NO: 49684 - protein, 109 aa, Zea mays
  Coding DNA Sequence Number=SeqID_7905
  Gene Ontology: Mol. function=DNA binding; Cellular component =cytoplasm; Biological process=DNA integration
  Homolog annotation: Hit_ID=O24587; Match level="QueryCoverage=99%, HitCoverage=12%, E-value=5e-47, Identity=73%"; Hit description=Pol
  Pfam annotation: Domain name=rve; Domain location=2-109; Score=46.8; E_value=7.3e-11; Accession=PF00665.16; Description=Integrase core domain
MTTSRPLELLHMDLFGLVTYLSIGGSKYGLVIVDVFSRFTWLKLKKIRSNNGSEFKNLQVEEYLEEEGIKHEFSAPYTPQQNGVVERKNRTLIDMARTMFGEYKTPERF

SEQ ID NO: 49685 - protein, 206 aa, Zea mays
  Coding DNA Sequence Number=SeqID_7906
  Homolog annotation: Hit_ID=Q9ST68; Match level="QueryCoverage=30%, HitCoverage=13%, E-value=9e-12, Identity=56%"; Hit description =Isocitrate dehydrogenase
MELNEKSEKNTQEVDEKFQNTNLYLKNLEMELRGTIGQSEEETEELSKITLENKDIQLDINIRVFDGADPMELHVYDFKGPGVTLSMYNSDEFIRPFAKSSMDMALSKKSSLHLSTKNTIIKKYDDRHGSSMFLQARGNPCSFKYPLYNMQAVGTNVHLQVTFIRPFAKFMDMALSKKSSLHLSTKNTIIKKYDDMHGSSMFLQAR

SEQ ID NO: 49686 - protein, 261 aa, Zea mays
  Coding DNA Sequence Number=SeqID_7907
  Homolog annotation: Hit_ID=Q6Z901; Match level="QueryCoverage=22%, HitCoverage=9%, E-value=9e-11, Identity=59%"; Hit description =Kinesin light chain-like protein
MASPTVASPIRASPVDNPTVAPSLASCRCALSLDARHPHPRARGRGQGHQDEPDRDRLAISSKEEARGPMDVSVPSWWPARSIFSKKELADAVTLQLPDYHKVIAKPVAFNLMAAARHLPPPAPAVTAASPRPLTRLAAQDAHSGPHRAHPLPPSTATSAATPTPSPSSSALSPSSHRQRCLPPATEVDDQQRQAAELDDTHAMLGHMDESIACYEKGLQIQMSALDERNPCLPETCRFVFGVTALLPLFRVAEKDNSGKL

SEQ ID NO: 49687 - protein, 212 aa, Zea mays
  Coding DNA Sequence Number=SeqID_7908
MGEAMLAQGKTGVRHSRLESKATGTEGPRWEGRRACMELFVISSSSVSDPRSTAIRHCRRSRLRTMSWPLASWRTLRGVHLPGVPALHLPRAPYVGIPRRGAGGSRCGRAGHRRRGGGGARPGHSRPRDVVMGQGGAGAPGARAPRAQALPQRLRPWLEIDETRRHCDRPNSSTLNVWLTRILSRGSEWRQTGRKGKGKLVSRMKFESYARC

SEQ ID NO: 49688 - protein, 64 aa, Zea mays
  Coding DNA Sequence Number=SeqID_7909
MGAGGGAVEAGVVEVVGTAEVVDGSRAAGAGEVGGGVETVAEGENDILALGSETIAINEKQWCI

SEQ ID NO: 49689 - protein, 145 aa, Zea mays
  Coding DNA Sequence Number=SeqID_7910
  Gene Ontology: Mol. function=identical protein binding; Cellular component=proton-transporting two-sector ATPase complex; Biological process=negative regulation of enzyme activity
  Homolog annotation: Hit_ID=Q9ZTT3; Match level="QueryCoverage=73%, HitCoverage=14%, E-value=5e-18, Identity=48%"; Hit description =Subtilisin-like protease C1
  Subcellular localization annotation: CTP_CleavageSite=23; ConfidenceScore=5.06e-01
MAGQPSSPSPSMGSSSSLLEGLRSKSESVWTTLSARYDTQYRNGLGLQGAHRRLLLIQRAKFDQPRDSQARPVVAGDRHPGSMDAVVAGVWEPQRQQVRGVQHRIRHVHGVPHATGAAAYVQVLPRFHPDWSPTMIMSVSPRHNR

SEQ ID NO: 49690 - protein, 155 aa, Zea mays
  Coding DNA Sequence Number=SeqID_7911
  Gene Ontology: Mol. function=identical protein binding; Biological process=negative regulation of enzyme activity
  Homolog annotation: Hit_ID=Q9FIF8; Match level="QueryCoverage=91%, HitCoverage=20%, E-value=9e-15, Identity=34%"; Hit description =Serine protease-like protein
MDPSRNSGGGELAYGARQLNPSRARDPGLVYDAREADYVRMLCTEGYNSTQLRAVTASPVPTPRPAAAAGRGVAASLNYPTMAHHTKPGKNFTVGFPRAGLRVHRQGLIRVTVVPKRLVFSRLLQRLSFTVTVSSALPAANESVSAAVVWPDGVR

SEQ ID NO: 49691 - protein, 107 aa, Zea mays
  Coding DNA Sequence Number=SeqID_7912
MSSGLSGGGGTSGGGLSGGGGGGRGDDEYWQLDMQPAGSANSNEPANSVGGRFPQMHVTGSGELDLDGGGTLRVGGVAFRPCVPRRARVVADPLDSSLFGGREFFDL

SEQ ID NO: 49692 - protein, 40 aa, Zea mays
  Coding DNA Sequence Number=SeqID_7913
MKVKISEVILKLHTMSLPEQSLNNRRSYLLPDNVMRNLKF

SEQ ID NO: 49693 - protein, 218 aa, Zea mays
  Coding DNA Sequence Number=SeqID_7914
  Homolog annotation: Hit_ID=Q6Z7R3; Match level="QueryCoverage=20%, HitCoverage=2%, E-value=1e-07, Identity=68%"; Hit description =Putative serine-threonine rich antigen
MWPLRRPTLDPGFSAFHEISAQHGEHTSASTIIVLQFHSFRPNDTSTFYHYRHRQEDHQEERRNNADNLVMILAEAKPETILPQLTTRKGQLNHHSTYQLNQSLVAGKLMDHLNPLESVHLIAMRHAFLALFCVEERGCDSEGPEIEGAMLPLHTNYLQVYKFNNYNLTVTVLIMLAIKQAAGKCVIEMNTSTSKIAFDRVRRRLLVTDSFWELGAGW

SEQ ID NO: 49694 - protein, 126 aa, Zea mays
  Coding DNA Sequence Number=SeqID_7915
MQAHQRGLGRESRAYLGLREDHYEVVCIIPPFLLMIFLSMAWPHREEAEAAGWVEKAEARMDRALSRSCSTLALDPATTGSKARRCCCQNKCRRGGKVSGHGGGEYRRLLLVPAMVGFWDGDGGGG

SEQ ID NO: 49695 - protein, 97 aa, Zea mays
  Coding DNA Sequence Number=SeqID_7916
  Subcellular localization annotation: CTP_CleavageSite=33; ConfidenceScore=5.47e-01
MVDWSPVPSQLLTGAVPAVKIRYLSRGDFTRVPSMVAGKALTNSFAARWRRAAVLWRGRVEDKLATVGGGWILLRRSRLDMGEKELGVVDPVLDDPN

SEQ ID NO: 49696 - protein, 158 aa, Zea mays
  Coding DNA Sequence Number=SeqID_7917
MRRRLLLLVAVHHRNLRRRVCSCILRLFLSVLVALAPFHYLAPPWAASSHFPPSHLTHRAGLEEEDEEDTAPAFPGVEAEAEANALHRLDFFVLMVFCHVTISQMMQYACKRYFVLEDTTLRWFKFAPSSKREQWYITHYRVDIGRKMHVANKDAAKG

SEQ ID NO: 49697 - protein, 106 aa, Zea mays
  Coding DNA Sequence Number=SeqID_7918
MAKSGHGVARPVVPQDSGEQFVDPRILNHAPKVEILSSEYQEKGSTHRVGENEDTATPDLYPGSEVRAWAREARSPARWSIFCCNDNGEKDPTDAAHKSVARWKGF

SEQ ID NO: 49698 - protein, 94 aa, Zea mays
  Coding DNA Sequence Number=SeqID_7919
  Subcellular localization annotation: CTP_CleavageSite=35; ConfidenceScore=5.26e-01
MTAIAAKSSQGPPYTDHSPTALAPFGLRMKFSIVQGALRKCSQDSEQHPQGRRVEFYITRGLLCKRSRLNGYGEIRAARSDPDGSDYNVVITEP

SEQ ID NO: 49699 - protein, 117 aa, Zea mays
  Coding DNA Sequence Number=SeqID_7920
  Subcellular localization annotation: CTP_CleavageSite=42; ConfidenceScore=5.26e-01
MTAIAAKSSQGPPYTDHSPTALAPFGLRMKFSIVQGPLRKCSQDSEQHPQGRRVEFYITRGLLCKRSRLNGYGEIRAARSDPDGSDYNVVITEPGYADSNPDRPRRDQRPETISCTI

SEQ ID NO: 49700 - protein, 118 aa, Zea mays
  Coding DNA Sequence Number=SeqID_7921
MASRWSNMMMINLQSTIMEGFHWWSCPQCLQNRLRLFRWATSMEVASGHLGECHLGAQWGGRALKRGEERETREKQEGSLAVIIPPWEPAAGTDAKSWMFGGRKEILAKVSGSQSFNS

SEQ ID NO: 49701 - protein, 446 aa, Zea mays
  Coding DNA Sequence Number=SeqID_7922
  Gene Ontology: Cellular component=membrane
  Homolog annotation: Hit_ID=Q1SD20; Match level="QueryCoverage=58%, HitCoverage=70%, E-value=1e-43, Identity=39%"; Hit description=TMS membrane protein/tumour differentially expressed protein
  Pfam annotation: Domain name=Serinc; Domain location=2-261; Score= -263.1; E_value=0.003; Accession=PF03348.6; Description=Serine incorporator (Serinc)
MAPRVVAGEDCLGYRLFLLLCAAYIRWDPNLRENCAGWSRLVSTIKFITQLNYKLCVTNFEERYLWVAAISATAVIISMGLIIFMTLKFAQCWHNMEVIVITLVLFFIMCVLSLMSKANKFFMEPALIGGYATFICLLAMTSEPESGCGMKSKAGPGAGWLTISFFVSGLLSTVYSAFTMGTGYKCTRSTVESEDDVPYGYGFFHFIFSAGCMYFGMMFVAWDTHHTMEEWNVDIGWISTWVHIASEALVVVSYLTILLARILGVGWLQHFLAKIFGTDDQPHNDESHTTTDESHMMTVHGDEPQTTTVHGDEPQTTTVHGDESHTTTVHGDEPQTTTVHGDESHTTTVHGDESQATTTNDDESETMNTHVTSPSSLYHTASPSSLYYSPEQSPTNNTDHQPPPPSPPSLSPPHTIELQMSEVPNIGTSGMNEEDGDDYIREWESE

SEQ ID NO: 49702 - protein, 276 aa, Zea mays
  Coding DNA Sequence Number=SeqID_7923
  Homolog annotation: Hit_ID=Q9FJ58; Match level="QueryCoverage=55%, HitCoverage=39%, E-value=2e-23, Identity=37%"; Hit description =Arabidopsis thaliana genomic DNA, chromosome 5, P1 clone:MTE17
  Pfam annotation: Domain name=C2; Domain location=42-109; Score=8.6; E_ value=0.038; Accession=PF00168.20; Description=C2 domain
MAATYQTGLVAEPQLLNTEIITRRATYFVADTNRKDKCVGYLDVFVHQARDIHNVCVYHKQDVNAKLCLTSSPDILCSTKVISRAGRNPVFEESLRLDVQTVDASFKCCPHLITQKSPSTVDDSGNDHVVPAQLEKIVFPDLNVEKEDEIMVSKYLEMTSDSETPIKVENDMSLHSTNDDDVPSKLEKIKFIDSGRTSAAWDWWPLMLSRGGVVALLAACAGSTPAAQSATAGVLRNLVVFLDLLPVFRDEGALPLLLQLVSLGTPRAQELALACL

SEQ ID NO: 49703 - protein, 109 aa, Zea mays
  Coding DNA Sequence Number=SeqID_7924
  Subcellular localization annotation: CTP_CleavageSite=63; ConfidenceScore=5.32e-01
MNMHVTSPSSLYHTTSPSSLYYSPEQSPTNNTNHQPAPPPPPSPSSRHTIELQMSEVPNISTSGMNEEEGGDDYIREWEKISGEDDIGDRDLGFSKWAEKLHGDVSGFV

SEQ ID NO: 49704 - protein, 105 aa, Zea mays
  Coding DNA Sequence Number=SeqID_7925
MAVTKARPVEKNKDISFIDSVVEGSKQLSTHKPSKIEDPDPGLACKLKDTTALYSLQILKHVVKASFLSYQVNVMISCRYWGQQQPAADAGERWSNRSYCYSYLA

SEQ ID NO: 49705 - protein, 87 aa, Zea mays
  Coding DNA Sequence Number=SeqID_7926
MQPAVKMKWKETVPICSIYLLTLDISESPHMMKNSRSVITMTSMLCQHCANLRVKNMTNPIDVMMAVTEITATRSREKARIEKEKNQ

SEQ ID NO: 49706 - protein, 126 aa, Zea mays
  Coding DNA Sequence Number=SeqID_7927
  Subcellular localization annotation: CTP_CleavageSite=84; ConfidenceScore=5.12e-01
MKGKKLKSYATRKKEKKTVLPLNYLALSLALLSLRSTFKLSCAKKSKLKTSNQQWTLTKWDSMCMTWRQLIELRTKTKDFEVTRAMEKVKRTKEPKAIEKTWFLQKVKVGQVVMTLNALNPTIYET

SEQ ID NO: 49707 - protein, 114 aa, Zea mays
  Coding DNA Sequence Number=SeqID_7928
MELSAEACAAVPPGGTHASRHALSRAGSEGLCDNSPRTSHPTVGFFNDVASVTASMEENLCDASSTATRNRFRRALRQHPRASHPAARRGGDDDGSHHFIHIKIGSKGLCRFGT

SEQ ID NO: 49708 - protein, 107 aa, Zea mays
  Coding DNA Sequence Number=SeqID_7929
  Subcellular localization annotation: CTP_CleavageSite=36; ConfidenceScore=5.12e-01
MGTRLRLISSLGWWSWVSLARVVLRRSAQRGLRSCRASLEGGELLMPQRRGDQRPCVPVLGGRRRLHLDHRGIWGIGLSGASRRRALANAMAAPSLGLDKGGRKKGL

SEQ ID NO: 49709 - protein, 77 aa, Zea mays
  Coding DNA Sequence Number=SeqID_7930
MASGRTCPSLFRLSTWRGAGNDAGFYAPVGGVRTRGIQLIPQQIRLKTLTNSPGSRFVRNRREQEDIFDLRDDLILA

SEQ ID NO: 49710 - protein, 107 aa, Zea mays
  Coding DNA Sequence Number=SeqID_7931
  Subcellular localization annotation: CTP_CleavageSite=36; ConfidenceScore=5.15e-01
MGTRLRLISSLGWWSWVSLARVVLRRSAQRGLRSCRASLEGGELLMPQRRGDQRSCVPVLGGRRRLHLDHRGIWGIGLSGASRRRALANAMAAPSLGLDKGGRKKGL

SEQ ID NO: 49711 - protein, 679 aa, Zea mays
  Coding DNA Sequence Number=SeqID_7932
  Gene Ontology: Mol. function=protein serine/threonine kinase activity; Cellular component=membrane; Biological process=protein amino acid phosphorylation
  Homolog annotation: Hit_ID=Q1EPA3; Match level="QueryCoverage=50%, HitCoverage=60%, E-value=6e-95, Identity=51%"; Hit description =Protein kinase family protein
  Pfam annotation: Domain name=Pkinase; Domain location=385-619; Score=- 39.2; E_value=3.2e-06; Accession=PF00069.15; Description=Protein kinase domain
  Pfam annotation: Domain name=Pkinase_Tyr; Domain location=385-619; Score=-3.6; E_value=3e-12; Accession=PF07714.7; Description=Protein tyrosine kinase
  Pfam module annotation: Pfam domain module=Pkinase::Pkinase_Tyr; Domain location=385-619::385-619
  Subcellular localization annotation: CTP_CleavageSite=54; ConfidenceScore=5.82e-01
MSDIAPSPSSSPSSGGNGGGNNSTAPAPRGSSSSSSPPKPRNGWPSSSPPPTPSSDSEGSRSTPPSDWQDPSSSSSSPPPSRSSPPPPSSQPPPSPPPSPSSWSGGGNSTSSSPPTPPSQPSPPPSGRSSSPPQRSSEGSSPSPQSSSSNQAPPAPSGWSPSPSRESPPQSSSQSPPPQSDVDQPNSQPSNTPQSPPPPPSPPSSSPPAPPTNQSVVIIPVPVPSNNSPPGALPPPGLVPTAPGATVMSSTSVPGSAASSSSQEASTGASNGGGGSTSTRVVGSSHVAAAIAGAAITGLMFALLAVFLVSKRRKKKTGGLVYHNDGSNYNMASGQFMGSNNPSYTQPAAGESADMGGGGGYYHYQNQSGSMDAAAAPGSMASFSYEELTSITSNFSRDNLKAGSGQGEREFQAEVEIISRVHHRHLVSLVGYCVAQHHRMLIYEFVPNGTLEHHLHGRGMPVMDWPTRLKIAIGAAKGLAYLHEDYFGLAKLTNDTNTHVSTRIMGTFGYLAPEYASSGKLTDRSDVFSFGVVLLELITGRKPVDQARQGEESLVEWARPVLVDAIETGDLGAVVDPRLVDGGAAYDRGQMMVMVEAASACVRHSAPKRPRMVQVMRALDDEGGMSDLSNGVKVGQSRNFDSGHQQAAAIQQLRATAFASEEYTGEFEQSSGMDYLKSG

SEQ ID NO: 49712 - protein, 76 aa, Zea mays
  Coding DNA Sequence Number=SeqID_7933
MAEQENSPPRRGDRKQPQEEEETQAMSTPRAVQFGDGGDATCRVRLRCCVSARQQQSPTNVTNDTNVIVVVLETNM

SEQ ID NO: 49713 - protein, 217 aa, Zea mays
  Coding DNA Sequence Number=SeqID_7934
  Homolog annotation: Hit_ID=Q6H3Y3; Match level="QueryCoverage=32%, HitCoverage=21%, E-value=3e-17, Identity=75%"; Hit description =Chaperone protein dnaJ-like
MSSNQIQMWAPCVGARPSRGERDSTIENTSKNKKVELGFLDEERDQELPDFSSFIPFLPPLSAANLKVYYATRFTIIVGIMVFSGFLAPIKCTQVIHQVKSKTFESSWVICVAIDASESWLIDTKWLSCFDGSSDSNEQCLLPFVWTGLNNNYRCYSQIVCSVSGETTNPLIWFREGGIILACADGLDCAIKSLQSICQFIETSNLHELINKPIPGS

SEQ ID NO: 49714 - protein, 1052 aa, Zea mays
  Coding DNA Sequence Number=SeqID_7935
  Gene Ontology: Mol. function=ubiquitin thiolesterase activity; Cellular component=nucleus; Biological process=ubiquitin-dependent protein catabolic process
  Homolog annotation: Hit_ID=Q1SM56; Match level="QueryCoverage=97%, HitCoverage=99%, E-value=0.0, Identity=53%"; Hit description =Peptidase C19, ubiquitin carboxyl-terminal hydrolase 2; Ubiquitin carboxyl-terminal ...
  Homolog annotation: Hit description=hydrolase, N-terminal region 1
  Pfam annotation: Domain name=UCH; Domain location=122-421; Score =121.6; E_value=2.3e-33; Accession=PF00443.19; Description=Ubiquitin carboxyl-terminal hydrolase
  Pfam annotation: Domain name=ubiquitin; Domain location=938-1007; Score=8.9; E_value=0.033; Accession=PF00240.13; Description =Ubiquitin family
  Pfam module annotation: Pfam domain module=UCH::ubiquitin; Domain location=122-421::938-1007
  Subcellular localization annotation: CTP_CleavageSite=40; ConfidenceScore=5.20e-01
MGSNRFLSPPSYTAGPPLMSRPNTRNKSKRPRSDESINPSAAVFKKIHSAGDISKDDICQLYMVWKPPCHGCHGNTKDSPNCFCGLIPAANGVRKTGLWQKMQEMVRGLGPNPSKDLRDSTDTPAGLTNLGATCYANSILQCLYMNIAFRSGIFSLELDVLEKHPVLDQLARLFAQLHSSKMLFIDSAPFIKTLELDNGVQQDSHEFLTLFLSLLEQSLSHSKVPGARTIVQNLFCGSVSHVTRCSSCGKESAASSKMEDFYELELNIKGLNNLEESLNEYFSEEALDGENQYFCESCQKRVDATRCIKLRSLPPVVNFQLKRYVFLPKGTGANSGHYVAHIKDESNGQWWEFDDETVSKLGLHPFGEKPGKASNKDDQKSQNTSTEGSVTNNNNNGHHEAAPSSTMGEMFSSTDAYMLMYKCITKDVNPTESNKIVEINNDLLPHHLLDEINELNASYTKLCVEYQSKKDSHLAYITERRQEVKSVLTEAPAGPGDDSYFWISTDWLRQWADNITPPSSIDNGAIQCEHGKVPASKVTSMKRLSSVAWQKLHSKYGGGPILNSDDFCMECLKDGAKSAVSADVYRERRASLKTLAEAALAGNCPDGPSYFISKTWLTHWLRRKNADIPSDGDNGPTSALRCCHGDFLPEHAPGAKRVSVPEILWLFLYQTVHEKKADDTVTFPSDSHPCETCSRELSDVASVEVNLRAVKLKQRQNHEKLISGKSFALHPGQKYYLVPSSWLSEWRAYITATGKNISSLPEPQTLEAVARSLICEKHSRLLQRPLDLVLKRGSIIQKASNTDGLTIIPEYDWKLFSEEWSATPGKGISAEIAFSKSSQDKLHGSSEAVPITDGNLGQSLDDTNDDLGAREPYIRTDPEVCEECIGERESCALVEKLNYQNEDIHVYFVHGKEAPKSIKEASKAVTVPDRRTSKRSRRTSSGNSISLKVSGSTSVYQLKLMIWESLGIVKENQMLHKGSVEIEDDFATLADKSIFPGDFLWVRDSEIYENRDIADEISEQKDDMLQAEEGFRGTLLTSTVSAQLCQDIAFSE

SEQ ID NO: 49715 - protein, 129 aa, Zea mays
  Coding DNA Sequence Number=SeqID_7936
MASKTLVYLRDATGVRGRLDRIIPILKMVPSDLVPTMGIGALQDLWESVLGVLGVEPPKILGPPTPVLVLRTLDSHADVPNSLIVFPSAEGPQDEGVIDKEMLRILFPVGGPQDEDISKGVNNKCRSYG

SEQ ID NO: 49716 - protein, 230 aa, Zea mays
  Coding DNA Sequence Number=SeqID_7937
RRSGAAPLCAPPHPALHLSYLFMAGVIDASGSIPALDTTGGPEDDLRLLAAQWACDVALSMAREAEREAAEATRERNVVVVVQNIRALVPVVLDIASAFYTRWRDSFLLGQATSPTFLEVRNDLLLEELTLTHHSIVLASALLVTTTDKPPTNKPEPPPPHHLPNNPKRGTRGGVARTPDVGCSLGATSTVSHSSAPIPDRWHSRSLATGATATMVYTTAARISDSHHSI

SEQ ID NO: 49717 - protein, 256 aa, Zea mays
  Coding DNA Sequence Number=SeqID_7938
MKLLYALDQSVWEVKVLAIIESPNYETLTMDELFSKLKSIVIDHQTRTNIENRGAPTMVLVSGGGSSSHLAPVMFALSSLLTITEKKVESLGMTSRRLTSDACDPDHFIDSCPKKGKQEAGSRDNHSSWSKGKQEHTSGKHKSRRRFDKEALKKKYLQKAKIKKLAFLASLSDFDHDSNELASSSSDEDLERHVEDKINKLCFIADTVEGLCTLALGDDAGGGDNKDIDDDYASKVSHSTNDLAAKVEELTIVLAN

SEQ ID NO: 49718 - protein, 105 aa, Zea mays
  Coding DNA Sequence Number=SeqID_7939
  Subcellular localization annotation: CTP_CleavageSite=14; ConfidenceScore=5.18e-01
MAPNSEQPKGRTTTVGEKSKTNQKSETWFVPFSRLPPHSGISSYHADRRRSLLPELSSPFQPPASTPLSSPASPPSKPLLHAYIFVVKVVAEQSAPPPVRRVAAW

SEQ ID NO: 49719 - protein, 234 aa, Zea mays
  Coding DNA Sequence Number=SeqID_7940
MIALPVDVAGLCPRQGVVGAPPKPRLSLSSVAEAESEPLGRARRKSFGRGQGGVRALGSGEAEFVVFRGRARVRALGSGGAEVVRQRPGRSPSPGVGRGGVRRLPGPSPSPSLGVGRSGVRRLPGLSPSPSPGSGGAEFAVFRVLARVRALGSGEAEFAVAPLARPNCLSDSLCRVAPQSEWRRRRCPSVRLLYADGGYQLRIRRLEGTPNYGPRHHVSPRRREPLLPRHSPAP

SEQ ID NO: 49720 - protein, 475 aa, Zea mays
  Coding DNA Sequence Number=SeqID_7941
  Gene Ontology: Mol. function=acyltransferase activity; Cellular component=nucleus; Biological process=paclitaxel biosynthetic process
  Homolog annotation: Hit_ID=Q5VP55; Match level="QueryCoverage=94%, HitCoverage=96%, E-value=1e-106, Identity=50%"; Hit description =Putative anthocyanin 5-aromatic acyltransferase
  Pfam annotation: Domain name=Transferase; Domain location=3-453; Score=97.2; E_value=5.1e-26; Accession=PF02458.6; Description =Transferase family
MRSRVRILAVTHVAPAPAEVLSNDGHVKLSFTDALFVNRVPMQRLFFYEGPDVPPFQSLVRSLKSSLAAVLPVFRPLAGKLTHRASTGDVVVDCTPAAVSPGVRFVQAEYAGSIDDMRRLAVGDEHHTEALVLLGPELNVARLPAPVLAVQVTRPAIGVGRAVVVGVSIHHAVADGHSLWQFMRVWSAASREPDLVVTPPPTWDRAAIPYPRAEEVAREFLRTVAPALPVARPPSMCAPPDQRRRSFLLRAEDIRSVKQRILAQSKAIGGGHLGALPSTYVAVSSLVWTSIVRAKPLDDTAGSGDAYFLVPVDLRRRLGPAVDERYFGNCVAPCFARAAVRHLRDGGAGLGHAAAAISEVVRTKLKDPLGGAERWLEDFFQVPKERLTHTGSSNRFMAYETDFGWGKPSRVELVSLFTRGLVLLLGAEEGGVQVTVALDHAHMEDFAANLGAGTEQGSLLIRYGEPHEPGTQPAI

SEQ ID NO: 49721 - protein, 187 aa, Zea mays
  Coding DNA Sequence Number=SeqID_7942
  Gene Ontology: Mol. function=protein transporter activity; Cellular component=endoplasmic reticulum; Biological process=ER to Golgi vesicle-mediated transport
  Homolog annotation: Hit_ID=Q6H8D5; Match level="QueryCoverage=99%, HitCoverage=27%, E-value=6e-94, Identity=64%"; Hit description =Putative coatomer protein complex, subunit beta 2
  Pfam annotation: Domain name=WD40; Domain location=127-167; Score =31.2; E_value=3.6e-06; Accession=PF00400.22; Description=WD domain, G-beta repeat
  Pfam annotation: Domain name=WD40; Domain location=2-37; Score=1.8; E_ value=22; Accession=PF00400.22; Description=WD domain, G-beta repeat
  Pfam annotation: Domain name=WD40; Domain location=41-79; Score=47.4; E_value=5e-11; Accession=PF00400.22; Description=WD domain, G-beta repeat
  Pfam annotation: Domain name=WD40; Domain location=84-123; Score =45.1; E_value=2.3e-10; Accession=PF00400.22; Description=WD domain, G-beta repeat
  Pfam module annotation: Pfam domain module=WD40::WD40::WD40::WD40; Domain location=127-167::2-37::41-79::84-123
MVKSFEVSELPVRSAKFISRKQWVVAGADDMFIRVYNYNTMDKVKVFEAHTDYIRCVAVHPTLPYVLSSSDDMLIKLWDWDKGWMCTQIFEGHSHYVMQVTFNPKDINTFASASLDRTTKIWSLGSPDPNFTLDGHQKGVNCVDYFTGGDRPYLITGSDDSTAKYYDGAFYGKVGLGLPDEKLCSDT

SEQ ID NO: 49722 - protein, 62 aa, Zea mays
  Coding DNA Sequence Number=SeqID_7943
  Homolog annotation: Hit_ID=Q6H8D5; Match level="QueryCoverage=74%, HitCoverage=5%, E-value=2e-18, Identity=91%"; Hit description =Putative coatomer protein complex, subunit beta 2
  Pfam annotation: Domain name=WD40; Domain location=5-43; Score=21.3; E_value=0.0034; Accession=PF00400.22; Description=WD domain, G-beta repeat
MPLRLEIKRKFAQRSERVKSVDLHPTEPWILSSLYSGSVCIWDYQAQFCKICMLEYKTGDLP

SEQ ID NO: 49723 - protein, 149 aa, Zea mays
  Coding DNA Sequence Number=SeqID_7944
MEVSSPEVGANVGHLFSNAVNQEQGNTIDKDKGPSSSKALSPHGYNAHQTKRKGRLLYHFVEGVCVLRTFDGEEDPQQLPKLSTTATTTPRKRRMASVLDVVLKFMKMPTHASVEASDKKIEDARMQPLQALQALLLYMLKWGLQGLRQ

SEQ ID NO: 49724 - protein, 198 aa, Zea mays
  Coding DNA Sequence Number=SeqID_7945
MAERWRSRVWRDPNLDEDASPPSRQPHHSGGDEEDDELGNEDLSLEIIARAQRKRRGESAGGVPMFADLLSVSSTDEEGAVVELDEADETRRKQKKKQRRKQRKKHQKETTEAAAAAAVKVDDKAGCSTEEGPIGTAQSMLTENGADAPASDNMVLRKLLRTRSKDSQLLPKILTLQNQLAGLQPNGNGYTFRKVSLI

SEQ ID NO: 49725 - protein, 216 aa, Zea mays
  Coding DNA Sequence Number=SeqID_7946
MGGIDKEENIVNNDDDGWDAWPVQQAQPPEPVVNANNVEEQFSYQLSDLEDLPSDESVGFFNDIIIPQEIHFPQHLEQSIPDPAYEDYLARKCLNSWADIFPCNSDLVTVPKVWAAFFMGLLLRSNSFDWAKKFLTSGAISALVEPSMETVSLKIPPKCLPPPSQELHVEPQSPTAAEAVSKHKQPIMVELKLEGVPDFGRRLGASRTAQGLEKCS

SEQ ID NO: 49726 - protein, 67 aa, Zea mays
  Coding DNA Sequence Number=SeqID_7947
MKIQTIRTLVARSAIGPKDYNEDFAWTARREFDVHLGAVVALIVGGALLGLDIEPAWLRSFEFELAR

SEQ ID NO: 49727 - protein, 152 aa, Zea mays
  Coding DNA Sequence Number=SeqID_7948
MGEGSRLGRKNRAKVGKTNETSNDGENDGLLTLARKPPTDSKESHEGSGAAVGELPWVIGVKPLTVLELGGAFDGDTGNQFLVVDCHTRVLGVQSPGANIITRNMAKQWGTSLPEIIAGKSPATVVSSSEASAKDSGRLKRGNEASQTHSKP

SEQ ID NO: 49728 - protein, 143 aa, Zea mays
  Coding DNA Sequence Number=SeqID_7949
  Subcellular localization annotation: CTP_CleavageSite=76; ConfidenceScore=5.60e-01
MRGLCFLAAGRIPNRAPPLLNLVVPHRWSASPSPLLGKSSPNRFTSTFVFMPSSSDSGFGVTGRPSRCARRRWAPGAASFGHWVEEVFRAIGSIGGTVDRWIMVKRIGLDQGIDGVWTVDSTANAWDLVAHTGWVGEISAFRS

SEQ ID NO: 49729 - protein, 128 aa, Zea mays
  Coding DNA Sequence Number=SeqID_7950
MLGKVGEGYVGINSRGLLSFSYLLLSYPRVLPHGRTKAVERLQKWQQELKGKASDAALAEEKLKAKERSLDRWEKDLTRRETDLTFREDMLTRRGEMRAEHEIEAEEKERELEERIRQFNAAQAAPSP

SEQ ID NO: 49730 - protein, 630 aa, Zea mays
  Coding DNA Sequence Number=SeqID_7951
  Gene Ontology: Mol. function=zinc ion binding
  Homolog annotation: Hit_ID=Q2QZH2; Match level="QueryCoverage=89%, HitCoverage=94%, E-value=1e-101, Identity=41%"; Hit description =Expressed protein
  Pfam annotation: Domain name=VWA; Domain location=96-268; Score=31.8; E_value=2.3e-06; Accession=PF00092.18; Description=von Willebrand factor type A domain
METWLVLTALLLSLSLVYFFLPFISCPWIDGTYGDDESSTHTHVPQAAAAGTETVKVITTPVFPHIPRLQASKDFQVLVRVEAPPALQQHRRVPVDLAVVLDVGASTGTGTGVPRLDAVKKAVKFIISQVHDNDRLAVVGPSNYRLVTGFKDTYDARHNAQKSVEQLQHRGEFTSGAGLEEAIKILEELPATASRSSRARFVILVTDRAVAEGSSRFSKLPRESLPPVHTFGLGEAHDPRELLHIARESQGTYSFVDDQNTDGITGAIAVCLSGLKNVVAVGARVRLETPVGSGVTIERIQSGGYTYSRTRPITTRDDKTYVEVALGALYAGEVKSFLVHLSVPALLASTSTVVADGCYRQQLLTASLVGHYTTSDEEYAAAPASPSPTVTQAILYVQRPPPEALDVFCGGALQTVPVPVVMNHIARFGVLEMVATFVDTDIGRHSTVTAEVATKLRAQWEKFVQARQFWSGLDLGVLEDEVSWMVNILEKAASRSGSSAATAYMLSWLSSYQMQRPTAMGSPDSVAAAFVTVNMQLTLLEVRKGIVTLPPPQPPIVCVDPLPPPLFKPSGRNDDTYRVVNTAYPPSVLVDAINEAMKQMHLALVQASKLQRCDGAGVDAMMPRAAGAFA

SEQ ID NO: 49731 - protein, 57 aa, Zea mays
  Coding DNA Sequence Number=SeqID_7952
MEMMEANELHRRAKARYDRMASFFLFVMYNTVVMKLNLMLVLKVLLMEDWLINLGCK

SEQ ID NO: 49732 - protein, 176 aa, Zea mays
  Coding DNA Sequence Number=SeqID_7953
  Gene Ontology: Mol. function=nucleic acid binding; Cellular component= chromatin; Biological process=chromatin assembly or disassembly
  Homolog annotation: Hit_ID=Q8W1D1; Match level="QueryCoverage=75%, HitCoverage=9%, E-value=1e-43, Identity=58%"; Hit description=Gag-pol
  Pfam annotation: Domain name=Retrotrans_gag; Domain location=89-176; Score=54.8; E_value=2.9e-13; Accession=PF03732.7; Description =Retrotransposon gag protein
MSIEQMFLMQTQAVQAIGQTLAAIQQQQQQQPPPQPQMPQMPRDKRAEFMRGHPPTFAHSSDPMDAEDWLHTVERELHTAQCDDREKVLYGPHLLRGAAQSWWESYLATHVNPDTITWEEFRGSFRQYHVPAGLMTVKKEEFLALKQGSSSVSEYRDRFLQLSHYAPEDVNTDAKR

SEQ ID NO: 49733 - protein, 61 aa, Zea mays
  Coding DNA Sequence Number=SeqID_7954
MAGHNVFFLQHTTEAGCRLLPWRDTRRTADGVPAIPMPARRKEGRTDLDLKRRRMNRTVEK

SEQ ID NO: 49734 - protein, 140 aa, Zea mays
  Coding DNA Sequence Number=SeqID_7955
MTPCHPYMIKDCIRASYRLPWKTLGERMVMRRKDEKHPLLGERMDYDKHYIDSTKEEISSDEESEEVVETWSCSSGFTSEETEEDLDWDFNDDFNKDSVQDDNDNDDDHGNDDDDDDNNDSGEEGLERKRRRFIRYLCLL

SEQ ID NO: 49735 - protein, 90 aa, Zea mays
  Coding DNA Sequence Number=SeqID_7956
MRISEAATCWLLLPGRPPAPCVLPEGAGVPLIQCLSEQQLRCRKKDHTRLASSGKFEGNVGDGVMDRRDDVFPLIGQAQAESDSIDMTAL

SEQ ID NO: 49736 - protein, 78 aa, Zea mays
  Coding DNA Sequence Number=SeqID_7957
MEQELSLELTLLHPSGLAARSPPGYFVCMYCDRKFSARRLSKAPAADDDAPATASSSNMKRSSEYGYGVEELDLSLRL

SEQ ID NO: 49737 - protein, 91 aa, Zea mays
  Coding DNA Sequence Number=SeqID_7958
MADSKDLNGVSPNSDAMLTNLLATEYKKLKDDMKKMDEEIQRQQHQVLKVAKKWYLSHFRVDCHQKVVRERSGPSGLGARTIHGWQKGGND

SEQ ID NO: 49738 - protein, 344 aa, Zea mays
  Coding DNA Sequence Number=SeqID_7959
  Gene Ontology: Mol. function=receptor activity; Cellular component =integral to membrane; Biological process=xylan catabolic process
  Homolog annotation: Hit_ID=Q6JN46; Match level="QueryCoverage=93%, HitCoverage=61%, E-value=1e-63, Identity=31%"; Hit description=EIX receptor 2
  Pfam annotation: Domain name=LRR_1; Domain location=126-148; Score =5.5; E_value=27; Accession=PF00560.23; Description=Leucine Rich Repeat
  Pfam annotation: Domain name=LRR_1; Domain location=150-172; Score =8.3; E_value=7.9; Accession=PF00560.23; Description=Leucine Rich Repeat
  Pfam annotation: Domain name=LRR_1; Domain location=174-196; Score =18.3; E_value=0.027; Accession=PF00560.23; Description=Leucine Rich Repeat
  Pfam annotation: Domain name=LRR_1; Domain location=198-219; Score =11.0; E_value=2.5; Accession=PF00560.23; Description=Leucine Rich Repeat
  Pfam annotation: Domain name=LRR_1; Domain location=29-51; Score =15.0; E_value=0.28; Accession=PF00560.23; Description=Leucine Rich Repeat
  Pfam annotation: Domain name=LRR_1; Domain location=4-27; Score=14.8; E_value=0.31; Accession=PF00560.23; Description=Leucine Rich Repeat
  Pfam annotation: Domain name=LRR_1; Domain location=53-75; Score =12.8; E_value=1.1; Accession=PF00560.23; Description=Leucine Rich Repeat
  Pfam module annotation: Pfam domain module=LRR_1::LRR_1::LRR_1::LRR _1::LRR_1::LRR_1::LRR_1; Domain location=126-148::150-172::174 -196::198-219::29-51::4-27::53-75
NCAELKFLDLSDNELSGEIPMWIGQKLSSLVFLSLQGNQFSGRIPHQLCGLKYLQILDLSVNKISGTIPPCLNNFTSMVKKVSLDRRIELHLLDKPYVESLIDVRYVDEALITWKGKKQNYPQLGLLLAIDLSCNKLRGEIPEELISLQELVALNLSRNFFTGNILQKIGHLRQLEVLDLSRNKFSGNIPTSLSELTFLSILDLSYNELSGKIPTSTQLQSFDPSSFSHNRGLCGPPVSPNCSMVEPPPGKPAVGGEEDSDDQFMKWFYIIMGLGFVVGFWGFCGVVFFKRSWRHSYYRYLDSAKDWVYVSFVLLETRLVRRIKGVSTRSGLIRTATEGDISCT

SEQ ID NO: 49739 - protein, 626 aa, Zea mays
  Coding DNA Sequence Number=SeqID_7960
  Gene Ontology: Mol. function=protein binding; Cellular component =integral to membrane; Biological process=xylan catabolic process
  Homolog annotation: Hit_ID=Q1T2W5; Match level="QueryCoverage=88%, HitCoverage=91%, E-value=9e-50, Identity=31%"; Hit description =Leucine-rich repeat
  Pfam annotation: Domain name=LRR_1; Domain location=119-141; Score =5.4; E_value=28; Accession=PF00560.23; Description=Leucine Rich Repeat
  Pfam annotation: Domain name=LRR_1; Domain location=146-170; Score =11.4; E_value=2.1; Accession=PF00560.23; Description=Leucine Rich Repeat
  Pfam annotation: Domain name=LRR_1; Domain location=172-194; Score =16.7; E_value=0.082; Accession=PF00560.23; Description=Leucine Rich Repeat
  Pfam annotation: Domain name=LRR_1; Domain location=196-212; Score =1.5; E_value=1.5e+02; Accession=PF00560.23; Description=Leucine Rich Repeat
  Pfam annotation: Domain name=LRR_1; Domain location=228-250; Score =9.9; E_value=3.9; Accession=PF00560.23; Description=Leucine Rich Repeat
  Pfam annotation: Domain name=LRR_1; Domain location=252-276; Score =9.6; E_value=4.6; Accession=PF00560.23; Description=Leucine Rich Repeat
  Pfam annotation: Domain name=LRR_1; Domain location=278-304; Score =10.3; E_value=3.4; Accession=PF00560.23; Description=Leucine Rich Repeat
  Pfam annotation: Domain name=LRR_1; Domain location=330-352; Score =6.4; E_value=18; Accession=PF00560.23; Description=Leucine Rich Repeat
  Pfam annotation: Domain name=LRR_1; Domain location=378-400; Score =10.3; E_value=3.4; Accession=PF00560.23; Description=Leucine Rich Repeat
  Pfam annotation: Domain name=LRR_1; Domain location=402-424; Score =8.5; E_value=7.3; Accession=PF00560.23; Description=Leucine Rich Repeat
  Pfam annotation: Domain name=LRR_1; Domain location=426-448; Score =17.2; E_value=0.061; Accession=PF00560.23; Description=Leucine Rich Repeat
  Pfam annotation: Domain name=LRR_1; Domain location=450-471; Score =10.8; E_value=2.7; Accession=PF00560.23; Description=Leucine Rich Repeat
  Pfam annotation: Domain name=LRR_1; Domain location=93-113; Score =4.0; E_value=52; Accession=PF00560.23; Description=Leucine Rich Repeat
  Pfam module annotation: Pfam domain module=LRR_1::LRR_1::LRR_1::LRR _1::LRR_1::LRR_1::LRR_1::LRR_1::LRR_1::LRR_1::LRR_1::LRR_1::LRR_1 Domain location=119-141::146-170::172-194::196-212::228-250::252
  Pfam module annotation: Domain location=330-352::378-400::402 -424::426-448::450-471::93-113
MDSSGDDALFLWETEECCFWHGVECNSLTGYVEILDFSLQSWVVAGPIPSLLGNLSMLETLRLGGNGGDETYRHNFKKMFSVGKLEWLSHLSRLKEVDLSFTNLSNANDWSQVISHLPLLQKLTLRHCDLPSISSSSLSLANSSTSLIYLDLSDNNLPSSAIYPWLFNVSSNLVSLNLSSNKLKGPIPEAFGNMKAIQELYLNDNLLVLAENQVRGDSGLNEIGKLPDFRVLDLGYNLLNGSISKSIGQLSNLHVLRLAGNSFDGDVISEAHLSNFTNLQVLDLSFTSLTLKFNTGWIPPFHLSQIMLCSCKLGPRFPDWLRTQMDFLLVLEYLDISASGISDSLPYWFWDPFQRLRYVDEALITWKGTKQNYPQLGLLLAIDLSCNKLTGEIPEELNSLQELVALNLSRNFFTGKILQKIGHLRQLEVLDLSRNKFSGNIPTRLSELTFLSILDLSYNDLTGKIPTSTQLQSFDPSSFSHNRGLCGPPVSPNCSMVEPPPGKPAVRGEEDSDDQFMKWFYTGMGLGFVVGFWGFCGVVFFKRSWRHSYYRYLDSAKDWVYVSLVLLKTRQSLPSPENQKEKDPAPTFKPNFDDEEGISDDAVTGRSGGGREVSSVCGDDWPRGGC

SEQ ID NO: 49740 - protein, 100 aa, Zea mays
  Coding DNA Sequence Number=SeqID_7961
  Homolog annotation: Hit_ID=Q1S5Q1; Match level="QueryCoverage=52%, HitCoverage=6%, E-value=2e-09, Identity=47%"; Hit description =Leucine-rich repeat; Leucine-rich repeat, cysteine-containing type
MVEPPPGKPAVGSEEDCDEFMKWFYTGMGLGFAVGFWGFCSVVFFKRSWRDSYYRYMDNAKDWVYVTFVLLKARLVRRIKGPSTRSNSFSTWKSFNVGDF

SEQ ID NO: 49741 - protein, 159 aa, Zea mays
  Coding DNA Sequence Number=SeqID_7962
  Homolog annotation: Hit_ID=Q9FT11; Match level="QueryCoverage=73%, HitCoverage=77%, E-value=5e-28, Identity=42%"; Hit description =Hypothetical protein homologue of SPH
  Pfam annotation: Domain name=Self-incomp_S1; Domain location=48-155; Score=93.6; E_value=5.9e-25; Accession=PF05938.2; Description=Plant self-incompatibility protein S1
MNNFYKNVLCFILVQAIAITSLITLSSSEPNKGGHDNSRWIHPWFKTWHIYAVNGISKDQTLLVHCKSKDDDLGIHNLTVGSEFTWKFRPRFFGGTLFWCYMAYDNLHASFKAFWDNQVLYNLCDWGTCFWIAKDDGIYIRNIPKNRDDYYCNWEQGRL

SEQ ID NO: 49742 - protein, 90 aa, Zea mays
  Coding DNA Sequence Number=SeqID_7963
  Homolog annotation: Hit_ID=Q1S5Q1; Match level="QueryCoverage=65%, HitCoverage=7%, E-value=1e-10, Identity=45%"; Hit description =Leucine-rich repeat; Leucine-rich repeat, cysteine-containing type
MVEPPPGKPAVGGEEDSDDQFMKWFYTGMGLGFVVGFWGFYSVVFFKRSWRHSYYRYLDSAKDWVYVSFVLLKTRSGLIRTATKGDISCT

SEQ ID NO: 49743 - protein, 274 aa, Zea mays
  Coding DNA Sequence Number=SeqID_7964
  Gene Ontology: Mol. function=nucleic acid binding; Cellular component= mitochondrion; Biological process=DNA integration
  Homolog annotation: Hit_ID=Q1SRN1; Match level="QueryCoverage=89%, HitCoverage=16%, E-value=2e-66, Identity=52%"; Hit description =Integrase, catalytic region
MGQSNESPTPMTTTCHLTANQGVPVEDAQLYRSIVGALQYIVITRPDIAYSVNKVCQYMQKPSGQHFTAVKRILRYLKGTLDYGIKFSRSSKLILEGFSNASWGSDSDDRCSTSGYCVYLGGNPISWSSRKQQVISRSTAEAEYRSLAHVTSEVLWIQALLSELGIILKGKTLLWCDSTAAVAVAGNPVMHSKFKHVELDLFFVREKVTQGVLQVGHVPNHQQVADVLTKPLAAGSFYKFRNQLRVTTKDDSRKEYSSTGNVRNSDQSQSPKVS

SEQ ID NO: 49744 - protein, 210 aa, Zea mays
  Coding DNA Sequence Number=SeqID_7965
  Gene Ontology: Mol. function=protein binding; Cellular component =integral to membrane; Biological process=xylan catabolic process
  Homolog annotation: Hit_ID=Q1S5Q1; Match level="QueryCoverage=87%, HitCoverage=21%, E-value=4e-33, Identity=40%"; Hit description =Leucine-rich repeat; Leucine-rich repeat, cysteine-containing type
  Pfam annotation: Domain name=LRR_1; Domain location=41-63; Score=7.3; E_value=12; Accession=PF00560.23; Description=Leucine Rich Repeat
  Pfam annotation: Domain name=LRR_1; Domain location=65-87; Score =15.0; E_value=0.27; Accession=PF00560.23; Description=Leucine Rich Repeat
  Pfam annotation: Domain name=LRR_1; Domain location=89-110; Score =7.6; E_value=11; Accession=PF00560.23; Description=Leucine Rich Repeat
  Pfam module annotation: Pfam domain module=LRR_1::LRR_1::LRR_1; Domain location=41-63::65-87::89-110
MAKKVSLDRRIEHHILDTGPRFLSPEGVNGEIPEELSSLQELVVLNLSRNHFNGKILQKIGHIRQLEVLDLSRNKFLGNIPTSLSELTFLSNLNFSYNDLSGKIPTSTQLQSFDPSSFSHNRGLCGPPISPNCSMVEPRPGKPAVGSEEDCDEFMKWFYTGTGLGFAVGFWGFCSVVFFWRSWRHSYYRYMDNAKDWVYVTFVLLKARSD

SEQ ID NO: 49745 - protein, 428 aa, Zea mays
  Coding DNA Sequence Number=SeqID_7966
  Gene Ontology: Mol. function=protein binding; Cellular component =membrane; Biological process=defense response
  Homolog annotation: Hit_ID=Q1SPY2; Match level="QueryCoverage=91%, HitCoverage=20%, E-value=1e-52, Identity=33%"; Hit description =Disease resistance protein; AAA ATPase; Zinc finger, C2H2-type
  Pfam annotation: Domain name=AAA; Domain location=173-355; Score= -23.7; E_value=0.013; Accession=PF00004.19; Description=ATPase family associated with various cellular activities (AAA)
  Pfam annotation: Domain name=NACHT; Domain location=172-320; Score= -38.6; E_value=0.059; Accession=PF05729.3; Description=NACHT domain
  Pfam annotation: Domain name=NB-ARC; Domain location=138-427; Score =168.1; E_value=2.3e-47; Accession=PF00931.13; Description=NB-ARC domain
  Pfam module annotation: Pfam domain module=AAA::NACHT::NB-ARC; Domain location=173-355::172-320::138-427
MAEYVAPAAVEIVADQAKEYASPYLRYFFRYGEIVEDFKNQREALELKKERVDTRVDEAESQNELIHKDVDNWLTSAEKELKETQNLKDEIDRVKCFKWCPKWGWRYSLSKKLAEKIPIISELLETSNFAQVGYRRPLQGIEFITSTDFMDSKSSKSAFNQIMEAINAKGVNMIGLHGMPGVGKTTLAKEVGKHAREQKLFDKVVMFTMSQNPNIRTIQDKIAEMFGLNFHTNTAEGRAEELFRSMQGMNKILVIVDDLWEEFKMESIGIPFGDEHEGCKILLTTRRQQVWTKMNCKEIQLGILSEDEAWVLFRHKAGLEDDCSTLNDVAKEVAAQCKGLPLAIVIVAKALKGESLNGWRDANQRFKDSTHLYDEEVLGGVLEPLKLSYDYLKKGINQMTGNHIQMCFLLCSLFPEDEEILIEILIMC

SEQ ID NO: 49746 - protein, 402 aa, Zea mays
  Coding DNA Sequence Number=SeqID_7967
  Gene Ontology: Mol. function=nucleic acid binding; Biological process= DNA integration
  Homolog annotation: Hit_ID=Q1SIY6; Match level="QueryCoverage=71%, HitCoverage=30%, E-value=2e-50, Identity=36%"; Hit description =Integrase, catalytic region; Zinc finger, CCHC-type
MKTFLQALDLWSAVENDVEPPPLRANPTIAQIRQHGEERAKKHKAMACLQNRVSDVIFTHIMACDSPKQAWDRLKEEFMGSDKTRQQQVINLRREFENLKMKESETIKQYSDRIMTTVNNIRLLGEDFSDSRVVEKVITTLPEREEQVGRRRVLKVLFKQRSKKALAQVRKLRSLGLKKGKDQRKMLYGHHEKICRNQEKAQTLPVQAKTAEDLQAQEEHVFTASCSATTSKSKCSWLVDSGCSHHMESDESLFKDLDKSYTSKVKIGNGNLIEAKGRGDVVINTGSDVCGPMKIPSLNGSVNTSVYLLNRLPTHAVKDKTPFEACSSKKGYRVFDPSTNKVLVSRDVKIDEGRFWSLDGSNTSQFEEEQVDSNLELAESEVSNANVDDAPVRGTRSIADIY

SEQ ID NO: 49747 - protein, 53 aa, Zea mays
  Coding DNA Sequence Number=SeqID_7968
  Homolog annotation: Hit_ID=Q9SXQ6; Match level="QueryCoverage=61%, HitCoverage=8%, E-value=5e-09, Identity=87%"; Hit description=Flap endonuclease 1a
MVRLAVDAILMAEGAERKEHMGIKGLTKLLADNAPKAIKEQKLESYFGRKIAM

SEQ ID NO: 49748 - protein, 56 aa, Zea mays
  Coding DNA Sequence Number=SeqID_7969
MATGLAIVVALSSFCQACVERKATGRGLPHGGPQRNAGHTLNYVALKLYRRVRDRG

SEQ ID NO: 49749 - protein, 203 aa, Zea mays
  Coding DNA Sequence Number=SeqID_7970
MAENLDALKCWWLGGAAIVWRTGQSGAPPDTVRCASHVTQPLGFNRWSSDKWGHRTVRWRTGQILFIVRKLHLVSSALLPSKRGFEPQQRAGPTESAGWHAVPGPEMWHAGVGLARQSQHVLPGPELWPAGVGSVPDAIWPSICVLGREGGEVRTHALMEEGRETLGQHYGPRLQPKHDTTFLALASIRSFLRPHWRNGLHGV

SEQ ID NO: 49750 - protein, 159 aa, Zea mays
  Coding DNA Sequence Number=SeqID_7971
  Gene Ontology: Mol. function=asparaginase activity; Biological process=glycoprotein catabolic process
  Homolog annotation: Hit_ID=Q9FUG8; Match level="QueryCoverage=68%, HitCoverage=38%, E-value=5e-18, Identity=51%"; Hit description =Asparaginase
MVVLFPTFRARAVRLPYPTDRNGQVQREQRGQRQHTQGGHGDERVAHQCVHIGDVEVCGGYVHRRLMSKMLRHIGDSPLIRFDTYTCSACAVSCTLKWDVATVMEYKGLPLQQVVDYYVRVLTPFLGRQSLNTNQWQCSLVRRVRSAAKGRTIHDLARG

SEQ ID NO: 49751 - protein, 188 aa, Zea mays
  Coding DNA Sequence Number=SeqID_7972
MKATQSELVRSNPRVMQAGEHREDKCNTLNLGPPSDPPACSSPAPNPRARPPPAAPAAGPAVRGAHLLFLLPNRPALVLAHDAHLTEPTIPPTLFSHLEAWPTPPLAALWRGPGSAARRGGLARHQRGGPMASLPCARPDGSPSARVWPQHGSAGTRPRRAGARPRRGLVAALWRGPGTVRPTPLALV

SEQ ID NO: 49752 - protein, 303 aa, Zea mays
  Coding DNA Sequence Number=SeqID_7973
HPAAHQRAAAPPQTLGCALPQPPQPPGPPVRGAHLLFLLPNRPALVLAHDVHLAEPPIPLTLFSHLDAHPTPPPPLTALWRGPGSAARHGGPARHQRGGLMASLPCARPDGSPSARAWPRHVSAGTRPRRAGARPRRGLDAALWRGPGSAARRGASPPPSRPWSSHGVAASSSARRRSQPDGALAPAAPVPALLPGPAAPAAGAHGQRAANGLGEVPCGARPVAARCQRGLRRGALPARWLGVACLRGGPARCGQSARRLRHGPALCAESWRGSWPARPARHALRDSPSCPAWLSRASCAPVA

SEQ ID NO: 49753 - protein, 248 aa, Zea mays
  Coding DNA Sequence Number=SeqID_7974
  Gene Ontology: Mol. function=protein binding; Cellular component =protein complex; Biological process=red or far red light signaling pathway
  Homolog annotation: Hit_ID=Q6ZJ47; Match level="QueryCoverage=91%, HitCoverage=43%, E-value=1e-74, Identity=65%"; Hit description =Putative COP9 complex subunit 3, FUS11
MESLEALVAHIQGLSGSPEELAHLHSLLKQADGEPLRAHAAALVPFLAHLSPETHSLGYIYLLDACAASASNLSDFGGGDFLVTIAGFLTACSADQIRLAPDKCACCFFFDPQIDSNRNALYPVTIGCRRCNLTNFDLAVRCRAVLHVCKVLKDQVMQLNMPIRGIAPLRAAVRKIQSSPEQLTPVHADYLLLCLLAKQYKAGLSVLEDDIFEVDQPKDLFLYCYYGSGSNVPLWFTYGFGVLVAHAY

SEQ ID NO: 49754 - protein, 1047 aa, Zea mays
  Coding DNA Sequence Number=SeqID_7975
  Gene Ontology: Mol. function=nucleoside-triphosphatase activity; Cellular component=membrane; Biological process=defense response
  Homolog annotation: Hit_ID=Q69PR5; Match level="QueryCoverage=89%, HitCoverage=79%, E-value=1e-120, Identity=31%"; Hit description =Putative nucleotide-binding leucine-rich-repeat protein 1
  Pfam annotation: Domain name=LRR_1; Domain location=621-643; Score =3.2; E_value=72; Accession=PF00560.23; Description=Leucine Rich Repeat
  Pfam annotation: Domain name=LRR_1; Domain location=645-666; Score =10.8; E_value=2.7; Accession=PF00560.23; Description=Leucine Rich Repeat
  Pfam annotation: Domain name=LRR_1; Domain location=668-690; Score =8.2; E_value=8.3; Accession=PF00560.23; Description=Leucine Rich Repeat
  Pfam annotation: Domain name=LRR_1; Domain location=692-713; Score =5.6; E_value=26; Accession=PF00560.23; Description=Leucine Rich Repeat
  Pfam annotation: Domain name=LRR_1; Domain location=833-854; Score =6.5; E_value=18; Accession=PF00560.23; Description=Leucine Rich Repeat
  Pfam annotation: Domain name=LRR_1; Domain location=915-937; Score =4.6; E_value=39; Accession=PF00560.23; Description=Leucine Rich Repeat
  Pfam annotation: Domain name=NACHT; Domain location=173-361; Score= -25.5; E_value=0.0056; Accession=PF05729.3; Description=NACHT domain
  Pfam annotation: Domain name=NB-ARC; Domain location=137-469; Score =88.6; E_value=1.9e-23; Accession=PF00931.13; Description=NB-ARC domain
  Pfam module annotation: Pfam domain module=LRR_1::LRR_1::LRR_1::LRR _1::LRR_1::LRR_1::NACHT::NB-ARC; Domain location=621-643::645 -666::668-690::692-713::833-854::915-937::173-361::137-469
MASSLSMFVANLVLAEISEHRAVKGDVNRLKKNYERVALMMASAERRVALDDQAATYWLKRVTDHMYQVQIVVDQWVIKNEKMHREGSLKRTISCGDHSGVMKLAAAMKELNADFDSILELSAETNKTRQPAAVRSYGKTAPGYNADIVGDYVDSDARGIIELLHSSKRRSCRLIAIVGPVGIGKTTLARRIYHSVDAQRFETKLWIRFSNDLSSLIIWPEPGWSSDRYKEGPTKSHWPDSDSRSSDRRKEGPTRSHWPDSECWSSDRRWEGPTKSQLMHLGAEIASKRFLLVVDSVWTEDVWEALLEGPLQQGDLEGSRVIVTTRNKHVARRIGAGLIHHVRRMSNADALRLLFRRASVSESDEAELQDVGRRIVEKCDGLPLAVRSVGRTLRGQEPTRHDWETACRAAFQDLSPEEQYTIGLSFRNLPPHMRQCFLYCSVFPEGFFIEKQYVEQQWISEGFILNKRRVTMEEAAERCFDELVGRGLLRLAVGSDGATGARMPIVIRSFAKDVSDHVNFCTESVSAANNLFEVRRLSIVENNEADDRIGDGDDSGNGEIAGGGDGNGSMEDEHGNRGEARIAGEDVPLHGLGRMKCLRTLVLRKSTVSQKSIRAVRQLNLLRVLDLRGVQGISALPIAVGSLEHLRYLNISETEIERVPGSISYLTMLQYLLLRNCSKVKTLPTGIQQLRYLRCLDIAGTGIKAVDWSFSAMEELVSMQGFPVTRGDGVVGSLRALNLKFPKKLAALRLDMLQEILEPLPRDRWPVREYQQLRDLELCYANADSPLVQGGTIENRMLVLDRFVPEKRLVRLKIENYLGKQYPSWIAAATLPNLQRLHLQSCAWCEELPPLGELPQLKLLAVTGFDSLRSLGAEFRGGNGPPVRTTAFRRLQQLFIGDMKALHTWSGLQSQDLPQLQVLRLLGCINLVAIPLVLQESATLTRLEVDTRTKTVIEDKLRGFTGGIVVNVDNTWEQEPPQHEADVAPQDAQPPGPGQDEAVEAEVEETVGALQKEVPKAFELGAVKLVLTIFAITAICSVLYLLFVPRC

SEQ ID NO: 49755 - protein, 106 aa, Zea mays
  Coding DNA Sequence Number=SeqID_7976
MEKKWEKKKKKEFLSLWAGGGFWPTWARALARARQAAQLAQLCGETAGDGVEARTHQPGRGEGADGVSDNGGGEGLDRGRPAVRIHGGSPPSVRFCDWEAVAEQEW

SEQ ID NO: 49756 - protein, 272 aa, Zea mays
  Coding DNA Sequence Number=SeqID_7977
  Gene Ontology: Mol. function=alkylbase DNA N-glycosylase activity; Cellular component=nucleus; Biological process=base-excision repair
  Homolog annotation: Hit_ID=Q39147; Match level="QueryCoverage=60%, HitCoverage=70%, E-value=3e-55, Identity=62%"; Hit description=DNA-3- methyladenine glycosylase
  Pfam annotation: Domain name=Pur_DNA_glyco; Domain location=69-237; Score=159.9; E_value=6.3e-45; Accession=PF02245.7; Description =Methylpurine-DNA glycosylase (MPG)
  Subcellular localization annotation: CTP_CleavageSite=38; ConfidenceScore=5.15e-01
MTTSGAPKRPSFKRSSPGKKSRLRTRRVAAGGREGEAEAEAAGTSALARALLPASVGLDAVPPVGRALPRDFFEVDALDLAPRLLGKLLRRDEVVLRITEVEAYRPNDSACHGRFGITARTAPVVGSCVMLSELAKFEALRFEHFDQFLETLSGLETIQRRRGQQTEKPILLTGPGKVGQALGLSTDWSNHPLYAPGGLEVLDGPEPESILVGPRVGIEYASPEHVAAPWSVFDKKAYELYEGGCPGRTFSNVKSVDMFFAFMLWCMIFECR

SEQ ID NO: 49757 - protein, 70 aa, Zea mays
  Coding DNA Sequence Number=SeqID_7978
  Homolog annotation: Hit_ID=Q9FXT5; Match level="QueryCoverage=36%, HitCoverage=7%, E-value=4e-07, Identity=96%"; Hit description =Replication factor C 36kDa subunit
MAGTAAAALMDIDAAAPPPPPPGAAAKGKAPLSAGGRAAPWVEKYRPQSLADVAAHRDIVDTTCESKAFC

SEQ ID NO: 49758 - protein, 295 aa, Zea mays
  Coding DNA Sequence Number=SeqID_7979
  Homolog annotation: Hit_ID=Q6QP51; Match level="QueryCoverage=16%, HitCoverage=20%, E-value=9e-11, Identity=73%"; Hit description =Putative growth-regulating factor 1
MQVVCNRTTVAHPFGFVAFGMEAQAHTSWTGKGDISKGILLSKGSGPRALLLIRGSKAGPSEGFDSRQSTRAPSPLLIRGSKAGPSEGFDSRPRARRVRDDSRYVRYMAEARATLPRPRPRKEVSASPDPRAQRLSLSLGLGLGRNHATREQDRRPIWLASVTGFKHFSDGHVIAYTGLKHFSDSHVGMAFMRGVARGDELTNRLTLSLARDACNPYYEHTPGRSRQTTPPGARNKVQVQLSPHRPLRPRHLAIGISGHRSPHPVAIAASLPLPANSQLASVKRVLYYTLPRRRI

SEQ ID NO: 49759 - protein, 172 aa, Zea mays
  Coding DNA Sequence Number=SeqID_7980
MGRRETEHEGGKLEGDRRKGETRGLRVVLRLGRPWVGRDGGSSKVEVESVFRGRGRVRTSGRARRRPSSEAKAESEPWGRVRQSSSSSGVEPESEPWGRARRSSLSSGAEPESEPWGRARRSSSSSGAEPESEPWGRARRSSSSSGAKAESEPWGRARRSSSSSGAEPESEP

SEQ ID NO: 49760 - protein, 90 aa, Zea mays
  Coding DNA Sequence Number=SeqID_7981
  Pfam annotation: Domain name=zf-C2HC_plant; Domain location=2-54; Score=-3.1; E_value=0.096; Accession=PF07567.3; Description=Protein of unknown function, DUF1544
MEAKSHHQPIILRSTCKNYATMTALVPTITGMGDHVSGRVRRAICCQVHSGSVCWGRYSLGEHPLVQKYQTRTFWKAEKVNYNFGIFITT

SEQ ID NO: 49761 - protein, 74 aa, Zea mays
  Coding DNA Sequence Number=SeqID_7982
LIVLPSITKKGEIESSLVGFGGLDDNPIKGLTETTNQAKGGGKKSFEVPSAWEKVKETEEPKARGEEEDLQSQG

SEQ ID NO: 49762 - protein, 193 aa, Zea mays
  Coding DNA Sequence Number=SeqID_7983
MADIVICSNITMAAIDISLLLEFTNLIIRTKLSNSYGLVVKWIHLSGRIPRQIHSMQEQSSETDSNSTNPINIFVKSFLDLLSAVRTHETWKDIENPDPWPSSKWKEIEESASAAPWHPLRPPPLPRLPARETVAIVPLPRAARDDPLPRDSGVFATHGVTLYADDGGELHDHLLRPAPKGASRRSRAKLQKK

SEQ ID NO: 49763 - protein, 160 aa, Zea mays
  Coding DNA Sequence Number=SeqID_7984
MGSASTPPSLPSEDFGDSEYLEEVSSEYDRSPVPASPVASSDDLDDSMGLSATERAYIRSIEHAGLGGSDDSEEAYSKEVEDSSDSMEGSDTRAAAMRATVAAAMATTTAAGAMTIAAKETTMAAARAAATTVKAAAGAATARATTATVMLVAECHWLKY

SEQ ID NO: 49764 - protein, 58 aa, Zea mays
  Coding DNA Sequence Number=SeqID_7985
MAGIIGLSFMDGASLYNNNVLRLKFYSAALLRSITSEEPNYLQISHHTITKGVGSIPL

SEQ ID NO: 49765 - protein, 65 aa, Zea mays
  Coding DNA Sequence Number=SeqID_7986
MPSVSATLAGPGPSAHRVGQGTRDQATATAATELLAAYLFELNHKQLILLHHVCKYKLGQTSKTR

SEQ ID NO: 49766 - protein, 815 aa, Zea mays
  Coding DNA Sequence Number=SeqID_7987
  Gene Ontology: Mol. function=nucleoside-triphosphatase activity; Cellular component=membrane; Biological process=protein transport
  Homolog annotation: Hit_ID=Q5VRN1; Match level="QueryCoverage=84%, HitCoverage=98%, E-value=0.0, Identity=64%"; Hit description =Putative cell survival CED-4-interacting protein MAC-1
  Pfam annotation: Domain name=AAA; Domain location=214-413; Score =279.2; E_value=7.9e-81; Accession=PF00004.19; Description=ATPase family associated with various cellular activities (AAA)
  Pfam annotation: Domain name=AAA; Domain location=487-651; Score =221.5; E_value=1.9e-63; Accession=PF00004.19; Description=ATPase family associated with various cellular activities (AAA)
  Pfam annotation: Domain name=AAA_2; Domain location=210-354; Score= -50.9; E_value=0.068; Accession=PF07724.4; Description=ATPase family associated with various
  Pfam annotation: Domain name=AAA_3; Domain location=214-357; Score= -22.0; E_value=0.084; Accession=PF07726.2; Description=ATPase family associated with various
  Pfam annotation: Domain name=AAA_5; Domain location=214-361; Score= -5.3; E_value=0.0045; Accession=PF07728.4; Description=ATPase family associated with various cel
  Pfam module annotation: Pfam domain module=AAA::AAA::AAA_2::AAA _3::AAA_5; Domain location=214-413::487-651::210-354::214-357::214-361
MSNRPRHAAPRRLASSSTIRRLIQDGDLAVPGSSAEDVAHALRNHRPELRRKRLKPLTEAVRRVLSSDFDDDDDDDSASRGHQGAHATLSSTTSLSDESAHPPPPPYFDATKTMLRSQYASQTSKQNPGTNQQLEIEMTAEKARRLITSDCGGGGGDAKPEAPVSEGVVNGDKWPRFADLGGMDQVLDQLVVEVVVPLCHPELPDYLGVRPVAGLLLYGPPGCGKTTLAHAIANETGVPFYKISAPDIVSGVSGGSEENIRGLFQKAYRTAPSIVFIDEIDAIASKRENLQREMERRIVTQLMTCMDEFHQNIGGDGSDADSSEKKPGYVIVIGATNRPDAVDQALRRPGRFDREIYLGVPDVNSRKQILMMLARKLRLEGQFDFLKIARATPGFVGADLKALVNNAGYLAMKRIINKRRAQYCSEVKEATKLVQPSLRREGFSSIPDVTWDDVGGLDSLRKEFHRYIRCIKSPEDCDLFGVRMQDGFLLFGPPGCGKTLIAKAVAHEAGANFIHIKGPDILNKYVGESESEIRKIFNRARINAPCIVFFDELLIELDGAGQRKGVYVIGATNRIDMIDDAMLRPGRFGKKHYVPIPGARERVSILKALARRIPVSSTVDLDVLALREECSNFTGADLASLVDEAAMLAMAERWMYLDSRTSTSPSSLIEPSHFEEALSKVKPSISKKLWRACSSSRGKKSQTTPLNQACAWKKSKLKHDEVQALVDAGFLAKWFYIDNQRPQLPKPSMYAPVHGDDWNAEACCRAEEGQLIVERVAFSFMKRHIQPLMKTPTGMSTPEVMTIRGSPRRRSAQML

SEQ ID NO: 49767 - protein, 55 aa, Zea mays
  Coding DNA Sequence Number=SeqID_7988
MEADGSTRVCAGQGGRVRGETDLAGKVAAAVNTAGKAAAARVPTKAMKRRATGRF

SEQ ID NO: 49768 - protein, 134 aa, Zea mays
  Coding DNA Sequence Number=SeqID_7989
  Subcellular localization annotation: CTP_CleavageSite=49; ConfidenceScore=5.60e-01
MHKSKPCAGVQSRGKGGTGNPASCQVAVPESSGRNKSRALASCVRPGTRVAGEPSARSTGSNRSTDGERWDEDGQDAPPPRDKKRSTSTPLVVDDVETGIALRVHGAWAWAASRCMDLIVVGYDINFDMTRLQM

SEQ ID NO: 49769 - protein, 63 aa, Zea mays
  Coding DNA Sequence Number=SeqID_7990
MAASPPQSAKPPCKIFINCVGDALFIYDLNGDFEAVFEEVVTSLLPKLQKNPRDLVALRRLRL

SEQ ID NO: 49770 - protein, 145 aa, Zea mays
  Coding DNA Sequence Number=SeqID_7991
MQTELEGKSRFGRCPYCRAMIYQDLSATIFYCSRCRTPIRGKNPQPTDETDSSMFIAPSWIDLGSATGGWRRMDLIVRAGEGGGVGGGERHGHRTRPRRSVYGRLWRPSGADRDYFMTLSYSNLRPQMLRAIPNLVTGYHLSFVP

SEQ ID NO: 49771 - protein, 732 aa, Zea mays
  Coding DNA Sequence Number=SeqID_7992
  Gene Ontology: Mol. function=GTP binding; Cellular component =intracellular; Biological process=intracellular protein transport
  Homolog annotation: Hit_ID=Q2QWF0; Match level="QueryCoverage=98%, HitCoverage=98%, E-value=0.0, Identity=69%"; Hit description=AIG1 family protein, expressed
  Pfam annotation: Domain name=AIG1; Domain location=164-357; Score= -7.6; E_value=6.2e-10; Accession=PF04548.7; Description=AIG1 family
  Pfam annotation: Domain name=MMR_HSR1; Domain location=164-274; Score= 22.2; E_value=9.2e-06; Accession=PF01926.13; Description=GTPase of unknown function
  Pfam module annotation: Pfam domain module=AIG1::MMR_HSR1; Domain location=164-357::164-274
MNFRDWISYRLGSSLLSARPFALSPGADDGASEGDAHGTAHNDFVDTVTANTFSSNDMRASEVTANSGSGAIYSGIVQQDDDNKKSDPLMKVEALQIKFLRLVYRTGVSPSADVVAQVLYRLQLANLIKASESDARRTNLAINKARVIAAQQEAPGGPDLDVSMQILLLGKSGVGKSATINSIFDERKVATDALVPATHRIKKIEGTIKGIRVTVIDTPGLVSHYHGQRRNMKILNSVKHFIKRSPPDIILYFERLDHINSRYSDYPLLKLMTDILGSPMWFNTVLVMTHCSSSPPEGPDGYPLEYDTYTRYCKNVVQRHIQAAVSNTQLDNPFVLIDNHPMCRRNTKGERVLPNGQPHSSSSSDAIDSQLTEMSDEEDEYDQLPPFRILKKSEYENLTNEQKSAYLDELDYRETLYLKKQWKEGIRRKKLTEAQSDEVGDDYDESASPEIVHMSDMDIPLSFDSDYPVHRYRHIITDDQLFRPVLDPQGWDHDIGFDAINFEASQELKKNVSAAITGQMRKDKEDMYIHSECSVSYNAQRGCSLMGGMDMQTASKDLVCTVHGDAKFHNLPWNSIGGGISVTKFGNKYFAGAKLEDSVTIGRRVKLVANAGRMSGCGQVAHGGGVEITARGKDYPVREGSVTAAVSALSFEKETVIGANLQSDFRVGRGSKISVSANLNSRNLGNLSVRTSTSDHAEIALITVVSLIQFILRRRSAADNKDEQQIGTNLDD

SEQ ID NO: 49772 - protein, 404 aa, Zea mays
  Coding DNA Sequence Number=SeqID_7993
  Gene Ontology: Mol. function=zinc ion binding
  Homolog annotation: Hit_ID=Q9M5P4; Match level="QueryCoverage=30%, HitCoverage=67%, E-value=4e-49, Identity=61%"; Hit description=CRS2
MEDFVHEYYSVERFRKAYSRLIEPLPDRTQWPEVDLPFVVGAPLDKRFAGRQRKLRIKSCLEGGGGGKPKKDATVAAVKAEWGTKKQMIRGKRKCKRCGELGHGETSYKCSLNGTKKRKRKPRKNTTKYGENAKLPTKRRGQNGEETNAAVDQTAQETGNADRDVQETNAIISSPIRPNRETILQDSPIRLTRRGLAMLLGESTSEQADFNLGSNKDLNVSPTKLATIKNAKPAKKMTPRKKKNLTAIKQGANFVRVQLTPLRAKGAATASSRPLAFPFAMSLLAAAIPSTSSHFSAPFLPSFHMPRKNLTAPLHRIRRPRPFTVVSSVPDPAAGPVEYTPWLIAGLGNPGNKYYGTRHNVRTVATLVLSFPISRNLDVIYDDTSLPNGVLRLQKKGGHGRHNG

SEQ ID NO: 49773 - protein, 68 aa, Zea mays
  Coding DNA Sequence Number=SeqID_7994
MAAATGRSWYGALERAKRGAPAAHNRGELVAPPYGADRRKKEPPDRSIGYRRLGLEGAYLFESLNYGH

SEQ ID NO: 49774 - protein, 267 aa, Zea mays
  Coding DNA Sequence Number=SeqID_7995
  Gene Ontology: Mol. function=nucleic acid binding; Cellular component= intracellular; Biological process=chromatin modification
  Homolog annotation: Hit_ID=Q9C9H1; Match level="QueryCoverage=38%, HitCoverage=42%, E-value=2e-15, Identity=44%"; Hit description =Putative zinc finger protein; 21453-22187
MTSPRLKLFGFHVSEEEHELGRARETEAEAEPDEAPACGNVGGGGGGSDSSSSSTTTTTTTTATAAGDARRFECQYCCREFANSQALGGHQNAHKKERQQLKRAQLQAAAAAAGRVAAGGALYPRANPMVSAFVPPPHLFGGGGDAAPTSWVYFSPRAAAAGGQQFHVSHNCVFPSRAATPATVTAASPAVFSYASASSAGGGASAAYVTDDQYSGRRVHVSPAAALRRYPGMAAGPGMAVVAEPVVAGPEDALGLDLQLSLAPAGL

SEQ ID NO: 49775 - protein, 57 aa, Zea mays
  Coding DNA Sequence Number=SeqID_7996
MNITEEVEEQQKNSKVGRGKNVWNTGLLGEEEKGCADLDDWGRPEEDNPAGGNNRLG

SEQ ID NO: 49776 - protein, 411 aa, Zea mays
  Coding DNA Sequence Number=SeqID_7997
  Gene Ontology: Mol. function=protein dimerization activity; Cellular component=chromatin; Biological process=electron transport
  Homolog annotation: Hit_ID=Q7XFV9; Match level="QueryCoverage=59%, HitCoverage=49%, E-value=6e-68, Identity=52%"; Hit description=HAT family dimerisation domain containing protein, expressed
  Pfam annotation: Domain name=hATC; Domain location=91-179; Score =35.1; E_value=2.4e-07; Accession=PF05699.5; Description=hAT family dimerisation domain
MMSAMAKIRSNLGDDPINKNLCDRLMQVINRRLDYMLNDTLMLAATALNPKALYTSKMARKPKFQHVVTMAIKKLSSSSSKASAAIDQYTFFRKQAGLFGGEEAKDSALNGRASAADWWDQYGGDYLELQEFARRIVSQCMSSSGCERNWSTFALVHTKLRNQLSYDKLHKLVYVHYNLKLRIQHFETDMESLEQMKNSKDRNIDPCSIMIDVAMYDEGNPIMEWLCSSRSESVPTLDENDESESPNRPSGFVLEELGGLNEEEMVLLNSRIGSGRKNGRKRNDVEEDIGDDFLSDSSEGGGSPTYNESGDSDSNDGGGDDEDGEPSGPCFAARTQPKLATDQYNGPGQDEQAVPLRPRSKRQKKLSIKGLYMLQKFQHNIAVIFGSCGLTIFITVIDFYALFELLTTKYL

SEQ ID NO: 49777 - protein, 98 aa, Zea mays
  Coding DNA Sequence Number=SeqID_7998
MALDTRDRNGLKGANWLGSADWQGARERGRGEREGIKRVREDRGDSPSRERTTRLQQPPPVDDGERCDEAGRRVLGMQGELGKRGRVFCFGDVGTWCS

SEQ ID NO: 49778 - protein, 227 aa, Zea mays
  Coding DNA Sequence Number=SeqID_7999
  Homolog annotation: Hit_ID=Q9FNL3; Match level="QueryCoverage=72%, HitCoverage=74%, E-value=8e-21, Identity=35%"; Hit description =Arabidopsis thaliana genomic DNA, chromosome 5, P1 clone:MCL19
  Pfam annotation: Domain name=DUF679; Domain location=47-219; Score =195.7; E_value=1.1e-55; Accession=PF05078.3; Description=Protein of unknown function (DUF679)
MDPNGVRIQMLTAGQDVEPPSVQDDATKKKPQQTDDAATPKAPPARPALSSASDLMKLLPTGTVLAFQALAPSFSNHGVCHAANRYLVLSLIGACAVSCVLLSFTDSLVGRDGKLYHGAATFWGFYPFNYTGTREQREAAFDDEDLSRFRVTALDFVHAFFSALVFLAVALADASIQGCLFPDAGPDVRELLVNLPLGAGFLSSMVFMIFPTTRKSIGYMDMAPHAQ

SEQ ID NO: 49779 - protein, 44 aa, Zea mays
  Coding DNA Sequence Number=SeqID_8000
MASSTSSLSMHVGVNRSTKVLCISGWGVFFNVPQVNLGPCTFDL

SEQ ID NO: 49780 - protein, 196 aa, Zea mays
  Coding DNA Sequence Number=SeqID_8001
MTRVGSGSAKRWVMGNMTAACGCEDVKLARMARELLIFPYSHNIPDVIAAAMDPKGKASALVYGVVNLADRSRKWKVQASEVSTPAKSLNRLKLMSGAEATDKGVVPLPIKDYVLDNVEILTKSPLMANSVFSCCSRCRLLLGHAAEPSSDAVDVVEKVPLWGPAQSDSEVLLIKEEDPLDDVLCVTPLACWSPSV

SEQ ID NO: 49781 - protein, 71 aa, Zea mays
  Coding DNA Sequence Number=SeqID_8002
MPRRPSTLLKRRFFTGYAISSEGDLEEEEAMEMWPHNDGSTTEELEDLGWDYCDDPSKESFFDDNDNDDDG

SEQ ID NO: 49782 - protein, 662 aa, Zea mays
  Coding DNA Sequence Number=SeqID_8003
  Gene Ontology: Mol. function=kinase activity; Cellular component =alpha-glucosidase II complex; Biological process=protein kinase cascade
  Homolog annotation: Hit_ID=Q5NBP9; Match level="QueryCoverage=97%, HitCoverage=96%, E-value=0.0, Identity=58%"; Hit description=Protein kinase C substrate 80K-H isoform 2-like
  Pfam annotation: Domain name=Ldl_recept_a; Domain location=106-150; Score=9.1; E_value=0.014; Accession=PF00057.9; Description=Low -density lipoprotein receptor doma
  Pfam annotation: Domain name=PRKCSH; Domain location=544-593; Score =64.9; E_value=2.5e-16; Accession=PF07915.3; Description=Glucosidase II beta subunit-like prot
  Pfam module annotation: Pfam domain module=Ldl_recept_a::PRKCSH; Domain location=106-150::544-593
MRLLLVGALLLCATAAVESKPPLDTLGIPPQGSTGSVHACSAISFHLSLFPSVDAFLDSTFLGVADEAYYRGGVIKCRDGSGRFSREQLNDDFCDCPDGTDEPGTSACPEAKFYCKNAGHTPVTIFSSRVNDGICDCCDGSDEYDSNITCKNTCWEAGKAAREKLKKKVATYKSGVVIRNQEVERAKEAYAKDEAELAKLKGEEKILQGLVDKLKEQKRLIEKAEEEERLRKEKEEKRIKEAEKQAADEKGTPDASPDVDSKETHDHVQEDENKVAEEHDVHATDHDNHATDHDNHAAESGASVEQQGSVNKDDISVEAGTLDELLHKESAVPTLEKQLILGRYVDFMSKGDDHSSDNPEGLSREELGRMVASRWTGESVSEVSKDDKKGHEDEQEIPEPAKEALEDELEIPEPAEENYDGYHSEVEDDRHKYEDEEFDHESEDEYVDDHDEHVESYKSDDDQKDLTEPGHASWLDKIQQTVQNVFQKFNFFRTPVDLSEASRVRKEYDDANSKLSKIQSKISNLAEKLKHDFGKDKEFYSFYDQCFETKEGKYTYKVCAYKKASQAEGHSSTNLGRWDKFEESYRVMHFSGGDKCWNGPDRSLKVRLRCGLSNELNDVDEPSRCEYVAVLSTPALCVEEKLKELQNKLDAMSSKQPGHDEL

SEQ ID NO: 49783 - protein, 118 aa, Zea mays
  Coding DNA Sequence Number=SeqID_8004
MNHRVVASLLQVALDNPEHVGVFSVFAVVVDKNEEEVTVEEEETAPSTENPPARKSTCFTVDGMFSKIKLDGGSIMAMMGSTSDKMYLCQGSTISKQFANRVLIFDQHYLDSLKPAYF

SEQ ID NO: 49784 - protein, 51 aa, Zea mays
  Coding DNA Sequence Number=SeqID_8005
MAPKKATSKAITSLDDATKKEIVTAKRQRTNMQAKVRQIILEEEQKARELK

SEQ ID NO: 49785 - protein, 95 aa, Zea mays
  Coding DNA Sequence Number=SeqID_8006
RVNVPGKAGKIPNLSSDSGTPTGLSEQHGSSSLISCEKQTIRIEFLNLASDRTCTHHNRNGRPRLRSLEEGNLLPGSIRYLRTQIVNMKYDQDEA

SEQ ID NO: 49786 - protein, 70 aa, Zea mays
  Coding DNA Sequence Number=SeqID_8007
  Gene Ontology: Mol. function=amino acid-polyamine transporter activity; Cellular component=integral to membrane; Biological process=amino acid transport
  Homolog annotation: Hit_ID=Q1SJF1; Match level="QueryCoverage=92%, HitCoverage=20%, E-value=7e-11, Identity=41%"; Hit description=Amino acid/polyamine transporter I
MSAQPNTEMMPMLERMAMGPFFSTPLVSSVRIMAPQERNGSPNVAAVTYHHMEITSRNAMTSSTNVLSMT

SEQ ID NO: 49787 - protein, 577 aa, Zea mays
  Coding DNA Sequence Number=SeqID_8008
  Gene Ontology: Mol. function=guanyl-nucleotide exchange factor activity
  Homolog annotation: Hit_ID=Q93ZY2; Match level="QueryCoverage=74%, HitCoverage=75%, E-value=1e-126, Identity=54%"; Hit description=Rop guanine nucleotide exchange factor 1
  Pfam annotation: Domain name=DUF315; Domain location=2-470; Score =725.1; E_value=4.8e-215; Accession=PF03759.4; Description=Domain of unknown function (DUF315)
MARGDTASEALTADSADEEGRRGSSSSASSDAASSFSCTYSPAPPDEWHKVAIIKTCVSVSADAAGGGGGKDQKPRGVVAAADRHGGASEMEMMKERFSKLLLGEDMSGSGKGVCTALAISNAVTNLCATVFGQLWRLEPLPPEKKAMWRRELDCLLCVSDHIVELVPTWQTFPDGTRLEIMTSRPRSDLYINLPALRKLDNMLLEILEGFRDVEFWYVDQGICAPDCDSSASYRRTFHRRDDKWWLPVPHVPHGGLREATRRQLEHRRDCASQILKAAMAINSNALAEMAVPVSYLDSLPKVHQSLSTGCRTPVPRVPVPNGRAALGDVIYRYITSDQFSQDYLLDCLDLSSEYQALEIANRVEASIYVWRRKGGGGARSSWGIVKDMVMDTEKRDLLAERAEALLMSLKQRFPGLTQTSLDMSKIQYNKDVGKSILESYSRVLESLASNIIARIDDLLNVDELSKQPADSIPSAGADAKVACKSNGSKQATAVPASGTPYATAYATPSFSPAQLSSPSKIGRALLVDRRSHHVAGAKRATASAADRAGVEVVKGMVVDGSSAIFDIIPIAVPAKI

SEQ ID NO: 49788 - protein, 141 aa, Zea mays
  Coding DNA Sequence Number=SeqID_8009
MGKGNKRKHEPTPPSEDFGDSEYSEEEFSSESEGSPAPVSPSASSDDSDDSQGIAAEVWTYIQAVERSGLEGSDESEYSSDEEDSPEEDGDGDDEDDGGDSGDDGDGGGRGGNSDDKGGDGGSSRGSNGGGNSKGSNKASG

SEQ ID NO: 49789 - protein, 129 aa, Zea mays
  Coding DNA Sequence Number=SeqID_8010
MGDQAHATDGCPVAVAVEIGKDKDPVRRDENAKRRRRTDLCPNKETVSPMGSELRTLEPVPSEGQLGHCQWTRTFVTLACPMSLPHGRIETDHAPAPSYCHWARQGRRELTEISPAKSSYDKIRTAARA

SEQ ID NO: 49790 - protein, 145 aa, Zea mays
  Coding DNA Sequence Number=SeqID_8011
  Subcellular localization annotation: CTP_CleavageSite=25; ConfidenceScore=5.35e-01
MAQRLANSDRSVSRSPLHYTTSGIRQRGNRPWPAPVTTRPERLFVFGQLESLPDLSLVPGYWALRPSLMPPRLYFFLPATAALCCRLIAMLLCLESKMPPEGRKKLQYYGIGTALRRLSKATSRHTERSAPICHTTRLWTYLLIW

SEQ ID NO: 49791 - protein, 78 aa, Zea mays
  Coding DNA Sequence Number=SeqID_8012
MGGTWTDLGESAPEPDAYRDPLPTDRTPRGWRPEYANLPQGTTRWAVSSPRLRRSGISVAIMMTPMNIASPMSSAIPN

SEQ ID NO: 49792 - protein, 107 aa, Zea mays
  Coding DNA Sequence Number=SeqID_8013
  Subcellular localization annotation: CTP_CleavageSite=60; ConfidenceScore=5.48e-01
MAAPRWMPRSKTFQTRFRMSSGCKRVAPHARILWVTESTSQRSFANSASCPTQKINRNISLSVLQRQKGIEKQNEWRTRRTGLHNGQSCLETCNTRIKCPYGRSRCL

SEQ ID NO: 49793 - protein, 132 aa, Zea mays
  Coding DNA Sequence Number=SeqID_8014
MVLEELAQAKEHLWALSVEHSNLSVAIDLVCDHLGVLHLGEVSACTPRMALVSSCIHELDTTAFRLESSMPWSSLVLSVKTRLRGVEPASDVPSVGHMASSKDLRALAGPIVRRSPCGHSFFEFPREGKIKK

SEQ ID NO: 49794 - protein, 134 aa, Zea mays
  Coding DNA Sequence Number=SeqID_8015
MALDPAVVSAVWGEGVGNGAASLCALCAGLPGVGARRGAAHRRSAPGAAKAELGSATRRSAWHGQAILGAASCSLGATRRALGLPGTAGRRRANPATARPGAARPGMPGARSGQPESRHPVRPPGALDVASQRR

SEQ ID NO: 49795 - protein, 194 aa, Zea mays
  Coding DNA Sequence Number=SeqID_8016
MRHPSAAASPPSAPPGLSLEQNRVWVVASGSEPVEERAGKGRMSMEGLPDPGNEEERGQARAEEVSGGGTEQMALGLEMPLATHIKCFYILVNERMVLVTHIKRCHHPNNCWRNGGDGRAYLRRRRCELMVAVEGGVQTLKANTYGHGIAVASSRRGASAASGRSVVARLHPEAWPTDAAQEVARLGTLDSFWW

SEQ ID NO: 49796 - protein, 140 aa, Zea mays
  Coding DNA Sequence Number=SeqID_8017
  Homolog annotation: Hit_ID=Q8SA97; Match level="QueryCoverage=35%, HitCoverage=10%, E-value=2e-09, Identity=57%"; Hit description =Ornithine carbamoyltransferase
  Subcellular localization annotation: CTP_CleavageSite=44; ConfidenceScore=5.03e-01
MANTGKGVPHRDMRSPGPRLRRSAVQRRRSGTGEEFRADRNVIRPMRGAGKQHRLPRSDCCATRQGEADNSQVQPQAQQEAPPRPTLGLGLGRRSPPRPTPGLGLNLGLGRWSPPRPTTRLGLNLGLGRNRVLDRPRPRP

SEQ ID NO: 49797 - protein, 221 aa, Zea mays
  Coding DNA Sequence Number=SeqID_8018
  Homolog annotation: Hit_ID=Q6QP51; Match level="QueryCoverage=97%, HitCoverage=91%, E-value=3e-10, Identity=27%"; Hit description =Putative growth-regulating factor 1
MTASKKASSLPTDQGFEGWPLGGVHNRLRACGLHTYYWSEVRRPAPRKGSTAASGHSGSAPTTDQGRQSRSDRSHFAAPLTGLTEGQRRLRRSDCCVARQSEADRQSGPASGTIKNSAPPDPGLGLGLSPGRRRTPLRPTQGSDSGSAPEDDELRSARPRARTRAQPRKTTNSASPDPRARTQPWPPPTVSALPDPGARTRPRPRKTDSTSTSEEPPHRPT

SEQ ID NO: 49798 - protein, 76 aa, Zea mays
  Coding DNA Sequence Number=SeqID_8019
MSCAFDDYYIKDYGVILAPDVTVSLCTVMSYVTTGKGERMIASDFSWYRSVPIPVPASYLLPADTRYSPAYYSFSI

SEQ ID NO: 49799 - protein, 99 aa, Zea mays
  Coding DNA Sequence Number=SeqID_8020
MQRGVAAATAGGGTPPAPEKTTKEQARAIVRAAQRAVEEEDARTRRGGDDGGGGAGPSLSFKKSLQWFLEGRKNKLATVAATAGIHRQLEGDTTLSSIY

SEQ ID NO: 49800 - protein, 100 aa, Zea mays
  Coding DNA Sequence Number=SeqID_8021
MTGKQSGAAAAGVGRGVEAAATEEQARAIIATAKRAVEEDAAKAKTTIGDGGTTPSSSLKRSLECFLQGRMNKATSSSAATRPHLETSTASSSSSSSPST

SEQ ID NO: 49801 - protein, 236 aa, Zea mays
  Coding DNA Sequence Number=SeqID_8022
  Homolog annotation: Hit_ID=Q6H7S8; Match level="QueryCoverage=83%, HitCoverage=7%, E-value=8e-35, Identity=39%"; Hit description =Putative LvsC
MSERLFKFPLSDNLCAALFSVLSGTSAQQVPQENSEPDPSRDRNCNILSLPPFSLPQILICIFRFMHSCKDSSARTRILNLLLGLLDSNSSNIEALMEHSWNSWLETSTKLEVFKDYKSVSKGDPDDVKADEISLVRNLYSLVLSYYLRFVRGGWHQLDDTANYFLLKTDQPCCDNVLHFLNLIQELLISQMGIRLLAVGSWLGQSTLAALVFPITIHEKWHQLISDETFNDSHGY

SEQ ID NO: 49802 - protein, 287 aa, Zea mays
  Coding DNA Sequence Number=SeqID_8023
MEIRCRMSDMRDYFKSQRFSRRNIREKERLRPTVGEGSHGGAAPSEKTRPTRQLQVWAATMAAWRAQIPPQQQARPRRGITRLSTGGARARPVPRRSGAQRAAARVRARCGARDNVTGRRERQTEKMRRGVLTRMERWSEKTTLAAREVGLGAVAPRDGGQPESEHDRSDLEHAGVLTTVEGEPTRRGSRRGAGPCAMAGRRPVRRLGRWRPSRGARQHRAHAMGRRCNWWSSALVGDGSMSGRPPGGLGDFLSRNDDPWRLGADGDGEGLIPRGQILIFSCCCGFD

SEQ ID NO: 49803 - protein, 217 aa, Zea mays
  Coding DNA Sequence Number=SeqID_8024
LTSLVHHAAIGFVYPSRGISVRMPSPETACSWNFEAKRMNCADGPRPGAGRSATWREAATLSGQTRTVRGTGPDEGQRRLRHSDCSATRQSESDRQSGLAKGAMGNSASPDPRAQTRAKTRKTANSAPPDPRARTRAKTRKTANSAPPDPRARTRAKTRKTANSAPPDPRARTRAQPQKTTKLRLARPQGSGSALASAERSPPRPTRRLGLGLGHGR

SEQ ID NO: 49804 - protein, 356 aa, Zea mays
  Coding DNA Sequence Number=SeqID_8025
  Gene Ontology: Mol. function=DNA binding; Cellular component=nucleus; Biological process=regulation of transcription, DNA-dependent
  Homolog annotation: Hit_ID=Q8S0Z6; Match level="QueryCoverage=99%, HitCoverage=100%, E-value=5e-57, Identity=44%"; Hit description=Myb -related transcription factor LBM2-like
  Pfam annotation: Domain name=Myb_DNA-binding; Domain location=98-143; Score=33.4; E_value=7.9e-07; Accession=PF00249.21; Description=Myb -like DNA-binding domain
MGRAPCCDKTSVKRGAVVARGGRPAAELRPEPRHRRQLDRAPAQSRCVLAQAVGRGKPATRIDAYRACMRLCERDGLNRCGKSCRLRWLNYLRPDIKHGGYTEQEDRIICSLYNCIGSRWSIIASKLPGRTDNDVKNYWNTKLKKKAVAMQEQQKEKEEEEEYYQQQQQHTSGGRGAAPRSQQCASMQPSPASASSAVTTASPSDACSFGAMYPSPTTLQAPVHARYDVTAPVPPVPQQQASSSSLAEFSPAPAPAPAATPPAASIIGGTCTWAGGPLLDDMFLPELLGDVSEFPPGDFFGTGGLAPLLQDRAAAASLQELSAFYFPNAQAEMWAAADHHVHANNKPAAGLCHSLT

SEQ ID NO: 49805 - protein, 110 aa, Zea mays
  Coding DNA Sequence Number=SeqID_8026
MDNPTMSDEFLYVLRPPGRWVAASGLHPKGKGQIESVMFQIFLQCEDRDGKERDANFPGTQSRKLKASRNRSSLERRGSTIRPSIVEFFTASSCSIAIASGAGQGRDGTE

SEQ ID NO: 49806 - protein, 237 aa, Zea mays
  Coding DNA Sequence Number=SeqID_8027
  Gene Ontology: Mol. function=telomeric DNA binding; Cellular component=telomerase holoenzyme complex; Biological process=mRNA catabolic process, nonsense-mediated decay
  Homolog annotation: Hit_ID=Q8W417; Match level="QueryCoverage=51%, HitCoverage=15%, E-value=3e-35, Identity=57%"; Hit description=Cig3
NNELEDQLRKSAQSKVPSDPNIWLQMRDNFEKIILIDHDLSEQRDVEYLLWQLHYKRIEDFRRNISAASSLASQSGKSNTNPDRVKRIKSAFKSFLSEATGFYHDLMLKIKSNWGLPLNYFPDSLDNANNSVRDDMKTVQLKKDLARYKSLNGDGDSASREYTAASSYYKEAASIYPSSGNPHHQLAILASYSGNEVVAVYRYFRSLAADTPFATARDNLIILFEKMRLIANLDYTL

SEQ ID NO: 49807 - protein, 163 aa, Zea mays
  Coding DNA Sequence Number=SeqID_8028
  Gene Ontology: Mol. function=transcription regulator activity; Cellular component=nucleus; Biological process=regulation of transcription
  Homolog annotation: Hit_ID=Q84LH4; Match level="QueryCoverage=69%, HitCoverage=31%, E-value=1e-16, Identity=41%"; Hit description =Putative Helix-loop-helix DNA-binding domain containing protein
  Subcellular localization annotation: CTP_CleavageSite=34; ConfidenceScore=5.22e-01
MPPPYRENRAQQQLTSPTPQQQQQNTQTRLSVVYANHVLRNALVLDEIHFSVFSALISLMLLSQDRNLAFYGVEPGSSGLTGPFNQGIMQPKLMCTIANPVDVLHGAIHDASTMNHVILQSDVLTYVYAVPYVLPNLSSVTHAHIVAGGEHASHREFNLHAPC

SEQ ID NO: 49808 - protein, 199 aa, Zea mays
  Coding DNA Sequence Number=SeqID_8029
  Gene Ontology: Mol. function=protein serine/threonine kinase activity; Cellular component=chloroplast; Biological process=protein amino acid phosphorylation
  Homolog annotation: Hit_ID=P27450; Match level="QueryCoverage=61%, HitCoverage=28%, E-value=1e-27, Identity=48%"; Hit description =Probable serine/threonine-protein kinase Cx32, chloroplast precursor
  Subcellular localization annotation: CTP_CleavageSite=27; ConfidenceScore=5.55e-01
MTSKTSGSITTILSTTGKLSSVGSSFMASAGSRSTSGGFDEGAKYSDGQILEAPNLRTFTFIELKTAPKNFRPDSVLGEGGFGRVYKGWVDEKTMAPTRNGTGMVVAVKKLNSESMQGFDEWQLRLLGSADGPMLTRNILLEVLYNITTSHMSITMQLLFVCCHAFEKGKNCFLSCVVFSKHNKFSNVPHILANCYGHN

SEQ ID NO: 49809 - protein, 56 aa, Zea mays
  Coding DNA Sequence Number=SeqID_8030
MAEKWHTVEKNALMCGPHNIASRASAESAERLTNRSHRPAAEQTRRARPKNYLSPV

SEQ ID NO: 49810 - protein, 140 aa, Zea mays
  Coding DNA Sequence Number=SeqID_8031
MASACGAMRKSTSLASKVSCMWDHFVCTTEPRSLLVWVLAVGGCGAEGLCDAEAVVIEPTPLDGAAALGGVFLTTVGLSGWVLIGYGVHLLMIANVPVEVWLHQSSPGSAGLRRRDSSSKASVSGRYPWKLSRNLSRRPF

SEQ ID NO: 49811 - protein, 70 aa, Zea mays
  Coding DNA Sequence Number=SeqID_8032
  Gene Ontology: Cellular component=membrane
  Homolog annotation: Hit_ID=Q2QPU1; Match level="QueryCoverage=88%, HitCoverage=16%, E-value=5e-09, Identity=55%"; Hit description =Nodulin, putative, expressed
MEVSNSIIYHHEQCPFDPYPLGTTTGFGAGRVLRGEGTVVVDRAHGRAGLQGDGDDFRQAEHYADDLGYA

SEQ ID NO: 49812 - protein, 73 aa, Zea mays
  Coding DNA Sequence Number=SeqID_8033
MAVGVSEALYVKAVSPDLLTGNRWGWLMCVGTECPYMSCSLEDMVAGVTWPSILPPGWTVEWDPASAEEEHEE

SEQ ID NO: 49813 - protein, 142 aa, Zea mays
  Coding DNA Sequence Number=SeqID_8034
  Subcellular localization annotation: CTP_CleavageSite=53; ConfidenceScore=5.01e-01
MWSDRSTLYLDCLASYVDGPNGLSRVCTVGAKPDLSTLKSARNFALASWISVRCTRVVQEPSSLSQENAGVLRYNSPDCPVCQRGNGYLRAMVDSDSATVSRQKSEQRVRGAPDCPVHHQTVRCHKKTNAPTINCSRTLTVG

SEQ ID NO: 49814 - protein, 680 aa, Zea mays
  Coding DNA Sequence Number=SeqID_8035
  Gene Ontology: Mol. function=protein kinase activity; Cellular component=integral to membrane; Biological process=protein amino acid phosphorylation
  Homolog annotation: Hit_ID=Q6H4R9; Match level="QueryCoverage=96%, HitCoverage=95%, E-value=1e-172, Identity=53%"; Hit description =Putative receptor kinase
  Pfam annotation: Domain name=LRR_1; Domain location=116-138; Score =9.0; E_value=6; Accession=PF00560.23; Description=Leucine Rich Repeat
  Pfam annotation: Domain name=LRR_1; Domain location=140-162; Score =13.2; E_value=0.96; Accession=PF00560.23; Description=Leucine Rich Repeat
  Pfam annotation: Domain name=LRR_1; Domain location=164-186; Score =16.4; E_value=0.1; Accession=PF00560.23; Description=Leucine Rich Repeat
  Pfam annotation: Domain name=LRR_1; Domain location=187-210; Score =2.8; E_value=87; Accession=PF00560.23; Description=Leucine Rich Repeat
  Pfam annotation: Domain name=LRR_1; Domain location=91-114; Score =1.3; E_value=1.6e+02; Accession=PF00560.23; Description=Leucine Rich Repeat
  Pfam annotation: Domain name=Pkinase; Domain location=402-635; Score=- 69.6; E_value=0.0002; Accession=PF00069.15; Description=Protein kinase domain
  Pfam annotation: Domain name=Pkinase_Tyr; Domain location=400-664; Score=-106.5; E_value=6.2e-06; Accession=PF07714.7; Description =Protein tyrosine kinase
  Pfam module annotation: Pfam domain module=LRR_1::LRR_1::LRR_1::LRR _1::LRR_1::Pkinase::Pkinase_Tyr; Domain location=116-138::140 -162::164-186::187-210::91-114::402-635::400-664
MAKAVAVTALAAALVVLLLLACCPCRARADESANVTASLVSFLTALAGDDGGQTAIRLRWNASINPCVPGTKASLWSGTVQCFDRGVNDGHIKRIDLDEQGLNGTIDAALLCAAPALRVLNFHNNSLRGGLPAGISACSGLTHLVVSGNRLSGNLPSSLAQSRSLRVIEVSGNNFSGELPGGLGRLNLERFLANDNHFDGTIPDFDLDSIVGLSFDVSNNNLTGPIPKDAVRFGKGRFWPNAAGICGEPLFAPCPSPTPPSSGSEAEDDGKGGDKDKEKKRTVPKIVMYLGYVLLGAAILAFVLYRFCFKKKRSKLGRNSKPSGGRAVYDSSRMTTTTTTTSATPSKTAYSLPTSGEHSTVAAEAGAPSASLVVLRRSGTASITSNAAAAAAKNLRFEDLLKSPAELLGRGRFGSSYKVVVPGGAALAVKRVRDAAVDEDEFRRRMERVGLAKHPAVLPPLAFYCAMQEKLLVYEFQSNGSLTKLLHGSIESSQAPLDWPARLHIAAKVADGMAFMHTTLRGDGGTTNSSSGGPIAHGNLKASNVLFTAGMDPCISEYGVTAPGRDGAAAFRADVRALGVLLLELLTGKATSAQGDGAELARWVTSVIREEWTAEVFDRALLAGTGVGSSEHRMVRLLQVAMQCVDASPGSAPPPTMREVAGMINAIRGDEDDGSVSFGA

SEQ ID NO: 49815 - protein, 410 aa, Zea mays
  Coding DNA Sequence Number=SeqID_8036
  Gene Ontology: Mol. function=nucleic acid binding; Cellular component= chromatin; Biological process=DNA integration
  Homolog annotation: Hit_ID=Q60DN3; Match level="QueryCoverage=83%, HitCoverage=34%, E-value=3e-63, Identity=42%"; Hit description =Integrase core domain containing protein
  Subcellular localization annotation: CTP_CleavageSite=55; ConfidenceScore=5.06e-01
MSSTLSTSSPAPIPLHHAATIRLTKSNYLLWRAQLMPYLRSAKLIGFIDGSTSAPAQMIASSTATGADQVPNPDYGRWCDQDQHLLSGLLSTMTEDVLRDVISANTSKEAWDILQRMFSSSTRARTVQIRVELATTKKHGFSAADYFRKIKNLAIEMAAADAPLRDDEVIAYLLAGLGADYDAFVTSMTTKCETLSLDDVYAYLMVFEACQSQHQAEMQLHTGSSVNYAGRGGSSRSRGRPDRGDLAVAPFPVQVTPEVIVAIPLVLHARFVAKRDTLSCVAGTAWTHPIMKIPLLQRWQPHLPTRLIPIGTVIPAPRIILQVILTGLLFVNVIMVVNKFKWATVQDRKTRQHLLDGRCEGGLYPLTPSDADVLKQALAHVERLLDTKIKCVHSDWGGEYQRIHNTFFDP

SEQ ID NO: 49816 - protein, 108 aa, Zea mays
  Coding DNA Sequence Number=SeqID_8037
  Subcellular localization annotation: CTP_CleavageSite=56; ConfidenceScore=5.66e-01
MTTPSNAVWSSPTANWVPGWFIPRHSGCVRAPTAATAHPGARARPLVVVYRRRATSTSARPSAPTLRHCNSRWAYRIPPDSDGWLLRPPSCAATVLCTMYHGTGPRWL

SEQ ID NO: 49817 - protein, 407 aa, Zea mays
  Coding DNA Sequence Number=SeqID_8038
  Gene Ontology: Mol. function=metal ion binding; Cellular component =integral to membrane; Biological process=ubiquitin cycle
  Homolog annotation: Hit_ID=Q9LRB6; Match level="QueryCoverage=75%, HitCoverage=79%, E-value=6e-52, Identity=43%"; Hit description=RING finger 1
  Pfam annotation: Domain name=PHD; Domain location=184-229; Score=9.4; E_value=0.0065; Accession=PF00628.19; Description=PHD-finger
  Pfam annotation: Domain name=zf-C3HC4; Domain location=185-226; Score= 39.6; E_value=1.1e-08; Accession=PF00097.15; Description=Zinc finger, C3HC4 type (RING finger)
  Pfam module annotation: Pfam domain module=PHD::zf-C3HC4; Domain location=184-229::185-226
  Subcellular localization annotation: CTP_CleavageSite=65; ConfidenceScore=5.19e-01
MAAAGPRRAGARFLLARGIGSSVAHVHSLGRGGGGVTMPRALLADSAPASAPAMTGRAPPAASSSASAAASRITPAVLFVTVVLAVVLLVSGLLHVLRRLFLKSHHAGAGAGERHLQHLFFPAHDDGAGAGSGSGSGAGGGGGLGQDAIDALPEFAYGELSGEGAAAAAPASRKGKEKAAGPFDCAVCLSEFADHDRLRLLPLCGHAFHVACIDVWLRSSATCPLCRTKLSARHLVAAAADAPAPASVAPDVGEQRPQRDHAPEAAEAASSSVVLPVRLGRFKNADAESAEAESSNGGATSRVERRRCYSMGSYQYVVADEHLLVSVHLRHGTSAAVAASSGVDGDDRQQHQGKKVFARGDSFSVSKIWQWRGSKRLPGALCADDGLPWAPAKDDRASACTRQRGDT

SEQ ID NO: 49818 - protein, 65 aa, Zea mays
  Coding DNA Sequence Number=SeqID_8039
MAWVARVVASGSDALLIQWGAQQGRKDNDEGCAAGWAMKAAKILPVINGHGVIGLGEKADVAVAA

SEQ ID NO: 49819 - protein, 896 aa, Zea mays
  Coding DNA Sequence Number=SeqID_8040
  Homolog annotation: Hit_ID=Q2QLK8; Match level="QueryCoverage=83%, HitCoverage=81%, E-value=1e-97, Identity=35%"; Hit description =Expressed protein
MEAKTLTPEADAAAAPQTLAAGELVWAKPSKPRRHCWWPARMLAACPASATRGAQVSYFSDPAAPGAPSAPPAQVRRFADADAGADMMARGSTARGFSGAVAEAEARAVAALRAQLACACVPPTPPPGEDSSVTGRRQPGARGVPGRAPLKSWVRAVGEGWGPHGARHYPRRPLHDLVDKIDLDVPAGEDRDADGWLAEDQHKALERPEETPLRHKKRGVTKVLDAGEDEGKMDSPEHVTSGKRQRKRSKYLLPPYTSLVVVDKIALKPVDLPRALVTEAAEDGSDMSPLPDSIVVEDVLLLVRRLGEVPRHKDDFPKDAEGFLCLFRSTTFVHGADYESCKAYECPLVRGSGKVGMEIVVALASDSHAFLNQGSCVLKRTRKKDEAVSGSPSIKKKREKTSLASADIPIAPAIPIRQLKAEDMRTLMKAESGLRGIGLGVKNNKGKPSPLKVPISAADPGAVELGHEHAQANVLAVCNTFPEQPAKENDATNLEATRSEMNMQNGTVDVPIRSVQTEAMKLQANNPIDVNAQSVAVDVPVGSVSKEATEPETSVHKDKNVQSDVSGVSDRIVSKEPTESETDDHINENVQSVAADMSSRSVSKEAAMTDADIGIHENTQSAADLPDSSGPSPMHEDMSQPVDGHKEPGSVEVCIVQQSYASLEAMVPEMLKKANANGAGTIGVNYTLKDEFQKDGQPVEKVKLPAEVANHSCGGGTNGTWLDPANLTPKKRKKVAQHFSNPAAVIVEFAPGATVPSRQELLSTFGKYGDLIESQTDISETTRSASVVYGKSVEAEEAYRNGCQYLLGQFGPPFATLRLDFSPIVPSPSPPASKPPLRDIRKNLEDMISSRRSALNKATSSADAQLDPVPDKLLGEMQGLLAKVDRMLTRPHANAP

SEQ ID NO: 49820 - protein, 98 aa, Zea mays
  Coding DNA Sequence Number=SeqID_8041
  Homolog annotation: Hit_ID=Q3LRV2; Match level="QueryCoverage=38%, HitCoverage=16%, E-value=4e-08, Identity=71%"; Hit description=Gag
MSGEHAKREMVIGEKPEASGKKNDERTPSKEADDKHKEESTGSIKSHRKGNKKKKKMKKTPQVSNEDYNSDEATQIRHFNSQATSILLASLCRKEYNK

SEQ ID NO: 49821 - protein, 367 aa, Zea mays
  Coding DNA Sequence Number=SeqID_8042
  Gene Ontology: Mol. function=carboxypeptidase activity; Cellular component=membrane; Biological process=auxin mediated signaling pathway
  Homolog annotation: Hit_ID=Q5VRN3; Match level="QueryCoverage=91%, HitCoverage=93%, E-value=1e-120, Identity=65%"; Hit description =Putative MtN21
  Pfam annotation: Domain name=DUF6; Domain location=16-149; Score =54.7; E_value=3.1e-13; Accession=PF00892.11; Description=Integral membrane protein DUF6
  Pfam annotation: Domain name=DUF6; Domain location=191-321; Score =22.5; E_value=0.0015; Accession=PF00892.11; Description=Integral membrane protein DUF6
  Pfam annotation: Domain name=TPT; Domain location=8-149; Score=-26.0; E_value=0.018; Accession=PF03151.7; Description=Triose-phosphate Transporter family
  Pfam module annotation: Pfam domain module=DUF6::DUF6::TPT; Domain location=16-149::191-321::8-149
MDDEWRPVMAMLVFNLISAVMTALVKKALQQGLNALVLITLRQLVATLFLAPIAYFKERNTRPKLTLEIFVYHFFSAALGASLSQYSFFYGLKLTTATFAITFANMAPVLTFLIAIALRVESLNMKSKSGSAKMVGTLMSLGGVLLLSLYKGMAVTHHSSGTPPPSQVQLGNDGDRKVWMLGTVALLANCLVFSLWLLLQSRLTNKYPALYSSTAFMFFISTLQTGSLTVTVEWHHASVWIVTKKLEMVTILYSGIMASAAGFLIMTWCVHKRGPVFTAAFIPIVQIMVAIIDFFFLHEQLYLGSVLGSALMIFGLYLLLWGKKKDAMAACSAEFRKAYSNFQFRVLISTFKQGPKTGYKNYYRFFL

SEQ ID NO: 49822 - protein, 131 aa, Zea mays
  Coding DNA Sequence Number=SeqID_8043
MDALCSIPHQLAADGVAAMLSAFPLLAPLPIHRYAVFSVQDLDLGIWFLRNAEPKLTVEILAYLHGHVTQHRRLRLSPASAPGFGSGSASDRLRDDDSRCRALALHLLFVFWKNLRGVMQIEELCATQFTR

SEQ ID NO: 49823 - protein, 136 aa, Zea mays
  Coding DNA Sequence Number=SeqID_8044
MGAYGMPSATNNPDASGQSFSEALKSSRKHLLQYDAFESADGGPGGKGAKKKTKKSKEHRIGGGGQCHVAAGMMRHGKGGKCRALCCGASRLSVSSSASCLILSSREQPSSGRRNPAPSYAAAAIPMLPIQLLSSG

SEQ ID NO: 49824 - protein, 301 aa, Zea mays
  Coding DNA Sequence Number=SeqID_8045
  Gene Ontology: Mol. function=carboxypeptidase activity; Cellular component=membrane; Biological process=auxin mediated signaling pathway
  Homolog annotation: Hit_ID=Q9LX06; Match level="QueryCoverage=91%, HitCoverage=93%, E-value=4e-58, Identity=39%"; Hit description =Putative MtN21
  Pfam annotation: Domain name=DUF6; Domain location=138-251; Score =6.8; E_value=0.027; Accession=PF00892.11; Description=Integral membrane protein DUF6
MVSVVVVFAVLNTLTKMAFNQGMHTTVLITLRQLTAFLFLAPIAYYRERKTRPKMTLEIFVYLFFSAVLGMEKLDLKTGAGIAKVIGTAVGFTGAIVLALYQGPSLTKPSPAQAAAAHHVLAHHQWAIGSVALLAGAACWSFWFILQSRLGKKYPALYSGNALMFLLSFLQMAAVGLATERKDLSVWILRTKLQIITVLFVQRGPVFTTAFTPLIQLIAGAINVVALHEQLHVGSALGSALVIAGLYFVLWAKTKEAASDAPPTTNIVKSKQATTEQGEMIDEVTRIYKEISLDVCFSLTM

SEQ ID NO: 49825 - protein, 153 aa, Zea mays
  Coding DNA Sequence Number=SeqID_8046
  Gene Ontology: Mol. function=lipid binding; Cellular component =anchored to membrane; Biological process=lipid transport
  Homolog annotation: Hit_ID=Q6ASY2; Match level="QueryCoverage=56%, HitCoverage=53%, E-value=7e-15, Identity=45%"; Hit description =Protease inhibitor/seed storage/LTP family protein
MARLGLLALAVAVLALASSVASQAPGPAPSTDCASALAYVQQGSTQGKPDRECCAGVKAALKSPATVACLCAAVAQNYGMPVNLTRGAGLPAACGEDHAALSKCNKPTASGTAPAVQSPGSSKSSSSAAAAIRSPVSAFAIVVAATLLSHCLL

SEQ ID NO: 49826 - protein, 34 aa, Zea mays
  Coding DNA Sequence Number=SeqID_8047
MATSPRSATALAVRAESAQEFAGPPAVPRFTIDT

SEQ ID NO: 49827 - protein, 433 aa, Zea mays
  Coding DNA Sequence Number=SeqID_8048
  Gene Ontology: Mol. function=RNA-directed DNA polymerase activity; Cellular component=nucleus; Biological process=regulation of transcription, DNA-dependent
  Homolog annotation: Hit_ID=Q7X970; Match level="QueryCoverage=75%, HitCoverage=13%, E-value=5e-28, Identity=28%"; Hit description=BZIP -like protein
  Pfam annotation: Domain name=zf-CCHC; Domain location=220-237; Score =6.7; E_value=0.079; Accession=PF00098.13; Description=Zinc knuckle
MANREDGFLDHREDEVADLLKGLILTAEEEEVADFSDEEDEGVPDASWALVGKVLSPTIVHATSIQGAMEPAWGNPAGLNIRMVGAKEENLFVAEFCFKQDMERALGGSPWVVGKHAVILHEYDERLKPSEISFDTLDIWVRILDLPLGWMNKLKGERAMGLIGEVKKMDVDGGGKASGPFLRARVAIEVSKPVRRGVKLKTKKDGSPEWFEVQYEKLSFYCLACGIIGHSQLNCDKPLVRNAEGKLPYDVNLRVFEPRRRKMQSFSEAAAESFGRESSSHSKREQAMGDSGGSGSSDAHKDKVNQEENREVPGPQFDDSRVGKGQASNPLNARHVMFKKSSEGNRGLPRKRKSKMSEPGSDNSPGHSQLPMNNMAIVPADSVSIQVNQLFDDEGDGDPPVVPDELSKKQKKEYSQPKARSVAAAMGSPRRAQ

SEQ ID NO: 49828 - protein, 125 aa, Zea mays
  Coding DNA Sequence Number=SeqID_8049
MTGESEVYSNQAKSLGRRDRQGQAKALPNVSSFKNLPYWCAPHTIATAEQAMAKQDVFSFDFVGANLTTGLKSLPEAEVKASEQTRTCFIAQSGGDECEGNFPRELRIILIREEKRSKMDQGTKP

SEQ ID NO: 49829 - protein, 303 aa, Zea mays
  Coding DNA Sequence Number=SeqID_8050
  Gene Ontology: Mol. function=microtubule motor activity; Cellular component=microtubule associated complex; Biological process =microtubule-based movement
  Homolog annotation: Hit_ID=Q6WJ05; Match level="QueryCoverage=75%, HitCoverage=25%, E-value=8e-79, Identity=66%"; Hit description =Central motor kinesin 1
MNRPVKPSGPGALSEAREVSVWSFAMKFFFLKRACWWKKEVLAIPLPKAFTEALQLKEKALNRAVHIRSMCKGYGPQTIEEKQKLYTLLRSLNVNGGLASASISEPYTSTGQSFAGGAPVDGFYSPELRGEFGAGLLDLHAMDDSELLSENAASEPFEPSPFMPKEMDDDDYDVIAENQQGLVDNQSAFTNEKENTVVSARESNVAKIKVVVRKRPLNKKEVSRKEEDIIDVHNSQFLTVHEPKLKVDLTAYVEKHDFCFDTVLGENVTNDEVYRETVEPIIPLIFQRTKATCFAYGQTGYIS

SEQ ID NO: 49830 - protein, 152 aa, Zea mays
  Coding DNA Sequence Number=SeqID_8051
MGMGMGVNPYPPVYMGDPMSFFFVVGMGMRDENGTDTGGYRVIPYPTLMYFSRIQDQLQFCFRLGHISLMGHIEPAESTVADQTANAQGKMHRQASYPNVFYPYPTQGIRVVASVNINLNSLHWYESDQPYARTVQTYAVAPPGLFICRATT

SEQ ID NO: 49831 - protein, 71 aa, Zea mays
  Coding DNA Sequence Number=SeqID_8052
MAIFFNIPITFNTGEIFCFGSLSCIADQKGILHRIVDPFRKKSSQVAPKGLHFCEEQVDPEEDYYDEFDEV

SEQ ID NO: 49832 - protein, 100 aa, Zea mays
  Coding DNA Sequence Number=SeqID_8053
MGGEPSRIYTPPEDIPGSKQSGETPPFTIRGTSARVSKSSPHGGSAVLHPAAHKDRSTQCLWVCDLWTASVKGCGSPESYSARVAAISERSQQPRSWRRA

SEQ ID NO: 49833 - protein, 86 aa, Zea mays
  Coding DNA Sequence Number=SeqID_8054
  Gene Ontology: Mol. function=ATP-dependent helicase activity; Cellular component=nucleus; Biological process=mRNA processing
  Homolog annotation: Hit_ID=Q56XG6-2; Match level="QueryCoverage=81%, HitCoverage=47%, E-value=1e-28, Identity=68%"; Hit description =Isoform 2 of Q56XG6
  Pfam annotation: Domain name=Helicase_C; Domain location=2-60; Score =30.1; E_value=7.9e-06; Accession=PF00271.21; Description=Helicase conserved C-terminal domain
MYRSPCGFDRLTRYKNFKEGHKRILVATDLVGRGIDIERVNIVVNYDMPDSADTYLHRVQERFEVDIKELPEQIDTSTYTLRMGDD

SEQ ID NO: 49834 - protein, 121 aa, Zea mays
  Coding DNA Sequence Number=SeqID_8055
MALFVKRFNELMKKKKGQPRKDASSDDDDDTSSKLNAGFAIKDAPSLFSSPHCLMASGGTKGWQLGGLDTDIWFVNPYPRDKAQPILVPIYVHEYGSVPIPILVGYPLPSGYPLPARLLQF

SEQ ID NO: 49835 - protein, 246 aa, Zea mays
  Coding DNA Sequence Number=SeqID_8056
  Gene Ontology: Mol. function=ATP-dependent helicase activity; Cellular component=nucleus; Biological process=mRNA processing
  Homolog annotation: Hit_ID=Q56XG6; Match level="QueryCoverage=99%, HitCoverage=60%, E-value=1e-119, Identity=90%"; Hit description=DEAD- box ATP-dependent RNA helicase 15
  Pfam annotation: Domain name=DEAD; Domain location=24-154; Score =91.6; E_value=2.4e-24; Accession=PF00270.19; Description=DEADDEAH box helicase
MSASLKLFLEWMSSVKQNLEWQIDPVAGQVAALVLCHTRELAYQICHEFERFSKYLPELRVAVFYGGVHIKNHKDLLKNECPHIVVGTPGRILALARDKDLPLKNVRHFILDECDKMLESLDMRRDVQEIFKMTPHDKQVMMFSATLSKEIRPVCKRFMQDPMEIYVDDEAKLTLHGLVQHYIKLSEAEKNRKLNDLLDALDFNQVVIFVKSVSRAAELNKLLCECNFPSICIHSGMTQEERSVIY

SEQ ID NO: 49836 - protein, 225 aa, Zea mays
  Coding DNA Sequence Number=SeqID_8057
LIRFLAAPEAKVAVEIEELPPMGVEEAKIREVIALIAQRVKPLQPLSESEEEVEGERIARVMSSFFEADEDEAKKDIAGTTLALKDSMLPATDRTGPSNLGFEWITVVVTPSAIMVAEGSSKPTLAEDKGKGSAKFEVVEKAIKDDTPLGEGPFDQDLGGRRYQVHHVVGKMMGTKQLAKAIGFAEQLGPEHFGVLLGFSSASKGKSGLCGGNGEKIDFWIILIP

SEQ ID NO: 49837 - protein, 86 aa, Zea mays
  Coding DNA Sequence Number=SeqID_8058
MSLTPSSNVPETRAKELALAARAIATRVEAGSTNLSQDSDTVDIEENTIIRPMKPSHVDFGKSKIKGGHIEYLIVSVMLTMSSGCN

SEQ ID NO: 49838 - protein, 187 aa, Zea mays
  Coding DNA Sequence Number=SeqID_8059
MADYRVLAMHCPLTLAPYVHSRATEGGRRRGSRRCSAAGEDQLDSAAGDQAWTESEMWVSASLSTMASSTASSISRLRSSRWTLTARASLGRGDAGRERISGTGWHWPRAFLRTRQWRAGGLVRERQGAVAAMCVFGGEHVRDDAGLFAQKKRGRNPTARPIYGPIHDSDNLEDVVGKVEDIENKIF

SEQ ID NO: 49839 - protein, 42 aa, Zea mays
  Coding DNA Sequence Number=SeqID_8060
MASQQLFLAQQQDGDSDIGRVVWLCFAKEGVTVAFTFVKGQE

SEQ ID NO: 49840 - protein, 89 aa, Zea mays
  Coding DNA Sequence Number=SeqID_8061
  Homolog annotation: Hit_ID=Q53M47; Match level="QueryCoverage=62%, HitCoverage=5%, E-value=8e-11, Identity=53%"; Hit description=HAT family dimerisation domain, putative
MDKFLIKNQKKDVSNYKIIRTNESRVEQKRPCIELDMNDIVADPGLRKPIDEFPHEIRDDAKRVYLQMGPCQPFGHTFPRTPASKNQQL

SEQ ID NO: 49841 - protein, 476 aa, Zea mays
  Coding DNA Sequence Number=SeqID_8062
  Homolog annotation: Hit_ID=Q6CML6; Match level="QueryCoverage=50%, HitCoverage=72%, E-value=6e-08, Identity=21%"; Hit description =Similar to sp|P53155 Saccharomyces cerevisiae YGL082w
MHVATCMYALTEQLKEMKELGAPLAQAQPHNLGENYWCREPADDDGTLPTTIVHIPFHCFASCGHSKEVCPDHWHFCGSPPRVRMSGDTERRRSATGRKSTVSRYKVVKFDLSKTIQSEKFEDRRTWGIFVEGRNAVSVLVAINNVSTFIHGRNLDWRCVDTFDEQYMKDKIRSLITDRQRLSQIRKEVQSIPEDDMKAFFDVISNIRKFTLSPRLTGPSAFEVNQPYMLLCHLFTPVFHGWVVSPELSSYDAIKGFTRDELIQYCNALIALEGESDNVRVIRDLLNDSDQLLTAYGFDCLVQEMRDDKFGLFFWRSRYDVIHKHDGDLFLLVSDERVRSEMPQATWMLFEQSPESSIYFTSEYLPVENQYSIDRAREWHQQKLQQKTSSSLETVKKAKKKRKNKKSAMASKEIPEQGGPNVEDVVVAVSISAELRNEGQPTTTREMDNPKQGGLNVEDVVAAVSVSDEPTREIFN

SEQ ID NO: 49842 - protein, 151 aa, Zea mays
  Coding DNA Sequence Number=SeqID_8063
  Pfam annotation: Domain name=DUF630; Domain location=33-92; Score =104.4; E_value=3.4e-28; Accession=PF04783.3; Description=Protein of unknown function (DUF630)
MTWGEPLVGLFALKVRLLAEAGRRIKVLEVLLMGSSSSKVDNEEPVRRSKDRRRLMKQLVRRRPELAAAHIAYLHALRNTGATLRQFVELESALSQQPPVGLAAPPSPTPQSLPQPQPPPPPEPSLPPSPHPPPPLPFSPVTTIRKMEKRD

SEQ ID NO: 49843 - protein, 238 aa, Zea mays
  Coding DNA Sequence Number=SeqID_8064
  Gene Ontology: Mol. function=RNA-directed DNA polymerase activity; Cellular component=nucleus; Biological process=RNA-dependent DNA replication
  Homolog annotation: Hit_ID=UPI00004C1732; Match level="QueryCoverage =96%, HitCoverage=13%, E-value=8e-37, Identity=38%"; Hit description =UPI00004C1732 related cluster
MPLMLKASIAYDRRDHPSSIPHPGTYPRAAETIVGPKRLSKVLMDGGSRLNVMYIETFDTLGIALSALHPSTVLIYVITPDHSACSLEQIVLPVTFANPSNFRTEQLQFELNFLGAYNTILGRSGYVKFMVIPNYTYLKLMMSGPHGVITASASFQAVYVCEKASCELASAQATARELVELWRGIDSRDGSDAPNVSSDIQMRRGHEGRSDRQRRHLQACKNRGDTLHKQEGALIDFL

SEQ ID NO: 49844 - protein, 705 aa, Zea mays
  Coding DNA Sequence Number=SeqID_8065
  Gene Ontology: Mol. function=protein transporter activity; Cellular component=cytoplasm; Biological process=intracellular protein transport
  Homolog annotation: Hit_ID=Q6K437; Match level="QueryCoverage=92%, HitCoverage=100%, E-value=0.0, Identity=53%"; Hit description=Myosin heavy chain-like protein
MGWASRRGKHYGPASRRWHLSSNYSQPSRDNLSTLTAAAWRSHQTHIQMEMAETLHVLPDDGNGSAAVQTEPYCHEDAIEDMESFLDEVNDRVHVSGIVTGAIIKGILSDVRQEAASQIALKDAEISSLNQKLQQPVNGSLSLSEGRDKRHDEFYSLRQQLDSISKSLLNSEWGLSGSQHNFEDSENASKQQDKENSSRNGVAKTIHPGDSKEEVFGDPKLLDHMDKVALIAHFNKSMNEMKRQHDSVLYQRTEEIFKLKREILKKDGSNPFHLRNNKELEQTRKKIEEVISKLDVLLLENKRASVRIKSNAIPGQQDKNNVLGSEIEQLESGASNNEDYHCSIPTHSSHFASREADHELNIVRPQFDVEDARIAATFREEIERIIIKEFISEINIELHGYEIEGGMKQEVCSIIHNEAIARAMSNIDSLLLKYEEKKGHAEEESLHKQKIEKLKLIVDSFTEVLSEKEKFVSQIGLEAMQTRVESMCCELDLLRDKVAKQDSYLSEKNREFDAIMCRLEQAQQHVQHNDVTLVELNDRLRTISNSLKDLEKQNQALHYAMEEKEKMLTSAVSKDNDMREFMENLVKSIKDFEIVMMNQQAVVANKVDHHESRFCLLKEQCKHLAKEGNLLRKKALRYKEISETRDSNLQKAELEVDLLGDEVEALTDLLAKIYTALDHYSPVLQHYTGVMETLSMIKKHISMAK

SEQ ID NO: 49845 - protein, 274 aa, Zea mays
  Coding DNA Sequence Number=SeqID_8066
  Gene Ontology: Mol. function=catalytic activity; Biological process =metabolic process
  Homolog annotation: Hit_ID=Q01FH7; Match level="QueryCoverage=73%, HitCoverage=34%, E-value=3e-22, Identity=35%"; Hit description=[I] KOG1176 Acyl-CoA synthetase
MAAPRHRQGHIAQCLGRILACRGSATAAVAAGPGGRRLTGAEFVDGVRSLAAGLADRGRRVRAAVPRVTYAGAIIAPLNYRWSFEEAAQAVELVRPTAFAFDGAFSSWALRLMEGDRFPSIGLYLLLGDPCRTGRAAAGCAVPITDVTGSLGGATAAAAMEPVSAPDDIALICFTSGTTGRPKGVAISHTSLIIQSLAKIAIVGYGEDDVYLHTAPLCHIGGVSSCMAVLMAGGCHVLAPKFDARSAFAAIQEHGVTCFITVPAIMADLLSYAR

SEQ ID NO: 49846 - protein, 690 aa, Zea mays
  Coding DNA Sequence Number=SeqID_8067
  Gene Ontology: Mol. function=binding; Cellular component=thylakoid; Biological process=photosynthesis
  Homolog annotation: Hit_ID=Q84UQ9; Match level="QueryCoverage=99%, HitCoverage=81%, E-value=0.0, Identity=63%"; Hit description =Putative pollenless3
  Pfam annotation: Domain name=TPR_1; Domain location=127-160; Score =3.0; E_value=2.3; Accession=PF00515.18; Description=Tetratricopeptide repeat
  Pfam annotation: Domain name=TPR_1; Domain location=223-256; Score =32.4; E_value=1.6e-06; Accession=PF00515.18; Description =Tetratricopeptide repeat
  Pfam annotation: Domain name=TPR_2; Domain location=127-160; Score =6.1; E_value=6.4; Accession=PF07719.7; Description=Tetratricopeptide repeat
  Pfam annotation: Domain name=TPR_2; Domain location=223-256; Score =25.5; E_value=0.00018; Accession=PF07719.7; Description =Tetratricopeptide repeat
  Pfam module annotation: Pfam domain module=TPR_1::TPR_1::TPR_2::TPR _2; Domain location=127-160::223-256::127-160::223-256
  Subcellular localization annotation: CTP_CleavageSite=98; ConfidenceScore=5.60e-01
MPSGGRRLPPWTSPRSAGAPMWSTAGTPGGPRPGPGYGTPPVSAGCFGTRVTPPTSGGTRVTPPTSGGAGARVTPPSTGGCSSRPPRPPPSMDSPYVRAKQAQIVEKDPNKAVPLFWAAINSGDRIESALKDMANVLKQANRSEEAIEAIRSFRDRCPYEAQESLDNILLDLYKKCGRTDEQIEMLTLKLRIVDEELASGRWKTKLSKSHGRVVYLSLRDEKARLLGNLAWAYMQSENYEEAEMLYRQALAIEADYNKECNLAICLMKTGKLAEAKYLIHAIPYNCNDESHVKSLSRATEMLREFDLQSLPSPITQAKSKEPRNFVADDVEMLVDLQPQTLSTPFSELKYKEAHISVSQNAEKHENCNSCLPSPITQLRREEPHTMVTADAEKNEGFAEFQDLSRLFNDAATPHSVLEKLRKRLVKEAPKVSIHDQIQTPPTESLPNSERNLDASETSVQEGKLLTKGVRKTWSDMVDEEEQQLGDDKPWADMVAKDDQQLGDGKSTHGVGITEQNESSKHASKLEYRTPSSSQESRTHQRPVMGGQLQGSSAGSWRRSDSKIYMDKNVNWDLVRTAPTWSRHKVHDHNNRVWQRLHTIHPRERASGTKQVPRRSNTSQRALFPDWKSKGEGYGHGYVPFDDNEHTQCSSHIEAATHRWHNNEASTGSWRPQNRLRVFQEITNEINQNVV

SEQ ID NO: 49847 - protein, 97 aa, Zea mays
  Coding DNA Sequence Number=SeqID_8068
MAGRLGEAVHAASRRKGSPARNPRGHSKVLLDFPLLPPLRCQFEFRVATMEDEPHWGRLSAAAVDSLCVERGGAGVGVAWGQRSKGARADEVVCRYL

SEQ ID NO: 49848 - protein, 120 aa, Zea mays
  Coding DNA Sequence Number=SeqID_8069
MAPGRAFLRARSESPSMAAAPPPRQIREYFHPWRETVAPPPRLPQHSIHGAPSALAPALCCPPPPPPFSSLAPPLSAVRSLASSTESWASGSTVMDWVSLVVAEMQRDDGFSLLIYAWKS

SEQ ID NO: 49849 - protein, 285 aa, Zea mays
  Coding DNA Sequence Number=SeqID_8070
  Gene Ontology: Mol. function=transcription regulator activity; Cellular component=nucleus; Biological process=regulation of transcription
  Homolog annotation: Hit_ID=Q84QW1; Match level="QueryCoverage=65%, HitCoverage=46%, E-value=3e-52, Identity=64%"; Hit description=BHLH transcription factor(GBOF-1)-like
  Pfam annotation: Domain name=HLH; Domain location=164-214; Score =29.7; E_value=1e-05; Accession=PF00010.16; Description=Helix-loop -helix DNA-binding domain
MDSDYVASLLMGMGSSAPALDFAALDAGFLETLCGGGGGLFGVSGVAAGAGCGGVSPEGSSVSDPAWARARGDDNVRKRKAPPTGSAGGKEACPGKAAEAKGPDGKRCRVGGSDSPVKPKVEEVAASDASVELKAQKKGKGKTAKPAVEPPKDYVHVRARRGQATDSHSLAERVRREKISQRMKFLQDLVPGCNKVVGKALMLDEIINYVQSLQQQVEFLSMKLATVNPQLDFSNLSTLLHKDQRDFWEDGLQNALPTGSEQRQEEDGLLVPNFDGVVIKCKKLI

SEQ ID NO: 49850 - protein, 127 aa, Zea mays
  Coding DNA Sequence Number=SeqID_8071
  Subcellular localization annotation: CTP_CleavageSite=70; ConfidenceScore=5.01e-01
MVFGLLAHNRGERQSAMGVAVGCQIHRSGHDAKAFPPCCSSRRRVHRSRRRTADRGVSLTATSARRPEVSSAPATELEIIPAWSRALLLAWSRRVLWLSSNVVWGDYVATLVVERCAGRRRPAGDQA

SEQ ID NO: 49851 - protein, 290 aa, Zea mays
  Coding DNA Sequence Number=SeqID_8072
  Gene Ontology: Mol. function=GPI anchor binding; Cellular component =membrane; Biological process=auxin mediated signaling pathway
  Homolog annotation: Hit_ID=Q84QW4; Match level="QueryCoverage=57%, HitCoverage=62%, E-value=6e-46, Identity=56%"; Hit description =Putative auxin-induced protein
  Pfam annotation: Domain name=DUF568; Domain location=99-215; Score =55.7; E_value=1.5e-13; Accession=PF04526.4; Description=Protein of unknown function (DUF568)
MAYATQHRRRAILVLAAIALLLVSPIAAAAAVAAGCEGDKLPAGRIYAHCAALPSLGARLHWTYDAKTGSLSVAFVAKPAGAGGAGWVSWAINPAGEGMKGAQALLALKSPAAPSSSYVVNTYNVTGYTALGAASTPIAYRAAELAADESGGGEVRIYGKLQLAPGLEKVSHIWQVGSTVANGAPVKHAFDTANLQAKGTLVLSGAALPVEAAPAPAPVGSGGASPAKGGGDSGAAPSTGGTSNSAAAKATTYVCVSVLTLLAAALAGSLAILLDEIRSTFDISSICYAI

SEQ ID NO: 49852 - protein, 155 aa, Zea mays
  Coding DNA Sequence Number=SeqID_8073
  Gene Ontology: Mol. function=structural constituent of ribosome; Cellular component=intracellular; Biological process=translation
  Homolog annotation: Hit_ID=Q45NI6; Match level="QueryCoverage=99%, HitCoverage=100%, E-value=9e-58, Identity=75%"; Hit description =Ribosomal protein L32
  Pfam annotation: Domain name=Ribosomal_L32e; Domain location=14-145; Score=175.7; E_value=1.2e-49; Accession=PF01655.8; Description =Ribosomal protein L32
MAVPLLTQKIVKKRVKQFKRPHLDRYKCLKLEMSLAQYCTSLAKCSLLLAMLPSWRRPKGIDSRVRRKFKGCTLMPNIGYGSDKKTRHYLPNKFKKFVVHNVSELELLLMHNRTYCAEIAHNVSTRKRKEIVERAAQLDIVVTNKLARLRSQEDE

SEQ ID NO: 49853 - protein, 212 aa, Zea mays
  Coding DNA Sequence Number=SeqID_8074
  Gene Ontology: Mol. function=DNA topoisomerase type I activity; Cellular component=chromosome; Biological process=DNA unwinding during replication
  Homolog annotation: Hit_ID=Q9SKZ9; Match level="QueryCoverage=72%, HitCoverage=18%, E-value=2e-65, Identity=70%"; Hit description =Putative DNA topoisomerase III beta
MVGPDAKSFPLCPFCYNCPPFEGIDKLFGALKLDDTGKVGKGAGMPCFLCPHPTCKQSMITQGVCACPECSGTLILDPVSAPKWRLYCNMCNCIVLLPHAAHRITTTDKKCLTCESTIIEVDFNKKTTPLQDGATLHEGCILCDDLLHSLIEMKHGSEGTAIMTTTCVSFEFGLGRTRQVMMKHEHVCFFVTAAKTAPALEHRNFTGISSKT

SEQ ID NO: 49854 - protein, 219 aa, Zea mays
  Coding DNA Sequence Number=SeqID_8075
  Homolog annotation: Hit_ID=Q2QXQ7; Match level="QueryCoverage=30%, HitCoverage=48%, E-value=2e-09, Identity=48%"; Hit description =Expressed protein
MPHKARIRTCCCILGFCSALHDPIIIHPTSVPAIERGLHRFERHLENAPHGMGIDTPPPKSRCDGRYTWEGLGVIVEGQLNPAPPTIDPNYEVVKEGGAIDDEVAREVVVEEVKIAKVAESKDDVARGPCLLSQPAVLSTMDRPQVAAWCREQHASIMKIVLICVFDLPFFSVLEGKLRGYNNVNDAYLLLRMNHELPEYVSHSVIEKDPKATLNREHD

SEQ ID NO: 49855 - protein, 162 aa, Zea mays
  Coding DNA Sequence Number=SeqID_8076
MPHARAHTAAVVGRAGLGPGMARRGVARQGMDLTDVGVMVEPVHGVRQICRGGKRKDDPYLYAWDRLGAGKVRDDEGRLCEFLALHAESIVDERGSDEVDPPVSENKGVRTIGMQAAKIGAQMAVVACGNAGVRDPRAATQRRAGARAGCDSRGETRPRERE

SEQ ID NO: 49856 - protein, 232 aa, Zea mays
  Coding DNA Sequence Number=SeqID_8077
  Gene Ontology: Mol. function=nucleoside-triphosphatase activity; Cellular component=intracellular; Biological process=two-component signal transduction system (phosphorelay)
  Homolog annotation: Hit_ID=Q69XZ5; Match level="QueryCoverage=80%, HitCoverage=24%, E-value=1e-81, Identity=82%"; Hit description =Putative transcriptional regulator
MAGRGSLAGLLPFGDANDIVLQMANEVLPVVKGVPVLAGVCATDPFRRMEYFLRQLETIGICGVQNFPTVGLFDGNFRQNLEETGMSMEVEMISMAHRMGFLTTPYAFNPDEVAAMAKAGSHIVVAHMGLTTAGSFGAMTATTLDDSVLRVQAIADAAFGVNPDIIVLCHEGNLVKIVIPRSNPNDAHVAGVGKFLMFPRELQLSGESVKLMKLGEAVAKGTINNETLGYFT

SEQ ID NO: 49857 - protein, 76 aa, Zea mays
  Coding DNA Sequence Number=SeqID_8078
MGGLVGADVAPPVVEVRAGMQRRDMDELRLGRAWDRRLWRAAMAGGCNRRPAAELVGQGPRRGHGGAAAMDRLAGG

SEQ ID NO: 49858 - protein, 680 aa, Zea mays
  Coding DNA Sequence Number=SeqID_8079
  Gene Ontology: Mol. function=nucleic acid binding; Cellular component= beta-galactosidase complex; Biological process=DNA integration
  Homolog annotation: Hit_ID=Q8W0X4; Match level="QueryCoverage=94%, HitCoverage=41%, E-value=0.0, Identity=89%"; Hit description =Putative pol protein
  Pfam annotation: Domain name=RVT_2; Domain location=229-484; Score =536.1; E_value=3.8e-158; Accession=PF07727.4; Description=Reverse transcriptase (RNA-dependent
VYLHRLLKKTSYELLTGNKPNVSYFRVFGSKCYILVKKGRNSKFAPKAVEGFLLGYDSNTKAYRVFNKSSGLVEVSSDVVFDETNGSPREQVVDLDDVDEEDVPTAAMRTMAIGDVRPQEHLEQDQPSSSTMVHPPTQDDEQVPQVEACDQGGAQDDHVMEEEAQPAPPTQVRAMIQRDHPVDQILGDISKGVTTRSRLVNFCEHYSFVSSIEPFRVEEALLDPNWVLAMQEELNNFKRNEVWTLVPRPKQNVVGTKWVFRNKQDEHGVVTRNKARLVAKGYAQVAGLDFEETFAPVARLESIRILLAYAAHHSFRLYQMDVKSAFLNGQIKEEVYVEQPPGFEDERYPDHVCKLSKALYGLKQAPRAWYECLRDFLIVNAFKVGKADPTLFTKTCDGDLFVCQIYVDDIIFGSTNQKSCEEFSRVMTQKFEMSMMGELNYFLGFQVKQLKDGTFISQTKYTQDLLKRFGMKDAKPAKTPMGTDGHTDLNKGGVSLSGSEANLRYLVATPCFGLWYPKGSTFDLVGYSDSDYAGCKVDRKSTSGTCQFLGRSLVSWNSKKQTSVALSTAEAEYVAAGQCCAQLLWMRQTLRDFGYNLSKVPLLCDNESAIRMAENPVEHSRTKHIDIRHHFLRDHQQKGDIEVFHVLVLDAKGPKLIPFWCLMPKGEKIKAKAINGSATT

SEQ ID NO: 49859 - protein, 120 aa, Zea mays
  Coding DNA Sequence Number=SeqID_8080
MSAYSRAAQSRLRRGICRGTRRDQRETRPGELERARRSASTTARSGHELGCSPAALWLDDGTEGDDANDKLRRKREEKRLTRMGISLKTGRGGFWCSAVVDMSGATKAMCCVGRGREERG

SEQ ID NO: 49860 - protein, 120 aa, Zea mays
  Coding DNA Sequence Number=SeqID_8081
MSAYSRAAQSRLRRGIRRGTRRDQRETRPGELERARRSASTTARSGHELGCSPAALWLDDGTEGDDANDKLRRKREEKRLTWMGISLKTGRGGFWCSAVVDMSGATKAMCCVGCGREERG

SEQ ID NO: 49861 - protein, 78 aa, Zea mays
  Coding DNA Sequence Number=SeqID_8082
MAGSQASSQPFQSAMRMRVAVPGGCDCEAHGDAWSPLTGDVVDHVGRSGRSCGIKWAAGLRHFSLILEMGVLFGFNRF

SEQ ID NO: 49862 - protein, 125 aa, Zea mays
  Coding DNA Sequence Number=SeqID_8083
  Gene Ontology: Mol. function=transporter activity; Cellular component= mitochondrial inner membrane; Biological process=transport
  Homolog annotation: Hit_ID=Q5W6Y0; Match level="QueryCoverage=94%, HitCoverage=32%, E-value=2e-25, Identity=58%"; Hit description =Putative mitochondrial carrier protein
  Pfam annotation: Domain name=Mito_carr; Domain location=33-125; Score= 55.5; E_value=1.7e-13; Accession=PF00153.17; Description =Mitochondrial carrier protein
  Subcellular localization annotation: CTP_CleavageSite=47; ConfidenceScore=5.57e-01
MPGDVATSPAPAPPSVSSSSQNHHHHGPTTARGLLCHAVAGASAGVVAATFVCPLDVIKTRFQLLLPNLLKYQTMRTTEMLQGSVIIGSLQQIAQREGFRGMYRGLSPTVLALLPNWAMEVINFL

SEQ ID NO: 49863 - protein, 101 aa, Zea mays
  Coding DNA Sequence Number=SeqID_8084
MGGGHEEQEGGGAKAGGYSSGLPPSEPPQEYGYGTFQGPRHPPVGFPQPAPPPGFGGGGGYHNQQQPYAHAETYYAQGYQAVPGLGSGTAGDGRASRVGAP

SEQ ID NO: 49864 - protein, 579 aa, Zea mays
  Coding DNA Sequence Number=SeqID_8085
  Gene Ontology: Mol. function=protein serine/threonine kinase activity; Cellular component=nucleus; Biological process=protein amino acid phosphorylation
  Homolog annotation: Hit_ID=Q67C40; Match level="QueryCoverage=91%, HitCoverage=96%, E-value=0.0, Identity=69%"; Hit description=Mitogen- activated protein kinase 7
  Pfam annotation: Domain name=Kdo; Domain location=14-174; Score= -86.1; E_value=0.074; Accession=PF06293.4; Description=Lipopolysacchar ide kinase (Kdo)
  Pfam annotation: Domain name=Pkinase; Domain location=10-300; Score =296.2; E_value=6e-86; Accession=PF00069.15; Description=Protein kinase domain
  Pfam annotation: Domain name=Pkinase_Tyr; Domain location=10-298; Score=30.2; E_value=2.5e-14; Accession=PF07714.7; Description =Protein tyrosine kinase
  Pfam module annotation: Pfam domain module=Kdo::Pkinase::Pkinase_Tyr; Domain location=14-174::10-300::10-298
MESFSDADRYIPQEIIGRGSYGVVCSAIDRRTGEKVAIKKIGGVFDDLSDAARTLREIKLLRLLRHPDIVEIKHVMLPPARRDYKDIYVVFELMEADLHQVIKANPDLTTEHHQYFLYQMLRALKYMHAANVYHWDLKPKNILLNADCKLKICDFGLARVAFDDSPTTVFCTDYIATRWYRAPELCGSFFSKYSPAIDMWSIGCIFAEILTGEPLFPGKNVFHQFTLMTNLLGTPSTDTISQIQNEKARKFLSCMRKQPIPFSEKFPGADPSALKLLQRLLAFDPKDRPTAEEALADPYFEGIGEVEREPSCQPIPKMEFEFEEKFTEEDVKELIFLEILQYHPQLLKDYKNSSEKTSFLYPSAVDKFHRQFTSLEENRGSNVMLVRKNASLPRTTTVHSTPIPAKEGPTATSQAAQRIPAARPGRVVGPVLPFESASVTDQHIARQVARNPAVPPATNTSSAYCYHLKPDSADRQEQQLELEEDHMQYRTGQHPMDAKGLAQSDLTDRANLHRSPLHGVAPFKGVAAVAGVLHRKSEGCPMTGMLDELQQICNGMVKLVQLTLGLELMFLNSKEFLEA

SEQ ID NO: 49865 - protein, 178 aa, Zea mays
  Coding DNA Sequence Number=SeqID_8086
  Homolog annotation: Hit_ID=Q8S8J6; Match level="QueryCoverage=53%, HitCoverage=14%, E-value=2e-07, Identity=30%"; Hit description =Putative myosin heavy chain
MSKNQLLEQEVKELTDKCSEHQEQAHLVQQRSLELEDLLHTSKTHAEGAYSRTQELEQELNSTYEKLKGVEEEREQYRSKASQLSNDLEAYQTKAASLEAVVEAAKYEAKLEESLKEKQSLEENLKEKRSLEESLQQELVKLREENEHHQNNIVDLNLQLSTNNDMHSQLETQLKEIN

SEQ ID NO: 49866 - protein, 593 aa, Zea mays
  Coding DNA Sequence Number=SeqID_8087
  Gene Ontology: Mol. function=RNA-directed DNA polymerase activity; Cellular component=intracellular; Biological process=RNA-dependent DNA replication
  Homolog annotation: Hit_ID=UPI00004C1733; Match level="QueryCoverage =96%, HitCoverage=42%, E-value=0.0, Identity=93%"; Hit description =UPI00004C1733 related cluster
  Pfam annotation: Domain name=RVT_1; Domain location=56-225; Score =144.5; E_value=2.8e-40; Accession=PF00078.17; Description=Reverse transcriptase (RNA-dependent
  Pfam annotation: Domain name=RnaseH; Domain location=455-581; Score= -9.5; E_value=0.00045; Accession=PF00075.14; Description=RNase H
  Pfam module annotation: Pfam domain module=RVT_1::RnaseH; Domain location=56-225::455-581
MPGIPRDVAEHSLDIRAGARPVKQPLRRFNEEKHRAIVEEIHKLMVVGFIKEVFHPEWLANPVLVRKKGGKWRMCVDYTGLNKACPKVPYPLPRIDQIVDSTAGCETLSFLDAYSGYHQIRMKESDQLATSFITPFGMYCYITMPFGLRNAGATYQRCMNHVFGEHIGRTVEAYVDDIVVKTRKASDLLSDPETTFRCLKAKGVKLNPEKCVFGVPRGMLLGFIVFERGIEANPEKIAAITNMGPIKDLKGVQRVMGCLAALSRFISRLGERGLPLYRLLRKTERFTWTPEAEEALGNLKALLTSAPILVPPAAGEALLIYVAATTQVVSAAIVVERRDEGHALPVQRPVYFISEVLSETKIRYPQIQKLLYAVILTRRKLRHYFESHPVTVVSSFPLGEIIQCREASGRIAKWAVEIMVETISFAPRKAIKSQVLANFVAEWVDTQLPAAPIQPELWTMFFDGSLMKTGAGAGLLFISPLGKHLRYVLRLHFPASNNVAEYEALVNGLRIAIELGVRRLDARGDSQLVIDQVMKNSHCRDPKMEAYCDEVRRLEDKFYGLEVNHIARRYNETADESGAPRPEVPSVVPLLLC

SEQ ID NO: 49867 - protein, 205 aa, Zea mays
  Coding DNA Sequence Number=SeqID_8088
  Gene Ontology: Mol. function=structural constituent of ribosome; Cellular component=ribonucleoprotein complex; Biological process =translation
  Homolog annotation: Hit_ID=Q943F3; Match level="QueryCoverage=99%, HitCoverage=100%, E-value=5e-92, Identity=81%"; Hit description=60S ribosomal protein L18a
  Pfam annotation: Domain name=Ribosomal_L18ae; Domain location=5-205; Score=387.6; E_value=1.9e-113; Accession=PF01775.7; Description =Ribosomal L18ae protein family
MVAHRFHQYQVVGRALPTPTDEHPKIYRMKLWATNEVRAKSKFWYFLRKLKKVKKSNGQMLAINEILSQALYRALSLSVMCVLGLLFGYFSNIFERNPTTIKNYGIWLRYQSRTGYHNMYKEYRDTTLNGAVEQMYNEMASRHRVRSPCIQIIKTATVHFKLCKRDNTKQFHNSEIKFPLVYRKVRPPTRKLRTTFKASRPNLFM

SEQ ID NO: 49868 - protein, 153 aa, Zea mays
  Coding DNA Sequence Number=SeqID_8089
  Gene Ontology: Mol. function=nickel ion binding; Biological process =protein complex assembly
  Homolog annotation: Hit_ID=Q6AUF3; Match level="QueryCoverage=79%, HitCoverage=86%, E-value=1e-36, Identity=92%"; Hit description =Putative urease accessory protein G
MASHDHHHSHSHDDHHHHSHGDGGGHAAGGSWVGEDGRVWHSHDGLAPHSHEPIYSPGDFTKRAPPLASRDFADRAFTVGIGGPVGTGKTALMLALCRFLRDKYSLAANLRRRDNPAGCRRAPTSQVKHGVGVEGIVNHILQAWEIATGNKRR

SEQ ID NO: 49869 - protein, 104 aa, Zea mays
  Coding DNA Sequence Number=SeqID_8090
MDAQPGRWPAWGAPQPIQPRLSRALLGDIAQGKERSSSQPTRSAAKPREGFNSLRLGLSTHPHYFYLLMLLEKSELNAHSSHPSSSGEGRALHGPVLGKLKVGI

SEQ ID NO: 49870 - protein, 107 aa, Zea mays
  Coding DNA Sequence Number=SeqID_8091
MHIGGWRRIVRRNNGTDAAGARPVSGVRLRVGGDGGDGVVASSLVGVDGTGSVVTTPLATAGRGCRGREAGVEVGLGVDGDGGIGVVALGLVGGDGADARRLLKLML

SEQ ID NO: 49871 - protein, 139 aa, Zea mays
  Coding DNA Sequence Number=SeqID_8092
MDTHRPPHFDSINFPYYDARIIGYLEAIDLGVWRVTRDKMKPPKNPDKLTANMYSRLNLVVNELNSVGINKLSDAIIMGQEEPTSSRPYAFTCEYHKNMKDKKMVESSSSSREEEKYEEEEDDEYDQPSTSSFEDGEII

SEQ ID NO: 49872 - protein, 79 aa, Zea mays
  Coding DNA Sequence Number=SeqID_8093
  Subcellular localization annotation: CTP_CleavageSite=28; ConfidenceScore=5.04e-01
MAASGIPQLRARRRTAAQPFGMPPRTLCCAKVSRDCSEHNGGSLTGACAAQSPGRDHARQRSGDLTPARKFIGFELATV

SEQ ID NO: 49873 - protein, 545 aa, Zea mays
  Coding DNA Sequence Number=SeqID_8094
MTENMSHIILEKKPLSYVAQSQIYAPRNSDAANPVIINRELKIGELDNSTRGWRSQPTISGICFYPYAPSKQPEQAFTLGNRMISHGLGWENYDIEHIPIPSGYAEWGTIILAKHSFNLRGDGEVDGEFYEEYVPSHHEREPSMLLYPKCLSQLLEDFSCLPNETRIGSCTIYWINWYRKFSEPFISVLTNLRCGCARGRVHYNDRKRLAEGKIIPRRLSPSDFVVIREVREEQHTKYIAFIKAREEVHSEINLMEDSSLQHVSTDNTSQKDSMDDQVYMQPEDNRKRRLSEDTLLCDSEESLTKRKLDFSQPIGGDNSTATLIPYPTITGNEDFVPSSSDVAQVGDGDDDVTNFCLTRREPPTCDVAQVGDGDDDVTNFCLIRREPPTSPFIDSCVDTIELAEDYSSFPCALPSAVNFSDIDSFLNGCDQLFENQPLDIISPVKIHPSMDTVATLEDLFLKTTRQALANVLDGLNAHTLRDPIRCASLCLASSCLTGQFASIARIKAMLDKLITISEQLQRTYSNFEVARKQDEQSCNTLNLGV

SEQ ID NO: 49874 - protein, 189 aa, Zea mays
  Coding DNA Sequence Number=SeqID_8095
MAENGECNGIAHTTNYAAEIPVHGRGRSTVLPPAPTSNSMLQRRRQAKETLAPAPRDHVDGSRTPNGEQVDGERPWARGGWEFYPGGGAFAFWGTKKRSGVPGDGAGSLLHVEARQLRGPRDHRSAPHARWARSARRRSREHRCEEEKADKWDPPASDVERREREGMRGGETDRWAPVDSRSRRWALLA

SEQ ID NO: 49875 - protein, 611 aa, Zea mays
  Coding DNA Sequence Number=SeqID_8096
  Gene Ontology: Mol. function=transporter activity; Cellular component= integral to membrane; Biological process=transport
  Homolog annotation: Hit_ID=Q9SCU1; Match level="QueryCoverage=66%, HitCoverage=94%, E-value=1e-139, Identity=61%"; Hit description =Patellin-6
  Pfam annotation: Domain name=CRAL_TRIO; Domain location=149-333; Score=77.5; E_value=4.1e-20; Accession=PF00650.10; Description =CRALTRIO domain
  Pfam annotation: Domain name=CRAL_TRIO_N; Domain location=44-135; Score=35.8; E_value=1.5e-07; Accession=PF03765.5; Description =CRALTRIO, N-terminus
  Pfam annotation: Domain name=EMP24_GP25L; Domain location=338-420; Score=16.5; E_value=0.02; Accession=PF01105.14; Description =emp24gp25Lp24 family
  Pfam module annotation: Pfam domain module=CRAL_TRIO::CRAL_TRIO _N::EMP24_GP25L; Domain location=149-333::44-135::338-420
  Subcellular localization annotation: CTP_CleavageSite=47; ConfidenceScore=5.50e-01
MSPTTTPPPAPVAAPTSKGAKRSLMSSLMDATALLRSSSFKEDSYVAAALPASELRALADLKALLATHPDPISIWGVPLNPRSPPAAADDAAPVDERADVVLLKFLRARDFRVRDAHAMVLRCAAWRAEFGADAVLDEELGFKDLEGIVAYMHGWDRDGHPVCYNAYGVFKDRDMYERVFGDGDRLARFLRWRVQVMERGVRALTLRPGGVNAIIQVTDLKDMPKRELRAASNQILSLFQDNYPEMVARKVFINVPWYFSVLFSMISPFLTERTKSKFVIAREGNVAETLYKFIRPELVPVQYGGLSRTGDLENGPPKPASEFTIKGGEKVFLEIDGIEAGATITWDLVVGGWDLEYGAEYVPAAEDSYTLCVEKTRMVSATAEEPVHNAFTAREAGKMVLSIDNSGSRKRKVAAYRYFVRKSSAGQLNDALEARPSRRAGGANPSRRHFLSHLSTLPPSELAGGMRSRWGDSVGSRLRLPASVLLECCWLAKALGEMVVLGLWSSRGSGTSQARPPRPPESTPRRRVAGDPRFGWAQAGSGAHETGARACVCGGGQRLASGGGCGWHDAAMAGVVTTATGYVIGGRGWAPPPLAVLGCDDLESGGVLRAS

SEQ ID NO: 49876 - protein, 115 aa, Zea mays
  Coding DNA Sequence Number=SeqID_8097
MSGAPPDSVRCTRGLQLELATFGNFAGRGAIIHRTVRCSKEARSPELASLGNAQQPLRYNSPDMSVMLDALIDSNPSSPLAIVFLLGRLRYTISCRITARPSRTAQNYYELNSFE

SEQ ID NO: 49877 - protein, 36 aa, Zea mays
  Coding DNA Sequence Number=SeqID_8098
MAESEVSIFPSLDSCSGRLDRGSLVSVLVGIKGIML

SEQ ID NO: 49878 - protein, 341 aa, Zea mays
  Coding DNA Sequence Number=SeqID_8099
  Homolog annotation: Hit_ID=Q5NA16; Match level="QueryCoverage=27%, HitCoverage=19%, E-value=9e-08, Identity=32%"; Hit description =Helicase-like protein
MACGVVAADFGSECGRIARGGARTRWMIPMEGCRRKGNGIYAEIPANLAEQTTPDIEEGRLHNISRFRVCAAKNAFKVFDGDKMIQFTFHTIVKRVIDPPTVFPKYVYRLTPFDQIESNIQTKPNFQGVYLSGGSACRWYFNPTILEAEPYHTSQQTRTIALQLPHALNHPPTIEHKQAVESKSLYDLIRINPYDFLKYRSKTNGGIQLAQNALKRQLHKIQFIIAMTITGTNTHSVQAQNLEQQGPSTPPNTSKLKLFKDSPSKLSMTTSTVVAKKLLYPTNDGTTKPPTNIDITDAENDDIDEGNIEVQTWTSTHQRKAEHQIFQELKIFSDYQQRFRL

SEQ ID NO: 49879 - protein, 555 aa, Zea mays
  Coding DNA Sequence Number=SeqID_8100
  Gene Ontology: Mol. function=protein transporter activity; Cellular component=cytoplasm; Biological process=intracellular protein transport
  Homolog annotation: Hit_ID=Q6FWE0; Match level="QueryCoverage=75%, HitCoverage=18%, E-value=7e-14, Identity=20%"; Hit description =Candida glabrata strain CBS138 chromosome D complete sequence
  Pfam annotation: Domain name=Tropomyosin; Domain location=289-504; Score=-111.2; E_value=0.028; Accession=PF00261.10; Description =Tropomyosin
MCRTAGVRTTIMDTVIYKHDDISQEGTLPFGETMNMGGSNVEILTRIELDIAFASEKLLNLEMLVMEIARQATDFEPSTLEDESISSEIAENALELDILYGILDAEVKELHNLISSLQADIKSIEHEVYEEESGGKVKTRMDAAKLSLKQMQELIADIQNESAKFEKVVEFSQDKEGTIEAVGCDNDHLSYQTGAQTEDQHRNVLHMLEQSIASEIDLEKKLSDSISVIEDLRLKLHHQEEEIYFLEESTETVSGRMFEAENASELLFGTSKELINRLNNMQFHVSEQKCTEDDLKSKLEQSLTKLSFLENSPEKVEKGSNKAGAGSPSLQDKIQELEKQLNESNLQLQLALASAETKQEEQNALQSELNTLENTIKNIKDDVSRAESRAQNAEIRCMELTVANIELNGELNALKSEKSDKASLLEKKLTESNTQLEHAKAAVDAIVEQQDLKGKVSKTETRAECAESKCTLLTDTNLELSEELAFLRGRVESLENSLREANHAKVSTAKDIGVKTKIITDLVRKLALERERLHLQVNAVQAVAFKQHGISKLSI

SEQ ID NO: 49880 - protein, 146 aa, Zea mays
  Coding DNA Sequence Number=SeqID_8101
MAKTTLAATTAHYGRAVELLRWARQDNGGADEEGDETGTTEGANELEEGLSNSFNSMGGEVDLELINLVRSKSFPNQGVFEAPLAKGSTAHLNQVQATGAYPDIPGSIWPMQIVGLHLSPIEVLKYEERLEGLPVLNPFNCLYGGH

SEQ ID NO: 49881 - protein, 169 aa, Zea mays
  Coding DNA Sequence Number=SeqID_8102
MAKELAMCSKLQFGLTHRTVSDGAPDTVRITYSPLPLGALTTSIRVVKGGLPISRQGLGPLLPDEVPSGSEIQTPPANSAAPAHARTVQPLDADHPSRQAGTRALCQVADCLIPGRGPSVPPQRALSLILTTVIGARIGTITMILNALASPPIKDWRRNPTNSGVSLTL

SEQ ID NO: 49882 - protein, 89 aa, Zea mays
  Coding DNA Sequence Number=SeqID_8103
MNTTKHIENPRKLNDMQNDLLPSLDMQNDLLPSLELVTKMIEDVELLEEKAKVAKRESSIAGTGILTKVEELREMLTHVKEANDMVLPS

SEQ ID NO: 49883 - protein, 99 aa, Zea mays
  Coding DNA Sequence Number=SeqID_8104
MDYKLPKATTQYGKLHGQRSSRLNQGSKSNKYNYKLEREQSALGVEEQVGYDWPYKINMTSNARWHLEKYTQSTRPLFFTTSGSRLCRPRQEPWTKVDK

SEQ ID NO: 49884 - protein, 102 aa, Zea mays
  Coding DNA Sequence Number=SeqID_8105
MGRLVGRNWKAVEASLTLSCRREECLPACHVIFFVVHPFQLGRERLNRCWSLLDAPVWESELELCGGPPPSELGANETSPGPWVPLAMGGGRSTKVFMIADQ

SEQ ID NO: 49885 - protein, 466 aa, Zea mays
  Coding DNA Sequence Number=SeqID_8106
  Homolog annotation: Hit_ID=Q9LK76; Match level="QueryCoverage=59%, HitCoverage=61%, E-value=6e-14, Identity=28%"; Hit description =Arabidopsis thaliana genomic DNA, chromosome 3, P1 clone: MDC8
  Pfam annotation: Domain name=IQ; Domain location=135-155; Score=25.3; E_value=0.00021; Accession=PF00612.17; Description=IQ calmodulin -binding motif
  Pfam annotation: Domain name=IQ; Domain location=157-177; Score=19.9; E_value=0.0091; Accession=PF00612.17; Description=IQ calmodulin -binding motif
  Pfam module annotation: Pfam domain module=IQ::IQ; Domain location =135-155::157-177
MGKAARWFRSLLGGGRKDQERQASPAPAPADRKRWSFARPSRDSAEASAAATEGFVRGAAGSAAIAEAAWLRSLDDDTGRRQSKHAIAVAAATAAAADAAVAAAQAAVEVVRLTSQGPAFGGGGVVLDLDPRGRAGAAVKIQTAFRGFLAKKALRALKALVRLQALVRGYLVRRQATVTLQSMQALVRAQATVRAARCGRALPSLQPRLHHPPARPRFSLQERHADDARSEHGVAACGRRLSASVAVESASYDRSPKTVEMDTARPRSRAPSLRTEDEWCAQPVSSPPPPCQQQHHHHLPPCIEVPTPRHFPDHGWCTPEKPRPATAQCTPRCAPPTPTPAAKTLCGGPASCLAASPSCPGYMSSTQSSEAKSSSRSQSAPKQRPARKRVPLSEVVVLQARASLGGAGGGAGTHIKPCNARAQAQAPDACDLRAAVVSRFEQRASEEDAAAAAERGRDVFFLQRRW

SEQ ID NO: 49886 - protein, 101 aa, Zea mays
  Coding DNA Sequence Number=SeqID_8107
MGKAARWFRSLLGGGRKDQERQASPAPAPADRKRWSFARPSRDSAEASAAATEGFVRGAAGSATIAEAAWLRSLDDDTGRRQSKHAIAVAAATAAAANKSI

SEQ ID NO: 49887 - protein, 548 aa, Zea mays
  Coding DNA Sequence Number=SeqID_8108
  Gene Ontology: Mol. function=DNA binding; Biological process =regulation of transcription
  Homolog annotation: Hit_ID=Q9FJU6; Match level="QueryCoverage=43%, HitCoverage=56%, E-value=3e-78, Identity=62%"; Hit description =Arabidopsis thaliana genomic DNA, chromosome 5, P1 clone:MIK19
  Pfam annotation: Domain name=NAM; Domain location=79-222; Score =188.5; E_value=1.6e-53; Accession=PF02365.6; Description=No apical meristem (NAM) protein
MNREHSSSSSSKLINEKLEEHRISTAKHCPHCGEKIDSKPFHPLRPQLASVPYYHETLGGATCFDGINCCNCKKDWVGLPAGVKFDPTDQELIEHLEAKVKDEGSRSHPLIDEFIPTIDGEDGICYTHPEKLPGVTRDGLSKHFFHRPSKAYTTGTRKRRKIQTDCDVHKGETRWHKTGKTRPVMVSGRQKGCKKILVLYTNFGKHRKPEKTNWVMHQYHLGDLEEEKEGELVVCKIFYQTQPRQSSWSAASDRGAATAMVAATTAAAQEQHRRDSGSGSCSSRDHEAVSATSFPAGYTVTTAVEMQQHMKQPAADHFSFAPFRKTFDQEVGIGGDQVPSNQLGRSETHHAGRGQQPHGPVLATTAVPATAFLISRPSNPVSTIVPPAMQHASVVLDNDQFHVPAILLHHHDKFQLLFHFDIIITKNMQQQPHQHQQEQTQQKLDRRSASAGLEELIMGCTSSTNTKGARPTGQREISLGPGVFAAKNMLQPDCKPRCLQSLIKRRIDPTYRSTRKLQLLTPKRQSGLTRTGHLITKIIMDSSDRTDK

SEQ ID NO: 49888 - protein, 94 aa, Zea mays
  Coding DNA Sequence Number=SeqID_8109
  Subcellular localization annotation: CTP_CleavageSite=70; ConfidenceScore=5.41e-01
MSEQTQKGGPSGYNSGTDPKPPSSGQDCGRSGPKARTVRSAKEHRVNTNGQTSDPLKDRGRSAPKGRTVRATKTSQVSDKLLNELFNLRNEKRC

SEQ ID NO: 49889 - protein, 783 aa, Zea mays
  Coding DNA Sequence Number=SeqID_8110
  Gene Ontology: Mol. function=polygalacturonase activity; Cellular component=cellulose and pectin-containing cell wall; Biological process=carbohydrate metabolic process
  Homolog annotation: Hit_ID=Q5ZDR5; Match level="QueryCoverage=71%, HitCoverage=74%, E-value=0.0, Identity=58%"; Hit description =Putative polygalacturonase PG2
  Pfam annotation: Domain name=Glyco_hydro_28; Domain location=393-750; Score=318.1; E_value=1.5e-92; Accession=PF00295.8; Description =Glycosyl hydrolases family 28
MPPATSTRPPFRRPVPLLTVVVSVALLSLVCFLVAADASRSLHYHYHLRKHRRHHGHHRAENYSHISLPPAAPPPGADGDSPAGPVGLPPDVGGALPPSSCSDKPCPLSPSPSRAPAGAPCSTPGSAKPPALTLATPPSPAPATPPSHSPPNPPSSHQPFQRPTLPLAKAPPSSKPPSPDIAPFHPHAKPPRALPDAKSPSQPPKRAPAPSPLSPSKPRKPPSCTLATPPQAQTSRLAPASAKPPMRSPAHPPKLSPASPLAHPPVEPPKSALAKPPGFSFSHTTKPQPPVASMVKPPRLAPAKPPAPSPLPAAQPPRCSTANPPVAPTASAKPPAYPPAAASKPIPPPPLPPAANNSSSAWGNVFDVRAFGASGSGSGNDTRALRAAWKAACSSNSTTPTLLVPSDGVFTISSTIFAGPCKSAVTFQIDGVLMPPDGPASWPASDSRKQWIVFYKANGMTLAGEGTIEGNGEEWWDLPCKPHRGPNGSTLPGPCDSPALVRFFLSNDVTVRGLRIENSPQFHLKFDDCERVRVDGLFVRSPAFSPNTDGVHVENTTSVQILNSRIYNGDDCVSIGAGCSDVRIENITCGHGHGISAALNVSADAASSWRPRSIGSLGVHGTRACVSNITVRNARILDSDNGVRIKTWQGGTGAVTAVEFAGVQMQNVKNCILIDQYYCLGSGCANLSSAVRVAGVTYRDIRGTYNPQASAPIRLACSDAVACTDITMSGVELLPASGGGARALLADPYCWNAYGVMETLTLPPVYCLQEGRPESLQDQLTSC

SEQ ID NO: 49890 - protein, 308 aa, Zea mays
  Coding DNA Sequence Number=SeqID_8111
  Gene Ontology: Mol. function=nucleic acid binding
  Homolog annotation: Hit_ID=Q8H912; Match level="QueryCoverage=24%, HitCoverage=9%, E-value=4e-09, Identity=35%"; Hit description =Putative zinc knuckle domain containing protein
  Pfam annotation: Domain name=zf-CCHC; Domain location=246-263; Score =15.1; E_value=0.0032; Accession=PF00098.13; Description=Zinc knuckle
  Pfam annotation: Domain name=zf-CCHC; Domain location=265-282; Score =12.2; E_value=0.0097; Accession=PF00098.13; Description=Zinc knuckle
  Pfam module annotation: Pfam domain module=zf-CCHC::zf-CCHC; Domain location=246-263::265-282
MTGWIFKVNTKLASSVDLSLLICFYDGSLSVRFEARKSYAEVVGSSVLTGANSIHVSSSSWQRKFLQQINPKLQGRASEVLECLAKEGQLGAAVPYFYCKDRANPGEQRDFNASSNGDGVAEQASSEGPQKTILQKRIPSSEKMKWTVDSDPPGFNTVEVRSALKTPSRESGEVNLFDPAGSGQHRDSRPFAGKLLISSAKEEDEGWTVVKPRFWWRRKNNNLGANLIHKEDEFKGANFFKKKFQGKCYNCFSAEHYAFRCWASPRCWSCFRSGHKAGSCPDKIHLVKSNSNRNHQESLKHSFKLNHC

SEQ ID NO: 49891 - protein, 196 aa, Zea mays
  Coding DNA Sequence Number=SeqID_8112
  Subcellular localization annotation: CTP_CleavageSite=21; ConfidenceScore=5.25e-01
MAPPATWSVRALCRARRRLLRAHGRVCLPRSRSSPSPWVGRGGDRRLRPEPKPGVGRGGVRRLPGPRPSPSPGSGEAEFVVFRGRGRVRALGRARRSSSSSGAEAVSEPWVRRGRVRRLSGPRPSPGVGRGRASYGARGWTWLLSASLCRVAQAALSSCQLCADGGYQLRLGVLGVPLIMVHDKMRAILISLEVEF

SEQ ID NO: 49892 - protein, 140 aa, Zea mays
  Coding DNA Sequence Number=SeqID_8113
MVGAGVLLLIMAPIIDNAIPILVHGHCPLWVLALKMSSPAGTLTMRGDQNATVMTIEKLHALAIESTHPNGEREDPQPCEPMHIATRAPKVQPSKADGVPANTIQAKADCSQTSRTATNLGEKLEDAVITFLWSNVDVFT

SEQ ID NO: 49893 - protein, 210 aa, Zea mays
  Coding DNA Sequence Number=SeqID_8114
  Gene Ontology: Mol. function=two-component response regulator activity; Cellular component=nucleus; Biological process=two -component signal transduction system (phosphorelay)
  Homolog annotation: Hit_ID=Q689G8; Match level="QueryCoverage=48%, HitCoverage=13%, E-value=1e-45, Identity=88%"; Hit description=Two -component response regulator-like PRR37
  Pfam annotation: Domain name=Response_reg; Domain location=57-188; Score=68.0; E_value=3.1e-17; Accession=PF00072.14; Description =Response regulator receiver domain
MEQYMEQKKDLHMVFIDLEKTYDEIPSNVMWWALDKHKVPRNFSRLYWYITLRKFGLHILAPIQDDTIFLQWWKRIADIVSGMTKKGKFSYAIQPFSVISAENGQQAWAYLEDKRNNIDLVLTEVFMPGVSGISLLSRIMSHNICKNIPVIMMSSSDAMSTVFKCLSKGAVDFLVKPIRKNELKNLWQHVWRQRCHSFFDVIHVSLGKIV

SEQ ID NO: 49894 - protein, 99 aa, Zea mays
  Coding DNA Sequence Number=SeqID_8115
MDRELTEQVLRKLEQARQPGDVVMVASLFRLHSQPCQRRLWQRWVLHQPKGFIVMPSEVTEHVEDLLELDMTIEEFYLMYDNFVELGFIGTDDVDAPTL

SEQ ID NO: 49895 - protein, 68 aa, Zea mays
  Coding DNA Sequence Number=SeqID_8116
MSEKCEIKNKKQCQEKKFRIEEELAKYSQHQFWPGTPDCPEVHRTCPMPQAGSTSTGRSREKRKATWL

SEQ ID NO: 49896 - protein, 187 aa, Zea mays
  Coding DNA Sequence Number=SeqID_8117
  Subcellular localization annotation: CTP_CleavageSite=54; ConfidenceScore=5.29e-01
MAHASTFASGETFTSGSHNMFGTLDLLATATGDLRLTTPDMSVTTGTQLTRSTRSKVDKRCLKRRVVALKRHVNKHDDAIKKKAARALSLTLMAGHQPTSILDLFENDLNHNLTRADSGADEALERAYFMATPPWNDNGMGTMSPPSRLSNINANARRASLLARTPSSSSKRSSTLSFISSIEFTVT

SEQ ID NO: 49897 - protein, 68 aa, Zea mays
  Coding DNA Sequence Number=SeqID_8118
MAVSTMMLRSIPEPDEPEATTMYRNLHNWWRSMWGAQPSQSTRDRVLAKNCIREIHDARHLINNRHRE

SEQ ID NO: 49898 - protein, 104 aa, Zea mays
  Coding DNA Sequence Number=SeqID_8119
MSAVTGHIITKPRPDVRVVHQRGVGRSLLARLYAPMKGLNRIPTTLWGQSNSVMGRPQHGSHYIVTRMTGKAEQYGIPSVRLRRMFLKPRQWEYGGDVEEIRRV

SEQ ID NO: 49899 - protein, 248 aa, Zea mays
  Coding DNA Sequence Number=SeqID_8120
  Gene Ontology: Mol. function=transition metal ion binding; Cellular component=mitochondrion
  Homolog annotation: Hit_ID=Q017C3; Match level="QueryCoverage=61%, HitCoverage=44%, E-value=2e-29, Identity=44%"; Hit description=[S] KOG2861 Uncharacterized conserved protein
MANKKYHMISWLLGRFGNTGMPLCSKGQNHVSRLLCRLCPIPAAFGVWLELPCYISCSCSCSLRILIHYAVVEKPTLETWMQGGLDYIVLRDLSIDGIRTIGSVLGQSIALDYYIRQVDGMVAEFTDINRGMEKTGTFTMERKKLFQLVGKANSNLADVILKLGLFERSDIAWKNANYAQIWEYLRDEYELTQRFGNLDFKLKFVEHNIRFLQEILQNRKSDFLEWLIIILISVEILISVYNIIQEQM

SEQ ID NO: 49900 - protein, 318 aa, Zea mays
  Coding DNA Sequence Number=SeqID_8121
  Homolog annotation: Hit_ID=Q69R94; Match level="QueryCoverage=32%, HitCoverage=8%, E-value=6e-45, Identity=89%"; Hit description =Putative symplekin
MAWSCSISWGPNGAHDSHMMLEKQELFIDAYLLLLVLVKAPDSTGKIVLEASFLSFSRFDLMHMTLESDVEPFSQVDFVMEIMSRLVSKQIWKYPKLWVGFLKCAILTKPQSYGVLLQLPAPQLENALSKNPTLKTPLAEHAEQPNIRSTLPRSTLVVLGLAEDQPQQPAVTQVQSSQNQAAETSSSAADTATEVPYELDRHKCGELYLMDLTFFSNPKGWSFMANPPRCVSELIEDATSLLAIVVVVTTSIIGSCPPSGFFHIEYTASLSDPHVDSHHHGVGVAHGVAPSLASVGAVPIRVIGSRMCGCTCIRGVLK

SEQ ID NO: 49901 - protein, 146 aa, Zea mays
  Coding DNA Sequence Number=SeqID_8122
MVVESSTEQGGSLGHRSGCNNVTEKVLSFGHLRGQSVDHGVLVLPNKGRNTFAILGNIHGSLDSGKGYHQGGRGGCDRQRIRSSRYERQNVDNCGEAEWVGWSHEGPHEVEESKATCEEAATALLRGGEDSGESVGVDEEGAQCPP

SEQ ID NO: 49902 - protein, 73 aa, Zea mays
  Coding DNA Sequence Number=SeqID_8123
MKLQMEGLEDFVHKRLECGQHIREAKEHDEELEVTMMASKSHAMGLKVQRKSMPKTRSNPPRSVLKQLMVNSS

SEQ ID NO: 49903 - protein, 105 aa, Zea mays
  Coding DNA Sequence Number=SeqID_8124
  Gene Ontology: Mol. function=N-acetyltransferase activity; Biological process=metabolic process
  Homolog annotation: Hit_ID=Q84NP5; Match level="QueryCoverage=79%, HitCoverage=11%, E-value=2e-11, Identity=47%"; Hit description=PHD -type zinc finger protein-like
MTKANSNPWQPAALDAEFSPQVAEMLRADQGRRELSSRVRSRDEDLRTAVKKHLLELGWTIVSMPNAAMLTRLRYKAPGDGGKSYYSLPDLVVDRAAAPHLIVDN

SEQ ID NO: 49904 - protein, 60 aa, Zea mays
  Coding DNA Sequence Number=SeqID_8125
MPLVLRLLLLLLFLLPAAIQQQQKKQRESEAEARHGEAMIDAEVTAGEDEDGWSSTDSIA

SEQ ID NO: 49905 - protein, 202 aa, Zea mays
  Coding DNA Sequence Number=SeqID_8126
  Gene Ontology: Mol. function=ATP binding; Cellular component=nucleus; Biological process=DNA replication
  Homolog annotation: Hit_ID=Q9C7A8; Match level="QueryCoverage=91%, HitCoverage=92%, E-value=3e-49, Identity=53%"; Hit description=DNA replication complex GINS protein PSF2
  Pfam annotation: Domain name=Psf2; Domain location=20-158; Score =205.6; E_value=1.1e-58; Accession=PF04128.4; Description=Partner of SLD five, PSF2
MAGQSDPHLSIFSPSEVEFVAEDEIVEIVPNIRMDALNMICGDFGPFFPQIPTKVPLWLAVALKKRSKCTIRTPDWMTVGQCFLVACSPFIPAQAYTAITICCLLLFLLDRLTQVRSLIEDIRDVRFHKVETGLETISGRTHAVKLKNLSAMEVNIVRPFMVRTLQAFYKHDSAQMIQQADNIGSRATLVTDRGPRRDLRRR

SEQ ID NO: 49906 - protein, 872 aa, Zea mays
  Coding DNA Sequence Number=SeqID_8127
  Homolog annotation: Hit_ID=Q69R94; Match level="QueryCoverage=94%, HitCoverage=74%, E-value=0.0, Identity=62%"; Hit description =Putative symplekin
  Pfam annotation: Domain name=HEAT; Domain location=26-62; Score=3.9; E_value=15; Accession=PF02985.12; Description=HEAT repeat
  Pfam annotation: Domain name=HEAT; Domain location=63-99; Score=24.2; E_value=0.00045; Accession=PF02985.12; Description=HEAT repeat
  Pfam module annotation: Pfam domain module=HEAT::HEAT; Domain location=26-62::63-99
MLAARNPPPPPHDIAARLHHLRDLRRVPLPNRVARIADLHTDEASPVRKLVAEIIGELGSKHMRYLPDMIPCLLHLLNDETPAVVRQAVKTGTNLFAKVLQKLAIQLSHVESECQATGNEGVRLLAIKFVEKTVLMYTPDPDVPSDPPTETTEDMAFNVAWLRGGHPLLNVGDLAMEASQSLGLLLEQLKSPKVKSLSTSMIIVFVTSLSAIAQRRPSFYGRILPVLLSLDPASSIIKLRVPGAFHALKSAFSACLKCTHSSAEPWRARLLEAQNIINQGGSIEDAANAAKNFGDTSNREESWPLMERSTDGSNKRSLAEDMNHVTEDDVHSTKRARQSIDANEHTAQGDRAAGSLQILSYSIASDLLAEVVMVNMQHLPISRPEVDQQQLPSTSSGDGLPLSSFSSLLGILLKGANQIDQDEVSPAKEPALVSSVADDRMILPANSPVPSSVNLPIEENSNSPTVPLCIETTEAKVTSAGGNSSIDIPESSEASHASTEPQGTQEHASTFAGPFPADNFSVGFSLAQSSETRSPSSSTLEANHSQLSSLSSQYVLPKLVVNNIDLSDEAKDLLQKEAFVRILESDKKEASGGSIARLPLLAHLGVEFPLEFDPWVILQKHILSDYANNEAENLRDMFPASDKSLGKLLCEIPYLPEGVLKLLESLCSPGSNERQDKDIQSGDRVTQGLSAVWNLIMLRPSNRDRCLEIALQSSTHHLEEVRMKAIRLVANKLFPMTSISKKIEDFANEKLNSVLEMTPSGDCVTTEMATPEAHKDIGLENLTASVTGMQTLMSLYFALCTKKHSLLRHVFAIYGNLPQAAKQAVHQQVPILIRTIGSSSDLLGIISDPPADCRDLLMQVGHNGSAKRPGKP

SEQ ID NO: 49907 - protein, 181 aa, Zea mays
  Coding DNA Sequence Number=SeqID_8128
  Subcellular localization annotation: CTP_CleavageSite=46; ConfidenceScore=5.48e-01
MALIIKSFRQILKQRRGKDYKPRSKRGFSSKPPLLPPPSRHLPPPVAACPTSSRRPGRLIPPSWGGPPHSRCLAPPKIWAPAWPWRLRALALPNGRRRRDLNGLPALPHQIRGRYVDLHAAAAKGARARRRRRRLAARRGGWLPSLGAAAPGSDGARRGSACPLARPWRLAPPARCRAGVT

SEQ ID NO: 49908 - protein, 75 aa, Zea mays
  Coding DNA Sequence Number=SeqID_8129
MVSVEPRTKVHGDAACSTRVRTGVALHRWSGEDGRGGLGAQSSRHQHQVVVVNVLLEIGPKEAERHDGAATMLRI

SEQ ID NO: 49909 - protein, 174 aa, Zea mays
  Coding DNA Sequence Number=SeqID_8130
MKGPCWFVLDAKGKVPWLWIDRLEGGGLLMFLGFGLIYGYFYVNHGGVKIATGLIRSLVVLNWNNVVEATEFWRHYNRDRTSQLNLSTNDWTSSYPTLFDERSCCLSVLSDHLAQVIGSPTVLHWGDDFLQQLMDGWVGGEFDPASACAIRSLELFRVPCVCSLTILLSMFFEN

SEQ ID NO: 49910 - protein, 53 aa, Zea mays
  Coding DNA Sequence Number=SeqID_8131
MEPIMKMRARRQFLADNDIVDQFGDMEHAIADLVRHQPMLPVLVALLHRMRLL

SEQ ID NO: 49911 - protein, 137 aa, Zea mays
  Coding DNA Sequence Number=SeqID_8132
MKLCVLPESRRATSTIEPSATVTCMVSAKETSARAEKTGASSAAASSDSSVGLLASCSFDALQDEQPLDTVVDRVYFLSQLYQRSFRRTSMVSWARPLCDPATTDAWRNVDHLGSKIGSGQVFLYFKCHMSQLVTDQ

SEQ ID NO: 49912 - protein, 82 aa, Zea mays
  Coding DNA Sequence Number=SeqID_8133
MAQWFQSPFGSSGLAWRVEFARVYQPVTKIYTSPQRSVDQTAYMIHQRNPDSWSTTKFKLVQTAVKAQHSMQTTTLPNNPTP

SEQ ID NO: 49913 - protein, 119 aa, Zea mays
  Coding DNA Sequence Number=SeqID_8134
MQNGRSLLVCPRCKRKIPWLWIDRLKGGDHLAQVIGSPTGSLNALLVNLRFWERLKGGGQNVIPVVLMQNERWAGFVLLDAEGKNNFGNWKSMYQTTDIRNWGQGCRLTLEADFPQLEI

SEQ ID NO: 49914 - protein, 493 aa, Zea mays
  Coding DNA Sequence Number=SeqID_8135
  Gene Ontology: Mol. function=phosphotransferase activity, alcohol group as acceptor
  Homolog annotation: Hit_ID=Q2R903; Match level="QueryCoverage=94%, HitCoverage=39%, E-value=1e-120, Identity=45%"; Hit description =Phosphatidylinositol 4-kinase, putative, expressed
MGRLLPDLVEGPHLSREKDNEEEESDRDGFFRRLLRDSKEEDMELTPSSDGLLKRLFRDKEDRQGEDDEKDFFAGCSRIRTRRGEIVIMQDMGMRKDWARVWKMMTEKVSSAKFSKIRMRRGKMKGIKSQMREKRQLFKEKNDEKKEGSTPSKKEEDDKGHKNADDDNFFRRLFKDKNEEKKGIVHDRNEDDKCEEGDKENFFRKLFKDKLEERRTEGPDKNDDYGKGSSGIEEEDNPEFLSFRRLFRVHPEDPKSGHIESSQSNNLSEGSLGSESFFKRLFRDRDRSLEDSEIFGSKMAKEARIWSHKHPGTTGINEKQSGKPPLPINAVAELRKGSYYASLELVQALCDTSYGLVDIFPIEDRVCFPMGKGIYRVVHIPEDESVLLNSREKAPYLICVEVLKAEAPSHSKGSSDGHKLSKDGIPLANGDVQLPKPPPWAYPLWSRHETQNYETDIMLKSTSQVIDQAMAQLWETKVFLYFKCHMSQLVTDQ

SEQ ID NO: 49915 - protein, 296 aa, Zea mays
  Coding DNA Sequence Number=SeqID_8136
  Homolog annotation: Hit_ID=Q9FFU2; Match level="QueryCoverage=26%, HitCoverage=19%, E-value=8e-17, Identity=51%"; Hit description =Genomic DNA, chromosome 5, P1 clone:MBG8
  Subcellular localization annotation: CTP_CleavageSite=72; ConfidenceScore=5.69e-01
MDSLDPPCRLPPPHNSTAPSSPSPASVAGPRPAAVRSGSETPTTAVRSGSETPTASPSPSASPSPSTPGTPTAAVASPPPHNSTAASQSDVPHQQPGQRRPMCAVCTKPLRLCLCGRLRSPPVDNAVGVTVLQHAMEAHHPLNSTRVARLGLRNLVVAQVTDVNHRACFILTMLDAGGGAAASGPAGGPVVGEDLNSSICSTRPTTAVSWSSDIRTRRRAREWRGRWWNWNGSGYPAGRGDGGVVPADVRHVLHVGRLPDLHLRLLHISYTRATHKNSLHDPIPVKIKNCIELRAM

SEQ ID NO: 49916 - protein, 93 aa, Zea mays
  Coding DNA Sequence Number=SeqID_8137
MRVGEGMGRRRDCIRGREDARGLADFLSMGLGARRRCRRARQGAGRVARRSHNSRRWGCGWGWGGGRVGKGRWGNDRGRGRANENKQITVINS

SEQ ID NO: 49917 - protein, 247 aa, Zea mays
  Coding DNA Sequence Number=SeqID_8138
  Homolog annotation: Hit_ID=Q10M68; Match level="QueryCoverage=35%, HitCoverage=22%, E-value=2e-10, Identity=39%"; Hit description =Serologically defined breast cancer antigen NY-BR-84, putative, expressed
  Pfam annotation: Domain name=DUF1692; Domain location=112-245; Score =14.6; E_value=1.2e-09; Accession=PF07970.2; Description=Protein of unknown function (DUF1692)
MDQAKRFRDGSEAINGGKTQNVSVPTVEGVARGTSYGWVDGGLRGTNLGAGVIDPTNVHSDNLLHVWSMPSTANVSQQEAPRPLEKVNLLAARNERESFQIALRPKVSWATSGIAGSVLIQCTDLCSSSGDRYENSSLPEDRIGELVKETLAAVGLKVVPTEYKYLSKKILPTNQGSVTEYFLSIRPTERAWPAVYFLYDLSPITFTIKEERRNFLHFITRLCAVLGGTFAMTDSLVASVAMHATWY

SEQ ID NO: 49918 - protein, 34 aa, Zea mays
  Coding DNA Sequence Number=SeqID_8139
MRQKYPELFIVEASEFEVEFFLRGIECDPVRSVQ

SEQ ID NO: 49919 - protein, 58 aa, Zea mays
  Coding DNA Sequence Number=SeqID_8140
MDNDPWRCVVYELKMGIRINVWYRTLDDMVAGVTWPSTLPPGWTVEWDPASAVEEHEE

SEQ ID NO: 49920 - protein, 284 aa, Zea mays
  Coding DNA Sequence Number=SeqID_8141
MNKHGFCLGLNSPDRPDLVPPYLPHPTISSLGTQTRQIALGIVKRFYTGFLARFACLVYQQAFEQGQKQTSTCSTCSDAPKHAQVLGPARPRQATPEPVPSPAPIKQLKAATVLPHTPLAPPELDFAGVLPEHGVTSAARARPPWTSHSGPPPPNPAPRLASLEPHRASRAHKPNTTSLEAPDCHHQTPAGHRRAWTELHGRSMHRRRARPPAHAASPPPVATTGDLHLDVTARDPGHRATLHQTSTIGGTLDDMVARVTWPSTLPPGWTVEWDPTSAVGEHEE

SEQ ID NO: 49921 - protein, 154 aa, Zea mays
  Coding DNA Sequence Number=SeqID_8142
  Subcellular localization annotation: CTP_CleavageSite=64; ConfidenceScore=5.53e-01
MAAGARPWHPARPPASCAGLALAAGARPWPRRGFGAVHSPARLGGLLVRLARVACPRQRPTRFACMARPRRRGVGAPPGVLARLWQPARLARGGLLGAWQPVRDRIRGVVRFAVMPSMGLGVAMRLMVLVIDSGNGEDEAVEGDFQEFQDYDEF

SEQ ID NO: 49922 - protein, 439 aa, Zea mays
  Coding DNA Sequence Number=SeqID_8143
  Homolog annotation: Hit_ID=Q9LF51; Match level="QueryCoverage=37%, HitCoverage=32%, E-value=5e-14, Identity=28%"; Hit description =Glutamine-rich protein
MQQQKPQGFLVAGGIPPAQGSGRIVTAVAARTRAAEQMAFEDVWKALNPDFRTPFASVEDAISSALGALGPGLARRQAGNSERALISRIDLVPLLAICSLGYLVRLLPYHIFADYEEDDDVVDPISGISSSICTTTEKSSAHNWEDGMVTQMEGFLEHFEKQVLTFNVMTQQHAAGFNRAEEQLILQMSMVEDERRQLELLRAAIVQHQQQEAARARLALAQPQAALPAASCQALVAAGRGEGASRGQALAPSLVMQQQETMMTAGAWQALAAAASRGQGASNEQALMQAIMAQHMQRQRQQEIMAAASRGDGATCGQAEALPLAAVTQLMQQRNQQRQQEEMTTTAFRCDVAPGYLALASAGMMRQQQQHQQEVMAAGGWQLDLGLRHTDIAPRVDGSSSSQAALPPAMLQQPGQGQASTAGSGMALPWRGVADGREQ

SEQ ID NO: 49923 - protein, 102 aa, Zea mays
  Coding DNA Sequence Number=SeqID_8144
MVAGHGGGEAGGGGARRWAGLGGGRGRRWPRRRGAAAGRVGRRGGADGKPGGWGGRRSRPAERSPAIGNMRRFTKKHYYTYFFEYASISRKALDISVRTLLE

SEQ ID NO: 49924 - protein, 42 aa, Zea mays
  Coding DNA Sequence Number=SeqID_8145
MTLIHQRLKVYAAVDVEALHVAVVHVRGKALVAAALEARCCC

SEQ ID NO: 49925 - protein, 114 aa, Zea mays
  Coding DNA Sequence Number=SeqID_8146
MAGPITENPRDSFISMSRLNESYRTKGYARPNPHRLILDQRIRLDDEILRPGYNPIVHAPSDGTYSTNEGINQDLIYTVDFAIHDRDAFFYLSLMEKLGSDTRPTTAWCVSIVA

SEQ ID NO: 49926 - protein, 178 aa, Zea mays
  Coding DNA Sequence Number=SeqID_8147
MGERGKDHVGETYRRRFSSGEVVDDVTEVTAVTSVCGPVSEMAGVGRFSRTGGGARRQRVIRPNHGRIAQFSELGCLTGGQGSSRRKEFVNGSPGSPVYVWWRATEVQRGRARCSGGAGSRLKFGKASWPLRDAVQEHGRGWGSKEEACYGGRARAMVAGGGTCLSRRTPVTIGSGGG

SEQ ID NO: 49927 - protein, 108 aa, Zea mays
  Coding DNA Sequence Number=SeqID_8148
MKGEVAGEYARSIAARQPGSEGLGVIVPRWGFHSARQADELWTGAVGISPDRAFIAKSSRASGILFVGSGFGLSTSVSGSAGEASTGGVGGAVRSGHGGREEDECVAV

SEQ ID NO: 49928 - protein, 267 aa, Zea mays
  Coding DNA Sequence Number=SeqID_8149
  Subcellular localization annotation: CTP_CleavageSite=58; ConfidenceScore=5.15e-01
MAFYLLSLSLMPPRSLLPSPERCSKYGEKLRLTWRGGVSGSASGASRSMGQAGVGHRRASIRGPGALESRGNPRGAWRGLGEDVPGSDWAVEARSDRSSCFGGRQEYSALGGGSVARLLDGALCSAAAASATRLLGGTSTMATLCSAACWSLPRYSLVACTSTGAPHGWKPGTSSLQAWRLALARVRNLELETRESERERPPAKSPRGRWGVVRMPQGRRGTGCSLWTSGPGLLGRRSLGLGLLATCEPWTAGCWPLFGSRCHMSIG

SEQ ID NO: 49929 - protein, 65 aa, Zea mays
  Coding DNA Sequence Number=SeqID_8150
MAMRCRFQPKALRVHAAEDFHRRRSIVAAIKLARTHRPRNGRAPASDDIQGGVALFLWRWKMFKI

SEQ ID NO: 49930 - protein, 119 aa, Zea mays
  Coding DNA Sequence Number=SeqID_8151
MAGDNKSEETAMFKFQEAMEKTNVAKITNELLASLQDDSEDSEDFDFDETIDEAEKRPWKPSHEGDIEAVLTDKPKVETPKVPSPTPTKQNIDYYTELWFMMRVFSYGKGIQDEDMARG

SEQ ID NO: 49931 - protein, 100 aa, Zea mays
  Coding DNA Sequence Number=SeqID_8152
MERPPGKTVLPQGWYGMPLADYLGKPAHHALRQLAHRIAASQPSALQTRCREWTQSGSCASNVNLNTLMNMFSVLGAGGGLGGRNASNGPVGDLFSNAMN

SEQ ID NO: 49932 - protein, 93 aa, Zea mays
  Coding DNA Sequence Number=SeqID_8153
MGLGAGIYREREVGERESGREWERPAAAINGVGGFSIIGEGVEGERKGRGRRYLAWGWDGTWGRFEVLQNLPPKKNLVFEITKLLKIAGGILL

SEQ ID NO: 49933 - protein, 79 aa, Zea mays
  Coding DNA Sequence Number=SeqID_8154
  Gene Ontology: Mol. function=racemase and epimerase activity, acting on carbohydrates and derivatives; Biological process=carbohydrate metabolic process
  Homolog annotation: Hit_ID=Q1M0P1; Match level="QueryCoverage=52%, HitCoverage=9%, E-value=1e-12, Identity=80%"; Hit description=UDP -glucuronic acid decarboxylase 2
MADGLMKLMEGEHVGPFKLGNPGEFTMLELAEVVQETIDHQAAQLLGTGVGPWDCRSPWTMVHDFRAGVLVGGDQQQRN

SEQ ID NO: 49934 - protein, 290 aa, Zea mays
  Coding DNA Sequence Number=SeqID_8155
  Gene Ontology: Mol. function=nucleic acid binding; Cellular component= nucleus; Biological process=mRNA processing
  Homolog annotation: Hit_ID=Q64HC2; Match level="QueryCoverage=57%, HitCoverage=68%, E-value=4e-87, Identity=90%"; Hit description =ASF/SF2-like pre-mRNA splicing factor SRP32'
  Pfam annotation: Domain name=NID; Domain location=103-198; Score= -1.8; E_value=0.093; Accession=PF07292.3; Description=NmiIFP 35 domain (NID)
  Pfam annotation: Domain name=RRM_1; Domain location=160-227; Score =39.4; E_value=1.3e-08; Accession=PF00076.12; Description=RNA recognition motif. (a.k.a. RRM, RBD, or
  Pfam annotation: Domain name=RRM_1; Domain location=70-132; Score =57.5; E_value=4.4e-14; Accession=PF00076.12; Description=RNA recognition motif. (a.k.a. RRM, RBD, or
  Pfam module annotation: Pfam domain module=NID::RRM_1::RRM_1; Domain location=103-198::160-227::70-132
  Subcellular localization annotation: CTP_CleavageSite=29; ConfidenceScore=5.16e-01
MRSGPGRLSFGPLRVVNKPRLPSVIPYVSTSQPQTRNPSLELYLRPQLVRLATKDEQALEPHDLRREPSPGDIREREVEDLFYKYGKIVDIDLKVPPRPPGYAFVEFEDPRDAEEAIAGRDGYNFDGHRLRVEAAHGGRGNASSHDRSSGFGGGGGARRVLVTGLPSSASWQDLKDHMRKAGDVCFSEVYREGGGTVGIVDYTNYDDMKYAIKKLDDTEFRNAFGRAYIRVKEYNGKRGRSYSRSRSPSRSYSKSRSPSKSPRTRRSSSRSRSRSVSSRSRSPSKGRSPS

SEQ ID NO: 49935 - protein, 158 aa, Zea mays
  Coding DNA Sequence Number=SeqID_8156
  Subcellular localization annotation: CTP_CleavageSite=23; ConfidenceScore=5.11e-01
MAPRTLCDDGGSQPPYGSKRMVRLTAAESSLRRHRKLRLARSWASASGEVSASLDPRARPPLRPRKVDSASLDPRARPRPRPRKVVSASPDPRARPRPRAESCPRPTPASSSGGVSASPDLGLGPTTPQEGPPGAETPIVGALDRGLLRVDEQLPIEF

SEQ ID NO: 49936 - protein, 216 aa, Zea mays
  Coding DNA Sequence Number=SeqID_8157
  Gene Ontology: Mol. function=catalytic activity; Cellular component =cellular_component; Biological process=metabolic process
  Homolog annotation: Hit_ID=Q9SPJ0; Match level="QueryCoverage=86%, HitCoverage=47%, E-value=6e-62, Identity=72%"; Hit description =Putative cycloartenol synthase
MEGHSAMLGTTLNYVALRLIGEGPDSGGDDGAAMERGRNWILQRDPNSEAFKLHVPRIYDYLWLAEDGMKMKGYNGSQLWDAGLTVLAIVNTDLIEEFGPTLKLAHAFVKNSQIIDNCLEDLNQWYRHMSKGGWPFSTADHGWCVSDCTATGLEATLLLSTISPQIVGEAMEVGRVYDGVNCLISLMTLEIAINASTSAPEDGIMLIFLQLKELNM

SEQ ID NO: 49937 - protein, 161 aa, Zea mays
  Coding DNA Sequence Number=SeqID_8158
  Subcellular localization annotation: CTP_CleavageSite=28; ConfidenceScore=5.00e-01
MQSACNRAKWAHPFDSNAPSMEAQAHTSCNRRAGCYVRATAPPLAPLPHLLDCGTSTATRGNPAYDPTVLARRIGHRPVSRGRRRDGTRKGDTPKGILLREGNGPRAPLLIRGSKAGPSEGFNSRLRALGLRAHNWSEVRRPAPPEGFNGRLRPLGLRAHY

SEQ ID NO: 49938 - protein, 327 aa, Zea mays
  Coding DNA Sequence Number=SeqID_8159
  Gene Ontology: Mol. function=RNA-directed DNA polymerase activity; Cellular component=chromatin; Biological process=RNA-dependent DNA replication
  Homolog annotation: Hit_ID=UPI00004C1731; Match level="QueryCoverage =71%, HitCoverage=70%, E-value=9e-89, Identity=81%"; Hit description =UPI00004C1731 related cluster
  Pfam annotation: Domain name=rve; Domain location=125-268; Score =42.2; E_value=1.8e-09; Accession=PF00665.16; Description=Integrase core domain
MLKESCPYHQGPVKHTLEECAMLRRHFHKAGPPAEGGRARDDDKKEDHKAGEFLEVHDCYMIYGGRVANASARHRKQERREVCSVKVAAPVYLDWSDKPITFDQDDHPDRVPSPGKYPLVVDPVIGNVRLTKVLMDGGSSLNIIYVETLGLLRIDLSSAVAFFTNIIHRFGVPNSIITDNGTQFTGRKFLDFCEDHHIRVDWAAVAHPMTNGQVERANDMILQGLKPWIYDDLNKFGKRWMKELPSVVWSLRTTPSRATGFTPFFLVYGAEAILPTDLEYGSPRMRAYADQSNRSNREDSLDQLEEARDMALLHSARYQQSLQCYHA

SEQ ID NO: 49939 - protein, 63 aa, Zea mays
  Coding DNA Sequence Number=SeqID_8160
MALLQAVAAWRYCKGEVSGGEEQWQQEASIAGEGEQGNMRRWLTAWTTGINITQVSSKSTDMD

SEQ ID NO: 49940 - protein, 292 aa, Zea mays
  Coding DNA Sequence Number=SeqID_8161
  Gene Ontology: Cellular component=mitochondrion
MADSTVINGEVENQMADNFYDADEAKLTEQDSKIKALESEKLDLSNENKELKEKMKKATLEIDQLRNKEEEMRQEMDNWEEDKKVLESVAARSADLETEVARLQHDLITSMSDADEANKQSMELKRELEEKGLEIKRLDKEITELKKEKVENEKRERELERKLGVLEVRESEERSKNVRMEEELRQQLDVFKNKVKDLEAEVARTRVELETTKEEQRESEERAMGFKLKLLELKEEVEKKAADGINGKSREIVETAESKEKGLNVPPLVAAGSAAAVLVAAAAVYLCCRKRS

SEQ ID NO: 49941 - protein, 193 aa, Zea mays
  Coding DNA Sequence Number=SeqID_8162
  Gene Ontology: Mol. function=DNA binding; Biological process=DNA integration
  Homolog annotation: Hit_ID=Q1S0G2; Match level="QueryCoverage=84%, HitCoverage=19%, E-value=3e-16, Identity=33%"; Hit description =Peptidase S8 and S53, subtilisin, kexin, sedolisin; Polynucleotidyl transferase, Ribonuclease H fold
MDAQTELCMFVGYPKGTKVGLSYNPKDNTIKVSTHTTFLEKSYMDNFKPRSKVVLKELLGVIKQSPSSFLEKVVERPINDQQHKGIHPSERVSKKLDFFIYDGSIYNTKVNHEDDDPLTYEEALQDVDSKLWKEAMDTEMDSVKSNTMWELEDLPIGIKPIRWLQSITRDQRTDIRYFTTYSVHNKIQSQSPL

SEQ ID NO: 49942 - protein, 50 aa, Zea mays
  Coding DNA Sequence Number=SeqID_8163
MGSHQLFLVDGSEPIRGYTTKIYHFKDQLLNPNEYLHECDGVSFKKLSEC

SEQ ID NO: 49943 - protein, 341 aa, Zea mays
  Coding DNA Sequence Number=SeqID_8164
  Gene Ontology: Mol. function=nutrient reservoir activity; Cellular component=apoplast; Biological process=auxin mediated signaling pathway
  Homolog annotation: Hit_ID=Q6TM44; Match level="QueryCoverage=58%, HitCoverage=94%, E-value=1e-110, Identity=100%"; Hit description =Germin-like protein
  Pfam annotation: Domain name=Cupin_1; Domain location=55-202; Score =124.4; E_value=3.1e-34; Accession=PF00190.13; Description=Cupin
  Pfam annotation: Domain name=Cupin_2; Domain location=90-166; Score =33.8; E_value=5.9e-07; Accession=PF07883.2; Description=Cupin domain
  Pfam module annotation: Pfam domain module=Cupin_1::Cupin_2; Domain location=55-202::90-166
MAKMVLLCVLVSFLLMPLASLALTQDFCVADLTCSDTPAGYPCKSSVTANDFYFHGLAGQGKINPLIKAAVTPAFVGQFPGVNGLGISAARLDIEVGGVVPLHTHPAGSELLFVTQGTVAAGFISSGSNTVYTKTLYAGDIMVFPQGLLHYQYNAGTGAAVGLVAFSSPNPGLQITDFALFANNLPSAVVEKVTFLDDAQVKKLKSVLGGSGLVLALLGGGVLERVVGDGKVVGVVPGGLGSKDASSWRWMLAAASIWAAFAWRTLRRRSGLDESGLGLILSLFSSAAATSAVVLAHDGGVCQHNAVGVGDGLSSSRGDASGASLQHPVSCGGVRASWVPR

SEQ ID NO: 49944 - protein, 309 aa, Zea mays
  Coding DNA Sequence Number=SeqID_8165
  Gene Ontology: Mol. function=hydrolase activity; Biological process =metabolic process
  Homolog annotation: Hit_ID=Q652P6; Match level="QueryCoverage=69%, HitCoverage=65%, E-value=9e-11, Identity=25%"; Hit description =Putative genetic modifier
MQLFAARNPSFHATDRPRKGRQIGVRRRASGFDAFASFAGKVFVDEAIGAEYGEGFETFRMDGPLKVDVDYLNEKLQECFLQRIRHAMKPDEAFGLIFSWDNVIADTDSLKLNAWRQLALEEGKDIPSGAHVRKSIIHGAADHVLRKVLYWAKEEDKMEKLKARLIELYYENLFKLDTPVEGLREWLDAVQTAGIPCAVASPLDRRCMIEALDRMALSKYFKAIVTDEDDMESIANRFLSAAMKACSCPTSNRCMSWYRQTLPLAKYSELSVINLRRLFANKGISFMDLQKQIIEKSPPKRRLTVDTIF

SEQ ID NO: 49945 - protein, 103 aa, Zea mays
  Coding DNA Sequence Number=SeqID_8166
MSGGYGMPVSGEGRRGGRSDGKRRRYPDGAATEARSSGSGARGTGGCPTRCGERQWRTVGLAEVPGLPIAALPSGRPGSGTAGMLAASARGKRDWRGAEAAWE

SEQ ID NO: 49946 - protein, 438 aa, Zea mays
  Coding DNA Sequence Number=SeqID_8167
  Gene Ontology: Mol. function=transferase activity; Cellular component= nucleus; Biological process=flavonoid biosynthetic process
  Homolog annotation: Hit_ID=Q5SMM6; Match level="QueryCoverage=98%, HitCoverage=99%, E-value=1e-172, Identity=71%"; Hit description =Putative hydroxycinnamoyl transferase
  Pfam annotation: Domain name=Transferase; Domain location=3-432; Score=293.2; E_value=4.9e-85; Accession=PF02458.6; Description =Transferase family
MAPTVEVLTSEVVVPAEETPAGSIWLSNLDIAARRGYTPTVYFFRPNGDPGFFAADVVKGSLARALAAFYPLAGRLGLDGTGRVQVDCTGEGAVFVTARSDYALDDLMREFVPCREMRDLLVPPTPAPNPPCALLFVQVTYLRCGGVVLALSMHHSACDARGAAHFLETWASIARGDDATTENAPVPPCFDYGRLLAARPGPARAVLYDHPEYKPEPEPVDADAVAASDDYASAIIVMTKAQVAALKARCPGASTFRAVVALVWQCVCLARALPPEAETRLYSMIDMRARLDPPLPPGYFGNAVVRTSVSATAGEVTSNPVGHAARRALAVTSQGDDYARSLVDYLEGVDAMNLPRSGISRAHLRAISWVGMSLYKADFGWGAPVFMGPALMYYSGFVYVMNAAGKEGALALVLSLEPESMPEFRKVFAEELASLEVM

SEQ ID NO: 49947 - protein, 330 aa, Zea mays
  Coding DNA Sequence Number=SeqID_8168
MSIYFKHELNIQYKLWMDSGCEAGGQRGQEPAAGAGQGEPGATTSGRGREPAVGAGQGELGAGKGHRARRPQDAGQARGRGVGLGGQARQARGRGSWARGRATGRGDLGTPGSGAGAPGAGKEAASSGAAGAGASGVAAASSGRGLRRREEEFGGGRVDQFDRYKGDRHTEPIPWWRMEWDDDWVAPDKLQHAVACLLIALLSAALAARSARPGLRRRAAAVGSAASLAAGAAKEAADEARLFGSAGASPKDAAADLLGVAAAALALALLRRLRRRRERKAREDGDGDGRGGAAVSMGLKKKRKLTNCLAQSGSRGSNKLSRTGFSSSLM

SEQ ID NO: 49948 - protein, 50 aa, Zea mays
  Coding DNA Sequence Number=SeqID_8169
MEATPKKKPYPLATVAEEVRLAGARTRYHIPLAVADVPVQDGIENQLDTD

SEQ ID NO: 49949 - protein, 71 aa, Zea mays
  Coding DNA Sequence Number=SeqID_8170
  Subcellular localization annotation: CTP_CleavageSite=46; ConfidenceScore=5.03e-01
MAAGGLAAEHEITMVSRRGAVLHQVVMKPRDFRRGRQSSVEARTMRARTSTEFVGEKQMNPTCGTQPPVTP

SEQ ID NO: 49950 - protein, 207 aa, Zea mays
  Coding DNA Sequence Number=SeqID_8171
MSIRLPMRQLKRQFQAFMNIHSAELKRIQCGSYLFLEYDVSLPTNQVEIKQEDIKLPLALEADPQVWINLSSCLEYRELDLRGAQNDVKQAEELQMLRVEELIFNREGMFPEVECLIFKCKQLYERSLDCSNPNLILSMSEWNKWKKEANVPTPLLFQEESKNVHGNMPMIYTNQVTLKVNEHRDKVRGDKVNEHGDKETECGSMMI

SEQ ID NO: 49951 - protein, 53 aa, Zea mays
  Coding DNA Sequence Number=SeqID_8172
MGLSKYSSGSTTMPIKLMYLVSTIRLLTIDIPLEGILEPFEGSCDVFRDFKAS

SEQ ID NO: 49952 - protein, 33 aa, Zea mays
  Coding DNA Sequence Number=SeqID_8173
  Gene Ontology: Mol. function=small conjugating protein ligase activity; Biological process=protein modification process
  Homolog annotation: Hit_ID=P42743; Match level="QueryCoverage=91%, HitCoverage=19%, E-value=3e-11, Identity=93%"; Hit description =Ubiquitin-conjugating enzyme E2-18 kDa
MTQRPADNDRYVKNCRNGRSPKETRWLFHDDKV

SEQ ID NO: 49953 - protein, 210 aa, Zea mays
  Coding DNA Sequence Number=SeqID_8174
MKEKEDECEIEKKIENEIENKNECEKEKKTEKESEVEERNQSAKEMSDMIKERGFENELEKEIREKDESEQARSVFTNHPMSFHCIDSTFQVSRNSIDQFQLQYFSEERRFQLVEKGKIVDDPSPQVLKGKHGKGSMLIELQQIHIHDNGEIAEDLVSKRLSYLDLSRYQSLIGDGFDLDDGLKSLSHDMSDVYKFDDEAILIFKIMPFD

SEQ ID NO: 49954 - protein, 145 aa, Zea mays
  Coding DNA Sequence Number=SeqID_8175
MGKSKKGGSLSHHSSDKRKREPTPPSEDFGDSEYSKEEFSSESEGSPVYASPPASSDDSDDSQGLAAEVWTYIQVVEHVGLEGSDESEVSLDEENSSDSSEEGAAVMAMMRATTTAEATAVTTATAAEATTRAVVAAASGKEANS

SEQ ID NO: 49955 - protein, 109 aa, Zea mays
  Coding DNA Sequence Number=SeqID_8176
MRSSASSRAEPESEPWGRAKRSSSSSGAEPESEPWVGRGGASYGARGRTWLLSAALYRVAQQSERRRRRYPFVRPLCADGGYQLRLGVLGVPLIMVPDNYRPCLVDRRP

SEQ ID NO: 49956 - protein, 101 aa, Zea mays
  Coding DNA Sequence Number=SeqID_8177
MAGKMFTSYEANEDPNNAVTFSDAWEIAHALHAWRSLFEFPCSTIRFPTRCRCMKRNEGKPPPSYLHPLQPANIRGTELFGVHIYGTDLDMEILSTKIAAT

SEQ ID NO: 49957 - protein, 177 aa, Zea mays
  Coding DNA Sequence Number=SeqID_8178
  Gene Ontology: Mol. function=RNA-directed DNA polymerase activity; Cellular component=mitochondrion; Biological process=RNA-dependent DNA replication
  Homolog annotation: Hit_ID=UPI00004C1733; Match level="QueryCoverage =99%, HitCoverage=12%, E-value=4e-72, Identity=78%"; Hit description =UPI00004C1733 related cluster
MEAYCDEVRRLEDKFYGLELNHIARWYNETADELAKIASGRTTVPRDIFSRDIHQPSVKIDDTPEPKEASAQPEEASAQPEVSSAVEAPRALVGNAFRQGFYWPTAVPDATRIVRSCQGCQFYARQTHLPAQALQTIPIIWPFAVWGLDLVGPLQKAPGGFSHLLVAIDKFSKWIEV

SEQ ID NO: 49958 - protein, 218 aa, Zea mays
  Coding DNA Sequence Number=SeqID_8179
  Homolog annotation: Hit_ID=Q6QP51; Match level="QueryCoverage=55%, HitCoverage=95%, E-value=2e-16, Identity=68%"; Hit description =Putative growth-regulating factor 1
MMTASKKGPGRGYFEGILPSEGKRAPSPPTDQGFEGWPLGRPPQSTRAPRPLLIRGSKAGPSEGFDSRPRPRRAKDDSASGATGSSASPDLRPRPQKEVSASPDPRAQPQPRPREESRPRPTPASASGEVSASPDLGLGPSAPRGIHHYPTLASSGYEGTRPASHLARPRLRHFSDGHVIAYTGLKHFSDSHVGIVGVEFLKLGYAERDWLGGPKGEL

SEQ ID NO: 49959 - protein, 622 aa, Zea mays
  Coding DNA Sequence Number=SeqID_8180
  Gene Ontology: Mol. function=inorganic anion exchanger activity; Cellular component=integral to membrane; Biological process=anion transport
  Homolog annotation: Hit_ID=Q1ZYR6; Match level="QueryCoverage=92%, HitCoverage=96%, E-value=0.0, Identity=68%"; Hit description=Boron transporter
  Pfam annotation: Domain name=HCO3_cotransp; Domain location=1-474; Score=-182.6; E_value=1.4e-09; Accession=PF00955.11; Description =HCO3- transporter family
MSRPNKAPFSGVTEDLKGRAGCYKQDWNHGFRSGLRILAPTLYIFFASAVPVIAFGEQLSKDTDSALTTVETLASTAICGIIHSIIGGQPLLIVGVAEPTIIMYTYIYNFAKNQPNLGEKMFLPWAAWVCIWTAVMLFLMAIFNVAAILNKFTRGDKAWQRSLIADYGVPLMVILWTALSYSLPSRIPSGVPRRLFTPLPWEPKSLQHWTVAKDLFSVPTVHIFLAIVPATMVAGLYFFDHSVASQMSQQKEFNLKNPSAYHYDILVLSLTTLICGLLGIPPSNGVLPQSPMHTRSLAVLKRQLLRKKMVQTAKEGMMNNATSSEVYVKMQDVFIKMDHGGDSVSAHKELKDLKDAIIPEGNGSGTVPEVFDPEKHVDAYLPVRVNEQRVSNLLQSLLIAGCIGVTPLIQKIPTSVLWGYFAYMSIDSLPGNQFWERIQLLFITPQRRYKVLEGAHASFMESVPFNTICTFTLFQLIYLLIVFGMTWIPVAGILFPLLFFFLIIIRQHFIPKYFDPSHLRELDAAEYEELKGFTPDPSVCEDESVRSGHAQPGYASEILEEFTTHRGELKRRNSTFRDGRLLQFCDFDGGGYKLQEMVFSMLKQYFCKYKVDLSLVVRVDDE

SEQ ID NO: 49960 - protein, 96 aa, Zea mays
  Coding DNA Sequence Number=SeqID_8181
  Homolog annotation: Hit_ID=O24587; Match level="QueryCoverage=36%, HitCoverage=3%, E-value=4e-12, Identity=94%"; Hit description=Pol
MEQCPGLERLMETTHLELDGKLFVNTQQAPTWRANCWRFDPGGSLDRRVNCHCVSQPRWVGVYASGGSSWIIDSGCTNHMTWEKKMITSYVKNKDS

SEQ ID NO: 49961 - protein, 67 aa, Zea mays
  Coding DNA Sequence Number=SeqID_8182
MDNISLDYEFEGSAADPNEAQEQEPALTLNFTVRTVAGTEVPTRRRCRGRQTRSSPPTTRAGRALTE

SEQ ID NO: 49962 - protein, 157 aa, Zea mays
  Coding DNA Sequence Number=SeqID_8183
  Subcellular localization annotation: CTP_CleavageSite=39; ConfidenceScore=5.02e-01
MARLRRGARRVLPHSEPLSLLARDAMAQSALRACPSAVRRARDMARLRRSRGARAPAPARRPPAALACSRPLPCICGTQRDHGSRLARGPRLSRAACASAAAGPRRDPAAYARRARRSLPAACAQLVRGALSAASSWCPWPQSVRPCAHWSLRGVCG

SEQ ID NO: 49963 - protein, 281 aa, Zea mays
  Coding DNA Sequence Number=SeqID_8184
  Gene Ontology: Mol. function=transferase activity; Biological process= protein metabolic process
  Homolog annotation: Hit_ID=Q7PC75; Match level="QueryCoverage=99%, HitCoverage=52%, E-value=1e-126, Identity=76%"; Hit description =Cellulose synthase-like A3
MTLDYHFKVEQEAGSSTFGFFGFNGTAGVWRTSSIKEAGGWEDRTTVEDMDLAVRAGLKGWKFIYVGDVKVKSELPSNLKAYRRQQHRWTCGAANLFRKMGAEIILTKEVSLWRKLYLIYSFFFIRKVVAHVVPFMLYCVIIPLSVLIPEVTVPVWGVVYIPTTITLLYAIRNPSSIHFIPFWILFENVMSFHRTKATFIGLLELGNVNEWVVTEKLGRTKPVPQMLEKPRCRCTISEILVAIFLFFCATYNLVLGDDFYFVYIYLQEIAFLIVGTGFCGT

SEQ ID NO: 49964 - protein, 84 aa, Zea mays
  Coding DNA Sequence Number=SeqID_8185
MAGLTPRSARFGEESVAAGRGDVYDFSEETEFDSIKRDGEEVSGPTRPTRQGQTSTERLMVSTPAGPTCQLGQMRVGAQAGLAW

SEQ ID NO: 49965 - protein, 136 aa, Zea mays
  Coding DNA Sequence Number=SeqID_8186
MAQSTRGRALVVGAAQRLDVTNPNRRMQQGAEIRARSEDRFSPMMAAQKVRPTAACGSMVKHQFRREIRSAPTLNRARRGHIYVWWDPSLPQYHLSRLEDRIWADQWRQRQSHLPAPPIHAPTAPSYTRLQLVGES

SEQ ID NO: 49966 - protein, 70 aa, Zea mays
  Coding DNA Sequence Number=SeqID_8187
  Subcellular localization annotation: CTP_CleavageSite=55; ConfidenceScore=5.14e-01
MTIVGQESSGAQDCPVSPQTGKFFSFLVEKASAPRTLRSIKGAPRRISWYPSILRALYNFKTPRPCYSSV

SEQ ID NO: 49967 - protein, 122 aa, Zea mays
  Coding DNA Sequence Number=SeqID_8188
MPSLPIIAECPSSDRKNKKPATVDSLWYQRSGLGLGPGCYTASCWGLPWARSTGLVAGVGPICHRGRGWSRLRLVSWPGGIALRILSRALIKTVRLGPEFCRETPIELQNHARSPEPWECDK

SEQ ID NO: 49968 - protein, 122 aa, Zea mays
  Coding DNA Sequence Number=SeqID_8189
MSAAGDCVGFAGRCSWAAPLDPRSRAASAAPVPYPDAWCYTASCWGLPWARSTGLVAGVGPISHRGRGWSRLRLVSWPGGIALRILSQALIKTVRLGPEFCRETPIELQNHARSPEPWECDK

SEQ ID NO: 49969 - protein, 185 aa, Zea mays
  Coding DNA Sequence Number=SeqID_8190
  Subcellular localization annotation: CTP_CleavageSite=59; ConfidenceScore=5.52e-01
MPRARASTVLNPSLQLDPRRHVAPNCQSSYRSSSARAFSSRDDQWAPLGSPSTGFIQTCANSYSYADKAPSCSLPVHALPETFNDWWDLRIRLTMSTFTPFVPLPGGPRLSDSSSSFAVHVGGRPCVAAPRTRPRPQPRAPWPLAEPAPTPAPTHQPRALHVGQSAEPAAESPSPNRAFCTSART

SEQ ID NO: 49970 - protein, 136 aa, Zea mays
  Coding DNA Sequence Number=SeqID_8191
MMGKEGIRCGHRWTVRGGRNKTLLWLGVARIYSSKPGISDRVELPRSNDQRILRSHPRRTLRRSAETGSASSEWGRRKPADILGPHGSEGNMAKQGVGADPWVQGVGAQFLGRSGALASHRWERAHAARPAGVVRV

SEQ ID NO: 49971 - protein, 65 aa, Zea mays
  Coding DNA Sequence Number=SeqID_8192
MSSPACARGPTDSDHRQRRPTIDMTVVTSPTSLDTSPKLDRRRYLRIRIMSIQSMVRTKPERDER

SEQ ID NO: 49972 - protein, 248 aa, Zea mays
  Coding DNA Sequence Number=SeqID_8193
  Gene Ontology: Mol. function=starch synthase activity; Cellular component=chloroplast; Biological process=glucan biosynthetic process
  Homolog annotation: Hit_ID=Q84VC7; Match level="QueryCoverage=89%, HitCoverage=27%, E-value=1e-104, Identity=83%"; Hit description =Starch synthase-like protein
  Pfam annotation: Domain name=Glycos_transf_1; Domain location=52-227; Score=-4.5; E_value=0.0034; Accession=PF00534.10; Description =Glycosyl transferases group 1
GGRGLQDTLKVHSKKFVGILNGIDTDTWNPSTDRFLKVQYSANDLYGKSANKAALRKQLKLASTQASQPLVGCITRLVPQKGVHLIRHAIYKITELGGQFVLLGSSPVQHIQREFEGIADQFQNNNNVRLLLKYDDALAHMIFAASDMFIVPSMFEPCGLTQMVAMRYGSVPVVRRTGGLNDSVFDLDDETIPMEVRNGFTFLKADEQLGYFSFSIRRNLSENSHSSQGSGINSRDIETVPCCLHEVS

SEQ ID NO: 49973 - protein, 52 aa, Zea mays
  Coding DNA Sequence Number=SeqID_8194
MQAACNRAKWARPFDSNEPSMEVQAHASCNWRAGCYVGSEGALSHGVKTVRP

SEQ ID NO: 49974 - protein, 116 aa, Zea mays
  Coding DNA Sequence Number=SeqID_8195
MWNTAPKVLPQFVHVHQKVFTPREVILLEPGTGCRELWRLAGPSGGAKGSTQTNKKNNPGFKRKEQKETEAHLRYNSPDCPVCHRTVRCTSGATAICAQRSTLQSEQWISDVRAAS

SEQ ID NO: 49975 - protein, 76 aa, Zea mays
  Coding DNA Sequence Number=SeqID_8196
  Gene Ontology: Mol. function=molecular_function; Cellular component =integral to membrane; Biological process=biological_process
  Homolog annotation: Hit_ID=Q8LEK2; Match level="QueryCoverage=89%, HitCoverage=37%, E-value=5e-25, Identity=81%"; Hit description=FAM18- like protein At1g09330
  Pfam annotation: Domain name=DUF846; Domain location=2-76; Score =37.6; E_value=7.7e-10; Accession=PF05832.3; Description=Eukaryotic protein of unknown function (DUF846)
MDQRQAGALAFYILFSLFVKSFVIIFVITVLLAALDFWVVKNVSGRILVGLRWWNEIDDDGNSVWKFECLDGEVVT

SEQ ID NO: 49976 - protein, 455 aa, Zea mays
  Coding DNA Sequence Number=SeqID_8197
  Gene Ontology: Mol. function=hydrolase activity, acting on ester bonds; Cellular component=cellulose and pectin-containing cell wall; Biological process=lipid metabolic process
  Homolog annotation: Hit_ID=Q5W722; Match level="QueryCoverage=76%, HitCoverage=77%, E-value=1e-166, Identity=80%"; Hit description =Putative GDSL lipase/acylhydrolase
  Pfam annotation: Domain name=Lipase_GDSL; Domain location=109-429; Score=186.7; E_value=5.6e-53; Accession=PF00657.12; Description=GDSL- like LipaseAcylhydrolase
  Subcellular localization annotation: CTP_CleavageSite=58; ConfidenceScore=5.62e-01
MAGATNGGGNGGGGKVVSMPLQYFCVLAAVVVAVMVLSLSFMSPAAMVAVRQNLSSVAAAPGGSSNSSAGGAGAGGAAGLAKAASPPAGWKEKEQEQEQEQARRPPVVLFNFGDSNSDTGGVAAAGGIRIMPPEGRTYFHHPTGRLSDGRVIIDFICEFPLPIQFNTAPAAGESLGTRELNPYLRGIGSDYSNGVNFAMAGSTVTHGVSPYSLNVQVDQFVYFRHRSLEMFERGLEGPVSKEGFESALYMMDIGHNDMVGVAHTPSDQWDKKITEIVGEVRQAISILYDNGARKFWIHGTGALGCLPALVVQETKGEQDKHGCLAGVNRAAKAFNRKLSQLCDDLRFHLKGATVVYTDMFAIKYDFVANHTKYGIEWPFMVCCGNGGPPYNMKQGRPGCGDLCPPEAKVVSWDGVHFTDFGSGLAAKLAMSGEYSKPRVKLASLIHGGSKKTSDS

SEQ ID NO: 49977 - protein, 137 aa, Zea mays
  Coding DNA Sequence Number=SeqID_8198
  Subcellular localization annotation: CTP_CleavageSite=37; ConfidenceScore=5.23e-01
MSGAPEDSSSNSSPSGISRGNSAIIHRTVRCTPDSVRCTKEERPPELASLGNSERQLRYNSPDMSGVHRTVRCNCGATTTSGANGYLQRIYCAPARAEVRHAHAGAPDTQQYMSGAPPDIKAGPEVRAPTVGTQRLW

SEQ ID NO: 49978 - protein, 770 aa, Zea mays
  Coding DNA Sequence Number=SeqID_8199
  Gene Ontology: Mol. function=metal ion binding; Biological process =metal ion transport
  Homolog annotation: Hit_ID=Q5JL93; Match level="QueryCoverage=27%, HitCoverage=55%, E-value=9e-21, Identity=31%"; Hit description =Glycine-rich protein-like
MADKEKLESEEEYESDLDDAPLSALRRRDAASDDEDEDEDGGMPLRRRKAGSDADSDGQGAAEVYDEDGAYEESEEYEEYEYGGFKAGGGGVRGVAVEAVAGAGHEEGEAGDGEAEKAGEAAPGGEEEDKKGNEPYSVPTTGAFYMHDDRFQEGRGRGRGRQRRMVNSRRLWSPKDEQAWVHDRFDEMDLHDFHGDNPKRKQGGVFRGRGGGQGGRTRGISRGNFRGSRTRTYYHDGSKNYSYVPKESHAYRDNTKNAHHSSHINGKNRVPKPSRDHYDGAKSYDIVPNESHIYHGDAKSQKNAPRVVRGRGSKRYQPRLKSTSDVSSVQNTKSQSLEGTSSNANLVKDEAQGPNSRLEQVLPIKQTVASNLNSASPPFYPARSSSQEFAVGQGENTQELSTNLVRGKAFVPSGHVEAAINGMNRPALLPPASSSNGPFPVATNQVNRDYGHPAHPIVQQNPVQPPTRSAPRMPAQMFGATFSNGSKISPAQPTSTILDDDAEISSPSGSNKYDSRLTVKGQPDDQGEERASFLYGGARVLGATSAMGITLGDQNFHGTPALLPVMQFGGQRPVGRGVPSIGMALPGFVSQQQLGINNSEMTWLPILTGASGALGAPYGSPYIAVDGSYYSRPPEQPSSSVSNRESSANNASSLKSQEITEVAGDARTQHQNKPRRRSVRKCEGLDGNREDGGLGRTAKLVSPLYSVHHVSDCVWVCAASAYELFGGCRIFELTNKKERVEHQIEKGGRSSPVRTVRACGLHGLRKRRTD

SEQ ID NO: 49979 - protein, 217 aa, Zea mays
  Coding DNA Sequence Number=SeqID_8200
  Gene Ontology: Mol. function=nucleic acid binding; Cellular component= nucleus; Biological process=DNA integration
  Homolog annotation: Hit_ID=UPI00004C1778; Match level="QueryCoverage =83%, HitCoverage=28%, E-value=2e-70, Identity=73%"; Hit description =UPI00004C1778 related cluster
MALYTSHELPPLRTYETHSALSFKSGCDTSGEIEQAGFPEALRPEKFSGMHFKRWQVKVMLWLTGINVIHISKGKHEGLLTSGEEKKHVDANTIFIGAIFSVLVDRLCDANIHYTDKKELWDALTVKYGALDARSELYIMETFQDYKMADNRSVVEQAREIRCIAKELDLLKIVFPYRIVVGCIITKFPSSQRNFTTSLKHKRQEISVENLMASLDV

SEQ ID NO: 49980 - protein, 81 aa, Zea mays
  Coding DNA Sequence Number=SeqID_8201
MVGIETNVQLIVSIAISEYFHFFLALWENSSLYSVHDRLEYILFIGERIPSSDGSESLVFTMRDWTTTIGGPPPWAHVVCR

SEQ ID NO: 49981 - protein, 154 aa, Zea mays
  Coding DNA Sequence Number=SeqID_8202
MALDEDMVGSGNKDTSDDSTSKVSLSIDDLTVETCPSLQIELVEKNARITSLEKANSSKRDERQGSKLNRRNMNRPTHGVHDPPIQRHHTMPRGALPHAARPQETQCLNLYSSKYNETWASFHRKMTEGITRLASIKFIITIFICKRLIKIKQG

SEQ ID NO: 49982 - protein, 118 aa, Zea mays
  Coding DNA Sequence Number=SeqID_8203
MDEVAEGGEEGMLLHLGLLEVLLLERLLVEPSIGLVLAEGVLVLALAPARVVVVLANIRLALLRATSDEVVGVTTVVASILGPTTPLIQVVVVEPREPTGHKRQLLVSKALHLLLYNG

SEQ ID NO: 49983 - protein, 143 aa, Zea mays
  Coding DNA Sequence Number=SeqID_8204
MEYSAKTSLPLYIFDIILPCRCQRFNSNQSKEQVRSQKKGAKSKPKAALVWRIGQSGVPPDSVRCTRVIQLELFTFGFPRRTFAIIHRTVWGLERFLECLSVAMRLMVLGFDSGNGCQHCNHCSGEDEAVEGDFQEFQDYDEF

SEQ ID NO: 49984 - protein, 55 aa, Zea mays
  Coding DNA Sequence Number=SeqID_8205
MSCINSPFESSEFRLAYPLKYLRAIILVEPKTLAKEKWNKLELLQKMKPSGFDIF

SEQ ID NO: 49985 - protein, 47 aa, Zea mays
  Coding DNA Sequence Number=SeqID_8206
MVSKCIVGAVHLATGRPRKRAWFEWDLVLVGKDTVRLSRNRLGIELS

SEQ ID NO: 49986 - protein, 68 aa, Zea mays
  Coding DNA Sequence Number=SeqID_8207
MPTLVRGYLFTHCTPEILLNPVFEDLRMPKDLMVKYAAKSMFLRREFGVWDSLQRQRGLLAQTNEQLA

SEQ ID NO: 49987 - protein, 148 aa, Zea mays
  Coding DNA Sequence Number=SeqID_8208
MTLKRRRSSDSMVAVVFLDLLRSGGDAAQVLHKANHVGEVIPHSDESVLQSTKSPKAAALHSCRRLQRRIAPQRLLAIDEGEEGESRARFYSPGQERTQSGWSRGSSAELVGDRVIGAVRCEHHARIGKKAPDTGVPVGSGSKADLAT

SEQ ID NO: 49988 - protein, 90 aa, Zea mays
  Coding DNA Sequence Number=SeqID_8209
MGFPELLPTCLLEVQNKANHVGEVIPHSDESVLQSTVRRTSATKEKLRRAMHRRLRRQARPECNHTIHAAPRRSPPKRRPSIPAADYSGA

SEQ ID NO: 49989 - protein, 53 aa, Zea mays
  Coding DNA Sequence Number=SeqID_8210
MGERDEADKRALAASERNQREKEGDKALTGGARMSTRGSGWAGYRGGERGRAR

SEQ ID NO: 49990 - protein, 77 aa, Zea mays
  Coding DNA Sequence Number=SeqID_8211
  Subcellular localization annotation: CTP_CleavageSite=68; ConfidenceScore=5.50e-01
MNKDTGIQGAITNGTPVPSPWAHVPSKGSKRASSHGVKTEKRATLRLRRNNRAKKGVQRLAPEGFTVASDAERGMTR

SEQ ID NO: 49991 - protein, 196 aa, Zea mays
  Coding DNA Sequence Number=SeqID_8212
  Subcellular localization annotation: CTP_CleavageSite=77; ConfidenceScore=5.35e-01
GDVKLLRKLSRVCLRCPSRVRAPLFGRGGDRRLRPGRSPSPGVGRSGVRRLLGLSPSLSPGSGGAEFAIFWGLARVRALGRAERSSSSSGAEPKSEPWVGRSGVRRLLGLSPSPSPGSSGAEFAVFRGLARVRALGRAERRPRAERSRSVERRSDCGHFGSVDWGARVRIKLYADGGYQLRIRSLEGTPNYGPRHY

SEQ ID NO: 49992 - protein, 132 aa, Zea mays
  Coding DNA Sequence Number=SeqID_8213
  Subcellular localization annotation: CTP_CleavageSite=41; ConfidenceScore=5.12e-01
MIALMPLAPPQPVFSFLIPGGDDSMNPRNRKPCSCICRGLVAQQLLELGCLSSVLQLQASDTSKLAVGESHSQQGTDGQGLQSGSANCHVSSAELCRCSLIGYLHVDHHFAVCLGTTQPMKLAIRREFTTTD

SEQ ID NO: 49993 - protein, 93 aa, Zea mays
  Coding DNA Sequence Number=SeqID_8214
  Homolog annotation: Hit_ID=Q8L4M1; Match level="QueryCoverage=54%, HitCoverage=13%, E-value=6e-11, Identity=58%"; Hit description =Putative WD-40 repeat protein
MAQGRLLLLVGPRSRPLDERPLGAPGQQILAVGAEPVLSRLTINGTVLSQIKCAPQCAFSVSIHSSGIAAVAGYGGLGGCDLRSWEPPSVHIW

SEQ ID NO: 49994 - protein, 96 aa, Zea mays
  Coding DNA Sequence Number=SeqID_8215
MEVRVPLLPQHILRNGDGREKKCGVRRWRELLAREAGKVGCVALPMAPVTGVASTRVPGGVNIGSSVTIPGVLPVFASASHSSHGNPGSAFSVGIV

SEQ ID NO: 49995 - protein, 91 aa, Zea mays
  Coding DNA Sequence Number=SeqID_8216
MEKPSAQLRAANHERAPWQQVVGAAAAEHIRCICTGIDKQVSDVSERGTLFRNGRRNDPSRGKLTKAPPTKQNATAAFMQVCAGLRLLFGS

SEQ ID NO: 49996 - protein, 92 aa, Zea mays
  Coding DNA Sequence Number=SeqID_8217
  Homolog annotation: Hit_ID=Q9FGZ2; Match level="QueryCoverage=74%, HitCoverage=43%, E-value=2e-19, Identity=62%"; Hit description =Arabidopsis thaliana genomic DNA, chromosome 5, TAC clone:K6M13
  Pfam annotation: Domain name=DUF786; Domain location=6-92; Score =42.1; E_value=1.9e-09; Accession=PF05646.4; Description=Protein of unknown function (DUF786)
MGNMINYRIFPNTGTYWIFPKIRKSRTFLSIIGGVVAGIWGFTGLMGFVFYFLIMMVASIGLLAKSKFSVQAYFDSWTRISIEGVFGGLMII

SEQ ID NO: 49997 - protein, 75 aa, Zea mays
  Coding DNA Sequence Number=SeqID_8218
MFMSGRVGGDDKRAGVLNLIFRGRPKGCIGADSGCARERSNGGRDNVAEPTLPYHPMLDMMKRKILGICVTVKKP

SEQ ID NO: 49998 - protein, 98 aa, Zea mays
  Coding DNA Sequence Number=SeqID_8219
  Homolog annotation: Hit_ID=Q1SP60; Match level="QueryCoverage=40%, HitCoverage=11%, E-value=2e-07, Identity=70%"; Hit description=MPPN
  Subcellular localization annotation: CTP_CleavageSite=43; ConfidenceScore=5.28e-01
MDGVVQYQQQSPTTPSGQQSQQQKVALITLPPPREVARPEMPRDSAPAAGRVDEEEWVTVFGEFPFEHKHADFQEFYIIGLWTSYPQHNSRDSENIVQ

SEQ ID NO: 49999 - protein, 216 aa, Zea mays
  Coding DNA Sequence Number=SeqID_8220
  Gene Ontology: Mol. function=transcription factor activity; Cellular component=nucleus; Biological process=regulation of transcription, DNA-dependent
  Homolog annotation: Hit_ID=Q8LRE9; Match level="QueryCoverage=72%, HitCoverage=79%, E-value=1e-33, Identity=49%"; Hit description =Putative DRE binding factor 2
  Pfam annotation: Domain name=AP2; Domain location=55-119; Score =132.4; E_value=1.2e-36; Accession=PF00847.10; Description=AP2 domain
  Subcellular localization annotation: CTP_CleavageSite=64; ConfidenceScore=5.77e-01
MSEPSSDTSCTSSCSSGPSTSTSPRAAPSAAAAAASGGGKKRPRSDDGGSSSSSAPAYRGVRMRAWGKWVSEIREPRKKSRIWLGTFPCPEMAARAHDAAALSVKGARAVLNFPGLARHLPRPGLPRAARRPGRRRARRAHAPLRRDGAAAHDEPEPERQPLEVAAELVFDELAPLWVEDVVELGPSADHPWPWTPCDGLDIAAGFHPLPLLWDDY

SEQ ID NO: 50000 - protein, 115 aa, Zea mays
  Coding DNA Sequence Number=SeqID_8221
MRTPRYAGAELELDPPSSERGRFLPPPDAAAAAAEGAARGLVDVEGPDEQEDVHEVSELGSLIAIYTTIRHRAGGWSSRSVHARVPAGLPCSAAGVSESDDPIDRRPRAQAQLAG

SEQ ID NO: 50001 - protein, 248 aa, Zea mays
  Coding DNA Sequence Number=SeqID_8222
  Homolog annotation: Hit_ID=Q6QP54; Match level="QueryCoverage=21%, HitCoverage=19%, E-value=1e-10, Identity=62%"; Hit description =Putative kinase
MTASNKGLGKGDTPKRTILREGNRLRASLLIRDSKAGPSEGFNSRLRARGLHTHYWSKDSAACAALTAEPPDRVRLTAAKASLGRHRKLCLARPQGSDSGSAPEDGELRSARPRARTRARSWKTANSAPPDPGLGLGLSPGRRRTPLRPTQGSDSGSAPEDGELRSARPRARTRAQPRKTANSAPPDPGLGLGLNPRRRRTPLRPTQGSDLGSAPEDDELRSTRPKARTWAQPQETTDSASPDPKART

SEQ ID NO: 50002 - protein, 189 aa, Zea mays
  Coding DNA Sequence Number=SeqID_8223
  Gene Ontology: Mol. function=carboxyl- and carbamoyltransferase activity; Cellular component=ornithine carbamoyltransferase complex; Biological process=amino acid metabolic process
  Homolog annotation: Hit_ID=Q8SA97; Match level="QueryCoverage=73%, HitCoverage=23%, E-value=6e-12, Identity=40%"; Hit description =Ornithine carbamoyltransferase
MAPPVDVAGLRLRLGDAEAPPKPRSSLSSVAEADSEPLGRARRRVRRLPGLSPSLSPGSGGAEFAVFRDLARVRALGRAERSSPSSGAEPESEPWVGRSGASYGRSVERRSDDGHFGSAGGPLQLYADGGYQLRIRSLEDNDEAAAWSGGMRWRRPRERRVGRRWRWQRPRVGQRWAAAACGMSGGMRE

SEQ ID NO: 50003 - protein, 235 aa, Zea mays
  Coding DNA Sequence Number=SeqID_8224
  Homolog annotation: Hit_ID=Q6QP51; Match level="QueryCoverage=60%, HitCoverage=73%, E-value=2e-12, Identity=36%"; Hit description =Putative growth-regulating factor 1
MTASKKGTGKGDTPKGILLRKGNEPRAPLLIRGSKAGPSEGFNSRLRALGLRAHYWLAPKGFDSRLRRRARDDPGYVRYITKARATLLRVRLTAAKSGFGRHRKLRLARTQGSAPVSASDDELCLARPRARTQPRLRKTTNSASPDPRARTRPRLWKTTNSASPDPGLGIGLDSGRRRTPPRPTLGLGLSLGLRRWSPPRPTRGSDSTSTSEDRLDLDLGGATASPDPGLGPTTS

SEQ ID NO: 50004 - protein, 207 aa, Zea mays
  Coding DNA Sequence Number=SeqID_8225
  Gene Ontology: Mol. function=binding
  Homolog annotation: Hit_ID=Q1SZZ7; Match level="QueryCoverage=61%, HitCoverage=60%, E-value=3e-36, Identity=71%"; Hit description =Armadillo
  Pfam annotation: Domain name=SET; Domain location=1-142; Score=2.4; E_ value=0.00052; Accession=PF00856.18; Description=SET domain
MEQILLGRSDVAGWGAFIKNPVNKNDYLGEYTGELISHKEADKRGKIYDRADSSFLFDLNDQVLLVPPAVLALRETSTFRKFTLQICFSLIYPFRLIACAQDLVTQFQNATNEESKEKIVANLANFAYDPFNYAFMRQVVLELFLDCITEPNEKLVEFGIGGICNSCEDPANSLIITQSGGIPLVVQCLWSLVRNTISISEAIVISS

SEQ ID NO: 50005 - protein, 148 aa, Zea mays
  Coding DNA Sequence Number=SeqID_8226
MSGGSTKREMETGTSHGKAPSKESGAKGREESPPRVKSHWSGDKKKKMKKVVYYETDSSSRASHSTIVHLYLHISTEMMKEQGPTLTPTSGELNRPSSASIDFRNAAEEDNSARGWPTPLDTNQETLREARSQKRKATSPTPQEGELD

SEQ ID NO: 50006 - protein, 134 aa, Zea mays
  Coding DNA Sequence Number=SeqID_8227
MEKTTPRTRWQGCGHKTGVREGETAGENLRAARGNSSEEYRPLGEAIGRDRARASSSGGGGALWANAGALDGLGLAGHRAGAASKHGCMPARPNWLQAVLKKSWDVWEDDVAKVPGDVRECARAGPRRAWGRRS

SEQ ID NO: 50007 - protein, 129 aa, Zea mays
  Coding DNA Sequence Number=SeqID_8228
MQRRGALQGQGVDLLARLPGADVERAGSDAWALGRMSRGGCPGCVWSRASGARAARWAQGAQSVSGWLQARMVGRWRVGVAAAGSRGRHGLLGCASERGARGRREEAGGREREAEGGGGFNWKRARALG

SEQ ID NO: 50008 - protein, 95 aa, Zea mays
  Coding DNA Sequence Number=SeqID_8229
  Subcellular localization annotation: CTP_CleavageSite=49; ConfidenceScore=5.48e-01
MGLAIRSSGSSSSKISVPCSICHQRRRRLRLRQGLLQQSGCPVVVQGASLAEVQEKAASQTPPPAEARGKSPAAPAPGIDAPAPRAGDDVVSLGD

SEQ ID NO: 50009 - protein, 58 aa, Zea mays
  Coding DNA Sequence Number=SeqID_8230
MLPASLLVGHTLCSSLPSAAPTSSLGLVMVFGEKDELVIVVALAKFKFYFMLISTFVF

SEQ ID NO: 50010 - protein, 675 aa, Zea mays
  Coding DNA Sequence Number=SeqID_8231
  Gene Ontology: Mol. function=cellulose synthase (UDP-forming) activity; Cellular component=membrane; Biological process=cellulose biosynthetic process
  Homolog annotation: Hit_ID=Q944E4; Match level="QueryCoverage=98%, HitCoverage=97%, E-value=0.0, Identity=53%"; Hit description =Cellulose synthase-like protein OsCslE1
  Pfam annotation: Domain name=Cellulose_synt; Domain location=1-675; Score=110.5; E_value=5e-30; Accession=PF03552.5; Description =Cellulose synthase
MEERLFATEKHGGRALYRLHAVTVFLGICLLLCYRATHVPAAGSGGRAAWLGMLAAELWFGFYWVITQSVRWCPIRRRTFHDRLAARFGERLPCVDIFVCTADPRSEPPSLVVATVLSVMAYNYPPAKLNVYLSDDGGSILTFYALWEASAFAKHWLPFCRRYGVEPRSPAAYFAQSDEKPRHDPPHALQEWTSVKNLYDEMTERIDSAARTGNVPEETRAKHKGFSEWDTGITSKDHHPIVQILIDGKDKAVADNEGNVLPTLVYVAREKRPQYHHNFKAGAMNALIRVSSVISNSPIILNVDCDMYSNNSDTIRDALCFFLDEETGHRIAFVQYPQNYNNLTKNNIYGNSLNVINQVELSGLDAWGGPLYIGTGCFHRRETLCGRRFTEDYKEDWGQRNQGAAAAPPPRRRRDRSEGQVASDLRLRARRRHAVGETRWGSSTAARWEDVITGLAIHCRGWESVYSNPRESGVRRRRADHARPDHTAAQAVERGQLRHLRFQLTSPWIAPFVYVAVAKNVYSAWEALWCGDTLRGWWNGQRMWLVRRTTSYLYGFVDTVRDSLGLSKMGFVVSSKVSDEDEAKRYEQEMMEFGTASPEYVIVAAVALLNLVCLAGMAAALDVFFVQVALCGVLVLLNVPVYEAMFVRKDRGRMPFPITLASVGFVTLALIVPFF

SEQ ID NO: 50011 - protein, 206 aa, Zea mays
  Coding DNA Sequence Number=SeqID_8232
MPTRVEHVCACILPEFWRVLSLIQACSCLASGAIGSSASPDPRARTRLRLRKTTNSASPDPRARPPSRLRKTTNSASPDPRAQTQPRLRKTTNSASPDPRARTQPRLRKTTNSASPDPRARTQPRLRKTTNSASPDPRARTQPRPRATVSASPDPRARTQSRPQTTVYASPDPWARTQPRPRRNRHLVQTRARTGHVARGPSLPYP

SEQ ID NO: 50012 - protein, 158 aa, Zea mays
  Coding DNA Sequence Number=SeqID_8233
MWKDKCAPPVFTISDNWELVYKTVAQGGGDVRAGDPQHGGYLRVTFCISMFVLPDLEDALEASHYASHHAHCTSRRQPHATCGLVPNTLLSSYEQQKNRALLVVTYAVVGLKCAGSLPTRQCMRTHTILFLCMPFFCDNATQVSISTTSPLSLSDKSV

SEQ ID NO: 50013 - protein, 224 aa, Zea mays
  Coding DNA Sequence Number=SeqID_8234
  Gene Ontology: Mol. function=24-methylenesterol C-methyltransferase activity; Cellular component=integral to membrane; Biological process=steroid biosynthetic process
  Homolog annotation: Hit_ID=O82427; Match level="QueryCoverage=62%, HitCoverage=38%, E-value=8e-60, Identity=88%"; Hit description=24 -methylenesterol C-methyltransferase 2
MAVRRQEEQVGVGQPKEKAKEEEEDVAVEEKIIQVEAEMPELREKKQQHLREKTSLQPTWWKRRSSRRSSGQRRLRTQGGDGVVVRLGDGHGGGEGQEGDGSQVGIHHAGQGAGQVHTVLVLLPPPQGDGPPRQRRRRRCRAFVDTFYNLMTDIYEWGWGQSFHFSPSLPGHSHRDATRVHEERVADLLDARPGHRLLDVGCGVGGPMRAIAAHSGSIVTGSRR

SEQ ID NO: 50014 - protein, 510 aa, Zea mays
  Coding DNA Sequence Number=SeqID_8235
  Gene Ontology: Mol. function=serine carboxypeptidase activity; Cellular component=cellulose and pectin-containing cell wall; Biological process=proteolysis
  Homolog annotation: Hit_ID=Q69ME0; Match level="QueryCoverage=85%, HitCoverage=86%, E-value=1e-163, Identity=65%"; Hit description =Putative serine carboxypeptidase
  Pfam annotation: Domain name=Peptidase_S10; Domain location=93-501; Score=645.2; E_value=5.3e-191; Accession=PF00450.12; Description =Serine carboxypeptidase
MRSNNLLYVSLLIVCAAALQLQLHLRADASQEGDQLKKFIRSRRDSSTRSRIDDKGAFKVSNNVVGGLLRAGGYSGSEQSALMKAGDKIAALPGQPDGGVDFDQYSGYVTVDEKNGRALFYYLAEAPRGAASKPLLLWLNGGPGCSSFGIGAMQELGPFRVNSDNKTLSRNKNAWNNVVVHVMANVIFLESPAGVGFSYSNTSSDYDLSGDQRAADDAYLFLVNWLERFPEYKSRPFYISGESYAGHYVPELAATILIQNSYDDAKTAIINLRGILVGNPLLDWRMNFKGQVDYYWSHGLMSDEVFANITRHCDDDSDSDVGACDGAVQAVDAGQLDYYNIYAPVCVDAANGGSYYPTSAQLPDPCSYHYTYSYLNDPAVQVALHARPTTWSGCANLNWTDSPASMVPTISWLVENKLPVWIFSGDFDTVCPLPATRYSIRDLKLRITTPWRPWTVNMEVGGYVQQYKGGFTFASVRGAGHMVPSSQPERALILLDSFLKGVLPPYVPEQ

SEQ ID NO: 50015 - protein, 56 aa, Zea mays
  Coding DNA Sequence Number=SeqID_8236
MGLRRVGGEVKDEEAVEGGPVPDLYGPASPRENGATASDSYGERGGGCTHVMMHKG

SEQ ID NO: 50016 - protein, 133 aa, Zea mays
  Coding DNA Sequence Number=SeqID_8237
MVLLAMFVSYMYRRLHGMLTYSPKVVICLVLRKTAPLMSYVQGHPEIVVQLVDLIGITSIMEVLIRLIGADETIYSNYGDTLQWLENTNVLEMIADKFNSSKLSMYLKCSYLCDMDNSDHLNYATKVTGKPPA

SEQ ID NO: 50017 - protein, 111 aa, Zea mays
  Coding DNA Sequence Number=SeqID_8238
MAAGKSQVHLWLRMWRQPSRDNCAMLLSLLTKWHLQLRSERKQLEDKIVCLQTQHTEAVRDRFVVENKIQNLLEKVGLLEKENEDLGRRWNEEKDATDQAKTEAQATRVEA

SEQ ID NO: 50018 - protein, 142 aa, Zea mays
  Coding DNA Sequence Number=SeqID_8239
MRDEDVEDLASLESSVATQDDDADVGIEEQSSLARVGRTEPRAAGSSLPSASTQGLATRGSDFDSWSSGSEGLLSPFARMDDESSKEDLDFVVPLDVSATESRTGDPSSRVSPIVARSKRRVGVLKRRLGTAVEPPQGIRGS

SEQ ID NO: 50019 - protein, 105 aa, Zea mays
  Coding DNA Sequence Number=SeqID_8240
MGSRLRVWELHRVLRKVPMAETGWRGHHGGPNGSPELGGQHGTAPCGGQISTLPKSSFGGRIGHGSGHLLGRWSLRRRGESVAPPWISRLGEGEDSWAVRSFSDG

SEQ ID NO: 50020 - protein, 575 aa, Zea mays
  Coding DNA Sequence Number=SeqID_8241
  Gene Ontology: Mol. function=transporter activity; Cellular component= integral to membrane; Biological process=transport
  Homolog annotation: Hit_ID=Q8H607; Match level="QueryCoverage=70%, HitCoverage=85%, E-value=1e-169, Identity=74%"; Hit description =Putative glycerol 3-phosphate permease
  Pfam annotation: Domain name=MFS_1; Domain location=23-433; Score =99.3; E_value=1.1e-26; Accession=PF07690.6; Description=Major Facilitator Superfamily
MEAAAPAPARGLGRQEYAVLALTFASYASFHASRKPPSIVKAVLSADWVPFSGPRGPHRLGELDVAFLSFYALAMFAAGHLADRADLRCLLGTAMLASGAACAALGAAYFLDIHALAFFAAAQVSSGVVQSAGWPCVVAVVGNWFGHASKRGTIMGVWNSHTSVGNIAGSVLAAAALEFGWGWSFLLPAVVIAALGVVVLVFLVAHPSEAGLDVEVMEVEMNGDGGEEVGLLGEDKKEVQGNEDNEFELEMGSQLPRAIGFVEAWKLPGVAPYAFCLFFSKLVAYTFLYWLPFYIRNNAVAGQFLSHKASGILSIVFDIGGVLGGISAGFLSDAIGARAITSVLFLLLSIPSLVVYRTYGSISMHHNIALMFLSGYFVNGPYSLITTAVATDLGTQDAIKGNSRALATVSAIIDGTGSVGAALGPLLTGGGNTPSQQLPSSLSHRVARSKTSWRVKEMERLGYFPTGYGWVAGAETMATSWSSRVYLLPDFAYCAMIFYLVCSRNTRVHIHQPNARVEMSKYVWATTTFGRAASVEVFAKHCCLHGQKRSVGGIVDQFESYMFTPKVFAKHLGYF

SEQ ID NO: 50021 - protein, 145 aa, Zea mays
  Coding DNA Sequence Number=SeqID_8242
MLGKQDSLSWLQSVPLHRQGRRQDLLFLTCSAATQGGKAGVFDLLHCRLRKARSAIFNLLRYNPGGRLVSLNYFAVGTGRQDLLFLTCSATTKGGKAGVFDMLRCRCRKAISAIFNLLRYNPGRQGWCLRSASLSVQEGKICYFY

SEQ ID NO: 50022 - protein, 417 aa, Zea mays
  Coding DNA Sequence Number=SeqID_8243
  Gene Ontology: Mol. function=pectate lyase activity; Cellular component=anchored to membrane; Biological process=pathogenesis
  Homolog annotation: Hit_ID=Q1T4K8; Match level="QueryCoverage=81%, HitCoverage=78%, E-value=1e-128, Identity=61%"; Hit description =Pectate lyase, N-terminal; Pectolytic enzyme, Pectin lyase fold
  Pfam annotation: Domain name=Pec_lyase_C; Domain location=168-353; Score=290.0; E_value=4.4e-84; Accession=PF00544.9; Description =Pectate lyase
  Pfam annotation: Domain name=Pec_lyase_N; Domain location=25-77; Score=52.1; E_value=1.9e-12; Accession=PF04431.4; Description =Pectate lyase, N terminus
  Pfam module annotation: Pfam domain module=Pec_lyase_C::Pec_lyase_N; Domain location=168-353::25-77
MGFAGYSYSWFLLSFFALIPTLRAHIAEYDEYWKARELEAIENLNKAYHPNPEEVVRHYNDHFVNTMLEYNNTRRVLKGKKNGPCEITNPVDSCWRCDPNWVKNRKRLADCAPGFARGTTGGKDGKFYVVTDPNDDIANPKPGTLRHAVTQLRPLWITFKKSMIIKLKQELIVTSDKTIDARGANVHICYGAGITVQFSRNVIIHGLHIHHIKPATGGIIRDAENHIGLRTASDGDAISLFGATNIWLDHLSLYDSSDGLIDVIQGSTAITISNCHFTDHNEVLLFGASDNYVADEKMQITVALNRFGKGLVDRMPRCRLGFFHVVNNDYTHWFMYAIGGSSHPTIISQGNRYIASSIYMDLEDALLRIDKMPSTLMGEEKKRVLEMMIGTGVDERISKDSQTLGSITTWDEFVGKF

SEQ ID NO: 50023 - protein, 46 aa, Zea mays
  Coding DNA Sequence Number=SeqID_8244
MVACDMIEHLKELYQGKARQERFDTSKAPFQSYEQEKQLNNYSDFI

SEQ ID NO: 50024 - protein, 411 aa, Zea mays
  Coding DNA Sequence Number=SeqID_8245
  Gene Ontology: Mol. function=phosphoinositide binding; Cellular component=multivesicular body; Biological process=cell communication
  Homolog annotation: Hit_ID=Q9FG38; Match level="QueryCoverage=93%, HitCoverage=93%, E-value=1e-173, Identity=80%"; Hit description =Sorting nexin-like protein
  Pfam annotation: Domain name=PX; Domain location=20-136; Score=113.8; E_value=4.8e-31; Accession=PF00787.14; Description=PX domain
  Pfam annotation: Domain name=Vps5; Domain location=158-403; Score =41.0; E_value=6e-10; Accession=PF09325.1; Description=Vps5 C terminal like
  Pfam module annotation: Pfam domain module=PX::Vps5; Domain location =20-136::158-403
MEQQRSTSESSQSPRSPPSQRYLSVSVSDPVKLGNGVQGYISYRVITKTNFPEYQGSEKIVIRRYSDFVWLRDRLFDKYKGIFVPPLPEKSAVEKFRFSAEFIETRRQALDVFVNRIASHNELQQSEDLRTFLQADEESMERLRSQETGIFKKKPADLMQMFKDVQSKVSDVVLGKEKPLEESNPEYEKLKHYVFELENHLTEAQKHAYRLLKRHRELGQSLSGFGKASKLLGACEGQALGKAFDELGAKSETLSIKLQKEAHQLLMNFEEPVKDYVRAVQSIKVTIGERANAFRHQCELAETMKLKEINLDKLMLTRSDRVGEAEQEYKEASHFILYAYWLKAESEEVTRRFETIVRRMNEEIVRFQEQKTQDMRIAFHEFAKGQARLAKSIADAWRSLLPKLEACSDTS

SEQ ID NO: 50025 - protein, 80 aa, Zea mays
  Coding DNA Sequence Number=SeqID_8246
MEMFYNELNAHTRMVVDAFTNGTLLDKTYNEEYEILEKIADNDYQYQTMRVRTSKRAAALTVEKHKLPLSLTALTHNLNN

SEQ ID NO: 50026 - protein, 86 aa, Zea mays
  Coding DNA Sequence Number=SeqID_8247
MTYKTKTLQSDREGEFLSLQVDELFKECGIVSQLTPPEILNGPTVWERKSMKNPRLDKPGKSSRWELTQNWHCPFVKTFTPSQSKL

SEQ ID NO: 50027 - protein, 70 aa, Zea mays
  Coding DNA Sequence Number=SeqID_8248
MESKATIGTCLEYDNPSGNKLKAKGNFGAKIVNIKTKRVSMQNRSDIFLGHDYTQDFEEQEAVAIQPLRI

SEQ ID NO: 50028 - protein, 175 aa, Zea mays
  Coding DNA Sequence Number=SeqID_8249
MGKGRYKRCSVEYRRHIKSALFVVSALHLEYRGECSMPISHSSTILMEQILLLHVIMTKWSINVGKIILKEIHDCARKKTKSAYFPSLITSLCLRAQVKTKANLKGPYVQGCITTHDLERLLENVHEKNQIKPSEPIEPDINESSNKFETEANSVTESEKVESEEEPNETEPIKE

SEQ ID NO: 50029 - protein, 47 aa, Zea mays
  Coding DNA Sequence Number=SeqID_8250
MDVKTAFVNGKLEEDVSMTQPKGFVNAKDAGKHNVDICHKRNCIQLS

SEQ ID NO: 50030 - protein, 106 aa, Zea mays
  Coding DNA Sequence Number=SeqID_8251
  Pfam annotation: Domain name=zf-CCHC; Domain location=64-81; Score =21.7; E_value=0.00026; Accession=PF00098.13; Description=Zinc knuckle
MFDISKALFQCNMKKVGPKPILMVRNNKGKGKAKVQTKPKGKGRPKPGKEKAVLKPKGGVAKEGNYFHCGVTGHWKRNCPIYLEEVKKAKISGTSASGTVKEQDFG

SEQ ID NO: 50031 - protein, 632 aa, Zea mays
  Coding DNA Sequence Number=SeqID_8252
  Gene Ontology: Mol. function=RNA-directed DNA polymerase activity; Cellular component=nucleus; Biological process=RNA-dependent DNA replication
  Homolog annotation: Hit_ID=Q8S472; Match level="QueryCoverage=99%, HitCoverage=58%, E-value=0.0, Identity=77%"; Hit description =Putative gypsy-type retrotransposon RIRE2
  Pfam annotation: Domain name=Retrotrans_gag; Domain location=121-212; Score=75.8; E_value=1.4e-19; Accession=PF03732.7; Description =Retrotransposon gag protein
MREASVHTGRTRNTAPAAPDRLGNGHPHRNRRTHLDERVRRGYHPRRGGRYDSGEDRSPSPEPPGPQAFSRAIRRAPFPTRFRTPTTITKYSGETRPELWLTDYRLACQLGGTDDDNLVIRNLPLFLSDSARAWLEHLPPRQISNWDNLVQAFVGNFQGTYVRPGNSCDLRSYRQQPGESLRDYIRRFSKQRTELPNVTDSDVISAFLAGTTCHDLVSKLGRKTPTRASELMDIATKFASGQEAVEAIFRKDKQPQGHPPEDVPEASTQRGTKKKDRKKSQAKRDAADVDLVAAAEYKNPRKPPGGANLFDKMLKEPWPYHQGSVKHTLEECTMLRRHFHKARPPTEGGRARDDDKEDHKAGEFPEVRDCFMIYGGPVANASARHRKQERREVCSVRVAAPVYLDWSDEPITFDQGNHPDRVPSPGKYLLVVDLVIGNIRLTKVLMDGGSSLNIIYAETLGLLRIDLSSVRAGVAPFHGIILEKRVQPLGQLDLPVCFGTPSNFRRETLTFEVVEFRGTYHAVLGRPCYAKFMAVPNYTYLKLKMPGPNGVITVGPTYRHAYECDVECVEYAEALAESEALIADLESLSKEAPDVKRHAGNFEPAETVKSVPLDPNNDASKQIRIGSELDPK

SEQ ID NO: 50032 - protein, 126 aa, Zea mays
  Coding DNA Sequence Number=SeqID_8253
  Homolog annotation: Hit_ID=Q6ZI62; Match level="QueryCoverage=38%, HitCoverage=12%, E-value=2e-13, Identity=73%"; Hit description =Glycosyl transferase-like protein
MGRRKMTYFLWPIWESPPKPLRTIIPPLLPRERHHGEPLQATRVDDRSWRASMHRYWAGETRYAHSRQTDAPLLANSAWHCSSFCFRRISDFAKTAWHWTADRTGSRWGLGGGGGGGTDQSREGDE

SEQ ID NO: 50033 - protein, 351 aa, Zea mays
  Coding DNA Sequence Number=SeqID_8254
  Gene Ontology: Mol. function=RNA-directed DNA polymerase activity; Cellular component=mitochondrion; Biological process=RNA-dependent DNA replication
  Homolog annotation: Hit_ID=Q8S463; Match level="QueryCoverage=99%, HitCoverage=20%, E-value=0.0, Identity=85%"; Hit description =Putative prpol
  Pfam annotation: Domain name=RnaseH; Domain location=1-123; Score= -17.8; E_value=0.0026; Accession=PF00075.14; Description=RNase H
MFFNGSLMKIGAGAGLLFISPLGKHLRYVLRLHFPASNNVAEYEALVNGLRIAIELGVRRLDARGDSQLVIDQVMKNSHCRDPKMEAYCDEVRRLEDKFYGLELNHIARRYNKTADELAKIASGRTTPEVPSAPEGEALRVEEERSGVTPNRNWQTPYLQYLHRGELPLDRAEPRWLARRAKSFVLLGDGKELYHRSPSGILQRCIPIAEGQKLLQEIHSGACGHHAAPRALVGNAFRQGFYWPTAVADATRIVRTCEGCQFYARQTHLPAQALQTIPITWPFSVWGLDLVGPLQKAPGGYTHLLVAIDKFSKWIEVRPLTSIRSEQAVAFFTNIIHRFGVPNSIITDNGT

SEQ ID NO: 50034 - protein, 176 aa, Zea mays
  Coding DNA Sequence Number=SeqID_8255
MARARLDRAWMTAMVRGSAWTTRGHIYDVKNNKIGFAIVGCNWEATQASKDSTNDESKFHRNCQDSSPTHCRRRGGTSVVAEGGERAGEAASWSGEGRRVWGVVLAPLLGNGRRGWWQHRRREGVTGGEATDVEGGWRDDRGGANDVDRGGTDNVDGGSTDVIGGWRQQRDDMLVT

SEQ ID NO: 50035 - protein, 57 aa, Zea mays
  Coding DNA Sequence Number=SeqID_8256
MSCHVLAISLTLLLDKGRNCVLLGCRRNYEMVARCGTIINRVMRKMSQIDPSTGYST

SEQ ID NO: 50036 - protein, 131 aa, Zea mays
  Coding DNA Sequence Number=SeqID_8257
MASRKRTRCGSSTCRGKQRGTAAHREHGMARTGELDEHRDDLGTSCAQAHAQGTSAGRAADWREPAWPYILDPNFLSDVYDVDSNGDTVNDGPNKTDFVFDNLLYGIRLKLAETIFANAPMISSPKQCAEG

SEQ ID NO: 50037 - protein, 94 aa, Zea mays
  Coding DNA Sequence Number=SeqID_8258
MHHAPYARTPNSHTPVKPQRCWSRGCYGRREWCEDGRYVVEEGDDDEEEEVLPLVRRERRSKACSNILLEVFFFAEGPQGKNTFGKIIQKAYVT

SEQ ID NO: 50038 - protein, 136 aa, Zea mays
  Coding DNA Sequence Number=SeqID_8259
  Subcellular localization annotation: CTP_CleavageSite=71; ConfidenceScore=5.19e-01
MGNAVSQAMNKLPKVVYCDVVTLLCTWHPGGKRQTLAKTSGPAARQVGTTASPRPHTQSRSFHRRLISALRAHESRRGEDHGVEFIDDTFTAPEDLFVHCTIRIFFSVFDGAYSGVFFFDFYVTNYRPDYNKVIHL

SEQ ID NO: 50039 - protein, 373 aa, Zea mays
  Coding DNA Sequence Number=SeqID_8260
  Gene Ontology: Mol. function=RNA-directed DNA polymerase activity; Cellular component=chromatin; Biological process=chromatin assembly or disassembly
  Homolog annotation: Hit_ID=Q6L428; Match level="QueryCoverage=87%, HitCoverage=45%, E-value=1e-36, Identity=42%"; Hit description =Putative integrase, identical
MELPFGEFDLILGIDWLVKHRTSLNCAAKRMVLKTTEDEEVVVIGERRDFLSNVVSAFRAKTLVPKGCEAFLAYIGVSDSDGPFVGDIRTVKDFSDVFPDELPGLPPSHEVEFDLRSGYHQLRVKEADMYKTAFKNRYGHYECQVMPFGLTNTLVAFMDLMNQVFQPYLDQFVVRHYLYGEKCTIYTDHKSLKYLLTQKELNLRQRRWIELLKDYDYSIEYHPVRTDYSLQKLAKLYVAEIEASDRQKSYADLKRLEIEYPVGDYVFLKVSPWKQLLRFGKKGKLNPRFIAPYCILKHVGPVAYQLELSPELDLIKDVFHVSMLRHYRSGPTHIVPVEEIEISVKEIVVNLHQWYKWAKPHLTIEASVNFSFG

SEQ ID NO: 50040 - protein, 68 aa, Zea mays
  Coding DNA Sequence Number=SeqID_8261
MVAMSSWAVLVTVVLMQCCNVIVAARPLPMESPAVATADGGWLEMIMQVLQGPGSNNHNCQASNGSCP

SEQ ID NO: 50041 - protein, 90 aa, Zea mays
  Coding DNA Sequence Number=SeqID_8262
MSSEEGALTRKEARPWRELRSAAKEEEQGHWVPSAMDGQKERRSCVLDLYGPESQGSAIIGTNIWVATTGSVPGFQPVEDLDDSFMFAVV

SEQ ID NO: 50042 - protein, 114 aa, Zea mays
  Coding DNA Sequence Number=SeqID_8263
MRMGYREATTHIQLWLSSALISHFEFDVVDFLICEIEDTILDGLRARLQLPYAHYLCHIFAQLIRHPQFQATLEASRMQFGFYHLAPEDTAPAPVDPLAPDLRVEDEAIKQFED

SEQ ID NO: 50043 - protein, 92 aa, Zea mays
  Coding DNA Sequence Number=SeqID_8264
MVKSPELGHARARVILGSPELGTEGKNDTANSVVAKRPRIQGQRGGMAGKRPRADWRNSGEGFQPPGGQSATIGLGLGPVEVGEHSGQKPGH

SEQ ID NO: 50044 - protein, 202 aa, Zea mays
  Coding DNA Sequence Number=SeqID_8265
MARVPGGKARHPLYTEERENLGGGVRRHLRRNSGAVGTGSTVYARFVEVDSARSGMALTDVAHTATYNARLCAVRAKLRPWAHLPSPCRREWRRAVAAPAGKKKEIGLLGLVIVSHLSPRGLGRFKMHGARRLRGWSMGRAGAGEQTGEEQPVLASTRERSGRAGMEHGERSEMRQGGMEHGRGVVGRQGGMHTTARAGEEH

SEQ ID NO: 50045 - protein, 109 aa, Zea mays
  Coding DNA Sequence Number=SeqID_8266
  Homolog annotation: Hit_ID=Q6FUA8; Match level="QueryCoverage=40%, HitCoverage=5%, E-value=5e-07, Identity=73%"; Hit description =Candida glabrata strain CBS138 chromosome F complete sequence
MEQQTISIAKAAITIVLILGTSVLAAVNPIAGCYDALKFPRGRNIVGCRSQGTPDILSVLCIVICQKLIGDYDRVSLPTKHPQNLIISSEKAKSIVQDITKVRLENSLV

SEQ ID NO: 50046 - protein, 139 aa, Zea mays
  Coding DNA Sequence Number=SeqID_8267
  Subcellular localization annotation: CTP_CleavageSite=46; ConfidenceScore=5.72e-01
MQAGRAGSNHATLGPSRTHRAPWPKALRAPCRGHRRMTAPRTPRACASGLVGVSRRAGLPRRGAHAGSRTPAPEPRRGRAPEPGVAPAPGPRWGQGRELAGGIEERGVAGGAYLDGGNCSRLGGCVVGENQGRAVREEE

SEQ ID NO: 50047 - protein, 403 aa, Zea mays
  Coding DNA Sequence Number=SeqID_8268
  Gene Ontology: Mol. function=RNA-directed DNA polymerase activity; Cellular component=nucleus; Biological process=RNA-dependent DNA replication
  Homolog annotation: Hit_ID=Q8S472; Match level="QueryCoverage=99%, HitCoverage=37%, E-value=0.0, Identity=79%"; Hit description =Putative gypsy-type retrotransposon RIRE2
MMDIATKFASGQEAVEAIFRKDKQPQGRQPEDVPEAPTQRGTKKKGKKKSQAKRDATDADLVAAAEYKNPRKPPGGANLFDKMLKEPFPYHQGPVKHTLEECAMLRRHFHKAGPPVEGGRAHNNDKREDHKAEEFPEVHDCFMIYGGQVANASARHHKQERREVSSVKVAAPVYLDWSDKPITFDQGNHPKRVPSPGKYPLVVDPVIGNIRLTKVLMDGGSSLNIIYAETLGLLRIDLSSVRAGAAPFHGIIPGKRVQPLGQLDLTVCFGTPSNFRRETLTIEVVGFRGTYHAVLGRPCYAKFMAVPNYTYLKLKMLGPNGVITAGPKYRHAYECDVECVEYAEALAESEALIADLESLSKEAPDVKRHAGNFEPAETVKSVALDPSNDASKQIRIGSELDPK

SEQ ID NO: 50048 - protein, 121 aa, Zea mays
  Coding DNA Sequence Number=SeqID_8269
MATIHLTHELVLCDVQGREQPCRGCSSRAGRARAPRVMSWPLLGEPPPRRAVHAGVPAPEPHARAGVAPAPRPRRGQGRELVGGIEERGVAGGAYLDGGNCSRLGGCVVGENQGRAVREEE

SEQ ID NO: 50049 - protein, 346 aa, Zea mays
  Coding DNA Sequence Number=SeqID_8270
  Gene Ontology: Mol. function=RNA-directed DNA polymerase activity; Cellular component=mitochondrion; Biological process=RNA-dependent DNA replication
  Homolog annotation: Hit_ID=Q8S463; Match level="QueryCoverage=99%, HitCoverage=18%, E-value=1e-178, Identity=88%"; Hit description =Putative prpol
  Pfam annotation: Domain name=RnaseH; Domain location=1-123; Score= -15.7; E_value=0.0017; Accession=PF00075.14; Description=RNase H
MFFDGSLMKTGAGAGLLFISLLGKHLRYVLRLHFPASNNVVEYEALVNGLRIAIELGVRHLDARGDSQLVIDQVMKNSHCRDPKMEAYCDEVRRLEDKFYGLELNHIARRYNETVDELAKIASGRTTVPPDVFSRDLHQPSVKTDDTPEPEKASAQPEIPSAPEGEALRVKEERSGVTPNRNWQTPYLQYLHRGELPLDRAEARRLARRAKSFVLLGDGKELYHRSPSSILQRCISIAEGQELLQEIHSGACGHHAAPRALVGNAFRQGFYWPTAVADATRIVRTCQGCQFYARQTHLPTQALQTIPITWPFAVWGLDLVGPLQKAPGGYTHLLVAIDKFSKWIEV

SEQ ID NO: 50050 - protein, 117 aa, Zea mays
  Coding DNA Sequence Number=SeqID_8271
MASHSSHEHTSSGWRQKAAARNQHAVALEAGNGMRLQLALRPSCFPTTSLLICQSKEEDKGSSIIKPSPRSLAVAHGPCPVLTKTNYNEWFLVMKVKLQGREVQDVVSYDDNDFDEN

SEQ ID NO: 50051 - protein, 61 aa, Zea mays
  Coding DNA Sequence Number=SeqID_8272
  Subcellular localization annotation: CTP_CleavageSite=52; ConfidenceScore=5.08e-01
MAVTGVVMLYCGCATLQAFHHVVPSRTNSPTTRKHLPLPRLAGPGARWSSVALDAVGDHAV

SEQ ID NO: 50052 - protein, 81 aa, Zea mays
  Coding DNA Sequence Number=SeqID_8273
  Gene Ontology: Mol. function=structural constituent of ribosome; Cellular component=ribonucleoprotein complex; Biological process =translation
  Homolog annotation: Hit_ID=Q9XEK8; Match level="QueryCoverage=62%, HitCoverage=37%, E-value=6e-16, Identity=84%"; Hit description=60S ribosomal protein L23
  Pfam annotation: Domain name=Ribosomal_L14; Domain location=1-71; Score=-28.3; E_value=0.011; Accession=PF00238.10; Description =Ribosomal protein L14pL23e
MVMATVKGKPDLRKKVMPAVIVRQRKLWCRKDGVYMYFEDNAGVIQTPSYESLLECVQTSESIATVAKGAIGLIESFVFVH

SEQ ID NO: 50053 - protein, 154 aa, Zea mays
  Coding DNA Sequence Number=SeqID_8274
  Gene Ontology: Mol. function=hydrolase activity, hydrolyzing O -glycosyl compounds; Cellular component=anchored to membrane; Biological process=carbohydrate metabolic process
  Homolog annotation: Hit_ID=Q69Q39; Match level="QueryCoverage=85%, HitCoverage=30%, E-value=2e-45, Identity=70%"; Hit description =Putative elicitor inducible beta-1,3-glucanase
MFDAQVDAAYFALEAAGYSGMEVRVAETGWASAGDATEAGANMENAITYDRNLRKRLFLRKGTPYRPDRVAKAYIFALFNEDLKPGPTSERHYGLFKPDGSVSINIGLKGLLPSSAPPRPLVAFKIFAHRYIEVAITPEQQLLLPMTSSALMLV

SEQ ID NO: 50054 - protein, 652 aa, Zea mays
  Coding DNA Sequence Number=SeqID_8275
  Gene Ontology: Mol. function=RNA-directed DNA polymerase activity; Cellular component=nucleus; Biological process=RNA-dependent DNA replication
  Homolog annotation: Hit_ID=Q8S472; Match level="QueryCoverage=99%, HitCoverage=63%, E-value=0.0, Identity=75%"; Hit description =Putative gypsy-type retrotransposon RIRE2
  Pfam annotation: Domain name=Retrotrans_gag; Domain location=170-241; Score=9.1; E_value=0.023; Accession=PF03732.7; Description =Retrotransposon gag protein
MPEPSTTEGRQIQGELKNLLEGAAVRRAESSASRRQGYPSEHRATTSRFMWEASVHTGRTRNTAPVAPGRLGNEHHHRDRRAHLDERVRRGYHPRRGGRYDSGEDRSPSPEPPGPQAFSRAIRRAPFPTRFRTPTTITKYSGETRPELWLADYRLTCQLGGTDDDNLIIRNLPLFLSDTAHAWLEHLPPGQISNWDDLVQAFVGNFQGTYRTELSNITDSDVIGAFLAGTTCRDLVSKLGRKTPTRASELMDIATKFASGQEAVEAIFRKDKQPQGRPPEDAPEVSTQRGAKKKGKKKSQAKRDAADADLVAAAEYKNPRKPPGGANLFDKMLKEPCPYHQGPVKHTLEECAMLRRHFHRVGPPAEGGRARDDDKKEDHQAGEFPEVRDCFMIYGGQAANASARHRKQERREVCSVKVAAPVYLDWSDKPITFDQADHPDHVPSPGKYPLVVDPVIGDVKLTKVLMDGGSSLNIIYVETLGLLCVDLSSVRAGAVPFHGIIPGKRVQPLGQLDLPVCFGTPSNFRRETLTFEVVGFRGTYHAVLGRPCYAKFMAVPNYTYLKLKMSGPNGVITIGPTYKHAFECDVECMEYAEALAESEALIADLESLSEEVPDVKRHAGNFEPAETVKSVPLDPSGDASKQIRIGSELDPK

SEQ ID NO: 50055 - protein, 125 aa, Zea mays
  Coding DNA Sequence Number=SeqID_8276
  Subcellular localization annotation: CTP_CleavageSite=75; ConfidenceScore=5.09e-01
MTSGYRRIPSESSSRRGNTDGRAARAPGLAPASTGCSTEALGPRTHGSQGRAAFHRKRVLALVERRLRLDKMTLEASVESSRMASTALSTDDLLRWVKGTVGKTDYTVPVPMGPNQGYVSMRLRG

SEQ ID NO: 50056 - protein, 288 aa, Zea mays
  Coding DNA Sequence Number=SeqID_8277
  Gene Ontology: Mol. function=metallopeptidase activity; Cellular component=signalosome complex; Biological process=red or far red light signaling pathway
  Homolog annotation: Hit_ID=Q7GC30; Match level="QueryCoverage=99%, HitCoverage=100%, E-value=1e-121, Identity=67%"; Hit description=JUN- activation-domain-binding protein homolog
  Pfam annotation: Domain name=Mov34; Domain location=55-169; Score =164.9; E_value=2e-46; Accession=PF01398.11; Description=Mov34MPNPAD -1 family
MEPTSSASIARQTWELENNIPAAASDPDAMDAIYRYDDASQARAQQEKPWANDPHHFRRTKISALALLKMVVHARAGGTIEVMGLMQGKCEGDAIIVMDAFALPVEGTETRVNAQADAYEYMVDYSTINKQAGRLENVVGWYHSHPGYGCWLSGIDVSTQMLNQQFTEPFLAVVIDPTRTVSAGKVEIGAFRTYPKDYKPPDEPVSEYQTIPLNKIEDFADKLEQAEGQLAHSRFGGMIMPSQRKKEQEESPLAKVIKDILFNSVHPSSKASTSAPPDSSGPEPMVEA

SEQ ID NO: 50057 - protein, 71 aa, Zea mays
  Coding DNA Sequence Number=SeqID_8278
  Gene Ontology: Mol. function=transferase activity; Biological process= amino acid biosynthetic process
MERNTICWDVTICLLVVYPTKKTCISKCFSNNSVTPCRFCPRLYHIEWGCHYTTSCTASESEISTTIKRGV

SEQ ID NO: 50058 - protein, 84 aa, Zea mays
  Coding DNA Sequence Number=SeqID_8279
MTRDGLDAPANSVAVVTGSSTAAAGSFEAAALPERVLRPEGRPKMADIGVALEVRVEPPATATAPSTTSICRAAGGVAIGRATP

SEQ ID NO: 50059 - protein, 280 aa, Zea mays
  Coding DNA Sequence Number=SeqID_8280
MAAAGGCTTTSGCTTVALNGDWWMHGGADDGPIFYRNFVVGRHHAIQDGLSIPASAIIAPRSRSVDGRRHSRDPPRLHYPPNPWPSRDIPTAPPLPPLSSRPLRRVLVPVVDRGPFRQSASPWPPTTNPALVRHSLPVGAAAVAGANAKNVSPPPVAAAWPGGGGAEEAVAGGKEEWQLTPLDMGLGVGEGWDVADAVAPPGLAPDHTFLRWIIGGEDASATMGSVMDSPVLELDHAPSMMSLAFGSTMPFAPTLEDAKPVPFGHTPNFFGSHPSLNAAP

SEQ ID NO: 50060 - protein, 147 aa, Zea mays
  Coding DNA Sequence Number=SeqID_8281
MAGLAAAAAALLLLWAGGVSVAKVTEDGRLTVPIWRSFELHNTKLANACRYWETVSRIVGNPELFSDGVLLRRQRVQRPPSLPQRILPEAAERIARLGHGIMYADTPAATAQSQLPSDLCRAPSLHRGIRSVYSTGSKFDANAGLEF

SEQ ID NO: 50061 - protein, 32 aa, Zea mays
  Coding DNA Sequence Number=SeqID_8282
MAFDYGRLTAQKYIEAAEFNLHVNISLGALWP

SEQ ID NO: 50062 - protein, 106 aa, Zea mays
  Coding DNA Sequence Number=SeqID_8283
MELRELRVSGVSKGIQRVGESLTVCRKVSIVLILYTLKPSTGDGNAQGSDELVNRLFRSATGRMVIGTNAFQPNDSGDDQIEAGEGFTEQVCVPVKGFGRISIGWH

SEQ ID NO: 50063 - protein, 385 aa, Zea mays
  Coding DNA Sequence Number=SeqID_8284
  Gene Ontology: Mol. function=protein binding; Cellular component =spliceosome; Biological process=mRNA processing
  Homolog annotation: Hit_ID=Q6QP51; Match level="QueryCoverage=59%, HitCoverage=91%, E-value=6e-18, Identity=40%"; Hit description =Putative growth-regulating factor 1
  Subcellular localization annotation: CTP_CleavageSite=8; ConfidenceScore=5.09e-01
MEAQAHTSCNRRAGSYVQATAPPLAPLPRLLDCGTSTTTRGNLAYDPTVPAGRSSGHVVSQAHVTSWDSKRTLSHGDTFGRRSKRRFTFAIMTVSKRDRERGIPRKGILLHEGNRPRASLLIRGSKAGPSEGFNSRLRALGLRAHYWSEVRRSAPRKGSTAASGHSGSARTTDQGFVGWSTKGAIGNSASPDPRARTRAQPRKTTNSASPDPRAQTRAQSRKTTNSASPDPRARTRAQPRKMTNSASPDPRARTRAQPRKTTNSASPDPRAQTQAQPQKTTNSASPDPRARTWAQPRRRRTPLRPTPGLGLGLSPGRRGTPLRPTPGLGLSPGLSRRSPPRPTQGLGLDLGLGRRTRPRPRRSLHLAQPGARTDHVTGGAIITLP

SEQ ID NO: 50064 - protein, 345 aa, Zea mays
  Coding DNA Sequence Number=SeqID_8285
  Gene Ontology: Mol. function=protein serine/threonine kinase activity; Cellular component=beta-catenin destruction complex; Biological process=protein amino acid phosphorylation
  Homolog annotation: Hit_ID=Q8LK43; Match level="QueryCoverage=84%, HitCoverage=76%, E-value=1e-157, Identity=91%"; Hit description=GSK -like kinase
  Pfam annotation: Domain name=Pkinase; Domain location=74-320; Score =248.3; E_value=1.6e-71; Accession=PF00069.15; Description=Protein kinase domain
  Pfam annotation: Domain name=Pkinase_Tyr; Domain location=74-309; Score=3.6; E_value=1.1e-12; Accession=PF07714.7; Description=Protein tyrosine kinase
  Pfam module annotation: Pfam domain module=Pkinase::Pkinase_Tyr; Domain location=74-320::74-309
MASVGVARSSLGFQNGTSSSSDPDRLPNELGSMSIRDDKDVEDIVVNGNGAEPGHIIVTSIDGRNGQAKQTISYMAERVVGHGSFGTVFQAKCLETGETVAIKKVLQDKRYKNRELQTMRVLDHPNVVALKHCFFSKTEKEELYLNLVLEYVPETAHRVIKHYNKMNQRMPLIYAKLYMYQICRALAYIHNSIGVCHRDIKPQNLLVNPHTHQLKLCDFGSAKVLVKGEPNISYICSRYYRAPELIFGATEYTTAIDVWSAGCVLAELLLGQPLFPGESGVDQLVEIIKVLGTPTREEIKCMNPNYTEFKFPQIKAHPWHKVGILYWIVCPLFLSLTSTKVDIFH

SEQ ID NO: 50065 - protein, 110 aa, Zea mays
  Coding DNA Sequence Number=SeqID_8286
MAVRGWHDVVVVHQRCLCCPVPAHVHEITIVHQDAQLSSAAARMCISPTGACSPHRHRPTPACSPPRAGLSGALLLVNIGCARSSSSPSVARLSSSLAASHARHQIEDVQ

SEQ ID NO: 50066 - protein, 300 aa, Zea mays
  Coding DNA Sequence Number=SeqID_8287
MPINNAPLGWSIFIDLPVPGLRGPRVCQGGGPAVYIPTASFLHPQPQSTRAHAQTRGGEKLPLPTTAKEGIPEGGGTHGRPSAGMLAADVSSVARLLRGEAVKKGGPEIVTMDLLGGCGGGVAAEDEVVDLDVTVPAGWERRLDLLSGKTFLTPRHQSVQGGHQDLNLPPPAAGSASAPNTNNSSAAVCTLDMVRSALERATAGRTAASPATSSTSSASTSSSSSAGKRNRRSPLPATPAMRAAACPSCLTYVLIAEADPRCPRCAARVPPLRGKAAGAATVGSGKKPRIDLNAAADEME

SEQ ID NO: 50067 - protein, 113 aa, Zea mays
  Coding DNA Sequence Number=SeqID_8288
  Homolog annotation: Hit_ID=Q75GP8; Match level="QueryCoverage=83%, HitCoverage=80%, E-value=4e-11, Identity=43%"; Hit description =Putative auxin responsive protein
  Pfam annotation: Domain name=Auxin_inducible; Domain location=1-113; Score=40.9; E_value=1.6e-09; Accession=PF02519.5; Description=Auxin responsive protein
MNWKRKSSGSRCREEEQRERLIQQAAADPPDGLRSCKGCCVPRGCVAVLVGGGAEPEERVVVDVRALGQPCVRALLDMAARELGYDQKGVLRIPCAAAEFRRAVAADGHRCMR

SEQ ID NO: 50068 - protein, 136 aa, Zea mays
  Coding DNA Sequence Number=SeqID_8289
MKKYASVIRVIAHTLSFNCALLTRYIIYLISDQKDEGFEGEEGSPHGDPEKDEMIDKKVVTLRQSLLKQTSRLALERRSSSSSSTPRLMVGSKEWARSATASSKFGHGRFQTNRGSLASSRPKLSAAASAGDIRRT

SEQ ID NO: 50069 - protein, 105 aa, Zea mays
  Coding DNA Sequence Number=SeqID_8290
  Homolog annotation: Hit_ID=Q6JAC8; Match level="QueryCoverage=66%, HitCoverage=69%, E-value=2e-10, Identity=47%"; Hit description =Putative auxin-induced protein family
  Pfam annotation: Domain name=Auxin_inducible; Domain location=1-78; Score=34.2; E_value=8.6e-09; Accession=PF02519.5; Description=Auxin responsive protein
MRERLIPAAGCVPPGCVAVLVGGGDEPERVVVDVRALAQPCVRALLEAAQREFGFDQKGVLRIPCAADEFRRAVTAGGHRCRRLGRADGGSRPRYNCTLCRMPEL

SEQ ID NO: 50070 - protein, 301 aa, Zea mays
  Coding DNA Sequence Number=SeqID_8291
  Gene Ontology: Mol. function=imidazoleglycerol-phosphate dehydratase activity; Cellular component=cytoplasm; Biological process=amino acid biosynthetic process
  Homolog annotation: Hit_ID=P34048; Match level="QueryCoverage=68%, HitCoverage=95%, E-value=2e-94, Identity=85%"; Hit description =Imidazoleglycerol-phosphate dehydratase
  Pfam annotation: Domain name=IGPD; Domain location=100-263; Score =317.2; E_value=3e-92; Accession=PF00475.9; Description =Imidazoleglycerol-phosphate dehydratase
  Subcellular localization annotation: CTP_CleavageSite=51; ConfidenceScore=5.73e-01
MTTARLVSTSPARLPSTSASPIPRTSLCVVGRAPAFSARALGFSLRLKPSPAMAAAGPPTAHGDSIGGSSRIGEVKRVTKETNVHVKINLDGTGVAECSTGIPFLDHMLDQLASHGLFDVYVKAIGDTHIDDHHSNEDIALAIGTALLEALGDRKGINRFGHFTAPLDEAAVEVILDLSGRPHLSCGLDIPTQRVGTYDTQLVEHFFQSVVNTSGMTLHIRQRICMTPSLSPDLAPYCLLKLAGKNSHHIIEASFKAFARALRQATEYDLRRQGTVPSFCQQINGRAEKIRALQLSGKRDG

SEQ ID NO: 50071 - protein, 380 aa, Zea mays
  Coding DNA Sequence Number=SeqID_8292
  Homolog annotation: Hit_ID=Q6ZA47; Match level="QueryCoverage=31%, HitCoverage=15%, E-value=8e-51, Identity=86%"; Hit description =Putative casein kinase 1, delta isoform 1
MYLIGTTGNSIDINKLGTLPLNLEAGQNGSIKKVTSIPVMPHSGHKGQDRIGCCCCTSSSTWHSKRGWAKWFHKKGYKYSCDATFWVTKGKITPKYLSNRTGRVAGQKEETQNSQGHDDKQMNTKDAKLVGYPHSDEEEHLDFTSLSSFERVEGHLNFVPLASYCNLLEPGKHTLYSGRFAPVGCLREVPVRGIEGHEGYIRLIEAKKKGKGYLLVHKIICTRRFISPQNNMYQDCKIVEGQLYTKRLNEKQITSLLKVQVGNTLEYITDRKLGKGGFGQVYVGRRVSGGAARTGPDAYEDALKLEHRNSKGCNYGPPYEWQVYNTLNGCYGIPSVHYKGRQGDYYILLNSFYSLIFLGNGYAWSQPLGRVEFNGAGLLD

SEQ ID NO: 50072 - protein, 143 aa, Zea mays
  Coding DNA Sequence Number=SeqID_8293
MEALNVSWNGLLALVLNVEEKEIGLGRWGVNRPKVDLLDRRWCPLRFVAIGPYHQSEKHLANLYEMKSAATYYVCQRVVVALKKVRQAVLAMSGGPGAPARRPVGSQERSARKMGKGDEETSAAAVCARNVRVKKNVNLVNVF

SEQ ID NO: 50073 - protein, 318 aa, Zea mays
  Coding DNA Sequence Number=SeqID_8294
  Homolog annotation: Hit_ID=Q5U9D4; Match level="QueryCoverage=12%, HitCoverage=4%, E-value=4e-10, Identity=87%"; Hit description=Plasma membrane proton ATPase 5
  Subcellular localization annotation: CTP_CleavageSite=17; ConfidenceScore=5.07e-01
MDRRRRLPLPPSTRFVLCALAGRSPVTVCAADCAVMQSRTILLPRNSSNRQLRPPPLANQPYLSAPLQTVRHPRLPDRRILPPPLPNARRYRTPAAAHAPRIPHARRRESRRYRTARTPAAANPAATEPPAYHPHAREPYGRRDCRISAPTPPAMPRNTRLPTPLNNCRDRPLPSFAATASWSRTSASPPPVATTASPRTLAPPNPIDAMVSKASKRKAIGEIVEQIPEESGRSYLEICDDLEKKPPKIMWNQSFDLRSPIATSDDATPAASMGARKDGSTKTISKALVLGVNVKMIAGDQLAIGKETGRRLGMGTNM

SEQ ID NO: 50074 - protein, 342 aa, Zea mays
  Coding DNA Sequence Number=SeqID_8295
  Gene Ontology: Mol. function=UDP-arabinose 4-epimerase activity; Cellular component=integral to membrane; Biological process =carbohydrate metabolic process
  Homolog annotation: Hit_ID=Q2LC83; Match level="QueryCoverage=43%, HitCoverage=34%, E-value=4e-68, Identity=87%"; Hit description=UDP-D- xylose epimerase 1
MAEDIILDFTKSKKQSNMAVMILRYFNVIGSDPEGRLGEAPRPELREHGRISGACFDAALGIIPGLKVRGTDYSTADGTCVRDYIDVTDLVDAHVKALGKAQPGKVGIYNVGTGQGRSVTEFVEACKKATGASIKVEYLARRPGDYAEGTQEISEILGTALVTSNPSNRQPVLVLDAREGRLHSLCPPPARLLRLCCGVAMSQSQIEAYTRRAGAAVALAAASALTTGFPALEPRAHVVLALHAILLLGCAAVLLSPAHGDGGPEAARGTTVLGSLRWLGFAGMALSALHVDAEEAPRGTGKGGRGAPAPQPRLAVEEDANGEEANAMPMTGDARVVVDSKV

SEQ ID NO: 50075 - protein, 51 aa, Zea mays
  Coding DNA Sequence Number=SeqID_8296
MTLRSKTKKGVENQIADHLSRLEQDEVMHSFLKALKVFDLSFRNFTHVNLE

SEQ ID NO: 50076 - protein, 414 aa, Zea mays
  Coding DNA Sequence Number=SeqID_8297
  Gene Ontology: Mol. function=nucleic acid binding; Cellular component= chromatin; Biological process=DNA integration
  Homolog annotation: Hit_ID=Q1S4N1; Match level="QueryCoverage=99%, HitCoverage=34%, E-value=2e-81, Identity=39%"; Hit description =Peptidase S8 and S53, subtilisin, kexin, sedolisin; Integrase, catalytic region; Zinc ...
  Homolog annotation: Hit description=finger, CCHC-type; Peptidase aspartic, catalytic
  Pfam annotation: Domain name=rve; Domain location=161-276; Score =17.7; E_value=0.0002; Accession=PF00665.16; Description=Integrase core domain
MAADERLFKDLDRNFTSNIKIGDGNLIEAKRKGNVLVSTGSDQNLLSVGQLVEKGCTLVFKNGCSIVQDSLGQELVIVAMTDRCFMLDVSQVERKAYTSLANSTDLWHRRLGHVNFKSLDLLHRLNLVDDMSKIEASGTVCEVCQLGKQARLPFPVDSAWRAQERLELVHFDVCGPMKIPSISDNKYLVLFIDDLTRFCWVYFLRQKSDVFETFYRSCVKVLGFIINSLLYILLNRMEYSKLPNQFWAEAVNTSVYLFNRLPTRAVKNKTPFEAWHGAKPVVTHLKVFGCVCYTHVPVEKSTKLESRAVPGIFVGYSSNKKGYRVFDPSTKKLLVSRDVQFDEERVWSRNGVEAGLLEENQLDLVTEPTEEGSNVDAVDDAPVRGTRTLADIYQRSNVAVVEPTNYEEAAKDKN

SEQ ID NO: 50077 - protein, 547 aa, Zea mays
  Coding DNA Sequence Number=SeqID_8298
  Gene Ontology: Mol. function=monooxygenase activity; Cellular component=endoplasmic reticulum; Biological process=electron transport
  Homolog annotation: Hit_ID=Q6J540; Match level="QueryCoverage=96%, HitCoverage=97%, E-value=1e-151, Identity=51%"; Hit description =Cytochrome P450
  Pfam annotation: Domain name=p450; Domain location=50-529; Score =246.0; E_value=7.7e-71; Accession=PF00067.12; Description=Cytochrome P450
MEIYYSMFIAPFTTMLSFSTLLAFITFALSHLFKLQWQRNAQKPKQPSLPPGPKPWPIVGNLPELIINKKKTSVSYWIHSFMKEMNTEIACIRLGNVHVIPVTCPEISLQFMRKQDAIFASRPLTMATDVLSKGHLTTIFSPLGDQWRKMKRVMVSEMLSHERHRWLHEKRVEEADNLVRYVLNQCKNGDEGGLVDLRLVARHYCCNVIKKLIFNRGYFGEGKADGRPGFEEEEYVDAILALVIHLYSFCISDYWPFLRGLDLEGHEKIVEDATRVLEKYNNPIIEDRIQQWRDGKKHEPQDLLDVLVSLTDDNGTPLLSADEIKAQVNEIMIAAVDNPSNNLEWALAEMLNKPETLQKARDELDNVVGKYRLIQESDVPQLNFTKACAREAFRLHPVAAFSPPHVSVTDTTVGDYFIPKGSHVIVSRVGLGRNPKVWDEPCEFKPERHLQNCNKGEEVVLEEPDLRLFTFGRGRRGCPGVVLGSLMTTMLFARLLQGFDWSIPTNQGTIDLCPGRGVPFLAKPLLAVAKPRLPPHVYSFLTESEIQ

SEQ ID NO: 50078 - protein, 52 aa, Zea mays
  Coding DNA Sequence Number=SeqID_8299
  Gene Ontology: Mol. function=DNA binding; Biological process=DNA integration
  Homolog annotation: Hit_ID=Q7XYU4; Match level="QueryCoverage=96%, HitCoverage=23%, E-value=4e-11, Identity=69%"; Hit description =Integrase
MDSMIGLPLTPKKKDAIWVIIDRLMKLAHSTPRSKVHFKVLEKVVRSLGYKT

SEQ ID NO: 50079 - protein, 209 aa, Zea mays
  Coding DNA Sequence Number=SeqID_8300
  Gene Ontology: Mol. function=hydrolase activity; Biological process =intracellular signaling cascade
  Homolog annotation: Hit_ID=Q1S1N3; Match level="QueryCoverage=81%, HitCoverage=53%, E-value=6e-29, Identity=40%"; Hit description =Calcineurin-like phosphoesterase family protein, related
  Pfam annotation: Domain name=DUF1723; Domain location=61-110; Score =81.9; E_value=2e-21; Accession=PF08330.1; Description=Protein of unknown function (DUF1723)
MVEELIRLDNQHISIEQMKMSVDRILECYIQNMYGPPSSLVENYLREAGFWNVVTVGRGCKLDPKLISALIERWRPETHTFHLPCGECTITLEDVNMQLGLSVDEYPITRSVQSSDWGAVCYELLGAIPEKINGGRIEMGWLRDTFPESDDDSTEVEIIRYARAYILQIIRGYLMPDLSWNLVHLRWLLKLVDFRAAGELSWGSAILAT

SEQ ID NO: 50080 - protein, 120 aa, Zea mays
  Coding DNA Sequence Number=SeqID_8301
MEANSITEIEESESEEEPNDPDSMKEPEAFQPNRPISSNTVKKLELLIMMDMIKFMHNQQQAYWKYAKIRDDFVRNTFKNISNNFILELPDYIFESWKEDGNVSKDEIAKEEDDEDKLNK

SEQ ID NO: 50081 - protein, 51 aa, Zea mays
  Coding DNA Sequence Number=SeqID_8302
MSEMVYELTHVGFVQVVVGLRHIKFIKLYIELEKSMDMTTFEKGTKDEVSM

SEQ ID NO: 50082 - protein, 126 aa, Zea mays
  Coding DNA Sequence Number=SeqID_8303
  Gene Ontology: Mol. function=small conjugating protein ligase activity; Cellular component=heterochromatin; Biological process =protein modification process
  Homolog annotation: Hit_ID=Q70I24; Match level="QueryCoverage=85%, HitCoverage=68%, E-value=1e-57, Identity=91%"; Hit description=SUMO E2 conjugating enzyme SCE1
  Pfam annotation: Domain name=UQ_con; Domain location=6-119; Score =139.3; E_value=1e-38; Accession=PF00179.16; Description=Ubiquitin -conjugating enzyme
MRHSVPIHFGLADETLSTDWEGGYFPLTLHFSEDYPSKPPKCKFPQGFFHPNVYPSGTVCLSILNEDSGWRPAITVKQILIGIQDLLDAPNPADPAQTEGYHLFIQDANEYKRRVRQQAKQYPPLV

SEQ ID NO: 50083 - protein, 170 aa, Zea mays
  Coding DNA Sequence Number=SeqID_8304
  Gene Ontology: Mol. function=nucleic acid binding
  Homolog annotation: Hit_ID=Q0WQM7; Match level="QueryCoverage=85%, HitCoverage=48%, E-value=2e-36, Identity=57%"; Hit description =Putative RNA-binding protein
MQALNGMVFDLEKGSTLFIDFAKSNSRSKHPRTDEEWTGSNKKSRGSFSRSTSDSCFGSVHVSGMGNSAYSMIGYPPAQSSGNVDANAESTAMKSSASPCPTLFVANLGASCTEEELIQVFSRCPGFLKLKMQSTYGAPVAFVDFQICEIPDGIAKETEINGIEAEIGLQ

SEQ ID NO: 50084 - protein, 85 aa, Zea mays
  Coding DNA Sequence Number=SeqID_8305
MENIKIRANPIEEPEVFMARFLAGHLDCLNEEMKGLSQMSLQIHPKIEVCLIHFVVLLVINLLKVSPENLNTHLTTSSKEGDIVL

SEQ ID NO: 50085 - protein, 36 aa, Zea mays
  Coding DNA Sequence Number=SeqID_8306
MKHWKLRRAINEKLIRLYNGKLIRAIIRKLIRANNR

SEQ ID NO: 50086 - protein, 244 aa, Zea mays
  Coding DNA Sequence Number=SeqID_8307
  Subcellular localization annotation: CTP_CleavageSite=60; ConfidenceScore=5.62e-01
MASCSPSALRPPSWSPPPTPLLPGRDPPRDSRRARLPTPTCHPLNPALTARTTAANSTTAANHPQSRLPTPACQPLTSPLTPPLTARTLQTSRTLRLPTPASRDRRQPSRDRSAKAANVAFRPHARAQFAPSSIPRREGANMSSVHAANNRPDQSAVSNLFPCSIPGPLSFLRPFHFPRQCAAGEEGRRRRSLPRHRRGRISDIAQPRRPRPRRPRMSAAWGQGCGGRGAAAEDAGGVGRGGVE

SEQ ID NO: 50087 - protein, 72 aa, Zea mays
  Coding DNA Sequence Number=SeqID_8308
MDRGHGGARSTMTAQEWARSVVAARAWGRIWREPRLPARAWGRGTVLGDLSRDGATRAGHGGVDADVAKLIE

SEQ ID NO: 50088 - protein, 127 aa, Zea mays
  Coding DNA Sequence Number=SeqID_8309
MSPILLEDWESAGHGVRPRVDRLSSSRGWRAHRIPLGSRRGCAVPRKLAPRVAPEAGPPSRLRHLQRNRMPQKRSQPAQKGAQSSLSLPPLSLSLLFPARVAQGRDEEKRQRVTSPMASPSLLRATC

SEQ ID NO: 50089 - protein, 43 aa, Zea mays
  Coding DNA Sequence Number=SeqID_8310
MANSRIGRYKRLPCLLFLYWKFLIGFMLATEDKQDGQTYETGI

SEQ ID NO: 50090 - protein, 63 aa, Zea mays
  Coding DNA Sequence Number=SeqID_8311
MSTLSDPSKEDTSPEGSGGVLYQQSTMKPKAPKVEPKEENDNDEEQQKLLQMQGVQESNPTQK

SEQ ID NO: 50091 - protein, 310 aa, Zea mays
  Coding DNA Sequence Number=SeqID_8312
  Gene Ontology: Cellular component=microtubule
  Homolog annotation: Hit_ID=Q10QE1; Match level="QueryCoverage=77%, HitCoverage=100%, E-value=1e-44, Identity=49%"; Hit description =Expressed protein
MCQRGHPSRTSPNNILTVASALETVSTTPDSYRATSAVGIIMLDSPLALRANHPIKRSAPLAPTARISMGNCQAAEAEAATVLIQHPGGGGTERAYWALSAETVMAANPGHYVAAVITTAQPDAGDGAASSAAAPVKHLKLLRPDDTLLLGRVYRLVSFEGTVRASCPGLAPNGLIRYVAGRVRPGRHLAARASEVLREFASNKRQVKLSRVTVRAKDEDEDVKPASKHRRASGDVGERKESERSLAKVLRQTEELEPEADPSSGPSAKHRQADTDTPADLEALLPHRALLGHRAARQWRPALQSIAEGG

SEQ ID NO: 50092 - protein, 354 aa, Zea mays
  Coding DNA Sequence Number=SeqID_8313
  Homolog annotation: Hit_ID=Q4QWQ6; Match level="QueryCoverage=31%, HitCoverage=40%, E-value=7e-39, Identity=84%"; Hit description=NAC23
  Subcellular localization annotation: CTP_CleavageSite=14; ConfidenceScore=5.51e-01
MPLPIPCTRHPLPPAPAPRGSRACPAVNQPPRLPQNPPPPANPAPRLRNNRRETPVRRALANPTPAANATDTCTHARDSPQSTTRRAAGWRRRRRRPQACVRHGGGELPAGAEAVRGGGRATPGVPGAGGVLRPAVGLDAAAARGLLQLLGAGAVPEAAGVRPGGAEPAQDQQMGADLRLRSREPRGLHARPRQRTPQYMRMSCSSGSPSTPRSLCPCTPALPVAPPIPVSPSSASRRTSPAPVPSPATRGPKIDLFFRQWEERGRRGGLDFLCREGSLGVGIPGVALLRPLLTTDTLERQSCGIRTWRWTRGGASAGIASLRGTGATCALREKEAELEAARARLHVVELEEWL

SEQ ID NO: 50093 - protein, 289 aa, Zea mays
  Coding DNA Sequence Number=SeqID_8314
MTKETGGGVGNGHRRKQPDACHSIARPRRARVDCGRGVHRCGVCSRRRRILQPGGSKATRGLAWCLVGGHSKSQKGSTANANRRIGEKLAIRKLNSVIWNLVLSPMYPVHARHSHKLAALSMWLANHKTCDVRSATICVGVSRPGVPKPTSECAACLSPDGSSAWASAKGGSEVAGGGRERGGNPAAFVFVPRPGRVGRRGGSSEAEVESVFHGRGRVRAPGSGEAEVVRQRPGRSPSPRVGRSGVRRLLGLSPSPSPGSGRAEFAVFRGLARVRALGRAERSSQSSGA

SEQ ID NO: 50094 - protein, 192 aa, Zea mays
  Coding DNA Sequence Number=SeqID_8315
MEAFVRSDSGTLSASKRGALEGSDWQQKNQDCMTDDDNRFLRPRGRVDPCDGEVGKEGRALPRTLFRSSYTWDRTKAGPTIATTERHPRGDEGAGGRSSIGDLGWTGGVGAGPGCWMRMSPFTRGVTTPMPMPPHGNKWGAVIRVHAHTQAAGSIIRVPTHFLHEILNTWGKIPMDFSFQYHHDSLLNKKFI

SEQ ID NO: 50095 - protein, 104 aa, Zea mays
  Coding DNA Sequence Number=SeqID_8316
  Subcellular localization annotation: CTP_CleavageSite=43; ConfidenceScore=5.07e-01
MGIDSRLSTCVDTQSPKYLEMAQGHISLSGRRAFSRHSMGLVRARACVGLASRRSIDGGVADGCFNNGKVCKDWALLVELAIVVAELDAWTPWHWSGGLGTLPR

SEQ ID NO: 50096 - protein, 235 aa, Zea mays
  Coding DNA Sequence Number=SeqID_8317
  Homolog annotation: Hit_ID=Q10QE9; Match level="QueryCoverage=99%, HitCoverage=61%, E-value=5e-76, Identity=65%"; Hit description =Expressed protein
  Pfam annotation: Domain name=DUF677; Domain location=2-230; Score =157.5; E_value=3.4e-44; Accession=PF05055.3; Description=Protein of unknown function (DUF677)
MRFDDEKDSDAAAAPSARYVRTLHELRQFKTAGNPFTDEFFDTFDAVYQQQLDMLKKLQQRQHRLDKKVKTIQAWRRVSSIIFATTFAAVLICSIVAAVIAAPPVAAALAAAAAVPLGSMGKWFDSLLKGCQDAVNRQEGVVSEMQFGTLIAIKDLENIKVLIKRVEEEISSMIDCVEFAERDEEAVKFGVEEIKKKLESFMKSVEDLGEQADRCTRHIHRARTLVLGRIIRHPN

SEQ ID NO: 50097 - protein, 371 aa, Zea mays
  Coding DNA Sequence Number=SeqID_8318
  Gene Ontology: Mol. function=nucleic acid binding
  Homolog annotation: Hit_ID=Q10QE9; Match level="QueryCoverage=29%, HitCoverage=28%, E-value=8e-50, Identity=89%"; Hit description =Expressed protein
  Pfam annotation: Domain name=DUF677; Domain location=42-280; Score= -32.6; E_value=7.9e-09; Accession=PF05055.3; Description=Protein of unknown function (DUF677)
MGNSSSSSGSSSKRPGPSEPALPAAAEELSAYEAACRSDPELRTFDTTLQRRTRRAISTLAVGVEVRSMSLDSLREVTGCLLDMNQEVVRTILDCKEDIWKSPELFDLVKDYLESSLQTLDFCTALEKCLKRARDSQLPLRIALQRVFWDYDPPVGRLRSLGIPQRSIPSLGCSCASTRRIGTIAGEDSINSDVAIDWGTIQVEENWEEEGAQDVASELVLYDRLGLLDEDNRETSARQDACRSRAFNVRGRSDDVDDEIVVVHCGDSIPEERILVCDRSNPIMKVGSLYKDMKEFRLAMRQYAINNEFRDVGLEYFVDDYFSVESFKKAYGRILEPLGDKSMWPKVPIADEVEVQRRNPPAMKMTLKGRY

SEQ ID NO: 50098 - protein, 194 aa, Zea mays
  Coding DNA Sequence Number=SeqID_8319
MAFQGKNRQVLEVDPADDPTAEVATAFDRLSVSPIPNPSASAAVVQVCSPYALNNSGTQQPQSSSTRDATMVPLPPASVLSYRYQEVLNCLHDAINEMQQVSMNLKSLATDHLVSQPDSGEELLVNQLMWRVHELAQSLDKASIRYQLVHDNSSPPLSEYCYNDDSDSDHEPDLMRHWSLEDVSWEEILDRQMK

SEQ ID NO: 50099 - protein, 142 aa, Zea mays
  Coding DNA Sequence Number=SeqID_8320
  Homolog annotation: Hit_ID=O23987; Match level="QueryCoverage=60%, HitCoverage=79%, E-value=2e-33, Identity=75%"; Hit description =Expressed sequence tag
RVYMFMEADIIVRFAGTVPAKVVLQLTTAFREGGLCNRNGTFSYKDHLRECQTPVLALAGDKDLICPPDAVYETVKLIPNHKVDYRVFGKPQGPHYAHYDLVGGRLQQERDGYDGYCECCADQCKFDNHLLNGLPKLIGQLN

SEQ ID NO: 50100 - protein, 223 aa, Zea mays
  Coding DNA Sequence Number=SeqID_8321
  Subcellular localization annotation: CTP_CleavageSite=29; ConfidenceScore=5.10e-01
MRPPLPSLSLIWISRATTSPLPLPPLSPRGALGFGDGDHRILDPEVSSPPLLFSSLSPSPSSSSPRARPPSPLPARDPVPALPRPARRRPPPLPPAAAALPAPARPRGGARPSPGLAAALPAPCPAAAAAPAPCPPARRSPPPPRRGGARPLPLPAAAIPPAPCRARVTTPPSPDPRRRSPAPARPRDAARSYPSEDAPALPERGGNPPPLDHLPGPDLVRPT

SEQ ID NO: 50101 - protein, 259 aa, Zea mays
  Coding DNA Sequence Number=SeqID_8322
MAELQDDHRPELIGLGKMAAEDSLSSLVSSEDEPDLDPGDSKETQLNPGSVSASTVSYRRQTSKERAIGLAPEFAFFKAEKDEHSEDDDEEPCPDSQDWPGSFVTTVRMYEAREAKLRARELNSSKLNKSAKRHLSECSWLSEDDFEKTFGKCSIESLQLHSVLRELYIADCTNVDAMAILPALQKINHLEVLAMFGIQSLCDKFVKGLIPVHGSSLKELAFAGCLELTSASIKTVGEYCQELTSLDLRNLNRLRDSAL

SEQ ID NO: 50102 - protein, 115 aa, Zea mays
  Coding DNA Sequence Number=SeqID_8323
  Homolog annotation: Hit_ID=Q5ZB58; Match level="QueryCoverage=47%, HitCoverage=10%, E-value=2e-07, Identity=58%"; Hit description =Ribosomal RNA apurinic site specific lyase-like
  Subcellular localization annotation: CTP_CleavageSite=58; ConfidenceScore=5.45e-01
MPLPSTTETKEASTQKNKVDKGSGTGAESGPPRCSSSTTPASSCTKTTAALCLSTGPRCGGVEDLILVNRHLPTSVSLLVDVLHLASLRTLYLGFWRFTDTTVLPRGCAAVFPYL

SEQ ID NO: 50103 - protein, 103 aa, Zea mays
  Coding DNA Sequence Number=SeqID_8324
  Subcellular localization annotation: CTP_CleavageSite=56; ConfidenceScore=5.60e-01
MKCPTAKALSVATLSALLILLFFVLRCGSSASPSPQLSIARRSRRLLWTPCRDANSCSTPVSGFRQFFKAPATVFESLKKMPKSSGSLRLLVYLVQDRHQHNL

SEQ ID NO: 50104 - protein, 67 aa, Zea mays
  Coding DNA Sequence Number=SeqID_8325
MWPTARDRPGHPTGGMPVRSSGRQYACAMAYIVLIITPTLPVKLLSHADTTQAANIRAQGDCTGNQH

SEQ ID NO: 50105 - protein, 397 aa, Zea mays
  Coding DNA Sequence Number=SeqID_8326
  Gene Ontology: Mol. function=phosphatidate phosphatase activity; Cellular component=integral to membrane; Biological process =hypersensitive response
  Homolog annotation: Hit_ID=Q6YZK3; Match level="QueryCoverage=78%, HitCoverage=99%, E-value=1e-130, Identity=71%"; Hit description =Putative phosphatidic acid phosphatase beta
  Pfam annotation: Domain name=PAP2; Domain location=186-336; Score =153.0; E_value=7.7e-43; Accession=PF01569.12; Description=PAP2 superfamily
MTFSTALAWAMRVADQIWHAAMRTGREAGLREGICGVGGRFPDIGGQQPTLWLVHSLPAGYVADHFAQLLATAACTLIWVGRMPDIQLGCHTIRSHGTKVATLHMYDWIILLCLAVLDGLLNIIEPFHRFVGRDMMTDLSYPLKGNTIPFWAVPVCSALLIAIVLPLVIFAVIYFKKKNVYDLHHGILGILYSVLITAVITDAIKDGVGRPRPDFFWRCFPDGKPNFNNITTDVICHGEKSVIKEGHKSFPSGHSSWSFAGLGFLAWYLAGKLKAFDRKGHIAKLCLVFLPLLVASLVAVSRVDDYWHHWQDVFAGGIIGLTVASFCYLQFFPYPFDNDALWPHAYFQQLAETHSNGNANSINIRPTEFEDEPDDHGDIVLRDTSPILESMESGRRP

SEQ ID NO: 50106 - protein, 149 aa, Zea mays
  Coding DNA Sequence Number=SeqID_8327
  Subcellular localization annotation: CTP_CleavageSite=46; ConfidenceScore=5.65e-01
MSLQYVAPPVRALAVLPAPGPPRRRTSHVSLYLPSRRPGLAVAPVRAAESSSPPTVPASAAGKAVVPDDEFSLAKVSFGVIGLGLGLSLLSLHLETQMGDSDLVIYQVEAARFLFCLKLSYIANGSVSWKWNFKMNLKYVRKRGILHSA

SEQ ID NO: 50107 - protein, 115 aa, Zea mays
  Coding DNA Sequence Number=SeqID_8328
  Pfam annotation: Domain name=DVL; Domain location=94-112; Score=31.1; E_value=4e-06; Accession=PF08137.3; Description=DVL family
MSNDPTVSRAGHMPGGSGCGGAMNVFIGISYNDWVPDDPFAADVLGAGGSVLGRTHPHPLLMMLENDIACISINLSSAAMKVGTQMKQLNKSLREKRAKLYIVRRCVVMLLRWSD

SEQ ID NO: 50108 - protein, 77 aa, Zea mays
  Coding DNA Sequence Number=SeqID_8329
MYPHTAYIHHTGSQEEVPVGIIEELPGILVEEGEPEAEAQECPDHRPSSFEKGIEVDWNQLLHIPLITLFTLSLPPI

SEQ ID NO: 50109 - protein, 170 aa, Zea mays
  Coding DNA Sequence Number=SeqID_8330
  Gene Ontology: Mol. function=actin binding; Cellular component =cytoplasm; Biological process=cytoskeleton organization and biogenesis
  Homolog annotation: Hit_ID=Q8LJZ1; Match level="QueryCoverage=96%, HitCoverage=22%, E-value=4e-42, Identity=52%"; Hit description=TNP2 -like protein
WRTRCYDAFGDTAMGEAEEEVQAEDEPDDDELGQAILDGKRGCDSEREKINFERIIEDHKKLLYLTCEGQKKLGTVLELLQWKAKNEIQKIHACHNDCILYCGKEYENLDECPVCHPSRYKIRRNDPGDVEGDGQLPTKRIPAKVMCPLMGPSGEQSIESSLSLQMPQET

SEQ ID NO: 50110 - protein, 64 aa, Zea mays
  Coding DNA Sequence Number=SeqID_8331
  Subcellular localization annotation: CTP_CleavageSite=21; ConfidenceScore=5.09e-01
MPHISGGSLSLSLGATASCCLAYEIPSRYLVPRSRSHVAIENKYSTLAPTSGDSTTTTRSMTNC

SEQ ID NO: 50111 - protein, 108 aa, Zea mays
  Coding DNA Sequence Number=SeqID_8332
MARRAKGGTNPNPDEHLVSDRAQRGPGLTVLEVRYKTRGRIGAEHDERRKAFRNSDEELGSRRPVDGEAVHTDAYPGDPRTPEASRSNPNGADQRQSQAKVRRPGFLG

SEQ ID NO: 50112 - protein, 221 aa, Zea mays
  Coding DNA Sequence Number=SeqID_8333
  Subcellular localization annotation: CTP_CleavageSite=68; ConfidenceScore=5.06e-01
MLRVSTWVFVLGHALATARRAKGGTNPNPDEHLVSDRAPTRSRPNRTRGAVQNKVRECRLTTRRGRISAEHDERRKAFRNSDEELGSRRPVDGEAVHTDAYPGDPRTPEASRSNPNGADQRQSQAKVRRPGARKIVAPQLLRGDGGGAVTVELADSARSARCDRFGRWVELLSSRAHASARTSQARETDSRAQGVGADIHRLGRRELKGNWAGLGIFGPCA

SEQ ID NO: 50113 - protein, 151 aa, Zea mays
  Coding DNA Sequence Number=SeqID_8334
SCFAPEYLLLVGCQLNTTEGLPGETSGFAPVESLLSPELPVLRSSIKWNDELALIVHCNNVIIDVQTGGMARSDPSTVQPGPFESGPFEPDYLTVPGRAARRARNLARARHESGPTMPGRHGKHGPQNYSCQSEPAPPKNPGNCTQLTVHM

SEQ ID NO: 50114 - protein, 60 aa, Zea mays
  Coding DNA Sequence Number=SeqID_8335
MGEDMVKSIVERHGEGAYVNGEDECGRGESERRPGEDERRLEGHRGVRRGEGRIDEGYGV

SEQ ID NO: 50115 - protein, 69 aa, Zea mays
  Coding DNA Sequence Number=SeqID_8336
  Subcellular localization annotation: CTP_CleavageSite=55; ConfidenceScore=5.06e-01
MALGKYTPASMVGAASGQYYVGIAAKLEASAMPSLTTSTTKTSSDCHRRALLCSRAHLGWQRRLGLDQA

SEQ ID NO: 50116 - protein, 103 aa, Zea mays
  Coding DNA Sequence Number=SeqID_8337
  Gene Ontology: Mol. function=RNA-directed DNA polymerase activity; Cellular component=chromatin; Biological process=RNA-dependent DNA replication
  Homolog annotation: Hit_ID=Q8W1D1; Match level="QueryCoverage=96%, HitCoverage=6%, E-value=3e-42, Identity=76%"; Hit description=Gag-pol
MAEGLGPDFKKDEQGTIWFKNRICVPEIDSLGETILKEAHDSAYYIHLGSTKMYQDLKQKFWWYGMKRDVALHVGVCDVCQWVKSEHQRSAGFLQPLKIPEWK

SEQ ID NO: 50117 - protein, 157 aa, Zea mays
  Coding DNA Sequence Number=SeqID_8338
MAYPVHVLRRADGFRRGRSGASGVVAFGLGLGKLYGTLGRLVEQLARARDGWGELAAVAGTRVARAGGVELAGVGDLLEEVRQVSSRVPKIGLSDSPNPRIKACQTVSNGFGLTPTFSRILIAQWVIDSYPDLPTPQRPKTAGLVPTTVALPAFDHP

SEQ ID NO: 50118 - protein, 159 aa, Zea mays
  Coding DNA Sequence Number=SeqID_8339
MEYWRQRLTTSQLKRPSIGFNKRAKGQPKAPLGLVHRTCPVHQRTPAHVAFGKIQRQLHYNSPDCPVYTGQCPVLQGTAPQELASFEKLQRLLRYNSPDMSGVHRTVRCNSGAKAISAPTATCSAFIVRQRAQKSGVPILAHRTLYSACPVRHRTSRRA

SEQ ID NO: 50119 - protein, 144 aa, Zea mays
  Coding DNA Sequence Number=SeqID_8340
MTMMMMMTTTKMTKMMMMTMMKTTEMMIRSDENAKDKGRTETQRKARSAIFSLLRYNPGRQGRKARSAIFSLLRCNPGRQGWKPRSAIFSLLCCNPGRQGWKARSAIFSVLHYNPRRQGRKARSVIFTDLLSGEQDLYNEPNYA

SEQ ID NO: 50120 - protein, 247 aa, Zea mays
  Coding DNA Sequence Number=SeqID_8341
MPSVSASGRHHSGGGGRRAVGQKALGAAHLGLGRQDLQSSTYSTAAQGDRTNGLNLLPYYLGKIKLDIFSLPHYNFKGIRLTFFNFNAREIRFDAFSFNPLYFIFNLFHYNAEETRFATFSFNLFHYDSKEIGFATFNFNRLHFSFNQFHCNTRETRFATFSFNLFRYNVKEIRLAAIILNAREIRFAAFSFNLLRFSFNLFHYNAKETRFATFSFNLFNYHAREIRFAIVASIYLTAMSGKQDSLL

SEQ ID NO: 50121 - protein, 316 aa, Zea mays
  Coding DNA Sequence Number=SeqID_8342
  Gene Ontology: Mol. function=hydrogen ion transporting ATP synthase activity, rotational mechanism; Cellular component=proton -transporting two-sector ATPase complex; Biological process=ATP synthesis coupled proton transport
  Homolog annotation: Hit_ID=Q8S237; Match level="QueryCoverage=99%, HitCoverage=60%, E-value=1e-109, Identity=58%"; Hit description =Lustrin A-like
  Pfam annotation: Domain name=DUF231; Domain location=139-312; Score =253.9; E_value=3.4e-73; Accession=PF03005.6; Description=Arabidopsis proteins of unknown function
MRNGRKDSLYQNWRWQPRDCNLPKYKPRLLLEKLRNKRLMFVGDSLNRNQWESMVCLVQSVVPPGRKSLNKSGSLSVFRIEDYNATVEFYWAPFLVQSNSDDPDMHSILNRIIMPKSIQNHGKNWKDVDYLVFNTYIWWMNTFNMKVLRGSFDQGDTEYDEIDRPVAYQKVLTTWSKWVDKNVNPNRTTVFFSSMSPLHIKSLDWENPDGIKCALETTPILNQSMHLNVGTDRRLYVIASNITQNMKVPVHFIDITSLSEYRKDAHTSVYTIRQGKMLTPEQQADPATFADCIHWCLPGLPDTWNEFLYARIIAHS

SEQ ID NO: 50122 - protein, 43 aa, Zea mays
  Coding DNA Sequence Number=SeqID_8343
MPKLVEDPSTSGHFSSEVATSGVPTEKHLPQVMAEKCQTHGSG

SEQ ID NO: 50123 - protein, 169 aa, Zea mays
  Coding DNA Sequence Number=SeqID_8344
  Homolog annotation: Hit_ID=UPI0000612705; Match level="QueryCoverage =82%, HitCoverage=45%, E-value=4e-08, Identity=36%"; Hit description =UPI0000612705 related cluster
MAAMGTRGGGDRTTGFNVLHCNLREGDEATGFNVLHCNLREEDRTTSFNVLHCNLREEDRTTGFNVLHCNLREGDRTAGFNVLHCNLREGDRTTGFNVLHCNLREGDEATGFYVLHCNLSEGDRTTGFNILHCNLREGDRTTGFNVLHCNLREGYRIYFFDLFSGEHDL

SEQ ID NO: 50124 - protein, 502 aa, Zea mays
  Coding DNA Sequence Number=SeqID_8345
  Gene Ontology: Mol. function=RNA-directed DNA polymerase activity; Cellular component=chromatin; Biological process=chromatin assembly or disassembly
  Homolog annotation: Hit_ID=Q7XYU4; Match level="QueryCoverage=40%, HitCoverage=57%, E-value=5e-77, Identity=67%"; Hit description =Integrase
  Pfam annotation: Domain name=RnaseH; Domain location=280-401; Score= -23.6; E_value=0.0092; Accession=PF00075.14; Description=RNase H
MNAHGMITHVTQALLRALNRVVGVPIEGVSHRTVAELLRSSEDLKCTPEQELKRVVSLLRDEAYWWWQSVENSFHFQEGPRHDLKVQVALHQERAFKALVEKTKIIEEIKRVEHEKKGKLKDQPKRETGPTGLNSRPVKWAREARPLQIGNSGPKRRGYSVEGIRTVKEFLDVFPDELPGLPLEREVEFRIELLPRMALVSIAPYRMALKKLKELKVQLQELLDRGFIRPRSDDFWVTLYQLRVFMKNAPFKWGDEQQASFKKLKSVLTEALVLIQPKSGKDYVVYNDASHVGIGCVLMQDGKFVAYASRELRPHESNYPTHHLEFAVVVFALKILKHYQYGEKCIIYTDHKSLKYLLTQKELILRQWRWIELLKDYDCTIEYYLGKANVVADVLSRKAMSDLRVIFTHLSLYDDRGILAELQLKSVWVQEIIDKQSLDETLTPRFKLVEDGSTEDFGINFDGILCFRGRYCVPSDKNLRRSILQEAHSSPYAMHPGSIKMY

SEQ ID NO: 50125 - protein, 76 aa, Zea mays
  Coding DNA Sequence Number=SeqID_8346
MSGGSAKREMETGEKATSHGKAPSRESGAKGKEESPPRVKTHQSDDKKKKMKKVVYYEDRFFVALHIWLRCRVRHF

SEQ ID NO: 50126 - protein, 72 aa, Zea mays
  Coding DNA Sequence Number=SeqID_8347
MARAKEDEQIMGIDLESCNLAKRSFYDAMQHDILEIWVATTKGIKLLVIVRGKSSSQVVECIHPDSQMRRGL

SEQ ID NO: 50127 - protein, 105 aa, Zea mays
  Coding DNA Sequence Number=SeqID_8348
MGQAQGKEEDPPRHHGLLLAGPTEAEKMIMEHQQPIANPLVAVGDLKARMASYLFTARYFHMSPCIHDKSTRRPMRLFTESWNTCVVVPRLFYNSARSLVIQRIE

SEQ ID NO: 50128 - protein, 81 aa, Zea mays
  Coding DNA Sequence Number=SeqID_8349
MSMATSKGSNIKVCMVQGDDVDARDVEGEHVPRGVDGGGEIVVFPNVEQGIKNDIRRDNAATNIATVEIVIWVTNMVFMIT

SEQ ID NO: 50129 - protein, 35 aa, Zea mays
  Coding DNA Sequence Number=SeqID_8350
MDIEVDEEKVYVGNIFNPSFEILELKLSSFAFGDK

SEQ ID NO: 50130 - protein, 155 aa, Zea mays
  Coding DNA Sequence Number=SeqID_8351
  Homolog annotation: Hit_ID=Q94GP3; Match level="QueryCoverage=33%, HitCoverage=9%, E-value=5e-11, Identity=60%"; Hit description =Putative mitochondrial RNA helicase
MTSSCGQISWMPDISKGDIVWVSWNRWSCDSHSWQYKRLSTKIDLITKWHKLSLLPALIDNSREKVVPPNNQVPQSTVIPYDADVLEDNQNQISFLSLACQDHHPYRMYTEPGYETSNRYVMEGLGRHPHMWYPKAREKKRNVFLHVGPTNSGKT

SEQ ID NO: 50131 - protein, 84 aa, Zea mays
  Coding DNA Sequence Number=SeqID_8352
  Subcellular localization annotation: CTP_CleavageSite=62; ConfidenceScore=5.57e-01
MLAPPAPSRCSPCSASPSVHGPASRWHAAGAPRTLSPLPRLPLALMTVPSHSIVSSRKEFIQAQWVQACKPVLYLLNAQLCESS

SEQ ID NO: 50132 - protein, 60 aa, Zea mays
  Coding DNA Sequence Number=SeqID_8353
  Subcellular localization annotation: CTP_CleavageSite=30; ConfidenceScore=5.01e-01
MTNVRKRYSGSVPSPSVTFAQGFALIAAIRARLGQDSAGRVKRSKGERIGSRGEAYQPRL

SEQ ID NO: 50133 - protein, 69 aa, Zea mays
  Coding DNA Sequence Number=SeqID_8354
MAFPEGRGVGLVSQMVSMEMVAYVMAPIISLRDFGGDEEDGFEYDYGNGKEECVEVDLQEFQDVDEIED

SEQ ID NO: 50134 - protein, 101 aa, Zea mays
  Coding DNA Sequence Number=SeqID_8355
MANRECARRATPTLTHGEGGMVVAARRAGGARGFANGEGRSRDHKVASQAGEHGKDTKARRVLSEGKRGSGTRRGRACGEVGREEWGSFKLLGGFLRRGRR

SEQ ID NO: 50135 - protein, 65 aa, Zea mays
  Coding DNA Sequence Number=SeqID_8356
MERIEEKLIDRRMMKLAAQQPPPPQVPVTPQVIDPIRSTKPPVDKIHKYGAEEFKATVDDDAERA

SEQ ID NO: 50136 - protein, 499 aa, Zea mays
  Coding DNA Sequence Number=SeqID_8357
  Gene Ontology: Mol. function=Rab GTPase activator activity; Cellular component=intracellular; Biological process=regulation of Rab GTPase activity
  Homolog annotation: Hit_ID=Q1SCV0; Match level="QueryCoverage=96%, HitCoverage=90%, E-value=1e-93, Identity=76%"; Hit description =RabGAP/TBC
  Pfam annotation: Domain name=TBC; Domain location=223-445; Score= -81.6; E_value=0.094; Accession=PF00566.9; Description=TBC domain
MAKLLKGRSIPGKILLTRRSDILDDSGSQERSPSYQRSFSQNDAGTSDDMDKSMEGGVRNTNNSDGNTTDNKLTSSTSKNDDAANEVQNSAMGTRATDSARVTKFTKELSGQMVILERLRELAWSGVPPYMRPNVWRLLLGYAPPNSDRREGVLRRKRLEYLDCVAQFYDIPDTERSADEINMLRQFFLFVRLPLIVLGLFLMSLSFSKLKFKNPWIAFFIHVKTQDSQYHTGWRTVFLLELRPVHYVPAGVTGIDRHELVGLVWTGIFTGVEKGVGCSCLKKGVGWLFNGAIRHPASGYVQGINDLVTPFLVVFLSEYLEGSIDSWSISDMSSGKISNIEADCYWCLSKLLDGMQDHYTFAQPGIQRLVFKLKELVRRIDEPVSRHMEDQGLEYLQFAFRWFNCLLIREIPFHLVTRLWDTYLAEGDALPDFLVYIFASFLLTWSDELQKLDFQEMVMFLQHLPTQNWTYQELETVLSRAYIWHIDDTNNFRENYESD

SEQ ID NO: 50137 - protein, 101 aa, Zea mays
  Coding DNA Sequence Number=SeqID_8358
MAAQLAQKEISVICRFSESYYKRYRLAVLKWLSVLLKGPKESVEYSFPKDQLIDIVPWARFEIGYGTCPFILTCISFHVHAFIVTFERYVRRTFVDPRRKE

SEQ ID NO: 50138 - protein, 196 aa, Zea mays
  Coding DNA Sequence Number=SeqID_8359
  Homolog annotation: Hit_ID=O22868; Match level="QueryCoverage=88%, HitCoverage=100%, E-value=5e-32, Identity=45%"; Hit description =Expressed protein
  Subcellular localization annotation: CTP_CleavageSite=12; ConfidenceScore=5.08e-01
MGISQSASKRVTSALVNSSQFNSACDSVYSQCLSLTQEAYPGVFPYQLLNAAANLHQHLTSLRPHSLILRWVPHPPARSQVDSAFRFVTRHQDNPRSDEEALLLDSSDFREWAVVLFSDAVVGNAGKAVLQRVPVGVLGIAGIGAAARTGKEVVGAAIGVYALGVATSIYLSLSEASNPILSKFYSYRLFNTPNSA

SEQ ID NO: 50139 - protein, 186 aa, Zea mays
  Coding DNA Sequence Number=SeqID_8360
  Homolog annotation: Hit_ID=Q67UT5; Match level="QueryCoverage=56%, HitCoverage=24%, E-value=8e-13, Identity=37%"; Hit description=F-box protein-like protein
MRGTTWEAAPDQPRQARYLRGQGHARTTVAQQAQDRPQVCWSDVDETFEVDWGFLNASWTDGMCANLQIVQTIGIAWLPNEFSFMKLILSKARLLRTLYVDRNPDDFDNQASAMHNFLPFPFIDEDKSSQFRQSSYAVNHLWELCAENDTVPRVGKVCNTFCKERYIEQIQKLYEKIYEPKGENGR

SEQ ID NO: 50140 - protein, 172 aa, Zea mays
  Coding DNA Sequence Number=SeqID_8361
MPRPASAAPRDVQAAAARAAAMDVHVPVGAAAAAATPPPPPEPEPEPLGSSSSPQQQVPPAGQASVCSPDEEEEEEGLLDEIVELPPIDEDVLAASDDGVFCWAASFHHCAADETWPYEPNAWMQAGGGGIAAAHVDEMAVVPGTEFAADQLWTSQPDSIMPSGLGAFLWNL

SEQ ID NO: 50141 - protein, 135 aa, Zea mays
  Coding DNA Sequence Number=SeqID_8362
MVEETASVAIRRSPLLLHTLGRRLYGWQRLNMYQDAYSTQQTSTSDTEEHRSKCNAQEEITKDQTASIRQLKAKDNMPLFESPPKRVVLCLRRSPCIRMRMIPEFAQFDEIAQSKCTFGLKESKGYKRDANAKSA

SEQ ID NO: 50142 - protein, 144 aa, Zea mays
  Coding DNA Sequence Number=SeqID_8363
  Homolog annotation: Hit_ID=Q5Z9D5; Match level="QueryCoverage=77%, HitCoverage=60%, E-value=2e-18, Identity=42%"; Hit description =Protodermal factor-like
MGTEVAAAGTAVMGGGGGGGGYTPGYSGTGTCDYWKSHPDAIVSCVGSLGSVLGSLGDACSAFFGGKLQTLQDALCNARADGYGDLLREGAAAYLNSVAAAAAGKYAYTTQQVKDCIAAALSSEAAAAAQAAMFNKANYACHYY

SEQ ID NO: 50143 - protein, 54 aa, Zea mays
  Coding DNA Sequence Number=SeqID_8364
MMLYVVSLLLSPLSLFLLLLVENARVLFDQAKAQGPYDGPTVIPDTAEPVRYNF

SEQ ID NO: 50144 - protein, 594 aa, Zea mays
  Coding DNA Sequence Number=SeqID_8365
  Gene Ontology: Mol. function=RNA-directed DNA polymerase activity; Cellular component=intracellular; Biological process=RNA-dependent DNA replication
  Homolog annotation: Hit_ID=UPI00004C1733; Match level="QueryCoverage =100%, HitCoverage=45%, E-value=0.0, Identity=89%"; Hit description =UPI00004C1733 related cluster
  Pfam annotation: Domain name=RVT_1; Domain location=56-225; Score =142.6; E_value=1e-39; Accession=PF00078.17; Description=Reverse transcriptase (RNA-dependent
  Pfam annotation: Domain name=RnaseH; Domain location=432-559; Score =10.8; E_value=5.8e-06; Accession=PF00075.14; Description=RNase H
  Pfam module annotation: Pfam domain module=RVT_1::RnaseH; Domain location=56-225::432-559
MPGIPRDVAEHSLDIRAGARPVRQPMRRFDEEKRRVIGEEIHKLMAAGFIKEVFHPEWLANPVLVRKKGGKWRMCVDYTGLNKACPKVPYPLPRIDQIVDSTAGCETLSFLDAYSGYHQIRMKESDQLATSFITPFGMYCYVTMPFSLRNAGATYQRCMNHVFGEHIGRTVEAYVDDIVVKTRKASDLLSDLEVTFRCLKAKGVKLNPEKCVFGVPRGMLLGFIVFERGIEANPEKIAAITSMGPIKDLKGVQRVMGCLAALSRFISRLGERGLPLYRLLRKAECFAWTPEAEEALMNLKALLTKAPILVPPADGKALLVYVAATTQVVSAAIVVERQEEGHALPIQRPVYFVSEAKVATLLRVSSGNCGVILPLGEIIQCREASGRIAKWAVEIMGETISFAPRKAIKSQVLADFVAEWVDTQLPTAPIQPELWTMFFDGSLMKTGAGAGLLFISPLGKHLRYVLRLHFPASNNVAEYEALVNGLRIAIELGVRRLDARGDSQLVIDQVMKNSHCRDPKMEAYCDEVRRLEDKFYGLELNHIARRYNETADELAKIASGRTTVPPDVFSQDLHQPSVKINDTPEPEAPSVQPE

SEQ ID NO: 50145 - protein, 38 aa, Zea mays
  Coding DNA Sequence Number=SeqID_8366
MASRFKLLPLLADVKISYLCDSKKKIQVPFAIVDLFPL

SEQ ID NO: 50146 - protein, 38 aa, Zea mays
  Coding DNA Sequence Number=SeqID_8367
MALSRMSIKGPKKDALRKTSKHMKTLKVSKAKADNGVL

SEQ ID NO: 50147 - protein, 272 aa, Zea mays
  Coding DNA Sequence Number=SeqID_8368
  Homolog annotation: Hit_ID=Q8RV00; Match level="QueryCoverage=42%, HitCoverage=39%, E-value=4e-21, Identity=50%"; Hit description =Putative hydroxyproline-rich glycoprotein
  Subcellular localization annotation: CTP_CleavageSite=47; ConfidenceScore=5.55e-01
MAAAGSTDAHYYPRPPTSSSAPLSSSTPAAPRLPPPPFLQVRMQLLCCFHRGTLVGVRCHDGNGRTVFRKDGVVTDRSGRFRVHLAHGPSSSSSSSSHQLRSVTSCSVAVHLPQASPPCVATASSARGLHLVAHHNKHDHGGGTRVFSAGAFSVRPELCSNKGLFFPPVPLVPEPPNVGGVPIPPNPVTPAPPSLVPPLLPTPSPPSVLPPLVPQPPPSSVIPPLLPLVKPPPPPPPPQLLPPLVPVLPPGVPGVPPASASTNRRPVNVNHP

SEQ ID NO: 50148 - protein, 62 aa, Zea mays
  Coding DNA Sequence Number=SeqID_8369
MAMGAELRRCDSAGKIGIPRKNGVLKLALKKRFWIGEGLPLLAVWSCKSWFAGHVSNIVPIS

SEQ ID NO: 50149 - protein, 488 aa, Zea mays
  Coding DNA Sequence Number=SeqID_8370
  Homolog annotation: Hit_ID=Q2QXP5; Match level="QueryCoverage=72%, HitCoverage=87%, E-value=1e-85, Identity=50%"; Hit description =Expressed protein
  Pfam annotation: Domain name=DUF1226; Domain location=103-443; Score=- 110.7; E_value=0.033; Accession=PF06775.4; Description=Protein of unknown function (DUF1226)
MHSTLTNLMEYSTPHQVSGNQQHGYSGDGRPRGTSGGESDSDDDALLFLAVPAGWLVRLLAFLGELVASAILGLVFPVAALVGALRALPAAAASSLRRVARGLLAAACTFAALVAALLVSVLLGFVLVRRCVEGPVTVRQQLFFDYTEAQPSAAVLLGGARGAVLPAGHSVSVSMALLLPDSYHNREVGMFQIKAEAVSASGVTMASATQPHMLRYKSGPVRLAQTALLCVPLTLGMRSEAQAASLRVLQYREGHGRHRRTGAIRVLLQPRAATVSLPQVYRAEVVVQTALPWAKSLARGFRWTLCVWVSSSVYAVLAVCWVRPLVLSARRRPSGVQEADGNLASGLGLVDMGDRPRKEASDCLAARWRARRSERKAQLRTRLHGGGMELEATEDSASSVAVVEREKEPGKIVECPLAMVAEAANRREHVSASTRQYVDVGRKKTSDLLDGSYLHSTVFDIPHFPDRIDLRNPFNSSRTSRRSIQHQQ

SEQ ID NO: 50150 - protein, 449 aa, Zea mays
  Coding DNA Sequence Number=SeqID_8371
  Homolog annotation: Hit_ID=Q9SJQ8; Match level="QueryCoverage=53%, HitCoverage=76%, E-value=8e-18, Identity=26%"; Hit description =Expressed protein
  Pfam annotation: Domain name=DUF868; Domain location=136-422; Score =57.0; E_value=1.4e-15; Accession=PF05910.3; Description=Plant protein of unknown function (DUF868)
MSPYWKAIRVWDPSTEQRIGFQEFRRSQRKESFGLQRWLQLVLSDDAYRRLALRSHGPNLQDYRPPAPAVTSRLSRALFCCACGASVQRIGGMVSASSLLLPSSVRDLASCVSDGAVRVACTTPASTFTVSSSSPSPPSTLSVAVSYRATPQVASSPPLLLRLTWSHSPRGQPTLSFAGPTASSPAVLLRRRRGTYCLPSSSSSSAHAPPLAIFWDLTGARYDGAGSSSPEPVSGFYVVAVASAEVVLAVGDLAAGFVKAKLEGQIPRARSILAVSRVVVVAAAGPGAAAHTARVRFAEGAPEHEVAVGCCRGLGGRPGEEDELWVSVDGKRAVHARRLRWNFRGNQTVFVDGAPVDVLWDLHGWWFRRDPPGCAVVMLRTRSALESRLWLEEEARAPGPLIVDEVEQMLCCQCLLLHVFPLPFDLGIWCLVFSNPNSNPTGQRFALTI

SEQ ID NO: 50151 - protein, 453 aa, Zea mays
  Coding DNA Sequence Number=SeqID_8372
  Gene Ontology: Mol. function=protein serine/threonine kinase activity; Cellular component=cytoplasm; Biological process=protein amino acid phosphorylation
  Homolog annotation: Hit_ID=Q53PY9; Match level="QueryCoverage=94%, HitCoverage=89%, E-value=1e-150, Identity=66%"; Hit description =Second messenger-dependent protein kinase, putative
  Pfam annotation: Domain name=Pkinase; Domain location=34-398; Score =207.2; E_value=3.9e-59; Accession=PF00069.15; Description=Protein kinase domain
  Pfam annotation: Domain name=Pkinase_Tyr; Domain location=34-392; Score=-27.8; E_value=9.2e-11; Accession=PF07714.7; Description =Protein tyrosine kinase
  Pfam module annotation: Pfam domain module=Pkinase::Pkinase_Tyr; Domain location=34-398::34-392
MPPDREDAAGAGADVAADELQSIPRLGAVSLSDIRFLRRLGAGDIGSVYLAEVRRPTPTAGAAGKEKHTSTLAAAAVVVAAKVMDRKELEGRNKEGRARTEREILEAVDHPFLPRLYGVAEGDRWSCLLTEFCPGGDLHVLRQRQPHRRFSEAAVRFYAAEVVAALEYIHMMDIVYRDLKPENVLVRGDGHIMLTDFDLSLKCDPTAPTPAHVISDPLSLAGRSGGAASSTSSCAISSSCIVPAASCFQLFPGRGRGRRRRRPRWLRAGKKPSPNNNGGLELELVAEPVELRSTSFVGTHEYLAPEIVAGEGHGSAVDWWTLGVFVFELLYGATPFKGHDNEMTLANIVARALEFPRDRDPPASPAARDLVTALLAKDPARRLGATVGAAAIKRHPFFAGVNWALLRCAPPPYVPPPFSIAKAAAAAGGGGGKDDDDDDVSDDSCPGTPVEYY

SEQ ID NO: 50152 - protein, 164 aa, Zea mays
  Coding DNA Sequence Number=SeqID_8373
  Gene Ontology: Mol. function=zinc ion binding; Cellular component =cellulose and pectin-containing cell wall
  Homolog annotation: Hit_ID=Q109J5; Match level="QueryCoverage=68%, HitCoverage=18%, E-value=3e-51, Identity=84%"; Hit description =Dehydration-responsive protein, putative, expressed
  Pfam annotation: Domain name=DUF248; Domain location=13-164; Score= -284.8; E_value=1.3e-08; Accession=PF03141.7; Description=Putative methyltransferase
MAATVTLLHLPLARLSYHLRSIEEESAAEAEAPRSFVLPRLSQPKLSVKEDVPIKWPKSRDVVWKANIPHTHLAKEKSDQNWMVEAGEKIKFPGGGTHFHHGADKYISNIANILNFKDNNINNEGMLRIVLDVGCGVASFGGYLLSSNVIAMSLAPNDVHQNQI

SEQ ID NO: 50153 - protein, 45 aa, Zea mays
  Coding DNA Sequence Number=SeqID_8374
MPPRKRSTRLTQKFEGMIAKMNDRLWCNEHICSDTSNGHTNLYTQ

SEQ ID NO: 50154 - protein, 67 aa, Zea mays
  Coding DNA Sequence Number=SeqID_8375
MAPRFYARDTQEHASSFVDFAGKKAKYVSRYRITDSYSLDAAMEATDDQRQISVGVVFVTVGMNALI

SEQ ID NO: 50155 - protein, 194 aa, Zea mays
  Coding DNA Sequence Number=SeqID_8376
  Homolog annotation: Hit_ID=Q5NAW2; Match level="QueryCoverage=19%, HitCoverage=7%, E-value=5e-12, Identity=84%"; Hit description=Zinc finger CCCH domain-containing protein ZFN-like 1
  Pfam annotation: Domain name=zf-CCCH; Domain location=162-188; Score =20.3; E_value=0.0027; Accession=PF00642.15; Description=Zinc finger C-x8-C-x5-C-x3-H type (and similar)
  Subcellular localization annotation: CTP_CleavageSite=58; ConfidenceScore=5.70e-01
MPPTLAATTLLPLPSRRHSFSLALSLSSLSTAPGPPISSSHSDRPTDRRASLFPPRPRDATEPPHAEQARRHCSSRRRGWHCKPGHRPRRCCLLNVFLFRSDLRPGVRPRGSLVASRCNRVVRERVAFVGPVLRRGLDGGGEGEDGELGAGQEANARLPERPGEADYGYYLCTGACGFGDRCSYNHPRDCGGTE

SEQ ID NO: 50156 - protein, 51 aa, Zea mays
  Coding DNA Sequence Number=SeqID_8377
MARGSTEHNHGYYATIRCAPSALKNATSLMPEKYVRKMEWLRYSQMIVQRE

SEQ ID NO: 50157 - protein, 127 aa, Zea mays
  Coding DNA Sequence Number=SeqID_8378
MTSGATVHLLPFFLGVVKGAFVNDIFAFALVFGAIKDCPNSLLARGVTHGDAKGLLSGPHTIAPGFVDLLTGGWGCIYSLQPLPSRCQSSTNYGQSALLARTVRPCTSTVEIAMVNSNDYINGYQGY

SEQ ID NO: 50158 - protein, 93 aa, Zea mays
  Coding DNA Sequence Number=SeqID_8379
MAPSPAVSLADGPAGPPATLAPGLLGLVIVSHLSPKGSGRFNHHLLQPVNGWLLPMELANNYKVLLMTHGVMVRSGRNKDSSVLIAGVLRRVE

SEQ ID NO: 50159 - protein, 89 aa, Zea mays
  Coding DNA Sequence Number=SeqID_8380
MDGHIRAGNDFRQRRKEAYRYIEMTRGFRGRDATKFLQATSSKRQRRKKLRREIQLSTQKNFIDDFLHESVDSFINGFVSNPNYIERPL

SEQ ID NO: 50160 - protein, 180 aa, Zea mays
  Coding DNA Sequence Number=SeqID_8381
MIRRVINGGIASTYGDGGGQPDLYSPDDGDFYLVYKEVAPALPKYLGDPTNTQQSRIVASTGASLVRKDIHFCGSDLKVRKPLLKGRIKEEKVRQGKLLSRMVDLDLFGELVRLLSFLDKVDLSLLRSWSPIPKGHFGIGFQSVKSTFVFRRDKSKIEMQTLVDDVDIFIEVSGTTQGPD

SEQ ID NO: 50161 - protein, 149 aa, Zea mays
  Coding DNA Sequence Number=SeqID_8382
MGRGPVSARVQALPYAFRSGEGPLLPRGGDFMEAELGKKAKVGPARLTARSPALCSFAEEGRRRACAMAGLGVQHHTEVLHGHAEQREGALPDLRKGSRELPAASYEVGGGGWTSCCTSELRPRGELEVEDSCWQACDGEAEQAAAAMR

SEQ ID NO: 50162 - protein, 124 aa, Zea mays
  Coding DNA Sequence Number=SeqID_8383
MDELGAQTCLLADAGGSSRAWGRERAWGSSGLARHGEREGSQLLARCAREAAMGEEAPARWGRRALRLVTSAESWASSGRMEQRMEMAPWLLLFTGDDRVRHWWLGRLLLVGWYQALAKSLVAG

SEQ ID NO: 50163 - protein, 327 aa, Zea mays
  Coding DNA Sequence Number=SeqID_8384
  Homolog annotation: Hit_ID=Q1S209; Match level="QueryCoverage=37%, HitCoverage=79%, E-value=2e-16, Identity=34%"; Hit description =Expressed protein
  Subcellular localization annotation: CTP_CleavageSite=19; ConfidenceScore=5.12e-01
MPWRWRAAGGDEKAHRDLSVASFSSLYRPSSLPVEFSFGSDSSESRKRSLPRGVVSIGAISLAGGLVLSAVNDLAIFNGCTTKAIEHAADNPAVVEAIGVPIVRGPWYDASLEDGLLSFLRHHDWKILLLEAHLEAPSDDEDQRKLVKSHTSDHAVASSPATSSSSAPSSCRNNDRRAPPERQAPGEEKSRRRNDSVDNSNLVDLVNDIVAESVSYRHRRVAEDILKMEKAGKVTARAFTYAELSEATGGFRPESLLGEGGFGPVYRGRLGSSSGPEVAVKAAGPATGMQGTREFLVRLSCSACSALQPGDAAGPSVPTPNTACSST

SEQ ID NO: 50164 - protein, 172 aa, Zea mays
  Coding DNA Sequence Number=SeqID_8385
MPPPAAPAVAARLPSPPHATETTVSGTSGAAKELSVDDNLVGGIAMFDAQTGLPPPGGGKLASATTSVVVVASIVQQLRFVTAFAEQVASWTVTSQFVSERRRLEGRIERLRTQHTEAVMNEEDVEDLAGLESSVTQRDASTEAGAEEQTTLPGGVAEGPATAETSTLVERM

SEQ ID NO: 50165 - protein, 45 aa, Zea mays
  Coding DNA Sequence Number=SeqID_8386
MASPTEENEQANDGTEVPLDRTVGPVEGTGERPSSSSTSCASLTV

SEQ ID NO: 50166 - protein, 668 aa, Zea mays
  Coding DNA Sequence Number=SeqID_8387
  Gene Ontology: Mol. function=kinase activity; Cellular component =cellulose and pectin-containing cell wall
  Homolog annotation: Hit_ID=Q6EQ17; Match level="QueryCoverage=90%, HitCoverage=98%, E-value=0.0, Identity=90%"; Hit description =Dehydration-responsive protein-like
  Pfam annotation: Domain name=DUF248; Domain location=93-603; Score =1239.2; E_value=0; Accession=PF03141.7; Description=Putative methyltransferase
  Pfam annotation: Domain name=Methyltransf_11; Domain location=210 -305; Score=24.1; E_value=0.00023; Accession=PF08241.2; Description =Methyltransferase domain
  Pfam module annotation: Pfam domain module=DUF248::Methyltransf_11; Domain location=93-603::210-305
MALKASSSDNRTRSTVSLCIVIGMCCFFYILGAWQKSGFGKGDSIALEVTKRTDCTVVPNLSFDTHHSKASGNSSSLVSPSKKFKPCPDLYTDYTPCQDQNRAMKFPRENMNYRERHCPAQKEKLHCLVPPPKGYVAPFPWPKSRDYVPFANCPYKSLTVEKAIQNWVQYEGNVFRFPGGGTQFPQGADKYIDQLASVVPIANGTVRTALDTGCGVASWGAYLLKRNVLAMSFAPRDSHEAQVQFALERGVPAVIGVLGTIKLPYPSRAFDMAHCSRCLIPWGANDGMYMMEVDRVLRPGGYWVLSGPPINWKVNYKGWQRTKKDLEAEQNRIEEIADLLCWEKVSEKGEMAIWRKRVNTESCPSRQEESAVQMCESTNPDDVWYKKMKACVTPLPDVKDENDVAGGAIKPFPARLNAVPPRIANGLVPGVSSQAFQKDNKMWKKHVKSYSSVNKYLLTGRYRNIMDMNAQYGGFAAAIESPKSWVMNVVPTIAKMPTLGAVYERGLIGIYHDWCEAFSTYPRTYDLIHASGLFTLYKTKCSMEDVLLEMDRILRPEGAVIIRDDVDVLTKVNSLALGMRWDTKMVDHEDGPLVREKILYAVKQYWVGVMEHFVKNHQKTRGTKIMAATGTGASDTNMHSNASTLRGFSPRYRGYFILSILSSHLSLL

SEQ ID NO: 50167 - protein, 92 aa, Zea mays
  Coding DNA Sequence Number=SeqID_8388
  Gene Ontology: Mol. function=G-protein coupled receptor activity; Cellular component=membrane
  Homolog annotation: Hit_ID=Q69K53; Match level="QueryCoverage=52%, HitCoverage=15%, E-value=2e-10, Identity=67%"; Hit description=G protein coupled receptor-related-like
MAPAVAAAASAAMRQALRDRQILDAVGTGAAALSLAGSSFIVICYLLFRELRKFSFKLVFYLAVSWLKYDTKIFKGYLASLESKTPRETGQS

SEQ ID NO: 50168 - protein, 163 aa, Zea mays
  Coding DNA Sequence Number=SeqID_8389
MGDILESMGEDRERDRLPRRWKPQSDPHEQIGPWARTDYPDPWRVWARIESEGRDLGRVSGDCVREESGSGGGCAFHGRRSCEDWDVTDEPYMESQGDDLGRGRGVFEIRGPGHHAPSMESDDLGRLERRSVVAAGWDCGRLSRWQSTVGKVDRWSWAHQTVR

SEQ ID NO: 50169 - protein, 84 aa, Zea mays
  Coding DNA Sequence Number=SeqID_8390
MAVILQPLDRDHLHVAGSGPECLPSYDASSLDHAALLRTGIASFALAPAPGDPHPDSLGPRWAGGWDHASLATTLAPCDGPKLI

SEQ ID NO: 50170 - protein, 92 aa, Zea mays
  Coding DNA Sequence Number=SeqID_8391
METVGDDVVEDVVGESILLKREEDLVLYSLVVCAWEDVCQSGSTSGPTRWTRGAGCCASWRSVREGQRCDRRRDQGGGASGGSVGASWTIEG

SEQ ID NO: 50171 - protein, 96 aa, Zea mays
  Coding DNA Sequence Number=SeqID_8392
MPDPAPEPALAGAGAAVLKDLCIFQCAAPRLNIQFTDFQFSDIQLKLDEWPYSVHRNKWTAVHRLEFSSQITTGIQFTQIKWTAVHTAVHRLEFSG

SEQ ID NO: 50172 - protein, 42 aa, Zea mays
  Coding DNA Sequence Number=SeqID_8393
MRTFHIKRAPSFSPSSDIPFVFPAFVLFCLPNLLPTPTVATG

SEQ ID NO: 50173 - protein, 73 aa, Zea mays
  Coding DNA Sequence Number=SeqID_8394
MGAIYGPRGPYGRWTFLQNLLEICSQVAHLTGLVHHRTENKDGYSRILTEAFQVGLAPDWSSLAPDYHMSVAC

SEQ ID NO: 50174 - protein, 148 aa, Zea mays
  Coding DNA Sequence Number=SeqID_8395
  Subcellular localization annotation: CTP_CleavageSite=43; ConfidenceScore=5.55e-01
MASSSIALTVMFGFTAALCCLQLLGADTTTTTTTQSGLARLAAASLVPAVLAALTLTPLLAFARVHARAGAEGALVSGLAKATLLAGTVALVAAAVVQLGADGHLDRGRDDVARLNVKRLDDRTTARSSFCSIRSELSASGLSDGGGV

SEQ ID NO: 50175 - protein, 58 aa, Zea mays
  Coding DNA Sequence Number=SeqID_8396
MEKPTAAMSGFAKNELCFLRIPVFDYRLETPDAASTGLIKMTGLNGLGKLCSMGKILS

SEQ ID NO: 50176 - protein, 43 aa, Zea mays
  Coding DNA Sequence Number=SeqID_8397
MQQTGRWRQCYTGGGGGGAVQAVARRRGYGYEPENNEIPPYCL

SEQ ID NO: 50177 - protein, 184 aa, Zea mays
  Coding DNA Sequence Number=SeqID_8398
MGPSWERDPGAAGDLHRHCTRADRPCLCRGHRRRGPVAARDGKQRPRASSRGPGSPSRRAPHRHHLLALALALALVPACRLDALTRNGDQARCHCQVCGLRSAGQRLRRHWAAEQTKRENSGPKSDEVYVSRGESSAIDPGCKVPLQRCCRLQPAVHLWPSINDWETKELRLPIAIGSVAFGSS

SEQ ID NO: 50178 - protein, 77 aa, Zea mays
  Coding DNA Sequence Number=SeqID_8399
  Subcellular localization annotation: CTP_CleavageSite=56; ConfidenceScore=5.15e-01
MARHGQALLAALLVSAVGAASAQPSYNDGGQGQVSTAMIALLVPVFAGQRRPRGLNAEVFEAFPTMKYPEAKALWLF

SEQ ID NO: 50179 - protein, 209 aa, Zea mays
  Coding DNA Sequence Number=SeqID_8400
  Gene Ontology: Mol. function=electron carrier activity; Cellular component=anchored to membrane; Biological process=electron transport
  Homolog annotation: Hit_ID=Q6Z7U7; Match level="QueryCoverage=50%, HitCoverage=41%, E-value=2e-35, Identity=69%"; Hit description =Putative Blue copper protein
  Pfam annotation: Domain name=Cu_bind_like; Domain location=37-120; Score=122.8; E_value=9.6e-34; Accession=PF02298.8; Description =Plastocyanin-like domain
MASSLVSRLPVAVLLLLVACSSTAAATSYTVGDGSGWTSGVDYTSWAASKDFKVGDNLVFNYAKGLHTVVEVSAGEYMACTAANPLGSESDSSGATTVALKAPGTHYYVCSIAGHCGAGMKLAVAVTVGGSNSNSPGATPDDPTTPRTSPTPTAPYTTPTTTTPYTTTPTTTPPYTTPTTTPTTTTPYTTPTCSGGGGATATPGMTPFM

SEQ ID NO: 50180 - protein, 711 aa, Zea mays
  Coding DNA Sequence Number=SeqID_8401
  Gene Ontology: Mol. function=RNA-directed DNA polymerase activity; Cellular component=intracellular; Biological process=RNA-dependent DNA replication
  Homolog annotation: Hit_ID=UPI00004C1733; Match level="QueryCoverage =94%, HitCoverage=49%, E-value=0.0, Identity=90%"; Hit description =UPI00004C1733 related cluster
  Pfam annotation: Domain name=RnaseH; Domain location=312-439; Score= -5.6; E_value=0.00019; Accession=PF00075.14; Description=RNase H
  Pfam annotation: Domain name=rve; Domain location=533-692; Score =121.5; E_value=2.4e-33; Accession=PF00665.16; Description=Integrase core domain
  Pfam module annotation: Pfam domain module=RnaseH::rve; Domain location=312-439::533-692
MPFGLRNAGATYQRCMNHVFGEHIGRTVEAYVDDIVVKTRKASDLLSDLEGTFRCLKAKGVKLNPEKCVFGVPRGMLLEFIVSERGIEANPEKIAAITSMGPIKDLKGVQRVTGCLAALSHFISRLGERGLPLYRLLRKAECFAWTPEAEEALGNLKALLTNASILVPPAAGEALLIYVAATTQVVSAAIVVERREEGHALPVQRPVYFISEVLSETKIRYPQIQKLLYAVILTRRKLRHYFESHPVTVVSSFPLGEIIQSREASGRIAKWAVEIMGETISFAPRKAIKSQVLADFVAEWVDTQLPTAPIQPELWTMFFDRSLMKTGAGAGLLFISPLGKHLRYVLRLHFLASNNVAEYEALVNGLRIAIELGVRRLDARGDSQLVIDQVMKNSHCRDPKMEAYCDEVRRLEDKFYGLELNHIARCYNETADELAKIASGRTTVPPDVFSRDLHQPSVKTDDTPEPKKASAQPEAPSAQSEVPSAQSEVPSAPEGFYWPTVVADATRIVRTYEGCQFYARQTHLPAQALQTIPITWSFAVWGLDLVGPLHKAPGGYTHLLVAIDKFSKWIEVRPLNSIRSEQAVAFFTNIIHRFGVPNSIITDNGTQFTGRKFLDFCEDHHIRVDWAAVAHPMTNGQVERANGMILQGLKPRIYNDLNKFGKRWMKELPSVVWSLRTTPSRATGFTPFFLVYGAEAIFPEDEGLRRPKQSS

SEQ ID NO: 50181 - protein, 54 aa, Zea mays
  Coding DNA Sequence Number=SeqID_8402
MESLTLMNVSHRQVMYFYNVEFEPRDRGKFISTAVEYKKIYSTCAPKEASCEVH

SEQ ID NO: 50182 - protein, 576 aa, Zea mays
  Coding DNA Sequence Number=SeqID_8403
  Gene Ontology: Mol. function=transcription coactivator activity; Cellular component=nucleus; Biological process=SRP-dependent cotranslational protein targeting to membrane
  Homolog annotation: Hit_ID=Q6K8D9; Match level="QueryCoverage=99%, HitCoverage=100%, E-value=0.0, Identity=72%"; Hit description =Putative GAMYB-binding protein
  Pfam annotation: Domain name=SKIP_SNW; Domain location=177-343; Score= 399.0; E_value=7.1e-117; Accession=PF02731.6; Description=SKIPSNW domain
MATLKDLLPAPKTSASTFYDHSSDPWFKERYGGESAQAAAAARPAAAARLMPPYGKRAGFVPRRPEDFGDGGAFPEIHVAQYPLGMGRRDDKGGSRILALTVDAHGSVAFDAVVKQGENAGKIVYSKHSDLVPKIATADSQAMSDDDEEQKQIEETTERTKAALEKPKNVPTHDSESKFIKYKPSQQSAAFNSGAKERIIRMSEVAVDPLEPPKFKHKRVPRASGSPPVPVMHSPPRPVTVKDQQDWKIPPCISNWKNPKGYTIPLDKRLAADGRGLQEVQINDNFAKLSEALYVAEQKAREAVQMRSKVQRELMLKEKERKEQELRALAQRARMERTGAPPAPSGVPAGGGRGAVEGLRLSMKIWIWSDHVNRRRRERERERRLEAKDAAMGKKSKITRDRDRDISEKIALGMASTGAAKAGEVMYDQRLFNQDKGMDSGFATDDQYNIYSKGLFTAQSTMSTLYRPKKDGDSDVYGDADEQLEKVMKTERFKPDKGFTGASERTGKRDRPVEFDKQEENDPFGLDQFLTEVKKGKKAVEKIGGGGSMKASGGSSMRDDYDGGSGRSRINFERGR

SEQ ID NO: 50183 - protein, 353 aa, Zea mays
  Coding DNA Sequence Number=SeqID_8404
  Gene Ontology: Mol. function=electron carrier activity; Cellular component=intracellular; Biological process=electron transport
  Homolog annotation: Hit_ID=Q6Z8K9; Match level="QueryCoverage=92%, HitCoverage=87%, E-value=3e-74, Identity=46%"; Hit description =Mitochondrial transcription termination factor-like
  Pfam annotation: Domain name=mTERF; Domain location=54-324; Score =7.3; E_value=1.4e-08; Accession=PF02536.5; Description=mTERF
MQHEENELVEGHNRDMNGKQRILVTTCGLTPAQAGRASKGLTHLKSPVKPDAVVAFLAGVGLAKDDIIAGIARYPRLLCSKVDKTLTPRFAQLMSLGLSPSQISRLITIVPNIFVAPKKISHLQFYLSFMGCFDRVHSAIRINPMLLSRNLEDVVKPNIAFLLQCGLTVSNVLEFPLLIGMRPESVRERVACAEKLGVPRNTGMFKSALWAVYCVGPNSIGAKLDVIKATLGCSEAELTLVVRKSPPILRMSEGKLSRALKFLKVDVGLKLQYILLRPAILAFSMQRRLMPRHYFIKILKAKGLVKENVDFYNALCLTEKRFAQKFIDPYNQSIAGLADAYAAACAGKMPHED

SEQ ID NO: 50184 - protein, 121 aa, Zea mays
  Coding DNA Sequence Number=SeqID_8405
MGAISVRRIQILLTDEGSCTVQVFEMLLCKRVWVLFANRVRISMYPRYLPFENSVLLKTTLVDDTILDYFRLFGVRFVIHLFCWSHCLEAKFDWLSFTPGRLTRSYTYNKVCSNMIDEDDM

SEQ ID NO: 50185 - protein, 175 aa, Zea mays
  Coding DNA Sequence Number=SeqID_8406
MRELFNARLWLQGAGVCATCLRERLSHLSVSAPLPSVVVVRGCGEDAEGHGGRRHQEAALSSCSESEASTAYSSEGSSAAASECASSDHETRRRRAPRVSLLMRHERVVGDADAVAAFLLARREQRTAAAAATSFWAKLLRATRGGGKKDHRGCSLAARGNTLQERAAAPKWVLF

SEQ ID NO: 50186 - protein, 218 aa, Zea mays
  Coding DNA Sequence Number=SeqID_8407
MELQKDGACHRPRQRRCHAVARVASPAGRRVRLAALHKHIDVFTHTTRRGVALREDRYAGVILAVSEAVGALPNGAQAIIRDFRDQPMGAWFQGRPVQLGYARRRRKLLPSSEENRARPPTNMARAAAMMVVLAVVALALAAAPRAEAGQNCICECMKLCVRTRIPSMGQCAGKCREMACTKSCEDACTRKGFPGLPSEGIPTCELEPLTPDETHMLH

SEQ ID NO: 50187 - protein, 99 aa, Zea mays
  Coding DNA Sequence Number=SeqID_8408
  Gene Ontology: Mol. function=transporter activity; Cellular component= mitochondrial inner membrane; Biological process=transport
  Homolog annotation: Hit_ID=Q656X5; Match level="QueryCoverage=77%, HitCoverage=23%, E-value=5e-18, Identity=61%"; Hit description =Mitochondrial carrier protein-like
  Pfam annotation: Domain name=Mito_carr; Domain location=4-79; Score =25.5; E_value=1.6e-05; Accession=PF00153.17; Description =Mitochondrial carrier protein
MKLSYVVRRQMQVQNQQQHEQFGAPRITGTLQGLVSIKQTQGWKQLFAGLSLNYIKVVPSVAIGFTAYDTMKHLLKIPPREKNKLAEKHCFFLRHGSAV

SEQ ID NO: 50188 - protein, 60 aa, Zea mays
  Coding DNA Sequence Number=SeqID_8409
MVCHGKETRRQRRRHRMEEVAKEVARTCEDDDAGRRGTGGGTVGPKGVEEKHWKNASFLL

SEQ ID NO: 50189 - protein, 183 aa, Zea mays
  Coding DNA Sequence Number=SeqID_8410
  Gene Ontology: Mol. function=protein serine/threonine kinase activity; Cellular component=cytoplasm; Biological process=protein amino acid phosphorylation
  Homolog annotation: Hit_ID=Q8LR51; Match level="QueryCoverage=98%, HitCoverage=36%, E-value=2e-90, Identity=91%"; Hit description =Casein kinase I-like
  Pfam annotation: Domain name=Pkinase; Domain location=9-181; Score= -24.7; E_value=4.3e-07; Accession=PF00069.15; Description=Protein kinase domain
  Pfam annotation: Domain name=Pkinase_Tyr; Domain location=9-183; Score=-148.8; E_value=0.0024; Accession=PF07714.7; Description =Protein tyrosine kinase
  Pfam module annotation: Pfam domain module=Pkinase::Pkinase_Tyr; Domain location=9-181::9-183
MEPRIGNKFRLGRKIGSGSFGEIYLGTNIQTNEEVAIKLENVKTKHPQLLYESKIYRILQGGRQVGLTTFVLTAGIPNVRWFGVEGDYNVLVMDLLGPSLEDLFNFCSRKLSLKTVLMLADQMINRVEFVHSKSFLHRDIKPDNFLMGLGRRANQVYVIDFGLAKKYRDTSTHQHIPYRHRKE

SEQ ID NO: 50190 - protein, 39 aa, Zea mays
  Coding DNA Sequence Number=SeqID_8411
MGVRENRPFSFKGGPSSKGLEARPFVLLEDEVLREDPKQ

SEQ ID NO: 50191 - protein, 159 aa, Zea mays
  Coding DNA Sequence Number=SeqID_8412
  Subcellular localization annotation: CTP_CleavageSite=66; ConfidenceScore=5.17e-01
MGRTTTGGASQSILRQHMLAQKDKPMDATGTTSGHLNANILDATSRLCTAVASTSTTIPCVIWRAAASAVETRSPETLLTCLLLPLPSSTSPDLEGFGSIPGLEGNRDPPGVWICFSVFLPRLWRGFHLLQKWMRLSQLISQADQQKEGLKFGITLIQS

SEQ ID NO: 50192 - protein, 91 aa, Zea mays
  Coding DNA Sequence Number=SeqID_8413
MAMMGSTSKKMYLCQVPDFGFLNDKAETGRGWGLGRWLGALDGGHHSWPRRRTRWGWGLGAAPRRASADAMGGAWDKLVGALGSPSRAGAS

SEQ ID NO: 50193 - protein, 107 aa, Zea mays
  Coding DNA Sequence Number=SeqID_8414
  Subcellular localization annotation: CTP_CleavageSite=33; ConfidenceScore=5.13e-01
MLLRRPGILATLRPPRPGYKGGPNPCASSPITRSVSGRGLLLGRGSLWTPRKWSPEYQETTDQAKDGGKKSFEVLSAREKVKETRNPKPGVKKKTCKVKVDRVKKSY

SEQ ID NO: 50194 - protein, 217 aa, Zea mays
  Coding DNA Sequence Number=SeqID_8415
  Subcellular localization annotation: CTP_CleavageSite=38; ConfidenceScore=5.07e-01
MGRAGLYDLVTGVASSAVARSLEMRQTRSPGSLGSLGRARMGQEGLANSLVDYRLQERDWKRENDKGKAKLTAAKALAEVQRRWWNDVGAGLVGGPHAMGATVVEEEDGSDGQGPRASYLDHNTDNRLALHRRWWTPKGFEEPTFFSAIIITEGVITTAVSLTFGLLGIATSAAGVITPFDARIVPAGDRIVDPLVFIEGISSIMDDISTSGIILKR

SEQ ID NO: 50195 - protein, 77 aa, Zea mays
  Coding DNA Sequence Number=SeqID_8416
MEERIVSPTQLWTCGTRVQDMGDAYEIWSSKSGFTVLARIGGDTWHHHEGCIEVKQLREEYVTVILIFQELAHFAPS

SEQ ID NO: 50196 - protein, 143 aa, Zea mays
  Coding DNA Sequence Number=SeqID_8417
  Subcellular localization annotation: CTP_CleavageSite=53; ConfidenceScore=5.03e-01
MDDGGMWQRRRGKAQPGHTGQGTDDGRTRDSSFFFAGAWERSSTMAVSRCAARQGAGWSTTPPSQASSRAGAGTRTWGREGGKACVREIEREKTMDVGAKNGIVGEFLVAVALPLASVRDVRLGSAWAAQKKEKNSGKGEGNT

SEQ ID NO: 50197 - protein, 92 aa, Zea mays
  Coding DNA Sequence Number=SeqID_8418
MELGANSPMAADLPPPPQLPPALVFCCCAIQKGEGRGGRGRLTRGPAQQGVPARGVEKLMRKTLTMMTMSAESSDAPVIFLWEIAHDISTVL

SEQ ID NO: 50198 - protein, 85 aa, Zea mays
  Coding DNA Sequence Number=SeqID_8419
MDGATGSGKAVGDDGCGGAKDGYFNYGDFDHFIASRPKMKGKQEVGKRDYHSSRHKGKRELTSDKLMSKERFDKEALKQKYLHKV

SEQ ID NO: 50199 - protein, 60 aa, Zea mays
  Coding DNA Sequence Number=SeqID_8420
MAAIKCESNPFATSNLGRLIEIGRLWACTDSLMEEHVTEDPGEQQVEVAEQELIEGKLCP

SEQ ID NO: 50200 - protein, 350 aa, Zea mays
  Coding DNA Sequence Number=SeqID_8421
  Gene Ontology: Mol. function=protein binding; Cellular component =integral to membrane; Biological process=regulation of floral organ number
  Homolog annotation: Hit_ID=A0AAQ1; Match level="QueryCoverage=88%, HitCoverage=90%, E-value=5e-99, Identity=60%"; Hit description =Polygalacturonase inhibiting protein 2 precursor
  Pfam annotation: Domain name=LRRNT_2; Domain location=40-78; Score =25.1; E_value=0.00024; Accession=PF08263.3; Description=Leucine rich repeat N-terminal domain
  Pfam annotation: Domain name=LRR_1; Domain location=108-131; Score =11.2; E_value=2.3; Accession=PF00560.23; Description=Leucine Rich Repeat
  Pfam annotation: Domain name=LRR_1; Domain location=133-155; Score =8.7; E_value=6.8; Accession=PF00560.23; Description=Leucine Rich Repeat
  Pfam annotation: Domain name=LRR_1; Domain location=157-179; Score =11.5; E_value=2; Accession=PF00560.23; Description=Leucine Rich Repeat
  Pfam annotation: Domain name=LRR_1; Domain location=181-204; Score =11.1; E_value=2.3; Accession=PF00560.23; Description=Leucine Rich Repeat
  Pfam annotation: Domain name=LRR_1; Domain location=208-230; Score =11.6; E_value=1.9; Accession=PF00560.23; Description=Leucine Rich Repeat
  Pfam annotation: Domain name=LRR_1; Domain location=231-250; Score =1.3; E_value=1.6e+02; Accession=PF00560.23; Description=Leucine Rich Repeat
  Pfam annotation: Domain name=LRR_1; Domain location=255-271; Score =2.7; E_value=91; Accession=PF00560.23; Description=Leucine Rich Repeat
  Pfam annotation: Domain name=LRR_1; Domain location=278-300; Score =11.3; E_value=2.2; Accession=PF00560.23; Description=Leucine Rich Repeat
  Pfam module annotation: Pfam domain module=LRRNT_2::LRR_1::LRR_1::LRR_ 1::LRR_1::LRR_1::LRR_1::LRR_1::LRR_1; Domain location=40-78::108 -131::133-155::157-179::181-204::208-230::231-250::255-271::278-3
MAAASSSQQPPRLLVLVAVSCLLLQSAITSSSAESSMQCHEEDQEALLAVNSALGSPYHFASWTPDTFCCDWYDVDCDNVTGRVVGLTVFGDGNLTGAIPDAIANLTNLRTLVLRHLPGISGGIPVSLAQLANLTQLTISSTGVSGPVPSFLSQLTELTLLDLSFNSLDGAIPETLADLPALSSIDLSRNRLSGPVPPLLLSKYVDDQAAYLMLSHNNLSGSIPAGFASVSFAYLDLSRNAFAGDASGVFGKGKPLQHLDLSRNGFAFSLTAVDLPEQLAYLDLSHNAIRGRIPAQVADLAGLQLFNVSYNKMCGVVPTGGSMAKFDAYSYQHNKCLCGTPLPACGHRYY

SEQ ID NO: 50201 - protein, 117 aa, Zea mays
  Coding DNA Sequence Number=SeqID_8422
MGRNPHRHGIRLLAGLSLLGTAPEGRLVKGVWCQPQARATSTIPSAISHRLWRATVDPRGTVDCFVYSSIPDLILQPKTLDTPSRVLFVKEPPRKSLINPPSSETVDWVLGILPCNP

SEQ ID NO: 50202 - protein, 87 aa, Zea mays
  Coding DNA Sequence Number=SeqID_8423
MATIARSGEQLVSGAYTSYTRSGKGRRENTQRAMRGADCPVPHGSDRGKRERAVATGLESGASVSERLRVSVATRVEPEWAEWSVRP

SEQ ID NO: 50203 - protein, 154 aa, Zea mays
  Coding DNA Sequence Number=SeqID_8424
INGHRVLAELFTWLLILAIRLRINGPGVSPNTLVELRWRRPGHTADHRRSTLKPVPQYSKIQLMPFYTMPDEKRDAGGKYYRLVRHETHGTRCSSSPRRRADNSGQSPARRASIAPTEVEGTHRRSRRSTQDHNSDRASVAIAKPRRRAPRSDD

SEQ ID NO: 50204 - protein, 90 aa, Zea mays
  Coding DNA Sequence Number=SeqID_8425
MATIARSGEQLVSGAYTSYTRSGKGRRENTQRAMRGADCPVPHGSDRGKRERAVAKGAGKWGPGVSERLRCKCGLRVVEAEVGRIGSVRP

SEQ ID NO: 50205 - protein, 372 aa, Zea mays
  Coding DNA Sequence Number=SeqID_8426
  Homolog annotation: Hit_ID=O49954; Match level="QueryCoverage=16%, HitCoverage=5%, E-value=1e-12, Identity=63%"; Hit description =Glycine dehydrogenase [decarboxylating], mitochondrial precursor
MEPQDDPSVAFALICNNTTVLGPANSRAADDSVKALVASTDPNALLNTVTADALATPSVDVGADVVADNWGGCFDDSEQYYESPSVVADNWGGCFDGEQYRMRPSVTVDNWGGFFGDEDLAPSGNPTRFVLPIASIDEPSIDTAPARANSGVADDSVFVTIEPAGYDESKLHATAVLDVLPRVHTLGKAQCASYADRLYASATCTAPDHATFWRGSVPVLVDAMKLQERDLDAYARKRWFTMGFLHKAAAIPRGSVPVRSLCMVTQVEDTKSILKLVALDALKVFDQMSSPDSDICQEAHTLVASSRNLLFPGFVSCVETGMMQKQNNDNLVALTVTYLLTHGVYEEGIDEIGKIIHENGSQVYMEGAKMNA

SEQ ID NO: 50206 - protein, 140 aa, Zea mays
  Coding DNA Sequence Number=SeqID_8427
  Homolog annotation: Hit_ID=Q38766; Match level="QueryCoverage=39%, HitCoverage=5%, E-value=2e-18, Identity=85%"; Hit description =Victorin binding protein
MMSSQGLTDASKIAILNANYMAQRLEKHYLVLFCGVNEIVAHEFIIDLRAFKATDGDNVVVYTKNCPEVVEDVERWLGYLLDTFEVVDQGIKHFFVVIWDPGGIDAMYWLEGKPVFKKGGMSTAARMVYRKRVWLMSVCG

SEQ ID NO: 50207 - protein, 1417 aa, Zea mays
  Coding DNA Sequence Number=SeqID_8428
  Homolog annotation: Hit_ID=Q1S8Q1; Match level="QueryCoverage=71%, HitCoverage=96%, E-value=1e-101, Identity=31%"; Hit description =PWWP; Regulation of nuclear pre-mRNA protein
  Pfam annotation: Domain name=Extensin_2; Domain location=1064-1316; Score=-130.3; E_value=0.032; Accession=PF04554.4; Description =Extensin-like region
  Pfam annotation: Domain name=PWWP; Domain location=18-90; Score=42.8; E_value=1.2e-09; Accession=PF00855.8; Description=PWWP domain
  Pfam module annotation: Pfam domain module=Extensin_2::PWWP; Domain location=1064-1316::18-90
MPPGGRRGAKQRPNWTREPQLGDLVLAKIKGYPRWPAKISRPEEFNHEPTPKKFFVYFYGTDEIAFVPLADLEEFTEKTKNDLLDRAPNMKVKRKYVQVFNDAVEQICKAYNELPKTSEAANGALPDQSEKPSEHLVRSQDVGEIPGLGQMEGDSPTDYSHTSAKRPGTEEDVKDDGHEICDHSLAVYQKKTSLLEDPKHPMTKKSAASKSSLDIYMEQEHSPTSVRAEREAEEVKIEKESCPLDGFILEPNLEVVCALEVPKKSKSNKPLRNAERKENKRAGIGSPIERIVAEAASDVVLNMSADKESREFKKSKIMTKQSLTTDSEKMDYNKIVHGGPDEQLTGKSSAGFSSNKKSLPDSGQHKMDSSADTRPGKKPRLMDRAGETDKTVDKSEMKSNIDYGKHYAVKHERPTSMETCKNTILKTSTSDDRALRSGGVVSPISRLHSEVMEPACGSVTLSTVADSVKKGSSMKEDASRVDRQLVKPKRRACRFDEDEDEGQRTPLHRTSAKSLSTHIVPTEKAGIRGKFSSHVGNVFGKKLGPAREEKSRSVRMSPVKHEPIFSSPSQDKVHARHQVVEKRLITGLVETPAVIGNKMSLVDGKSSAQVKMPASSEVKKLRSSSSKPSHLTSGNSHSRNYPAPEKIPLLPQPEETKAKSKLATSVEHKVGTTLSTEQSGKRDHLKEERSSYVDKAVSSEPNPGSAKSIKHLIAAAQARRNLMASVHAKFDGSSTDNADITSTPYGLPGLSPSPVFRIPSPPRIAFPGSPGQRILKSPIEFDNGHGKSPKSRQASGSPSGGTDAAIARDALEGMIETLSRTKDSIGRATRHAIECSKYGIAGEIVELLIQKLQSEPNFHRRIDLLFLVDSITQCSHSQRGVARASYVPTVQAALPRLLGAAAPPGAGARENRRQCLKVLRLWLERKIMPEDILRKYMGDIEVPNDDTSTTLMLKRPSRAERSVDDPIREMDDMLVDEYGSNATFELSGILSSKVFEDDEDFPKNNGSSPFVSQARPVENDVIRKTEDTIAPVYVEEHIIIVENVTTDAAMEDALELPGNKQQTDGAVLIEHDSIQDPGSEQAIDQNDFPSLPDGPPPLPSDSPPPPPPLPPSPPPVTPPPPPPPPLSPASPPPPPPPPLPSGPPPQPAPPPLATQVTPLPSIPPPVPSSPPSLSYQPPAPEYFVTANGDQLTQMTGNILIQAIGNATTFIPSGPVNGQAAVNFVTSMQAEYGNNNIFMAPQASNGNYQFRPTGVPFQQGNFSAFPSAQTHPVQPHSHMAHMNPMGQQAVPPTLNPYAVQSFPNSQSHYPSEEHWRMASGNFSPDGQHNWLAGGGALPCSEGPYVQDGFNVESSEHWRQFELSATIHGFVSLTANCSYCILLRRALVINRGLKNDSRTMTGFDLLMRRFGSHPSQFLK

SEQ ID NO: 50208 - protein, 136 aa, Zea mays
  Coding DNA Sequence Number=SeqID_8429
MVSRTNAPKPNPSYPRRDRDSSETWERELTEGGGKHRADHDATFLSRWRIRFPRQAHGELAAEVKRRRGGEEGDSAQSLISMRATDSGTTPTAPEIAMALAELGMVVEDGDPTDAAHTSVEPVTAPRNASDTRVGG

SEQ ID NO: 50209 - protein, 151 aa, Zea mays
  Coding DNA Sequence Number=SeqID_8430
MGKNNKRKREPTPPSEDFGDSEYSEEEFSSESEGSPAPVSPPALSDDSDDSQGIAAEVWTYIRAVERSGLEGSDESEYSSDEEDSPEEDGEGDDDDDDDGGGGSDDGDGGSRGGNGGSRSGNGGSSRGGDGGSSRGSGGGGSSKGSNKASG

SEQ ID NO: 50210 - protein, 284 aa, Zea mays
  Coding DNA Sequence Number=SeqID_8431
  Homolog annotation: Hit_ID=Q8SA97; Match level="QueryCoverage=83%, HitCoverage=26%, E-value=4e-07, Identity=50%"; Hit description =Ornithine carbamoyltransferase
  Subcellular localization annotation: CTP_CleavageSite=47; ConfidenceScore=5.33e-01
MALPVDVAGLCPRLGDVEAPPKPRSSLSSMGRSRVRAPGSGEAKVVRQRPGRSPSHGVGRSGVRRLLGLSPSPSPGVGRSGVRRLLGLSPSPSPGVGRSGVRRLSGLSPSPSPGVGRSGVRRLLGLSPSPSPGVGRSGVRRLPGLSLSPSPGSGGAEFAVFRDLARVRVLVGVAQAALSLCQAGQWSSKVTAVTSALPGARVRIKLYADGGYQLRIRSLEGTPNYGPRQIVILVVHLFPSDQRVFEKIVIAQLYFNTLSRTLTKHHPQRKIGDMKASDPSRNYV

SEQ ID NO: 50211 - protein, 136 aa, Zea mays
  Coding DNA Sequence Number=SeqID_8432
MVSRTNAPKPNPSYPRRDRDSSETWERELTESGGKHRADHDATFLPRRRIRFPRQAHDELAAEVKRRRGGEGGDSAQSLISMRATDSGTTPTAVKIAMAPTELGMVVEDGDPTDAAHTSVEPVTAPRNASDTRVGG

SEQ ID NO: 50212 - protein, 256 aa, Zea mays
  Coding DNA Sequence Number=SeqID_8433
  Gene Ontology: Mol. function=oxidoreductase activity, acting on the CH-CH group of donors; Cellular component=mitochondrion; Biological process=electron transport
  Homolog annotation: Hit_ID=Q75IM9; Match level="QueryCoverage=87%, HitCoverage=89%, E-value=2e-48, Identity=84%"; Hit description =Putative isovaleryl-CoA dehydrogenase
  Pfam annotation: Domain name=Acyl-CoA_dh_1; Domain location=87-253; Score=64.8; E_value=2.8e-16; Accession=PF00441.14; Description=Acyl -CoA dehydrogenase, C-terminal doma
  Pfam annotation: Domain name=Acyl-CoA_dh_2; Domain location=140-253; Score=6.0; E_value=0.00012; Accession=PF08028.2; Description=Acyl -CoA dehydrogenase, C-terminal doma
  Pfam annotation: Domain name=Acyl-CoA_dh_N; Domain location=30-143; Score=143.2; E_value=7e-40; Accession=PF02771.7; Description=Acyl -CoA dehydrogenase, N-terminal domain
  Pfam module annotation: Pfam domain module=Acyl-CoA_dh_1::Acyl-CoA_dh_ 2::Acyl-CoA_dh_N; Domain location=87-253::140-253::30-143
MQRWLPALLRRAAPGGGAARLLATSSLLFDDTQEQFKESVRKFAQEAIAPRAAAIDASNHFPRDVDLWRLMGDFNLHGLTAPEEYGGMGLGYMYHCIAMEEITRASGAVGLSYGAHSNLCINQLVRHGNPEQKLKYLPKLSHHVTEGACLRLQREQFGRPIGEFQFIQGKMADMYTSLQSSRSFVYSVARDCDNGKVDRKDCAGVILFAAENATQVALQAIQCLGGNGYINEYPTGRLLRDAKLFEIGAVALFFCQ

SEQ ID NO: 50213 - protein, 165 aa, Zea mays
  Coding DNA Sequence Number=SeqID_8434
  Subcellular localization annotation: CTP_CleavageSite=10; ConfidenceScore=5.02e-01
MQESLAGPPSQQNPPEGLPTLTTPLLPLPLSGKALDWATNSRGVRGLSAKDTRPSAQSDRMAGAIAPIHGDPSGGTPPTRGVPSVKNLRPHRHPRAKSKCTTHNTDDTEAWRRFHTDNRRANVPVHGVAEMVLDGEKFRGLHRPNAHAEATDTFLAVRGNSQTRR

SEQ ID NO: 50214 - protein, 165 aa, Zea mays
  Coding DNA Sequence Number=SeqID_8435
  Subcellular localization annotation: CTP_CleavageSite=2; ConfidenceScore=5.22e-01
MQQSLAGPPSQQNPPEGLPTLTTPLLPLPLSGKALDWATNSRGVRGLSAKDTRPSAQSDRMAGAIAPIHGDPSGGTPPTRGVPSVKNLRPHRHPRAKSKCTTHNTDDTEAWRRFHTDNRRANVPVHGVAEMVLDGEKFRGLHRPNAHAEATDTFLVVRGNSQTRR

SEQ ID NO: 50215 - protein, 418 aa, Zea mays
  Coding DNA Sequence Number=SeqID_8436
  Gene Ontology: Mol. function=DNA binding; Cellular component=nucleus; Biological process=regulation of transcription
  Homolog annotation: Hit_ID=Q6YXS5; Match level="QueryCoverage=62%, HitCoverage=92%, E-value=3e-81, Identity=61%"; Hit description =Putative OsNAC7 protein
  Pfam annotation: Domain name=NAM; Domain location=11-140; Score =303.5; E_value=3.8e-88; Accession=PF02365.6; Description=No apical meristem (NAM) protein
MSISVNGQSCVPPGFRFHPTEEELLNYYLRKKVASQEIDLDVIRDVDLNKLEPWDIQEKCKIGSGPQNDWYFFSHKDKKYPTGTRTNRATAAGFWKATGRDKAIYNAVKRIGMRKTLVFYKGRAPHGQKSDWIMHEYRLDDPAAAAAAGSGDAVANDDAAATAAAAAAASSDGGQEDGWVVCRVFKKKHHHKESGGGGGNKHGSSNSEHGHGGAGKASAAAAAAAHQHQHHGGLQYSSSDEALDQILQYMGRSCKQEHELVSPAPAPPGRAAASRYLRPIETVLGGHAFMKLPALESPSAAASASLTQPAQHDELYRAAGNGITDWAMMDRLVASHLNGQQAPAAADQLGGGCGFDADAGAEDADAGLAFYSAAASRLLGSGGGAGSDDDLWSFTRSSVSSTAAAAATSTERLSHVSL

SEQ ID NO: 50216 - protein, 53 aa, Zea mays
  Coding DNA Sequence Number=SeqID_8437
METPEFLTVEYHLRHAVDRNVRPSIVGCVDLGSNGYSRVPVRERLDIISRVHT

SEQ ID NO: 50217 - protein, 42 aa, Zea mays
  Coding DNA Sequence Number=SeqID_8438
MLSNRDIEPVKFHEEAMKNTMGGSLPVAAQQSRLPTLDWLEV

SEQ ID NO: 50218 - protein, 239 aa, Zea mays
  Coding DNA Sequence Number=SeqID_8439
  Homolog annotation: Hit_ID=UPI00004C1731; Match level="QueryCoverage =27%, HitCoverage=4%, E-value=4e-18, Identity=62%"; Hit description =UPI00004C1731 related cluster
MAIRFESLDFVIDNEGTMTRAPKAQSPLMKDLIDIVGASKASSSAPLTRTMGGGARQDPACVEFMGMMDPPGICSMTFSYRDQNVDTSPHPAEQVTTQPKSASYDVHSTSARPTLPKAVAKTESFLEQLVSPDRPRVPCCDAESRRLTNISRPHYWETTLRRTIARGTYLNPGNLWDLKSCRQKPDETLRDYIQRFLRLCNELTNLTNADVISAFILGTTSETLVHKLGIKSYEPQRNY

SEQ ID NO: 50219 - protein, 685 aa, Zea mays
  Coding DNA Sequence Number=SeqID_8440
  Gene Ontology: Mol. function=zinc ion binding; Cellular component =membrane; Biological process=defense response
  Homolog annotation: Hit_ID=Q65XH7; Match level="QueryCoverage=93%, HitCoverage=69%, E-value=0.0, Identity=79%"; Hit description=Ptative chromosome condensation factor
  Pfam annotation: Domain name=FYVE; Domain location=465-533; Score =46.0; E_value=1.3e-10; Accession=PF01363.12; Description=FYVE zinc finger
  Pfam annotation: Domain name=RCC1; Domain location=137-186; Score =29.0; E_value=1.6e-05; Accession=PF00415.9; Description=Regulator of chromosome condensation (RCC1)
  Pfam annotation: Domain name=RCC1; Domain location=189-241; Score =25.2; E_value=0.00023; Accession=PF00415.9; Description=Regulator of chromosome condensation (RCC1)
  Pfam annotation: Domain name=RCC1; Domain location=244-293; Score =15.0; E_value=0.017; Accession=PF00415.9; Description=Regulator of chromosome condensation (RCC1)
  Pfam annotation: Domain name=RCC1; Domain location=309-358; Score =37.7; E_value=4e-08; Accession=PF00415.9; Description=Regulator of chromosome condensation (RCC1)
  Pfam annotation: Domain name=RCC1; Domain location=361-410; Score =20.8; E_value=0.0039; Accession=PF00415.9; Description=Regulator of chromosome condensation (RCC1)
  Pfam annotation: Domain name=RCC1; Domain location=415-462; Score =36.2; E_value=1.2e-07; Accession=PF00415.9; Description=Regulator of chromosome condensation (RCC1)
  Pfam module annotation: Pfam domain module=FYVE::RCC1::RCC1::RCC1::RCC 1::RCC1::RCC1; Domain location=465-533::137-186::189-241::244 -293::309-358::361-410::415-462
MGVGMAMWGDEYRHHRRGVRKPSGAGELFLPSARGELTLGLHQELVGPSSDVLRASISSAPSTSSHGSAQDECDSLGDVYVWGEVVCDTSVRTGSDTVISSTGRIDILLPKPLESNLVLDVYHVDCGVKHAALVMKNGEVFTWGEDSGGRLGHGTREDCVRPRLVESLTVSNVDFVACGEFHTCAVTTTGELYTWGDGTYNVGLLGHGNDVGHWIPKRISGALEGLQVAYVSCGTWHTALITSMGQLFTFGDGSFGVLGHGDLKSVSYPREVESLSGLKTIAVACGVWHTAAIVEVIVTRSSSSVKLSAGKLFTWGDGDKHRLGHGDKETRLKPTCVATLIDHDFYRVACGHSLTVALTTSGQVLSMGNAVYGQLGNPHSDGRIPCLVEDKIVGEQVLQIACGSYHVAVLTNRSEVFTWGKGANGRLGHGDTEDRKVPTLVEALKDRAVRYIACGANFTAAICQYKWVSGADQSQCSSCRQPFGFTRKRRNCYNCGLVHCNSCTSRKALRASLAPSPGKPYRVCDSCFLKLNNASDPNAANRRKDPVPYQPVESNGDAKVGKASLPSNMEMIRNLDIKAAWQGKKTDGLSFLRNPQVSSLLQLSDIALSGGLGMNRSAPRAVHISAARSVTTSRAVSPFSRKPSPPRSTTPVPTAHGLSFSKSATDNIVKANELLNQEVERLRAQ

SEQ ID NO: 50220 - protein, 383 aa, Zea mays
  Coding DNA Sequence Number=SeqID_8441
  Gene Ontology: Mol. function=zinc ion binding
  Homolog annotation: Hit_ID=Q5EWZ0; Match level="QueryCoverage=55%, HitCoverage=23%, E-value=8e-79, Identity=69%"; Hit description =Putative chromosome condensation factor
  Pfam annotation: Domain name=DZC; Domain location=169-204; Score =85.4; E_value=1.8e-22; Accession=PF08381.1; Description=Disease resistancezinc fingerchromosome co
MAERLPPDHGAYNVNETKQSHNPNGIDSHAASYSSMNGIHQTRNELLNASIAHSLNSGRPSSHCNGISGQHKLLGNVSEHSDCSTHSLRITAPHDSELPSRRARSSSDEMLTAGSRVDDNLNVDAVSLQSGEDGYKPRGTIPLPSNQVQAEWIEQYEPGVYITLTTLRDGTRDLKRVRFSRRRFGEHQAENWWNENREKVYERYNVKSSERVSSAASTRKTAKAAASLLNSSKLFRSYILGDDKRPAAIIILLALHNAGYNARLYEGRVYRTRQSRPRASIRWEESRFQHLASTVRATKKQPAMAPKRENSKAAPSIDDVAKTALLVEKKGKALTDTTPKRLSKMTLSTARDSARTTPPPTALYAPAVLRAHHKHHHQGAKTP

SEQ ID NO: 50221 - protein, 139 aa, Zea mays
  Coding DNA Sequence Number=SeqID_8442
  Gene Ontology: Mol. function=RNA-directed DNA polymerase activity; Biological process=RNA-dependent DNA replication
  Homolog annotation: Hit_ID=Q08514; Match level="QueryCoverage=68%, HitCoverage=30%, E-value=4e-38, Identity=88%"; Hit description =Gallus gallus POL-like
MEVWSPQYKKDRELLERVQRRATKMMRRLEHLPYKDRLRELGLFSLEKRRLWGDLIAAFQYLKGAYKQEGIKLFERESGEVLERAAQRRCGCPVPGGIQGQVGWGPGQPGLVNGEVGGPAQQGVGDSWSLRSLPTQAIL

SEQ ID NO: 50222 - protein, 184 aa, Zea mays
  Coding DNA Sequence Number=SeqID_8443
  Gene Ontology: Mol. function=small conjugating protein ligase activity; Cellular component=cytosol; Biological process=protein modification process
  Homolog annotation: Hit_ID=P35132; Match level="QueryCoverage=66%, HitCoverage=72%, E-value=1e-54, Identity=83%"; Hit description=SUMO -conjugating enzyme UBC9
  Pfam annotation: Domain name=UQ_con; Domain location=1-121; Score =145.6; E_value=1.4e-40; Accession=PF00179.16; Description=Ubiquitin -conjugating enzyme
MGPSDSPYSGGVFLVTIHFPPDYPFKPPKVAFRTKVFHPNINSNGSICLDILKDQWSPALTISKVWELPTYQHPQSGRFQVLLSICSLLTDPNPDDPLVPEIAHMYKTDRNKYENTARTWTQRRGHVCVRRIGRKGDPEQVKWNYLPCGQATKFGPSGSPICRWSVGLQYRLPVIILVTAEVQR

SEQ ID NO: 50223 - protein, 78 aa, Zea mays
  Coding DNA Sequence Number=SeqID_8444
  Subcellular localization annotation: CTP_CleavageSite=61; ConfidenceScore=5.56e-01
MKSFCFGLLLSPPKMKSFCSLPQRWRVASQRRTVAALPPLQRVLEPAVEVTTLSRPIEIVMLSATSQSFVEIINVRFE

SEQ ID NO: 50224 - protein, 170 aa, Zea mays
  Coding DNA Sequence Number=SeqID_8445
  Subcellular localization annotation: CTP_CleavageSite=44; ConfidenceScore=5.22e-01
MAPRMLCDDGGSQLSYGSRKTSARTRPLRQLSLRQAPPLLRRPRHHTSWVPRSLRLPHRHGPLREGWPRGDEDETGALLGPLAPSPAWTLVTPYCKRTRPGRGTNTKAAGFPPLSRPSPAASLPPFALAHALDPSGLGHAATFTRRLRDPPVSKRRQTSLSNNLVKASVL

SEQ ID NO: 50225 - protein, 132 aa, Zea mays
  Coding DNA Sequence Number=SeqID_8446
  Homolog annotation: Hit_ID=Q1SSZ2; Match level="QueryCoverage=51%, HitCoverage=14%, E-value=6e-07, Identity=41%"; Hit description=C2 calcium/lipid-binding region, CaLB
  Pfam annotation: Domain name=C2; Domain location=20-113; Score=16.3; E_value=0.0085; Accession=PF00168.20; Description=C2 domain
MEAPDEEAGLGLLHEGEQILEVALISAQGLKPPSSQRRRLQAYAVAWVDAGHKIQTQPDDTGGLDPVWHARLLFRVREASLADDSRAAVSVEIYAAAAGSWHLGGDSLVGLVRFLLGDHRVVPRGHRGSPMA

SEQ ID NO: 50226 - protein, 234 aa, Zea mays
  Coding DNA Sequence Number=SeqID_8447
  Subcellular localization annotation: CTP_CleavageSite=74; ConfidenceScore=5.64e-01
MRVHGLLNVATSLVAVPPSPAACHALRLSQAVSLRGLSVVPTPSRALRVLNRAHSTPPPSPRLLTPKKQQMVVNANNKVADDASDEEGAEEDARGMGGVVFCGPCVLPLYPRKIRTSPSDENLQAYANVFSGGLKHCRTEPSFLRSPGKHKTARCSYVQGRMTLCGEAVARSRKPPSVLTPPNQPLVRCRQQTVLVALAQSPVAPAHGALASLPACHRPQCHSRLKTLLSAVDN

SEQ ID NO: 50227 - protein, 56 aa, Zea mays
  Coding DNA Sequence Number=SeqID_8448
MEHKTCRIQPSATGRHYALAKSSSVHWAMQQNIQEACEPFVSSENIPRLTTVIQEP

SEQ ID NO: 50228 - protein, 117 aa, Zea mays
  Coding DNA Sequence Number=SeqID_8449
  Homolog annotation: Hit_ID=Q2L9B8; Match level="QueryCoverage=27%, HitCoverage=14%, E-value=2e-09, Identity=90%"; Hit description =Vacuolar ATP synthase subunit E
  Pfam annotation: Domain name=vATP-synt_E; Domain location=20-92; Score=-61.9; E_value=0.0051; Accession=PF01991.8; Description=ATP synthase (E31 kDa) subunit
MGFCCWATAGPHVGWWDHVRQEFNIEKLQLVEAEKKKIRQEYERKEKQVEVRKKISGGIVLASRDGKIVFESTLDARLEVVFRKKLPEIVLDHLPRDQRYQQQRSAVLDDCVDDEWM

SEQ ID NO: 50229 - protein, 129 aa, Zea mays
  Coding DNA Sequence Number=SeqID_8450
  Subcellular localization annotation: CTP_CleavageSite=45; ConfidenceScore=5.14e-01
MGAAVGVCVSVLCQQCSALTILFGKPYTSRPSKTESRPWWPGGVSSSVAGGSVATGQHGETVLLFVAAHHIAAAPGGVPSLNAEYESGSDVSMDGLRDGPVGDVYWKKANWQLHRRCGKSYRLCEDGLF

SEQ ID NO: 50230 - protein, 170 aa, Zea mays
  Coding DNA Sequence Number=SeqID_8451
  Gene Ontology: Mol. function=methyltransferase activity; Cellular component=cytoplasm; Biological process=metabolic process
  Homolog annotation: Hit_ID=Q9SNQ2; Match level="QueryCoverage=93%, HitCoverage=35%, E-value=5e-50, Identity=67%"; Hit description =Protein arginine N-methyltransferase protein-like
MASLPNGGGAAASGSCGARPVDKEVDFANYFCTYAYLYHQKEMLCDRVRMDAYHSAVFRNAPHFQGKVGTPLNPSENSILSRQFWGPVWLIRQICQVVLDVGTGSGILAIWSAQAGARKVYAVEATNMAEHARELARANGVTDIVEVIQGTVEDVDLPEKGEAGFLMLVV

SEQ ID NO: 50231 - protein, 69 aa, Zea mays
  Coding DNA Sequence Number=SeqID_8452
MEQLTPVSSGGSGVVVSWGSDWGGLLELKDHDSTNDFESRMTQNQEGKNDEYMDINYMANAQSIIESQA

SEQ ID NO: 50232 - protein, 175 aa, Zea mays
  Coding DNA Sequence Number=SeqID_8453
MSREPRNKGISMLEEVERRMTVKAKGEDDEENESDSEDDDDLQQFFAQLSKKNWMNLLKLMKREEEQKEMLHKQEDILMRKIEDLEKLTKEHEKLKCSHDDLVQRRASAAGNQGPRSVLAVAQALQSHLSRPSPWPRPRLRRTSTTESGTAATGSPVTEPEVTIRSQASIRDLTT

SEQ ID NO: 50233 - protein, 125 aa, Zea mays
  Coding DNA Sequence Number=SeqID_8454
MYNAPPPPQDMSYYEHCQRRHEEKGCLYGWLGGKVDNHANNRTRQSLPDEVHAYCQPKTKPLRSIRKAGKMYNAPSAQEMSYLEHVQRRHEEKGCLYACIFTALCCFCCYETCECCLDCLCCCCN

SEQ ID NO: 50234 - protein, 47 aa, Zea mays
  Coding DNA Sequence Number=SeqID_8455
MAFDRLFTRLGSWKCKLDVKIRGNRTAGKGMFGTASFHEILLNSRKQ

SEQ ID NO: 50235 - protein, 151 aa, Zea mays
  Coding DNA Sequence Number=SeqID_8456
  Homolog annotation: Hit_ID=Q6QP51; Match level="QueryCoverage=34%, HitCoverage=30%, E-value=6e-14, Identity=68%"; Hit description =Putative growth-regulating factor 1
MQAACNRTMGAHPFDFDASSMEAQAHTSCNWRAGCYVQETAPPLAPPPCLLDCGTSTATRGNPAHDPTVPTRHIGHGDRERGNPERDPSPRRKRAPSPPTDQRFEGWPLGRVQQPPQSTRAPRPLLVRGSKVGPSKGFNGRLRPLGLRAYY

SEQ ID NO: 50236 - protein, 305 aa, Zea mays
  Coding DNA Sequence Number=SeqID_8457
  Gene Ontology: Mol. function=protein dimerization activity; Cellular component=nucleus; Biological process=regulation of transcription, DNA-dependent
  Homolog annotation: Hit_ID=Q7XE06; Match level="QueryCoverage=78%, HitCoverage=45%, E-value=1e-48, Identity=52%"; Hit description=HAT family dimerisation domain containing protein
  Pfam annotation: Domain name=zf-BED; Domain location=68-113; Score =28.4; E_value=2.5e-05; Accession=PF02892.5; Description=BED zinc finger
MVLDLLVVVVDAISRAPAPSSTPQDPTPTPSDVIAPTPTDGQGTGTTNTNAVEIDEDVRVGSKRKLKSDVWQDFERVCVGGTWKAKCNWCHKTLSDVCRNGTSHLRSHANSCESRQTRKGLKQSTLKLSKTQDGNVLLEKYVFDQGVARKELALMICVHEYPLSIVEHVGFRRFCAALQPLLKVMSRNTIRKDILDMYQVQKVSTVTLDNYSTNDNVMKEMQDKMPLPSLMLRGKLMHMRCVAHIINLIVKDGLGAKDAMGVKVVEEAIGRIRETIAFWSATPKRHERFERVVSQEGIKYDKNSS

SEQ ID NO: 50237 - protein, 916 aa, Zea mays
  Coding DNA Sequence Number=SeqID_8458
  Gene Ontology: Mol. function=alpha,alpha-trehalose-phosphate synthase (UDP-forming) activity; Cellular component=cytosol; Biological process=trehalose biosynthetic process
  Homolog annotation: Hit_ID=P93653; Match level="QueryCoverage=88%, HitCoverage=90%, E-value=0.0, Identity=67%"; Hit description =Trehalose-6-phosphate synthase
  Pfam annotation: Domain name=Glyco_transf_20; Domain location=93-537; Score=732.7; E_value=2.4e-217; Accession=PF00982.11; Description =Glycosyltransferase family 20
  Pfam annotation: Domain name=Trehalose_PPase; Domain location=571 -826; Score=261.4; E_value=1.9e-75; Accession=PF02358.7; Description =Trehalose-phosphatase
  Pfam module annotation: Pfam domain module=Glyco_transf_20::Trehalose_ PPase; Domain location=93-537::571-826
MPTSSPFVGDSGGAGSPIRVERMVRERSRRYDIFASDAMDTDAEAAFALDGVQSPGRASPANMEDAGGAAAARPPLAGSRSGFRRLGLRGMKQRLLVVANRLPVSANRRGEDHWSLEISAGGLVSALLGVKDVDAKWIGWAGVNVPDEVGQRALTKALAEKRCIPVFLDEEIVHQYYNGYCNNILWPLFHYLGLPQEDRLATTRNFESQFDAYKRANQMFADVVYEHYQDGDVIWCHDYHLMFLPKCLKDHDINMKVGWFLHTPFPSSEIYRTLPSRLELLRSVLCADLVGFHTYDYARHFVSACTRILGLEGTPEGVEDQGRLTRVAAFPIGIDSDRFKRALELPAVKRHVSELTERFAGRKVCPSEKHLQNIINLEDSKNVFWKVMLGVDRLDMIKGIPQKILAFEKFLEENPDWNNKVVLLQIAVPTRTDVPEYVALVTSLRDGMNLVSYEYVACQGSKKGVLILSEFAGAAQSLGAGAILVNPWNITEVADSIRHALTMPSDEREKRHRHNYAHVTTHTAQDWAETFVFELNDTVAEALLRTRQVPPGLPSQMAIQQYLRSKNRLLILGFNSTLTEPVESSGRRGGDQIKEMELKLHPDLKGPLRALCEDERTTVIVLSGSDRSVLDENFGEFKMWLAAEHGMFLRPTYGEWMTTMPEHLNMDWVDSVKHVFEYFTERTPRSHFEHRETSFVWNYKYADVEFGRLQARDMLQHLWTGPISNAAVDVVQGSRSVEVRSVGVTKGAAIDRILGEIVHSENMITPIDYVLCIGHFLGKDEDIYVFFDPEYPSESKVKPEGGSASLDRRPNGRPPSNGRSNSRNPQSRTQKAQQAASERSSSSSHSSTSSNHDWREGSSVLDLKGENYFSCAVGRKRSNARYLLSSSEEVVSFLKELATATAGFQATCADYMHVLG

SEQ ID NO: 50238 - protein, 198 aa, Zea mays
  Coding DNA Sequence Number=SeqID_8459
MGGAQMGAMLPWERSLGVLHGCSDLRRSRGLFQALKHGGAEEGKGEIAGAPWRSFCAASIEGEVELVGRGAVQERGAGNSDWSWMSSSLPWGRCLGAMAAGRAEASGPGRLLLAAFAKEGVMGSFCRGVWLGASREEDEQVLAAAARGRRSRGAAFGTRAKGRKAGKSGRHGWRKLPARCCREQGGRNVMAERREGGG

SEQ ID NO: 50239 - protein, 404 aa, Zea mays
  Coding DNA Sequence Number=SeqID_8460
  Gene Ontology: Mol. function=zinc ion binding; Biological process =regulation of transcription
  Homolog annotation: Hit_ID=Q41801; Match level="QueryCoverage=70%, HitCoverage=95%, E-value=9e-84, Identity=60%"; Hit description=Dof3 gene
  Pfam annotation: Domain name=zf-Dof; Domain location=91-153; Score =130.0; E_value=6.5e-36; Accession=PF02701.6; Description=Dof domain, zinc finger
MIFPPAFLQDSSSWNDNQHQQQQHHHQQQGHGHLQIAVSGSGDANHELLQQPIMGGALPDGGGGGGGGGQVGGPAKPMSMAERARLARIPLPEPGLKCPRCDSTNTKFCYFNNYSLTQPRHFCRACRRYWTRGGALRNVPVGGGYRRHAKRAKPKQQQQQHAAAGTGAATGAMQQPPAGSMASSAAACTATTTMTTNALHAGPGGGMLPMLPPLLRLADFDAMSLGSSFSGISSMGKPGSIGAACYPHSVGGLEQWRVQQMQSFPFLHAMDQGPLGPPLAMAMAAPGGMFQLGLDTTSDNSRGGGGGGEDGSSAGEALHMMQATKRESYPAAPRAMYGDQQHNHLAAAGGYTSYSTNAAAEKTSSMHALVAMFAFKKKLWREERLGLDADHAQILLVSTAATSL

SEQ ID NO: 50240 - protein, 100 aa, Zea mays
  Coding DNA Sequence Number=SeqID_8461
MGVVKGGREVHALASSSLGLGAWALRERGHGTMCWLGAWALWEQGHRTVCIVPRVGWTGAREIRVVIMRGRGSQTVAGAWRTCGCVGVGEGHNGEGHGEV

SEQ ID NO: 50241 - protein, 97 aa, Zea mays
  Coding DNA Sequence Number=SeqID_8462
MEQRQMVGRAREEAAQGTEEQQQRPSQREKGARVRAQYLGVEHKIKERTLRDAAGMDRKERLNYLDERNDVEIRKRIKNFRETFQRVDVCTKLYAPN

SEQ ID NO: 50242 - protein, 46 aa, Zea mays
  Coding DNA Sequence Number=SeqID_8463
MEQRQMVGRACEEAAQGTEEQQQRPSQREKGARVRAQYLGVEHKNS

SEQ ID NO: 50243 - protein, 950 aa, Zea mays
  Coding DNA Sequence Number=SeqID_8464
  Gene Ontology: Mol. function=ubiquitin-protein ligase activity; Cellular component=intracellular; Biological process=protein modification process
  Homolog annotation: Hit_ID=Q6YU89; Match level="QueryCoverage=61%, HitCoverage=38%, E-value=1e-115, Identity=36%"; Hit description =Putative HECT ubiquitin-protein ligase 3
  Pfam annotation: Domain name=HECT; Domain location=642-950; Score =218.7; E_value=1.3e-62; Accession=PF00632.15; Description=HECT -domain (ubiquitin-transferase)
VAKSAALSSICYSCVVVIGSFVKLCTPNLLVELQKTVNLSSLFNCLLAQKNQHVLFETLKISRILAKKDQHFFLESFTKEGVKHAIEYIVSQSKNNSHQNMKEYCLCFYMETSSTVEACSIANNSVTELAKEIKKNFLSVKGSNKSPNRFGFTLKSVRDFFARLNLYSSTHLAENPDSCKQLSDLSRRLLSDELPVTSNFEFVQSGSIKCLSVYLSNGAYCNADLNDGPVLEQLSVVHSRLHKFANLALTPFNESSANPLGILVEKLLDTLHMCYGSFPVLLSYEQMSREDMTMIPLRYPEAKKPTSLLLKFHRSQKERELYNYNGVLIVDLFSTPDSTEPILFPEVFRRTDQEPASENSNQDKNDDDGNKSSRLEFFYNGVTLQPSVTFFESILHLMYKGQSDLWIDPSFWVQEHSITYRKRIKSNKEISSQSSYYTRLSYVHEILQRAWLKDPFFTAILNGKLPGNLDVSDLSYNLLFMLKVLEGVNRFSYQLLMDEQINKFAEGIQEDINDIEVAICPVPRHQFLSSLLINKLEVQMQDVLFDDGLIPSWCVYLVENCPFLLSLDTRWKYFCLTVHRSFFPDQINRYYPQTKKYRVARSAIIEGAVSVMTNHGPSNRIIEVEFEGEIGTGRGPTFEFYSTVSHELQRAGLGMWRGDSGEHGFVHAPFGLFPKPWPPSSQGIDFTNMLQKFKLLGNLVVRAVLDGRILDIPLSKAFYKIMLEQELDMYDILSFDPELGRTVIEFQALVSRKNFLETSSEESNPTADLSYKNVKLEDLCLDFTLPGNPEYELVPGGSEKMVTLDSLDQYVSLVVYATLKSGIAKQIEAFKSGINEVFDLKALKMFTEEEMERILCGEQGAWDLKNLEDHIVFEHGYDMSSQPVIIFLEILREFGREEQRAFTQFSTGAPHLPLGGLASLDPKLTVVRKEIMRKKLKYAITEGLGPFHLS

SEQ ID NO: 50244 - protein, 690 aa, Zea mays
  Coding DNA Sequence Number=SeqID_8465
  Homolog annotation: Hit_ID=Q6QP51; Match level="QueryCoverage=85%, HitCoverage=95%, E-value=9e-25, Identity=38%"; Hit description =Putative growth-regulating factor 1
ASDTFGRRSGQRFTSAMMTASKKGTGKGDISKGILLREGSGPRALLLIRGSKAGPSEGFDSRPRALGLQAHTDQRIEGWPLGRVRQPPQSTRAPRPLLIRGSKAGPSKGSTAAPEHAERGMTLGMSDTWPRLRLCSQGTVGHFRDQQERFCNRVSSEGGIEPSDPIEWDRVRQITYRRIQCKDRLAPYPDTRASVGKVEQLGPASGATGSSASPDLGPRPQEKSPPRPTPGLGPCLGLRRWTPPHLTPGLGLDLDLGRWSPPRPTPGPGLNLDLGQNRILARPRPRPQEESLPRPTLGSDRPRRRGKDDEEVARRPIREVELRLSSPPSPARMMKILEAEGGAEAAARLASPHHRTGGHHPGDRERGYFERDPSPRRKRAPSPPTDQGFEGWPLGRVRQPPRALGLQAHTDQRIEGWPLGRVRQPPQSTRAPRPLLIRGSKAGPSKGSTAAPEHAERGMTLGMSDTWPRLRLCSQGTVGHFRDQQERFCNRVPSEGGIEPSDPIEWDRENSATHPSSTAMPPARVRLTAAGSSLRRHRKLRLARPWASASGEVSASPDPRARPLPRPQKVDSASSDPRARPRPRPRKVVSASPNPRAQPQPRPRAKSHPRPTPASASGGVSASPDLGLGPTTPQGPLTEARRRQQGPDSPDSCASTWLKCSSDGHDTAALPGSKRRQKKTVVLKFDHWIT

SEQ ID NO: 50245 - protein, 81 aa, Zea mays
  Coding DNA Sequence Number=SeqID_8466
MTKKGETDKAVEEGEDLEDNVSDTGDDVAGEEEYDLHPSKPSYTDMVQYLIKPSEEGSFPKLKVMVYKSFFWAGLLAFENT

SEQ ID NO: 50246 - protein, 119 aa, Zea mays
  Coding DNA Sequence Number=SeqID_8467
  Subcellular localization annotation: CTP_CleavageSite=29; ConfidenceScore=5.34e-01
MAREVPPRWSVGTALVAAARQAGRRCPPVAAAGGRGRSGGGRGVVAIVGSQVLNGFRVRRGLVPLVLVDSAATARARAKAYISRRRGERAADPDSDAARCMHVGPRSRVSRHGPTAFEV

SEQ ID NO: 50247 - protein, 114 aa, Zea mays
  Coding DNA Sequence Number=SeqID_8468
MNPEIRCTNRSHLAVMHALGVSSLLTCPEIRRRAAAAAPTSPPCALKGSLPRAPHGDAVALEPHRIRRRGRCHIAVVRTSWGRHRVRALGIRCHSCSHLAAVRASGIRSCQRVP

SEQ ID NO: 50248 - protein, 74 aa, Zea mays
  Coding DNA Sequence Number=SeqID_8469
MASSGGWGHWLRRNRSSESVVVRWAATAVAGDLHASTSGIELCGRGTLLAGEAAKFAVNRERRRCLSELGRKCI

SEQ ID NO: 50249 - protein, 314 aa, Zea mays
  Coding DNA Sequence Number=SeqID_8470
  Gene Ontology: Mol. function=DNA binding; Biological process =regulation of transcription
  Homolog annotation: Hit_ID=Q5QLQ4; Match level="QueryCoverage=72%, HitCoverage=59%, E-value=1e-35, Identity=41%"; Hit description=OsNAC protein-like
  Pfam annotation: Domain name=NAM; Domain location=4-136; Score=-8.9; E_value=1.1e-06; Accession=PF02365.6; Description=No apical meristem (NAM) protein
METHPSEAELITSFLRPRVVVSDDSDTPCASFVHDVDVYSAGPGELTGRLAPVLASNGDRAWYFFCAVRAKKSDGQRKARKVHTGEGCWHSEAGAKPVVEGPGRLLVGHRQAFSFMTKVKGRRVRSGWLMVELSLDGADADDVVLCKVYFSPRARASPAAASGRKERKAAADDKNPASSARRRRDPPADDAEAGTPTPDNDEDRDSAQSRGLADDDNSSTTVADDPDAVGLGTDDSAFSWWMRNRDRLMEKYKIVDRPDEELQKTLDLDEYLRLLSRDLDPADALPRATSYIYMHSAPISVDACCFDPLTPTGT

SEQ ID NO: 50250 - protein, 210 aa, Zea mays
  Coding DNA Sequence Number=SeqID_8471
MLKDNSRAQVPQEPNGAAATPDEANVNPTAFPTKSPAVGYGDLLLSWRLDGTVSGVVTQSVREEPEVLVAEGDMEERDVTELFRVVSVTTIAVPVDDHLDICRTMNRTSPRLTYMHLLGIDSKWESRIGALESMVTDSCMCHEASKSLLAQYGEDLIVVKRSKDGASAAATTELGAMDFGAEFGHISASEANTSAYGLWRRAVLLQRLGL

SEQ ID NO: 50251 - protein, 56 aa, Zea mays
  Coding DNA Sequence Number=SeqID_8472
MALLQEAESSRRDPVRGEGSSSDHNGLSSHEGHNQGVVGSRNVRVWKSSRRRYEGQ

SEQ ID NO: 50252 - protein, 85 aa, Zea mays
  Coding DNA Sequence Number=SeqID_8473
MALVCRFSLTILEWKVGTFSCSGMLNSFVDVSPEDLQQKDLQSSLEMVDVTHDSTESESKEDTEEKAPTNGATFKLNEDAARGPN

SEQ ID NO: 50253 - protein, 414 aa, Zea mays
  Coding DNA Sequence Number=SeqID_8474
  Pfam annotation: Domain name=Extensin_2; Domain location=1-412; Score= -135.6; E_value=0.052; Accession=PF04554.4; Description=Extensin-like region
  Subcellular localization annotation: CTP_CleavageSite=60; ConfidenceScore=5.55e-01
MAPSSQTDAPCPSMAPPSAPLRGDPDARSGVVQLPFTSATSMVLGAHAPQGRRPCFHSPPAAQDVAPPPRTMLRCLGSCAADFCPLLRCLRRAVGAVLRAAAASSVARRRPASRRPSPSQSAQRLHSTSTPPFPARTLSTVRAFSALWTGWLPYCRVGVQASRRCLAGARAVQIRPLSQQATPPLQPPACASFSAFLCALLPLPAAALGLCPPPPAPSPLRPPLAPSHVPPPPHCAGHLLTARADAQQRLTLLPSPVVGVVHSPCQPLSFGGPPAPRAAVPPRPCLLGHAPVVLARPRAAARAPVLLGHVPPSPPRPRARRPRATTRRRARARPPRPRAALASSATRPSSSAMRRPRPSAASPRLHALASSASRHHAPPSPPRCASPRALARVVQNRARKRLAYPSRVEKYFVK

SEQ ID NO: 50254 - protein, 140 aa, Zea mays
  Coding DNA Sequence Number=SeqID_8475
  Subcellular localization annotation: CTP_CleavageSite=50; ConfidenceScore=5.44e-01
MRHAPRSSGFVSPPTLPAPPIDPTTCRRGEPPLRAALQTCTARTACWNCRVVAVWPPAVRLPRKSSVVAATSNAASLPISSTLTPSSLVFFHVPFRVRRDGRVRLSPRRPRYSVWHCREMCHRIHSDRLRTSTPCEPAVL

SEQ ID NO: 50255 - protein, 112 aa, Zea mays
  Coding DNA Sequence Number=SeqID_8476
MGQALSWGRSLPSPAWTLVTPLLQAHPTWARDEHEGRGTSTSLTLDSGHLASPPFALAHALDPSGLGHAAHSLVGLGTPLSRNADTLDMIILGKRYTKSDRFSFSIVACAFA

SEQ ID NO: 50256 - protein, 486 aa, Zea mays
  Coding DNA Sequence Number=SeqID_8477
  Gene Ontology: Mol. function=ribonuclease H activity; Cellular component=mitochondrion; Biological process=DNA integration
  Homolog annotation: Hit_ID=UPI00004C1731; Match level="QueryCoverage =91%, HitCoverage=33%, E-value=0.0, Identity=86%"; Hit description =UPI00004C1731 related cluster
  Pfam annotation: Domain name=RnaseH; Domain location=37-162; Score= -16.7; E_value=0.0021; Accession=PF00075.14; Description=RNase H
  Pfam annotation: Domain name=rve; Domain location=198-357; Score =111.0; E_value=3.4e-30; Accession=PF00665.16; Description=Integrase core domain
  Pfam module annotation: Pfam domain module=RnaseH::rve; Domain location=37-162::198-357
MGETISFAPRKAIKSQVLANFVAEWVDTQLPAAPIQPELWTMFFDGSLMKTGTGAGLLFISPLGKHLRYVLRLHFPASNNVAEYEALVNRLRIAIELGVRRLDARGDSQLVIEQVMKNSHCRDPKMEAYCDEELLQEIHSGDCGHHAAPRTLVGNAFRQGFYWPTVVADATRIVRTCQGCQFYERQTHLPAQALQTIPITWSFAAWGLDLVGPLQKAPGGYTHLLVAIDKFSKWIEVRPLNSIRSEQAVAFFTNIIHRFGVLNSIITDNGTQFTGRKFLDFCEDHHIRVDWATVAHPMTNGQVERANDMILQGLKPRIYNNLNKFGKRWMKELPLVVWSLRTTPSRATGFTPFFLVYGAEAILPTDLEYGSPRARAYDDQSNRANREDSLDQLEEAQDMVLLHSARYQQSLRRYHARGVRSRDLQVGDLVLRLRQDARGRHKLTPPWEGPFVIAKVLKPGTYKLANSQGEVYSNAWNIRQLRRFYP

SEQ ID NO: 50257 - protein, 81 aa, Zea mays
  Coding DNA Sequence Number=SeqID_8478
MGLSKGERAYLRGIERAGLNDLEESMEEDKEDDEGRLRRSPSPAFVARTPPVTFDTDQHIDVTARASSTSPDPSSKLYCRG

SEQ ID NO: 50258 - protein, 175 aa, Zea mays
  Coding DNA Sequence Number=SeqID_8479
MTTELWLCEESSDSSDVESFDNDDDPMSGHWMGINFSDDGDDDDENDDSSSDYGSNDEDSNGSGDDDSDDDGGASQICDEMPPNKRRRLLHAADVPPRASPSWSLSDPASLRHPSRSEVGARLGRRLQARHQDVDLDKPTQYNLHGKTTAPTQYNNHTGLGLDSRTGGIAADDSY

SEQ ID NO: 50259 - protein, 89 aa, Zea mays
  Coding DNA Sequence Number=SeqID_8480
MATAPVREMGDGYAIAMCVIMPRSPCVMDEAPAHVNHARGYVSSEDHPGTWNLKSQTSCALDHFFLPTHVLINHNDLHRLILMGPNRLP

SEQ ID NO: 50260 - protein, 61 aa, Zea mays
  Coding DNA Sequence Number=SeqID_8481
MMHIEIQYSPDFDHRPRYFFYVKEDNIDEVTDKRVIALGEIEKDKIMVAKAYNKKVKAKSF

SEQ ID NO: 50261 - protein, 110 aa, Zea mays
  Coding DNA Sequence Number=SeqID_8482
  Subcellular localization annotation: CTP_CleavageSite=17; ConfidenceScore=5.45e-01
MASSCSSSLPSRALLPAAASLAQLRSCRPLVELPSPMVAGQLLRTTSCVLGWLFSVGHGCLGTTVAQLGNTNRLSRTSAPNPFHKPHRGAPARFCLVAGPLRRRAPGAPT

SEQ ID NO: 50262 - protein, 67 aa, Zea mays
  Coding DNA Sequence Number=SeqID_8483
MGIYREGARLLAKPEHKGELRVASEPRVHKRRARGRGSSRRQRGIAAMDGAGRELGRNQGQGGRHGQ

SEQ ID NO: 50263 - protein, 107 aa, Zea mays
  Coding DNA Sequence Number=SeqID_8484
MAIIHRTVWWCTGLSGEPTIASANGRPRNLRATRGLLQRSAGAPNCPDHQFTPLKVLSIGTATDNEQSVVPKCIADDLPEQQPGEGKCPQTFHVLLYLIIHCPVLYY

SEQ ID NO: 50264 - protein, 36 aa, Zea mays
  Coding DNA Sequence Number=SeqID_8485
MDDWAVVIMGVADGVPSPQSEPSILDPMVLRAYRFK

SEQ ID NO: 50265 - protein, 75 aa, Zea mays
  Coding DNA Sequence Number=SeqID_8486
MGSRGVGLSGTWQGRRGGSTGAARSGLRLLLALCLASCLGGAGNNYSLRMSKDEKNKTCRIGAREDGVKASIVNN

SEQ ID NO: 50266 - protein, 36 aa, Zea mays
  Coding DNA Sequence Number=SeqID_8487
MDDWAVVIMGVADGVPSPQSEPLILDPMVLRAYRFK

SEQ ID NO: 50267 - protein, 447 aa, Zea mays
  Coding DNA Sequence Number=SeqID_8488
  Gene Ontology: Mol. function=RNA-directed DNA polymerase activity; Cellular component=mitochondrion; Biological process=RNA-dependent DNA replication
  Homolog annotation: Hit_ID=Q8S463; Match level="QueryCoverage=99%, HitCoverage=23%, E-value=0.0, Identity=85%"; Hit description =Putative prpol
  Pfam annotation: Domain name=RnaseH; Domain location=37-164; Score =6.7; E_value=1.4e-05; Accession=PF00075.14; Description=RNase H
  Pfam annotation: Domain name=rve; Domain location=355-447; Score= -1.1; E_value=0.0073; Accession=PF00665.16; Description=Integrase core domain
  Pfam module annotation: Pfam domain module=RnaseH::rve; Domain location=37-164::355-447
MGETISFAPRKAIKSQVLADFVAEWVDTQLRAAPIQPELWTMFFDGSLMKTGAGAGLLFISPLGKHLRYVLRLHFPASNNVAEYEALVNGLRIAIELGVRRLDARGDSQLVIDQVMKNSHCRDSKMEAYCDEVWRLEDKFYGLELNHIARRYNETADELAKIASGRTTVPPDVFSRDLHQPSVKTDDMPEPEKASAQPEAPSAQPEAPLAPEGEALHVEEERNGVPPNRDWQTPYLQYLHRGELPLDRAEARRLARRAKSFVLLGDEKELYHRSPSGILQRCISITEGQELLQEIHLGACGHHAAPRALVGNAFRQGFYWPTAVADATRIVRTCQGCQFYARQTHLPAQALQTIPITWPFAVWGLDLVGPLQKAPGGYTHLLVAIDKFSKWIEVQPLNSIRSEQAVAFFTNIIHRFGVPNSIITDNGTQFTGRKFLDFCEDHHIRVD

SEQ ID NO: 50268 - protein, 268 aa, Zea mays
  Coding DNA Sequence Number=SeqID_8489
  Gene Ontology: Mol. function=transcription regulator activity; Cellular component=nucleus; Biological process=regulation of transcription
  Homolog annotation: Hit_ID=Q8S3D1; Match level="QueryCoverage=70%, HitCoverage=52%, E-value=2e-32, Identity=42%"; Hit description =Putative bHLH transcription factor
MDDWGDHAATASAACMVGGGGTKKDEGSAVPQQPPYSFYGSHGHLAAGGDEHEMPAPASKAQLSQMLLASSPRSCVTTSLGSNMLDFSNSAPPMELKRHHHHSDNSSECNSTATAAGSAVKKPRVQAASSSAQSTLKVRKERLGDRITALHQIVSPFGKALSYPYMGHGNLTSSSTQNGPAGSERNPAGLFPEYPGQLLNHNHNTGAQQQQPAAVQQPPDEKQGVDDEVKRDLRSRGLCLVPVSCTSHFGGDNAADYWAPAALGGMFR

SEQ ID NO: 50269 - protein, 155 aa, Zea mays
  Coding DNA Sequence Number=SeqID_8490
  Subcellular localization annotation: CTP_CleavageSite=44; ConfidenceScore=5.17e-01
MASDAAGAGATAAVLAILVVSSMGHPNKGPLCSECGSLCNTNCTAEAANSTTCRSYCDNDTTAAREDCERQVLQGCQAAYCSYGTCSRDCNLEAQNACLSIHDDYTDCQACKQGLTCPETLISLSPWSPSLSLNASKYGFSEPLMFYDDKKTVDA

SEQ ID NO: 50270 - protein, 189 aa, Zea mays
  Coding DNA Sequence Number=SeqID_8491
MAVAAMMLWSIPAPEESEAREMYRNLRNLVEKATIATTHGRPHLGAGGTTLPIPKRPRPYEGSYEGNPRRSTPPQQPTPGAGRGGTAKRAKTREKPSPTRSGPRAFRHSISKAQFSMKSLVHRSKCSATARSIEAMTSSQAYKSSRILVSIAAFASCAAFEASWAWESIFWSSRKGKGMTYHEEQSQRT

SEQ ID NO: 50271 - protein, 99 aa, Zea mays
  Coding DNA Sequence Number=SeqID_8492
MVTFEQKGVEGWEKRIEMLDRLGSRLEVMEADQFRLKERADRAAAATRKSTMASYCIFLQPSLNSHELSGDQILKVGEAVEFGIMGDSSIAPNGLKFIL

SEQ ID NO: 50272 - protein, 337 aa, Zea mays
  Coding DNA Sequence Number=SeqID_8493
  Gene Ontology: Mol. function=protein dimerization activity; Cellular component=nucleus; Biological process=regulation of transcription, DNA-dependent
  Homolog annotation: Hit_ID=Q2QRD1; Match level="QueryCoverage=97%, HitCoverage=59%, E-value=1e-84, Identity=60%"; Hit description=HAT family dimerisation domain containing protein
LDLPLNIGATDAFEEYIRFAHNPRFQRVSRQSTTRDLETYFHAKVSEVKNMLAKATCVCLTSDIWSGNAKEDYLSVVVHFVNDGWELEKRIIGMRLIDVSHCGSNIAERIMNALVDYQLTTKVLSVTLDNASSNTSAIEKLTPLLSSYVGSTLMHQRCACHIINLIVKSGLKRLKTLLEDFRTAISFLNSSNQRIAQYKTYCIAMGVRPRKFGLDMDVRWNSTYLMLKHLMPHKVIRLKLRLNCQFYMPNMSLNLVLYVCKDLNLLLLDLVMLIEERRRSLTPEHVEMLSLAKDWEQAAVRQQHCVENKDLEELMENMYLDAQEGSTCVGGGDGHDH

SEQ ID NO: 50273 - protein, 147 aa, Zea mays
  Coding DNA Sequence Number=SeqID_8494
MAGGIELAGAKERWLAGEGFELGIKVNIPDLWLKRRPGWPANPKTTVGFVLPGVLPPRGQDPGFAGDSRSLCATADGPPPPCGQSACLQMSHLVSVGKPNVNHSEGLGSLVSGHTWIIRGRKPDRPHVVWTIWPYGSDHPTYAGQGR

SEQ ID NO: 50274 - protein, 118 aa, Zea mays
  Coding DNA Sequence Number=SeqID_8495
  Subcellular localization annotation: CTP_CleavageSite=65; ConfidenceScore=5.38e-01
MGEIQVKAPSAQGTRSCLDRAQPRAGTVDPGGFTPRPRPSSGRLGSEAAESSLRRHRKLCLARPRSSAPASTSEDGLHLARPQGSASTSTSVDGLRLARSRGLASTSTSADGLRLTRS

SEQ ID NO: 50275 - protein, 146 aa, Zea mays
  Coding DNA Sequence Number=SeqID_8496
MAHQPGFDPTYRVVASPEEGPRATVDHAPPDRPAHRRSADSAFNAPRPLWWQASTRAGGIPIQSKQWAVRPHHCMRAVVIITWSIPRNLRQHANSTQAMDVKAQGDSARAGALRHSAGDFLSDRRADHPHVGGRMSPIGGGPSVMI

SEQ ID NO: 50276 - protein, 76 aa, Zea mays
  Coding DNA Sequence Number=SeqID_8497
MLGEHAKRDMVTEEKPGSLGKKIEQRTLWKEVGDKHKKHKEESAGSIKSHKKGDNKKKENEKGGLLRDRFFLTLNL

SEQ ID NO: 50277 - protein, 585 aa, Zea mays
  Coding DNA Sequence Number=SeqID_8498
  Gene Ontology: Mol. function=RNA-directed DNA polymerase activity; Cellular component=mitochondrion; Biological process=RNA-dependent DNA replication
  Homolog annotation: Hit_ID=UPI00004C1733; Match level="QueryCoverage =92%, HitCoverage=41%, E-value=0.0, Identity=83%"; Hit description =UPI00004C1733 related cluster
  Pfam annotation: Domain name=RnaseH; Domain location=279-406; Score =2.0; E_value=3.8e-05; Accession=PF00075.14; Description=RNase H
MYCYVTMPFGLRNAGATYQRCMNHAKGVKLNPEKCVFGVPQGMLLGFIVSERGIEANPEKIAAITSMGPIKDLKGVQRVMGCLAALSRFISRLGERGLPLYRLLRKAECFTWTPKAEEALGNLKALLTNAPILVPPAAGEALLIYVAATTQVVSAAIVVERREEGHALLVQRPVYFISEVLSETKIHYPQVQKLLYAVILTRRKLRHYFESHPVTVVSSFPLGEIIQCREASGRIAKWAVEIMGETISFAPRKAIKSQVLADFVAEWVDTQLPTVPIQPELWTMFFDGSLMKTGADVGLLFVSPLGKHLRYVLRLHFPASNNVAEYEALVNGLRIAIELGVRRLDARGDSQLVIDQVMKNSHCRDPKMEAYCDEVRRLEDKFYGLELNHIARRYNETADELAKIASGRTTVPPDVFSRDLHQPSVKIDDTPEPEAPSAQPEVPLAQSEAPSAQPEVPSVQPEVPSAPEVPRALVGNAFRQGFYWPTAVADATRIVRTCEGCQFYARQTHLPAQALLTIPITWPFAVWGLDLVGPLQKAPGGYTHPWAGLFVITKVLKPGTNKLADNRGEAHTNTWNIQQLRRFYP

SEQ ID NO: 50278 - protein, 1043 aa, Zea mays
  Coding DNA Sequence Number=SeqID_8499
  Gene Ontology: Mol. function=protein serine/threonine kinase activity; Cellular component=integral to membrane; Biological process=protein amino acid phosphorylation
  Homolog annotation: Hit_ID=Q5Z7H5; Match level="QueryCoverage=97%, HitCoverage=97%, E-value=0.0, Identity=69%"; Hit description =Putative serine-threonine protein kinase
  Pfam annotation: Domain name=APH; Domain location=699-890; Score= -17.2; E_value=0.096; Accession=PF01636.13; Description =Phosphotransferase enzyme family
  Pfam annotation: Domain name=LRRNT_2; Domain location=34-74; Score =50.2; E_value=7e-12; Accession=PF08263.3; Description=Leucine rich repeat N-terminal domain
  Pfam annotation: Domain name=LRR_1; Domain location=104-127; Score =17.5; E_value=0.048; Accession=PF00560.23; Description=Leucine Rich Repeat
  Pfam annotation: Domain name=LRR_1; Domain location=129-151; Score =14.1; E_value=0.5; Accession=PF00560.23; Description=Leucine Rich Repeat
  Pfam annotation: Domain name=LRR_1; Domain location=155-177; Score =10.8; E_value=2.7; Accession=PF00560.23; Description=Leucine Rich Repeat
  Pfam annotation: Domain name=LRR_1; Domain location=179-202; Score =2.7; E_value=89; Accession=PF00560.23; Description=Leucine Rich Repeat
  Pfam annotation: Domain name=LRR_1; Domain location=204-227; Score =7.3; E_value=12; Accession=PF00560.23; Description=Leucine Rich Repeat
  Pfam annotation: Domain name=LRR_1; Domain location=229-251; Score =12.4; E_value=1.4; Accession=PF00560.23; Description=Leucine Rich Repeat
  Pfam annotation: Domain name=LRR_1; Domain location=253-276; Score =8.3; E_value=8.1; Accession=PF00560.23; Description=Leucine Rich Repeat
  Pfam annotation: Domain name=LRR_1; Domain location=277-299; Score =8.4; E_value=7.5; Accession=PF00560.23; Description=Leucine Rich Repeat
  Pfam annotation: Domain name=LRR_1; Domain location=300-322; Score =21.0; E_value=0.0043; Accession=PF00560.23; Description=Leucine Rich Repeat
  Pfam annotation: Domain name=LRR_1; Domain location=324-346; Score =17.4; E_value=0.052; Accession=PF00560.23; Description=Leucine Rich Repeat
  Pfam annotation: Domain name=LRR_1; Domain location=348-370; Score =8.7; E_value=6.7; Accession=PF00560.23; Description=Leucine Rich Repeat
  Pfam annotation: Domain name=LRR_1; Domain location=396-418; Score =3.2; E_value=72; Accession=PF00560.23; Description=Leucine Rich Repeat
  Pfam annotation: Domain name=LRR_1; Domain location=420-442; Score =8.4; E_value=7.7; Accession=PF00560.23; Description=Leucine Rich Repeat
  Pfam annotation: Domain name=LRR_1; Domain location=444-463; Score =6.0; E_value=22; Accession=PF00560.23; Description=Leucine Rich Repeat
  Pfam annotation: Domain name=LRR_1; Domain location=466-485; Score =4.5; E_value=41; Accession=PF00560.23; Description=Leucine Rich Repeat
  Pfam annotation: Domain name=LRR_1; Domain location=487-509; Score =8.6; E_value=7.1; Accession=PF00560.23; Description=Leucine Rich Repeat
  Pfam annotation: Domain name=LRR_1; Domain location=511-533; Score =5.9; E_value=22; Accession=PF00560.23; Description=Leucine Rich Repeat
  Pfam annotation: Domain name=LRR_1; Domain location=535-558; Score =15.5; E_value=0.19; Accession=PF00560.23; Description=Leucine Rich Repeat
  Pfam annotation: Domain name=LRR_1; Domain location=560-579; Score =14.0; E_value=0.55; Accession=PF00560.23; Description=Leucine Rich Repeat
  Pfam annotation: Domain name=LRR_1; Domain location=582-604; Score =7.6; E_value=11; Accession=PF00560.23; Description=Leucine Rich Repeat
  Pfam annotation: Domain name=LRR_1; Domain location=80-102; Score =2.4; E_value=1e+02; Accession=PF00560.23; Description=Leucine Rich Repeat
  Pfam annotation: Domain name=Pkinase; Domain location=697-984; Score =138.4; E_value=2e-38; Accession=PF00069.15; Description=Protein kinase domain
  Pfam annotation: Domain name=Pkinase_Tyr; Domain location=697-984; Score=82.8; E_value=1.1e-21; Accession=PF07714.7; Description =Protein tyrosine kinase
  Pfam module annotation: Pfam domain module=APH::LRRNT_2::LRR_1::LRR _1::LRR_1::LRR_1::LRR_1::LRR_1::LRR_1::LRR_1::LRR_1::LRR_1::LRR _1::LRR_1::LRR_1::LRR_1::LRR_1::LRR_1::LRR_1::LRR_1::LRR_1::LRR
  Pfam module annotation: Pfam domain module=Pkinase_Tyr; Domain location=699-890::34-74::104-127::129-151::155-177::179-202::204 -227::229-251::253-276::277-299::300-322::324-346::348-370::396 -418::420-442::444-463::...
  Pfam module annotation: Domain location=466-485::487-509::511 -533::535-558::560-579::582-604::80-102::697-984::697-984
MRPTTSCHRFPLLLVLLLFLLAGEGRSQPAAGGGPSDRDTLLAVKKAWGSPPQLKSWDPAAAPDHCNWTGVTCATGGVGVVTELILSRQKLTGSVPAPVCALASLTHLDLSYNNLTGAFPGAALYACARLTFLDLSTNQFSGPLPRDIDRLLSRSMEHLNLSTNGFSGEVPPAVAGLPALSSLRLDTNNFTGAYPAAEISNRTGLQTLTLANNAFAPAPVPTEFSKLTNLTFLWMDGMNLTGEIPEAFSSLEQLTLFSMASNNLTGSIPAWVWQHQKLQYIYLFHNVLSGELTRSVTALNLVHIDLSSNQLTGEIPQDFGNLKNLTTLFLYNNQLTGTIPVSIGLLPQLRDIRLFQNELSGELPPELGKHSPLGNLEVCLNNLSGPLRGSLCANGKLFDIVAFNNSFSGELPAALGDCVTLNNLMLYNNNFSGDFPEKVWSFPNLTLVMIQNNSFTGTLPAQISPKLSRIEIGNNMFSGSFPASAAGLKVLHAENNRLGGELPSDMSKLANLTDLSVPGNRIPGSIPTSIKLLQKLNSLDMRGNRLTGAIPQGSIGLLPALTMLDLSDNELSGTIPSDLTNAFNLLNLSSNQLTGEVPAQLQSAAYDRSFLGNRLCARAGSGTNLPTCPGGGRGSHDELSKGLMILFVLLAVIVFGGSIGIAWLLFRHRKESQEATDWKMTAFTQLSFSESDVLGNIREENVIGSGGSGKVYRIHLGSGNGASRDEEGGGGRMVAVKRIWNSRKGDEKLDREFESEVKVLGNIRHNNIVKLLCCISSQEAKLLVYEYMENGSLDRWLHRRDREGAPAPLDWPTRLAIAVDAAKGLSYMHHDCAPPIVHRDVKSSNILLDPDFQAKIADFGLARILARPGEPQSVSAIGGTFGYMAPEYGYRPKVNEKVDVYSFGVVLLELTTGMVANDSGADLCLAEWAWRRYQKGAPFDDVVDEAIREPADVQDILSVFTLGVICTGESPLARPSMKEVLHQLVRCEQIAAEAEACQLVSYGGGGAPVVESWKRGSRRRSTSGSSRWSYDDEDSGDFVAHVV

SEQ ID NO: 50279 - protein, 278 aa, Zea mays
  Coding DNA Sequence Number=SeqID_8500
  Gene Ontology: Mol. function=DNA binding; Cellular component =mitochondrion; Biological process=DNA integration
  Homolog annotation: Hit_ID=Q8W0X5; Match level="QueryCoverage=94%, HitCoverage=100%, E-value=1e-130, Identity=74%"; Hit description =Putative pol protein
  Pfam annotation: Domain name=RVT_2; Domain location=1-165; Score =178.6; E_value=1.6e-50; Accession=PF07727.4; Description=Reverse transcriptase (RNA-dependent
MDVKSAFLNGPIKEEVYVEQPPDFEDERYPDHVCKLSKTLYGLKQAPRAWYECLRDFLIANAFKVGKADPTLFTKTCDGDLFVCQIYVDDIIFGSTNQKSCEEFSRVMTQKFEMSMMGELNYFLGFQVKQLKDETFISQTKYTQDLIKRVGMKDTKPAKTPMGTDGYVDLNKGGQCCAQLLWMRQTLRDFGYNLSKVPLLCDNESAIRMADNPVEHSHTKHIDIRHHFLRDHQQKGHIEVFYVSTENQLADIFTKPLDEKTFCRLRSELNVLDSRNLD

SEQ ID NO: 50280 - protein, 664 aa, Zea mays
  Coding DNA Sequence Number=SeqID_8501
  Gene Ontology: Mol. function=polynucleotide adenylyltransferase activity; Cellular component=nucleus; Biological process=RNA polyadenylation
  Homolog annotation: Hit_ID=Q5Z7G3; Match level="QueryCoverage=96%, HitCoverage=93%, E-value=0.0, Identity=73%"; Hit description =Putative poly(A) polymerase
  Pfam annotation: Domain name=NTP_transf_2; Domain location=70-167; Score=32.3; E_value=1.7e-06; Accession=PF01909.13; Description =Nucleotidyltransferase domain
  Pfam annotation: Domain name=PAP_RNA-bind; Domain location=320-456; Score=206.7; E_value=5.2e-59; Accession=PF04926.5; Description =Poly(A) polymerase predicted RNA binding domain
  Pfam annotation: Domain name=PAP_central; Domain location=8-319; Score=447.6; E_value=1.7e-131; Accession=PF04928.8; Description =Poly(A) polymerase central domain
  Pfam module annotation: Pfam domain module=NTP_transf_2::PAP_RNA -bind::PAP_central; Domain location=70-167::320-456::8-319
MASGSDAPKQYGITKPLSLLGPVEADLQRTEELEKFLLESGLYESPDESARREEVLGKLDQIVKDWVKQLTSQRGYTDQMVEEANAVLFTFGSYRLGVHGPGADIDTLCVGPSYVNREEDFFIVLHGILAQTEDVTELQPVPDAHVPVMKFKFHGISIDLLYASVSLLVVPANFRTALRCLKYWAKRRGVYSNVTGFLGGVNWALLVARVCQLYPNAVPSMLVSRFFRVFTQWQWPNPVMLCSIEEEELGFPVWDPRKNPRDRCHHMPIITPAYPCMNSSYNVSTSTLRVMLEQFQFGNRICQEIEMNKTSWPALFEPFQFFEAYKNYLQVDIIAEDDEDLRLWKGWVESRLRQLTLKIERDTYGMLQCHPYPHEYADPSRQCAHCAFFMGLSRKEGVKIQEGQQFDIRGTVDEFRHEINMYMFWKPGMELAVSHVRRKQVPAYVFPEGYKRPRPSRHVNHQSDKNDTEDGTATRSPDSQLKRKHDSVGTDDIRYAKRSSTSPVHPKNSPQSGSTGDETRCNNQIKRAPSDASGGSPASPQASERSPDTILSAPRCTTTGAVCSGDAISKHSSVPLVENCTTPTVAVCTTLKRVAEKVVSELVGSERLGSNNSAELLESMEKEDVLAENVRFGGNGVAQGGLPEELEVMLLVHPSPVYALSNMI

SEQ ID NO: 50281 - protein, 597 aa, Zea mays
  Coding DNA Sequence Number=SeqID_8502
  Homolog annotation: Hit_ID=Q2HSH7; Match level="QueryCoverage=45%, HitCoverage=70%, E-value=1e-109, Identity=69%"; Hit description =Histone deacetylase superfamily
  Pfam annotation: Domain name=Hist_deacetyl; Domain location=20-341; Score=174.5; E_value=2.6e-49; Accession=PF00850.10; Description =Histone deacetylase family
  Pfam annotation: Domain name=NC; Domain location=427-498; Score=30.3; E_value=6.8e-06; Accession=PF04970.4; Description=NC domain
  Pfam module annotation: Pfam domain module=Hist_deacetyl::NC; Domain location=20-341::427-498
MASESSPPPAGAPPPGLGDKLAVFWDEGMLAHDAGRGVFDSGRDPGFLDVLDQHPENADRVRNMVSILRRGPIAHFLSWHSGRPAHASELLSFHSSEYIEELVQTNATGAKKKLCEGTFLNPGSWGAALLAAGTTLSSAKHILDGQGNLAYALVRPPGHHAQPDHADGYCFLNNAGLAVQLALDSGRAKVAVVDIDVHYGNGTAEGFYRTDTVLTMSLHMMHGSWGPSHPQSGSVDEIGEGKGLGYNLNIPLPNGSGDAGYEYAMNELVVPSIDKFQPQLLFLVVGQDSSAVSATHLHSPCSEAGQRGKAHLRVSQKIIHPLYTKVLHGKNEIVITDCISLGNLVGIGNVVGIYVGDDKVIHFTRGRGQEVGTGTVVDIILVSSTPKRSNTPCPVCTDETSDSSTETNGVVSSCLSCFLAGGALYRFEYAVNPALFLAKARGGTCTLAPSDPDDTVARRARYLLSNGFRCYNLFKSNCEDFAIYCKTGLLVAEQGVVGQSGQAISIIGGPLAAVVSTPFRLVTTNIYGMAVMAVGVYCASRYAADIGNRRDVVKMEVEDLTAGLASGRICAVENIAQLVAPEAEGPADATATATLAA

SEQ ID NO: 50282 - protein, 71 aa, Zea mays
  Coding DNA Sequence Number=SeqID_8503
MVELRLRKNHSVERGPAEPGREGAHRRVSREAEGKVKLTVALDGARAQRQPRNRRWMSAGGGGSSRFAWAE

SEQ ID NO: 50283 - protein, 134 aa, Zea mays
  Coding DNA Sequence Number=SeqID_8504
MGGTEGRLGRAENAADDDQGGRAEDAGGLQLASMEGRAQEEAGPSSNRRGLLLLRFGTERRKRGDGVREKGGGAGAATFKGVLAAAIGGLGGCCRAQVMSASCSRWQSDFERPFLAFSFWNRTLVTAQNIFLDV

SEQ ID NO: 50284 - protein, 623 aa, Zea mays
  Coding DNA Sequence Number=SeqID_8505
  Gene Ontology: Mol. function=protein serine/threonine kinase activity; Cellular component=integral to membrane; Biological process=protein amino acid phosphorylation
  Homolog annotation: Hit_ID=Q8LRD7; Match level="QueryCoverage=76%, HitCoverage=66%, E-value=0.0, Identity=73%"; Hit description=CLV1 receptor kinase-like protein
  Pfam annotation: Domain name=LRRNT_2; Domain location=136-177; Score =68.6; E_value=2e-17; Accession=PF08263.3; Description=Leucine rich repeat N-terminal domain
  Pfam annotation: Domain name=LRR_1; Domain location=211-230; Score =13.8; E_value=0.62; Accession=PF00560.23; Description=Leucine Rich Repeat
  Pfam annotation: Domain name=LRR_1; Domain location=236-258; Score =8.6; E_value=7; Accession=PF00560.23; Description=Leucine Rich Repeat
  Pfam annotation: Domain name=LRR_1; Domain location=260-282; Score =12.8; E_value=1.2; Accession=PF00560.23; Description=Leucine Rich Repeat
  Pfam annotation: Domain name=LRR_1; Domain location=284-307; Score =8.6; E_value=7.1; Accession=PF00560.23; Description=Leucine Rich Repeat
  Pfam annotation: Domain name=LRR_1; Domain location=309-331; Score =13.9; E_value=0.57; Accession=PF00560.23; Description=Leucine Rich Repeat
  Pfam annotation: Domain name=LRR_1; Domain location=333-356; Score =1.4; E_value=1.6e+02; Accession=PF00560.23; Description=Leucine Rich Repeat
  Pfam module annotation: Pfam domain module=LRRNT_2::LRR_1::LRR_1::LRR_ 1::LRR_1::LRR_1::LRR_1; Domain location=136-177::211-230::236 -258::260-282::284-307::309-331::333-356
MVISVRVMFSSGCLGHLDRVHIRVDVYVDLTWQHLGAVDLGPDLHVGAEIHGADLGTEIYGAEVLPYQIHWPVASGQSNISHQHNSTLGSALPRPFLCTLPRLPTRPPPNATRRQLAMALRLLLLLVTVTTAADALTPDGQALLAFKAAVLQDPTGALANWVATAADPCSWNGVTCSSPDPGSAQHRRVVALSLPKKRLVAELPRAPLPSSLRHLNLRSNRLFGPIPPALVAGAPALQSLVLYGNALDGQLPEDLGDLAFLQILDLSSNAINGSLPASILKCRRLRALALARNNLTGSLPAGFGARLGALERLDLSFNGFYGTIPEDIGNLSRLQGTVDLSHNHFSGPIPASLGRLPEKVYIDLTYNNLSGPIPQNGALENRGPTAFVGNPGLCGPPLKNPCAPDTMPSSNPSLPNDGDSSAPEAAGGGKGKNKGLGKIAIVAIVLSDVMGILIIALVFFYCYWRAVSSKGSKGHGVAAGSKGSMCGKDCGCFSRDDSETPSEHVEQYDLVALDQHVRFDLDELLKASAFVLGKSGIGIVYKVVLEDGLTMAVRRLGEGGLQRFKEFQTEVEAIGKVRHSNIVTLRAYYWSFDEKLLIYDYIPNGSLSAAIHGKCLHLLQFAS

SEQ ID NO: 50285 - protein, 64 aa, Zea mays
  Coding DNA Sequence Number=SeqID_8506
MAEKMQPYTGFRIRDPNRLSTGRAGDGTRLSPNFGAKAILIPMVPDDTDIQWLSGLVTFTKWKV

SEQ ID NO: 50286 - protein, 76 aa, Zea mays
  Coding DNA Sequence Number=SeqID_8507
MESHDLRAERESRLVGKVHNLINQRQPHKSETLVGGNETDGFGYDYGAGCQHCNHCSGEDEAVEGDFQEFQDYDEF

SEQ ID NO: 50287 - protein, 152 aa, Zea mays
  Coding DNA Sequence Number=SeqID_8508
MTVSIPLRSALTKVGPRSTYRRKAFLAGRWARASEEKIISLLSSSSLDGESRGNPYDGEPASSVVSTNAIGAPTIVGHHMVAVRLAGAGPQPGHVILCKRVIASSSPCPSCVVLQGQILDPSVVTDGRATGRLEASRSAMQTTDAHIAGLQA

SEQ ID NO: 50288 - protein, 334 aa, Zea mays
  Coding DNA Sequence Number=SeqID_8509
  Subcellular localization annotation: CTP_CleavageSite=71; ConfidenceScore=5.68e-01
MGNSAPPDPRARTRAKTRKTVNSAPPDPRARTRAKTRKTANSAPPDPRARTRAKTRKTANSAPPDPRARTRAKTRKTANSAPPDPRARTRAKTRKTANLRLARPQGSDSALASAKRSPPRPTPGLGLRPGLGQTISASPDPRARTPPWPRPNDLRLARPGGSGSASAMEGRLDLDFGGAPTSPCLGHRLRRSSDSHDITPARCQDLSGCHIGMAFLEKVGRAGPRTGQALSWGRSLPSPAWTLVTPLLQAHLTWARDEHEGRGTSTSLTLDSGYLASPPFALAHALDPSGLGHAAHSLVGLGTPLSRNADSMGTDTCGTTSCRVVHIKQWRHSR

SEQ ID NO: 50289 - protein, 97 aa, Zea mays
  Coding DNA Sequence Number=SeqID_8510
MARFLGRGGSSFQGPNHFSFVVEGEVKAPKMDRHPRKSIGALKGKSRLPKWIAILGSRLVSRLAIQSLENFITERRSPLLGALTVDVSNLASTSAYP

SEQ ID NO: 50290 - protein, 70 aa, Zea mays
  Coding DNA Sequence Number=SeqID_8511
MKIEIARYVARCDTCRRVKAIHMKTAGPYENCMFRGSLEDMVAGVTWPSILPPGWTIEWDPTSAEEEHEE

SEQ ID NO: 50291 - protein, 106 aa, Zea mays
  Coding DNA Sequence Number=SeqID_8512
MGSANMGKRPGRPWRGARAAENQEGEGWSEQRRARSGRARARARGPGELLVQIWARLEQRGTRRGRGWTGRGGTASVAAGDQSPMPGSSRGAVRAGEEDGEGGCFT

SEQ ID NO: 50292 - protein, 87 aa, Zea mays
  Coding DNA Sequence Number=SeqID_8513
MKDTVAGSAGDARQENTRESEEQAKSRGVCVTVKAGMASTFYRRGKRERQEEKQQSSKPLTSPLSPLRGRGIGRKRNGRVKSPLTRK

SEQ ID NO: 50293 - protein, 125 aa, Zea mays
  Coding DNA Sequence Number=SeqID_8514
MDHDKHPAPECPHQGWSKSHPLQERLFLVGQWAQALEERSYRFRPPLQPLRMGNQGLTLVTEGNRLFLSHLPCAAMWGRILSPSDVGDGRATGLTGDTSLGCADVRHSYHGSPSVISHRGGLCVE

SEQ ID NO: 50294 - protein, 80 aa, Zea mays
  Coding DNA Sequence Number=SeqID_8515
MAQCKTIVAAVLVVALVVSTIPASADTNLEPAGGSTEGSARTSGMQKEETRGNKKPATLAGSLGSGKNAIYGTVYARGQY

SEQ ID NO: 50295 - protein, 105 aa, Zea mays
  Coding DNA Sequence Number=SeqID_8516
MGRQNCLTLERLPTRNLIALGSSHNAWATPEPTRILGPHAKSFMTTPPKPEPVKTGAHRRGDNDNPTRFFLNHCSSPMVIALGMNGQRGEEVAGMLYLCQGFVSP

SEQ ID NO: 50296 - protein, 86 aa, Zea mays
  Coding DNA Sequence Number=SeqID_8517
MGGDPAGGSSTKEIQGGHGGRESRLPLKMARVPWPVAEQCVPWRLENNIDMEHHGRARPSWASAGKKQLLLLASTGKELGAADEQG

SEQ ID NO: 50297 - protein, 108 aa, Zea mays
  Coding DNA Sequence Number=SeqID_8518
MEQGAARLWGEGRENSDQEAELEQGEEGGTRRWEKRRPGSRMAATMASRGSTRVVLCMRLGEPHGRTKEDPSGARRDAMEVGESFKEELGTGEEQALGSLGNLRDVES

SEQ ID NO: 50298 - protein, 52 aa, Zea mays
  Coding DNA Sequence Number=SeqID_8519
MDILSRHAPETSRRAQQSLPASGGGANTPSGWTGQSLGDEADAPQDERARKE

SEQ ID NO: 50299 - protein, 153 aa, Zea mays
  Coding DNA Sequence Number=SeqID_8520
MAYRVARSTCDGGRLKSGDVDPASPPPDGSPPMVVATVSEDDCLLLAEVHSTLLGHWGSAAAELPSLDNALPNGPALHNGSILCILLALGLLDCSSWLLGQEDEVPDYSASETDFLLVGSFGGTAVDAEGTASGTAAEEDVGSAVDIPKGDST

SEQ ID NO: 50300 - protein, 111 aa, Zea mays
  Coding DNA Sequence Number=SeqID_8521
MDRPPLTTIDSDSHLGVIARDSRTSPDPSLEQPHHRRENKPYLIKLTLITHHAMHISYSLHSLDCNLADGEYVLIPEQGAVHEEDQEQAPETAIEDLPAAPAIEGKPRFYA

SEQ ID NO: 50301 - protein, 125 aa, Zea mays
  Coding DNA Sequence Number=SeqID_8522
MVQRLTWSTCSGGVPNSDEHDCAISVVGVLGSSSGKLHSLLGELSKGLDRAEEGRKGVGNGGFPRAALAGRGEVAGAMGELGEVWCGFNGLFERLSVQILAKPPWWERPRLTSKMVNPYLDPGSP

SEQ ID NO: 50302 - protein, 75 aa, Zea mays
  Coding DNA Sequence Number=SeqID_8523
MRMMNLKMDNLNEYQDKGWSSRDRRLTNNNLVLFQVMLHMGWEFLQRKACDGESIMAMMGSTSEKELELRCCGWC

SEQ ID NO: 50303 - protein, 149 aa, Zea mays
  Coding DNA Sequence Number=SeqID_8524
MEHDPSLPLRSARTSSELDMDVLCLPQYRPCQAPVTPFPRHSRPAPDVSAVSDLCLLTLLFSTMQLLELVAVLCLDVPSSLTVCLSYAAPSLFPLVATKSCSTRSSGAALSSLWGLLGSPCFKMSSNLPATAVSSSPSLFNFGDHYHLH

SEQ ID NO: 50304 - protein, 144 aa, Zea mays
  Coding DNA Sequence Number=SeqID_8525
  Subcellular localization annotation: CTP_CleavageSite=23; ConfidenceScore=5.00e-01
SRLVPSGEWLQCLPNPGEPPRPRSGEPPPPPTSRRPGEPAPAPRPAAPTSPPLPRAAPRRAAPTPPRLGRAALRRLGTVPSRPRSCPPPRPCSMLAHPPRYLRTRIRKGEAQKIRRLTQCRSCEAGKLRHVRRKGNRLKDEKAI

SEQ ID NO: 50305 - protein, 136 aa, Zea mays
  Coding DNA Sequence Number=SeqID_8526
MEEKLGVARLGNREKQRELGTAARRDERESGACDGGTRTKTQGEGKGAGAPRHGECARQLWPASSEMGTLPWASKESTTAMGARHGRTECVCRSPRRGNKGGARHESKLHGGVQGEEERAEGKERRRAGEEKEERA

SEQ ID NO: 50306 - protein, 116 aa, Zea mays
  Coding DNA Sequence Number=SeqID_8527
MDPKGRNPSWDRWGQKEVLQGSQTWGKNRNLSWRLKSAPGKAENKEDIMTSSSGDGGQSVSSWSLQAKPKSKLHSVWIVAENVPEELQNYRAICELGSTIGVVEEVDILSLDTKDI

SEQ ID NO: 50307 - protein, 125 aa, Zea mays
  Coding DNA Sequence Number=SeqID_8528
MAGMCSAPWTLPLASVSPRADAPPWLGYRRWLFSPVRHGFKDPKRFCGLCDAIRAEATMRWRLVERSRLLCGHVLPCSIEVEDPYRRFLSWWWWRIPATGDASIVLQRRRLRLRAHWVDRGVRRH

SEQ ID NO: 50308 - protein, 251 aa, Zea mays
  Coding DNA Sequence Number=SeqID_8529
  Homolog annotation: Hit_ID=Q6IEP2; Match level="QueryCoverage=42%, HitCoverage=30%, E-value=2e-33, Identity=62%"; Hit description=WRKY transcription factor 39
  Pfam annotation: Domain name=WRKY; Domain location=132-192; Score =124.6; E_value=2.8e-34; Accession=PF03106.6; Description=WRKY DNA -binding domain
MESDLRWCSGSSNNDWDLHAVVRFASCSGGSCVPSPRASDESFSCLPLPPPPPQKDDVTDATTALSQQLPIGPAIDDSCLQQAFFATPQSRNEAPAPPLQPPAKLRIGGATRSKRKKKSKKEVKRVPVVGASPDPWAWRKYGQKPIKGSPYPRGYYRCSTDKDCRARKQVERCRTDPSTVIVSYTGEHSHPVPLHRNALAGTTRNKPQPASSICNSPAEQPPAASPIGDDLGAAPAAINVVTDEKCPFSQA

SEQ ID NO: 50309 - protein, 54 aa, Zea mays
  Coding DNA Sequence Number=SeqID_8530
MEASPTVGTLHRHRDRRQEVGILHLDRTWEKVEEMAREEAGALYKTLLPSSMKG

SEQ ID NO: 50310 - protein, 122 aa, Zea mays
  Coding DNA Sequence Number=SeqID_8531
MEIVPEEVTPESMVTRMKTHSKRARPTRLLHRVSTSIPCVASRMDTVFEAAMASLGVSTIVHYTTPSPTSRSPSSVPPRRHVPRRPTTFPLSPSWPSPRPPPPTLNDFAGSEYVLVVTERAD

SEQ ID NO: 50311 - protein, 246 aa, Zea mays
  Coding DNA Sequence Number=SeqID_8532
MMQHPCQHRFLFPHDVDTSRYTALKLGRRSETGKEKGATPEFEDSAACAAPTAEPPDRVRLTAAKAGLGRHRKLRLAQPRARTRAQPRKTANSAPPDPGLGLGLSPRKTANSAPPDPGLGLRLSPGRRRTPLRPTQGSDSGSAPEDGEHRSARPRARTRAQPRKTANSASPDPRAQTWAQPRKTTNSASPDPRARTWAQPRKTTNSASPDPGARPRPRPRRSLHLAQPRARTDHINKKRHHYPTPS

SEQ ID NO: 50312 - protein, 157 aa, Zea mays
  Coding DNA Sequence Number=SeqID_8533
MPGRRGAEATPREGQGPRRREGSGPRQGGAGATLRGSRGRAEEGRGPHPGRAGAAPGVGAATGEQRPAPPGGQEATMGDAGGRAAGGAGGHRGGGRGPHCRGSRGCALGAEATQGCARRGKQGARTGKKGKGEGKREGEGEGSSPQGLNLAITVSKT

SEQ ID NO: 50313 - protein, 217 aa, Zea mays
  Coding DNA Sequence Number=SeqID_8534
MQGRLLSLTVLAVKVATFRLPLSFEDTADFSLWGLVPISQKSSPSMVSGGHTTALSPTRRNGRLLVWKARVEKHKYRHLETVRLSRRRGGGEGRREFGMKARARCGATAVVRLPGCRGGEKRRRRGSPGWRPGRGAGLRRATRPQSSSEEEARGEGDGGQDGGGAAASSEATRRGKHTWKRGGAHAREAEHNESVSGESRRQGVKFLEYSGRRMCDR

SEQ ID NO: 50314 - protein, 178 aa, Zea mays
  Coding DNA Sequence Number=SeqID_8535
MDEYILSKLEVDKHNARQTGDNNPEGRRDHTIEAFSVGSNGRINGDPISVIHPTKIKGSWEKLQMYFTCKLISMQEQLGIVDAVIESAKMSERSKSKLGTCARVQIRWVKSIIEIRRSVEPIEYHIDKNVSHKELHIEGKKQCKLQKMQDMDSTALNTIVGGLEATKFERISIKDYNM

SEQ ID NO: 50315 - protein, 172 aa, Zea mays
  Coding DNA Sequence Number=SeqID_8536
  Gene Ontology: Mol. function=metal ion binding; Cellular component =integral to membrane; Biological process=ubiquitin cycle
  Homolog annotation: Hit_ID=Q5Z6V1; Match level="QueryCoverage=91%, HitCoverage=90%, E-value=4e-36, Identity=49%"; Hit description=RING finger-like
  Pfam annotation: Domain name=PHD; Domain location=109-154; Score=0.9; E_value=0.046; Accession=PF00628.19; Description=PHD-finger
  Pfam annotation: Domain name=zf-C3HC4; Domain location=110-151; Score= 21.2; E_value=0.001; Accession=PF00097.15; Description=Zinc finger, C3HC4 type (RING finger)
  Pfam module annotation: Pfam domain module=PHD::zf-C3HC4; Domain location=109-154::110-151
MAAAFVPTPNISEPEHRPATNKGTLVFSYTCVGLTGTALVAVLLFYCYHQLLRRRAPVTAAAAGAAAETNNPPGPDGHHVGGVDISKLPGFAYAAPSSRRRGNGGDGAQCSVCLGAVQAGEMVRRLPLCKHLYHVECIDMWLASHATCPLCRSDVEPPGIASSTEPPETLPV

SEQ ID NO: 50316 - protein, 328 aa, Zea mays
  Coding DNA Sequence Number=SeqID_8537
MSAAEEHRWRSLVFGEAVAAQRSALVLASYPLLLLLVVLAAFVRYLWIALAMYCALLFVLSCAARALAAQPAGAAGAEAARVSRGGLSAAAIAAVAPAFRVFVTNWGLTDIDSTARVNCDCKQPVCDSGMKTSGRKLPVKAPFDRNMFLTEQHCREYFGGSIETLNCWPQTARSTSRPRCSSSSALESSVCCGSGGQGGYNFNLRLPAVEDWVLDSIPYSVKKHVQQGLGATEFEGWYRPAFGPCFCFRLLFSGRARAKRPTHIPSTSDGYGKVACACGCHACLAYNYKSERTSASATGMPSQFTSPAKNPSTAKPNRPSPPGSSCLA

SEQ ID NO: 50317 - protein, 151 aa, Zea mays
  Coding DNA Sequence Number=SeqID_8538
  Gene Ontology: Mol. function=protein binding; Cellular component =nucleus
  Homolog annotation: Hit_ID=Q8SAA7; Match level="QueryCoverage=55%, HitCoverage=80%, E-value=2e-27, Identity=69%"; Hit description =Susceptibility homeodomain transciption factor
  Pfam annotation: Domain name=DUF538; Domain location=4-139; Score =73.0; E_value=9.6e-19; Accession=PF04398.3; Description=Protein of unknown function, DUF538
MSSQLIEEHRSGAEVHVGHELCERKSREFMVELGLPDGLLPLPSLDEVGYNRSTGFVWLRQAAGLTHTFGSIGKQVCPGGCTASPGVKSKELLIWVTISEIVLSPSGTKIVFRTPAGLGRAFPVTAFQLEPAAAEGDHKEEAEDAAAAAAN

SEQ ID NO: 50318 - protein, 66 aa, Zea mays
  Coding DNA Sequence Number=SeqID_8539
MERARRRRYRRRGADQRLSGLRGALAAEKASFSALSISRADKIEQQQPAADPYRCGCVSIRPRRLH

SEQ ID NO: 50319 - protein, 149 aa, Zea mays
  Coding DNA Sequence Number=SeqID_8540
MVPSCLHLQDQGQSGERVALAAAAAGADARQLTLEEMLYPPPSWETAAEAATPSRRSSPKVCPVNLADFFSDEEGADSGTGSGGGYSAPGVNESASVSVVSRASLRGLHSVSRRVSFRSPDESDVFIIPARGHSDDDDEWSSDGEPSRT

SEQ ID NO: 50320 - protein, 787 aa, Zea mays
  Coding DNA Sequence Number=SeqID_8541
  Gene Ontology: Mol. function=hydrolase activity, acting on acid anhydrides, catalyzing transmembrane movement of substances; Cellular component=integral to membrane; Biological process=calcium ion transport
  Homolog annotation: Hit_ID=Q2QMX9; Match level="QueryCoverage=99%, HitCoverage=77%, E-value=0.0, Identity=75%"; Hit description=Calcium- transporting ATPase 1, plasma membrane-type (EC 3.6.3.8) (Ca(2+) -ATPase isoform 1)
  Pfam annotation: Domain name=Cation_ATPase_N; Domain location=110 -190; Score=61.0; E_value=3.8e-15; Accession=PF00690.16; Description =Cation transporterATPase, N-terminus
  Pfam annotation: Domain name=E1-E2_ATPase; Domain location=204-445; Score=231.0; E_value=2.7e-66; Accession=PF00122.10; Description=E1 -E2 ATPase
  Pfam annotation: Domain name=Hydrolase; Domain location=449-778; Score=64.2; E_value=4.2e-16; Accession=PF00702.16; Description =haloacid dehalogenase-like hydrolase
  Pfam module annotation: Pfam domain module=Cation_ATPase_N::E1-E2 _ATPase::Hydrolase; Domain location=110-190::204-445::449-778
  Subcellular localization annotation: CTP_CleavageSite=52; ConfidenceScore=5.01e-01
MESYLNENFGGVKAKHSSDEALGRWRSVVGVVKNPTRRFRFTANLGKRSEAAAMKRSNQEKLRVAVLVSKAALQFIHGLPPQGDYAVPADVKAAGFGICAEELSFIVESHDVKKLKSHGGVDGLLSRLSTSASDGLDGSKLMAARQELFGVNRFAEAEPRSFWVFVWEALQDMTLMILAACALVSLVVGIATEGWPHGAHDGLGIVASILLVVFVTATSDYRQSLQFKDLDKEKKKITVQVTRSGYRQKLSIYDLLAGDIVHLAIGDQVPADGLFVSGFSLLINESSLTGESEPVAVSAENPFLLSGTKVQDGACKMLVTTVGMRTQWGKLMATLSEGGDDETPLQVKLNGVATIIGKIGLAFAVVTFAVLTQGLFWRKLADGSYFSWTGDDALELLEVFAIAVTIVVVAVPEGLPLAVTLSLAFAMKKMMNDKALVRHLAACETMGSATTICSDKTGTLTTNHMTVVKACICGKVKDVNSSAETKTLPSDLPASVVAMLLQSIFNNTGGDVVLNQDSRREILGTPTEAAILEFGLALGGDFATVRKASTLLKVEPFNSAKKRMGVVIQLPGGALRAHCKGASEIVLASCARYLDEHGNVAALDGATADHLRATIDSFANEALRTLCLAYVDVGDGFSPSDQIPTDGYTCIGVVGIKDPVRPGVKESVAICRSAGITVRMVTGDNINTAKAIARECGILTEGGVAIEGPDFRVKSEEELQDLIPKIQVMARSSPLDKHTLVKHLRTTFDEVVAVTGDGTNDAPALHEADIGLAMGIAGTEVLSTSCS

SEQ ID NO: 50321 - protein, 257 aa, Zea mays
  Coding DNA Sequence Number=SeqID_8542
  Gene Ontology: Mol. function=ATPase activity, coupled to transmembrane movement of ions, phosphorylative mechanism; Cellular component=membrane; Biological process=calcium ion transport
  Homolog annotation: Hit_ID=Q94IN2; Match level="QueryCoverage=92%, HitCoverage=42%, E-value=1e-110, Identity=82%"; Hit description=P -type ATPase
  Pfam annotation: Domain name=Cation_ATPase_C; Domain location=112 -257; Score=44.3; E_value=4.1e-10; Accession=PF00689.11; Description =Cation transporting ATPase, C-terminus
MWYRLGVHLIVSNNVCLKVAKESADVIILDDNFSTIVTVAKWGRSVYINIQKFVQFQLTVNVVALIVNFSSACLIGSAPLTAVQLLWVNMIMDTLGALALATEPPNDELMKRTPVGRKGNFISNTMWRNIMGQALYQFLVIWYLQSRGKRLFWIDEGAADADLVLNTVIFNCFVFCQVFNEVNSREMERVNVFRGILDNNVFVMVLGSTVVFQFVIVQCLGSFANTTPLSLAQWVACVAIGFVGMPIAVAVKMVPVE

SEQ ID NO: 50322 - protein, 79 aa, Zea mays
  Coding DNA Sequence Number=SeqID_8543
  Gene Ontology: Mol. function=small protein conjugating enzyme activity; Cellular component=cytoplasmic ubiquitin ligase complex; Biological process=autophagy
  Homolog annotation: Hit_ID=Q8LRF5; Match level="QueryCoverage=82%, HitCoverage=23%, E-value=4e-25, Identity=79%"; Hit description =Putative autophagocytosis protein
  Pfam annotation: Domain name=Autophagy_C; Domain location=2-71; Score= 38.8; E_value=7.7e-09; Accession=PF03987.6; Description =Autophagocytosis associated protein, C-terminal domain
MANVLRNHTALAQVTIEDHPHLLAGKHASVHPCKHATVMKKIIDVPMSGYLFIFLKFIATVIPTIEYDYTMDVDLGSTS

SEQ ID NO: 50323 - protein, 138 aa, Zea mays
  Coding DNA Sequence Number=SeqID_8544
  Homolog annotation: Hit_ID=Q8S2G0; Match level="QueryCoverage=38%, HitCoverage=13%, E-value=2e-19, Identity=79%"; Hit description =Putative isopentenyl monophosphate kinase
MAATAVTLLRLPLARLSYHLRSVEEESAAKAEAPRSFVLPQLPWPKLSVKEDVCPHGSTIVGIGSPDPPAFVYDDEDYNDVFVSEACLLTRDENEWYREPISTNATSGKEDTEFDQRLDMVGKNTTVLARIVHKTIWF

SEQ ID NO: 50324 - protein, 242 aa, Zea mays
  Coding DNA Sequence Number=SeqID_8545
  Gene Ontology: Mol. function=protein binding; Cellular component =spliceosome; Biological process=mRNA processing
  Homolog annotation: Hit_ID=UPI0000DA43ED; Match level="QueryCoverage =64%, HitCoverage=98%, E-value=6e-19, Identity=34%"; Hit description =PREDICTED: similar to keratinocytes proline-rich protein
MGRRETEREGGKKPEGDRRESPGLGEVEAPPRSRSSLSSKAEVESEPLGRARRRPSAEARAESEPWGRAKRSSSSSGAEPESEPWGRAKRSSSSSRAEPESEPWGRAKRSSSSSGAELESEPWGRAERSSSSSGAEPDSEPWGRAERSSSSSGDEPESEPWGRAMRSSSSSGAEPESEPWGRVKRSFLWRLRLDLAAISLTLSSGTAVRAAQAVLSSCQAGQWSGEVTTVTSALSTGGHALG

SEQ ID NO: 50325 - protein, 108 aa, Zea mays
  Coding DNA Sequence Number=SeqID_8546
MKEISMGLVLTEDKVWHGLFTARRGRGENPSSVEGFPRTQQGTLRLLSPTASMQSDRASGGHDGGRTPLEVVICDDTCRLPRLRRHNVDVAKRQQTKRHERAWSRGVL

SEQ ID NO: 50326 - protein, 427 aa, Zea mays
  Coding DNA Sequence Number=SeqID_8547
  Gene Ontology: Mol. function=protein serine/threonine kinase activity; Cellular component=beta-catenin destruction complex; Biological process=protein amino acid phosphorylation
  Homolog annotation: Hit_ID=Q9LWN0; Match level="QueryCoverage=99%, HitCoverage=100%, E-value=0.0, Identity=83%"; Hit description =Putative shaggy-like kinase dzeta
  Pfam annotation: Domain name=Pkinase; Domain location=67-372; Score =287.5; E_value=2.5e-83; Accession=PF00069.15; Description=Protein kinase domain
  Pfam annotation: Domain name=Pkinase_Tyr; Domain location=67-347; Score=-14.2; E_value=1.3e-11; Accession=PF07714.7; Description =Protein tyrosine kinase
  Pfam module annotation: Pfam domain module=Pkinase::Pkinase_Tyr; Domain location=67-372::67-347
MEAPPVPELMDLDAPPPAAADAAAAAPVPPAVSDKKKEGEGGDTVTGHIISTTIGGKNGEPKRTISYMAERVVGTGSFGIVFQAKCLETGETFAIKKVLQDRRYKNRELQLMRAMEHPNVICLKHCFFSTTSRDELFLNLVMEFVPETLYRVLKHYSNANQRMPLIYVKLYMYQLFRGLAYIHNVPGVCHRDVKPQNVLVDPLTHQVKLCDFGSAKVLIPGEPNISYICSRYYRAPELIFGATEYTTSIDIWSAGCVLAELLLGQPLFPGESAVDQLVEIIKVLGTPTREEIRCMNPNYTEFRFPQIKAHPWHKIFHKRMPPEAIDLASRLLQYSPSLRCSAIRVSFDAYSLRGIDNGTRQTKLDACAHPFFDELRAPNARLPNGRPFPPLFNFKHELANASPDLINRLVPEQIRRQNGVNFGHTGS

SEQ ID NO: 50327 - protein, 230 aa, Zea mays
  Coding DNA Sequence Number=SeqID_8548
  Gene Ontology: Mol. function=catalytic activity; Biological process =metabolic process
  Homolog annotation: Hit_ID=Q9LEA0; Match level="QueryCoverage=95%, HitCoverage=93%, E-value=7e-35, Identity=41%"; Hit description =Carnitine racemase-like
  Pfam annotation: Domain name=ECH; Domain location=15-175; Score=-3.5; E_value=1.2e-07; Accession=PF00378.10; Description=Enoyl-CoA hydrataseisomerase family
MEESLCAVEKRGRVHVITLTGAEEHRLSPALLSALRSAVAAARRALPRNGYDLAWARAGPAPAPGHRLSEMRAAFRGLVADLLALPVPTVAAVTGHAAGAGCALALAHDAVAMRASRGFLYMSEVDAGIKIVDFVGELVRQKVPDAAARRDLVMKGEKMTAAQAARRGIVDAAVDGGVEDVVAAAVAMAEELAARDWDGENLAAIRKDAWPVLWSKVKDYGGDVLARPRL

SEQ ID NO: 50328 - protein, 885 aa, Zea mays
  Coding DNA Sequence Number=SeqID_8549
  Gene Ontology: Mol. function=protein serine/threonine kinase activity; Cellular component=cell surface; Biological process =protein amino acid phosphorylation
  Homolog annotation: Hit_ID=Q656X4; Match level="QueryCoverage=37%, HitCoverage=50%, E-value=1e-117, Identity=63%"; Hit description =Putative receptor serine/threonine kinase PR5K
  Pfam annotation: Domain name=B_lectin; Domain location=121-228; Score= 106.7; E_value=7e-29; Accession=PF01453.15; Description=D-mannose binding lectin
  Pfam annotation: Domain name=Kdo; Domain location=541-754; Score= -84.9; E_value=0.06; Accession=PF06293.4; Description=Lipopolysacchari de kinase (Kdo)
  Pfam annotation: Domain name=PAN_2; Domain location=386-457; Score =3.0; E_value=0.00066; Accession=PF08276.2; Description=PAN-like domain
  Pfam annotation: Domain name=Pkinase; Domain location=568-841; Score =152.0; E_value=1.6e-42; Accession=PF00069.15; Description=Protein kinase domain
  Pfam annotation: Domain name=Pkinase_Tyr; Domain location=569-841; Score=103.6; E_value=5.9e-28; Accession=PF07714.7; Description =Protein tyrosine kinase
  Pfam module annotation: Pfam domain module=B_lectin::Kdo::PAN _2::Pkinase::Pkinase_Tyr; Domain location=121-228::541-754::386 -457::568-841::569-841
  Subcellular localization annotation: CTP_CleavageSite=17; ConfidenceScore=5.33e-01
MPPSHRLSLLLAVAVVVAATSVRVHVHAQGSVLFPTPASTNVSVTWTVSLKADGHGAQSFDYMDGTSASVFLLQSVHPTPQEGLCFAACFYCVAPCRAFLFGVCVVYVDGGGFLSWPNAGSPQVVWSANRGRLVRENATLSLTAAGDLLLRDGGGGGVVWSTNTSGRSVAGMAVTRSGNLVLLDGKNAAVWQSFDHPTDSLLPGQPLVEGMRLAPNASSTNWTASGQLYITVLSDGLYAFAESSPPQLYYQMTVTTNTTAGPGGRKTYMALTNGSLAIFAPSSSVNVSTPQPADGATNKTAAGEMEYVRLESDGHLKLYRYTGTEGWAMAQDLLQGQVGSCAYPTVCGAYGVCVSGQCTCPSATYFRQVDDRRTDLGCVPVAPISCASTQDHRLLALSNVSYFNYVDTKAALPRMVDEESCKKACLQNCSCKAAFFQYGGNDTSQGSCYLPTQVFSMQVNQWQETHYSSSAYLKVQVTRSPPPPPVPGPSNSNGTAIPAGKGRTGEAAIVGSALAGAIALLAVIVVTSVVLRRRYRRRDDEDDEDGLGEVPGMMTTRFTFEQLRAATEQFSKMIGKGGFGSVFEGQVGDQRVAVKQLDRTGQGRREFLAEVETIGNIHHINLVTLVGFCAERSHRLLVYEYMPNGSLDRWIYSSAAAAADTTPLDWHTRRRVITDVARGLAYLHEECRQRIAHLDIKPQNILLDDGFGAKISDFGLSKMIGRDESRVVTRMRGTPGYLAPEWLTSQITEKADVYSFGVVVMEVVSGRKNLDYSQPEDSVHLISVLQEKARDGRLEDLVDARSDEMRGLHREGVIQMVKLAMWCLQVDYNRRPQMSVVVKVLDGAVDVETGIELNFVATVPDSLANNGGNLASSTPLLASHLSGPR

SEQ ID NO: 50329 - protein, 112 aa, Zea mays
  Coding DNA Sequence Number=SeqID_8550
MAFENPKYTPDLVLSEVSQAPNGCLLNSDYMVIPELRPTPYVPASSRPEDIEIDKMTQSPRRRRHEHHVSFCERQTLVARQNQKFQSAIGRKFFTPTRDREMEINVDNEIDY

SEQ ID NO: 50330 - protein, 68 aa, Zea mays
  Coding DNA Sequence Number=SeqID_8551
MMVIVILLALRLIRAGKLGLLHNPNEAQSSGATPIRRTDCAPNGTMHWIKMYDSRGTTSRLWLGWILC

SEQ ID NO: 50331 - protein, 188 aa, Zea mays
  Coding DNA Sequence Number=SeqID_8552
  Gene Ontology: Mol. function=peptidase activity
  Homolog annotation: Hit_ID=Q5VP08; Match level="QueryCoverage=67%, HitCoverage=58%, E-value=1e-33, Identity=76%"; Hit description=ATP -dependent Zn proteases-like protein
  Subcellular localization annotation: CTP_CleavageSite=31; ConfidenceScore=5.43e-01
MSTNLGGASCFGFGLTQMQPAAVRLRLPPARAADTSSSQSPARLTAVLEQVDQLLSQGNDMAALSLVRSTQGGDGGLRAFGAARQVYFGGGVRNLVLDTIGHYLSQKYHNRVIQHEAGHFLIAYLLGVLPKGYTITSLDTLMNQGSLNVQAGAAFVDYEFLEEGLRRPTEGLRQQQPWALQGGLDKDS

SEQ ID NO: 50332 - protein, 104 aa, Zea mays
  Coding DNA Sequence Number=SeqID_8553
MDATVATEQAVGVGGRWWSSLFVWAERERGRESWAEGTNERGEVGEQGAGLKSGTGARTWPENARSWTCPWQGDRGRDVRDGLTGGDDGTEREGAGARDGNNAD

SEQ ID NO: 50333 - protein, 68 aa, Zea mays
  Coding DNA Sequence Number=SeqID_8554
MAFAIRRSKLCTYVCGIAAEQLGVREGDSSVHRLCGARRNGGIRNHSCARGLRVGLNYWCVVVVLNVC

SEQ ID NO: 50334 - protein, 153 aa, Zea mays
  Coding DNA Sequence Number=SeqID_8555
MARVACTLRGKRLDGGVSVLSVGVNPHTLESIFFSRVTSHLIVIGVNRWAADTSFTRRQWLEGSGGEDQIWDTVTSACLILTPRTLMILLRFPDSDDGACGGGGGPGIVDDGSRPRTTPVSEDHDSAVQESGWGSDSRVAGPLASASHIVVDG

SEQ ID NO: 50335 - protein, 129 aa, Zea mays
  Coding DNA Sequence Number=SeqID_8556
MKSISPRLEAVGQLVFVAERFYGVGGENVPRTTPAIGFRAHGVPRTRSRRYSNPRDNTPAYASFLLYFSICYLRQAPGASLARLRVGFRCGQGMRGAHINTQWSGKIWSLHASARSNGPCAKPGQQPGN

SEQ ID NO: 50336 - protein, 74 aa, Zea mays
  Coding DNA Sequence Number=SeqID_8557
RLMLFLPLLKLFCPYAAFCVLPAAPSRTGDDTWEVKVAEMTEEELREKGERGGYSPEREWEKHLDAAGEEIAGE

SEQ ID NO: 50337 - protein, 81 aa, Zea mays
  Coding DNA Sequence Number=SeqID_8558
  Gene Ontology: Cellular component=nucleus; Biological process =regulation of progression through cell cycle
  Homolog annotation: Hit_ID=Q2QQ96; Match level="QueryCoverage=74%, HitCoverage=12%, E-value=2e-15, Identity=66%"; Hit description =Cyclin, N-terminal domain containing protein, expressed
MKEKRAEEGRTKEDRGMGNLNTTLEHYTSYRCSDVLLCVRALWELQHDTRSFSAIRDKYRHHKFECVANLTSPALPRSLFS

SEQ ID NO: 50338 - protein, 119 aa, Zea mays
  Coding DNA Sequence Number=SeqID_8559
MSTHVQTQSGVDLSAYTSALRPGRDLILPRGLYRVMEVSSRYMSHMKNTKTTKKGEETTVAKIKDITCSRGLFKAELGVPGGAEQIMSQLKNKKATKMTEETTMTKIKDITCSPVEDHN

SEQ ID NO: 50339 - protein, 251 aa, Zea mays
  Coding DNA Sequence Number=SeqID_8560
  Homolog annotation: Hit_ID=Q9LNB9; Match level="QueryCoverage=31%, HitCoverage=38%, E-value=2e-16, Identity=48%"; Hit description =Putative LOB domain-containing protein 2
  Pfam annotation: Domain name=DUF260; Domain location=8-109; Score =91.1; E_value=3.4e-24; Accession=PF03195.5; Description=Protein of unknown function DUF260
MTGGGRGACAVCKHQRRKCEPNCELAAYFPAHRMNDFRALHLVFGVANLTKLIKANASEAGRRRAAETLTWEARWRECDPSDGCYREVACLRRDNAVLRAENAALRRQLAEQQLLWSSACSTGGSALLAEQQLLPPCGGNNNGLLTASSRAHHAPAAALAATHTALACYRGSMPVCTITMTADDGSGRRPASDAAAIAGRGSGAQVDASRDNKSSACSITQRLLYTVLPGSLPAGLLCHFTNQIARIGKKG

SEQ ID NO: 50340 - protein, 181 aa, Zea mays
  Coding DNA Sequence Number=SeqID_8561
  Subcellular localization annotation: CTP_CleavageSite=56; ConfidenceScore=5.22e-01
MDCQGKHGVKPPAPMLAGSDVAYVCKVLVVSNKGSRSSWSSNEATGGGQGQGRRCKAGAAAGPQAGTRVGAPLQGWSSSGATGGDKGRGRRCKAGAGVKQRARVKGGARFDREVVWSNAETTMGVKTHRFFPMEAVGMWKPSHNGVLETRSSNVEDTRCCRSKEIWGENGKHTNRTMNPKP

SEQ ID NO: 50341 - protein, 129 aa, Zea mays
  Coding DNA Sequence Number=SeqID_8562
MQAAYIKRRELAQEVRQSQLCEPARVINLSTTEFSPPPLPSHSKLEIMAISSKTVAVSMLLLSAVFFVLLSAPAHARKLGTMRAPTSSVRRPPAAPCTPRSILQEVATQTESTTTPGHSPSIGHNSPPN

SEQ ID NO: 50342 - protein, 166 aa, Zea mays
  Coding DNA Sequence Number=SeqID_8563
MVCELIQAVYPSSSNIKPHFQQRGMRLILLAPECQREKGSPQSAGWLPAGLAVEQVAEAELGRDGEITRGRTGRQARRKFAPEGRSASPVVLDVPSGDGRRHARTVVGRNHAVALGHDLCLVSHCAFVPLRGDRLERDGRSGGDLSRDGDSPEVGDPRRRGLGVKE

SEQ ID NO: 50343 - protein, 246 aa, Zea mays
  Coding DNA Sequence Number=SeqID_8564
MRPIGKEKLNSEQNSLSYSQKVLNLEDEILFKRAAQAPPREPALPVEQRPPMPSAPALVRAVHTRLGLDTCRYRTPAWVLFKAHVCSVLELWDPIASDPDPIREGPDPIPGVRLAHVAVLDQPWRSRLHIQGSGALLWGSWPTVDALEDITFSGHMEALDPPMWWSQGTDSGPQAHLKGGCEPTGGAKACTSPQHGMTGDWGAILACLLTCRINSVHLSTHALSICLQSHQLPYLSPSLTDPRPHV

SEQ ID NO: 50344 - protein, 109 aa, Zea mays
  Coding DNA Sequence Number=SeqID_8565
  Subcellular localization annotation: CTP_CleavageSite=42; ConfidenceScore=5.14e-01
MGHPICPTVRIQSPKGYSYIYSQPSISGSMVVDTSSRFPVARGGAAQVQRWSIAGITPSDARERQSPVQDPIHGMEINSSKLRGYLPMIMRPGIRTSRFSGTAATEQHR

SEQ ID NO: 50345 - protein, 155 aa, Zea mays
  Coding DNA Sequence Number=SeqID_8566
MDALDVPRQAPRARAARHAADAMAACQAGHAGHRAPRGGATAAPSELWPRTKGTSAELQATGREHGEEGQASRGSPRAGAGERPGREPRGRRAMPGRGTAARRGRRARRGGQGQGRARRGRAGVGRAMAGGGERARGSRTGGHLGRTGRGRDGRA

SEQ ID NO: 50346 - protein, 105 aa, Zea mays
  Coding DNA Sequence Number=SeqID_8567
MWSFKGKEKVVENLHKKDNGSLEDKSKDEKPTDSHRMKKDDNKKRIKKIIYYDTHCHPYRAKKNLPPSIAKRREEHNKVNGFENANKTWDTLRTSHEGDKMTRIT

SEQ ID NO: 50347 - protein, 214 aa, Zea mays
  Coding DNA Sequence Number=SeqID_8568
MEIAHRRKPSSPEPRRKSSIDGEPEVGSMNQKHLDETLDETNAAVLSYYANNELKVIARRSCRRSWNRPKLRRAIPKIVDRILEPGYHHPPGSGYHKKEAQGEEEPELGDAVRWAKLGDAFWRAKEQVIGDEGEASVETNMLSLLYYFSLTTIYVFLDIVDAHIIRQVVPCPGNTQCACKSTESKKCCIKETGLFADKALERALHVLIKNRMRK

SEQ ID NO: 50348 - protein, 285 aa, Zea mays
  Coding DNA Sequence Number=SeqID_8569
  Homolog annotation: Hit_ID=Q8LQH4; Match level="QueryCoverage=75%, HitCoverage=78%, E-value=1e-53, Identity=52%"; Hit description =Putative LOB DOMAIN 6
  Pfam annotation: Domain name=DUF260; Domain location=53-153; Score =213.2; E_value=6.1e-61; Accession=PF03195.5; Description=Protein of unknown function DUF260
  Subcellular localization annotation: CTP_CleavageSite=43; ConfidenceScore=5.58e-01
MDLPPAERQMAASSAPSSAVPAVSTAPVITVASPPTGGGGSISGNGGGGGGSPCAACKLLRRKCQPDCMFAPYFPSDNPQKFVHVHRVFGASNVSKILNDLQPFQRQDAVNSLAYEADMRIRDPVYGCVGVICILQRHLSLVRQELACATYELSKYRQAEAAAASVAVGSHGAAAAAGMAEFVGNAVANCPQTFMDVRHSTAAAAIGGAGGFMQEDNFSMQQMLAMTYEGEGSGAARVDMNGGGGYGFTYSPAAAMGAVEHGAVSGIGAAEQRGTIPEAQQDRRG

SEQ ID NO: 50349 - protein, 498 aa, Zea mays
  Coding DNA Sequence Number=SeqID_8570
  Gene Ontology: Mol. function=monooxygenase activity; Cellular component=integral to membrane; Biological process=electron transport
  Homolog annotation: Hit_ID=Q5WMQ8; Match level="QueryCoverage=91%, HitCoverage=75%, E-value=1e-133, Identity=54%"; Hit description =Putative cytochrome P450
  Pfam annotation: Domain name=p450; Domain location=38-486; Score =64.7; E_value=3.1e-16; Accession=PF00067.12; Description=Cytochrome P450
  Subcellular localization annotation: CTP_CleavageSite=25; ConfidenceScore=5.41e-01
MDAVWFTVSFLAIAAIATKIIAKRRATTSAPRSTIPAPPVVEGRSLVRFVHTLFTKGLRATIHDEHARMGSVFTVSFLGLMKTTFLVGPDVLNHFYNGPESDINHGNMLDFMVPMFGKEVGYGVDFATRYEQIRFYSDPLKRPSKLRIHVDPIVQEVEGYFAKWGEEGTVDLKHEFSQLLMLISSRCLLGKEVREKMFDEMHALFHELKSGMRLSSVLFPYAPTPTNRRRDRARAKLLKIFSEVVRSRRRRGEEEKEKEEDVLQSLIDSRYKDGRATTEEEVTGMIILLVFGGMDTSTLASTWTGARLLSTPAAMAAAVEEQRRILTDHGHGDRVGYSEFMQMTTLHWSIKEALRMHPPSAVFFRKARRSFGVRTRDGREYEVPGGHTVASPVLFNSHLPSVYKDPDVYDPTRFGPGREEDRAGGKFTYEAFSCGRHSCVGEAYAYLQIKVMLSHLLRNFQLELVSPFPQTDWGKLVPEPKGKVMVRYKRQRLLSVPS

SEQ ID NO: 50350 - protein, 199 aa, Zea mays
  Coding DNA Sequence Number=SeqID_8571
MPNFWVNISTTGYCKYKASCVLDHSSLPNNVHVNHYDMLRGTPKTPKSQLVTPKTPKSQLVTPKTSDDGLRLARPPGLELYLDLGRRSPPRPTPRLGLYLDLGRRSPPRPTPRLGLDLDLGRRSPPRPPPGAQTLPRARTTVSASPDPWARTLPRPRTTVSALPDPRAQTQPRPRRILRLARPRARTDHVTGGPSLPYP

SEQ ID NO: 50351 - protein, 348 aa, Zea mays
  Coding DNA Sequence Number=SeqID_8572
  Gene Ontology: Mol. function=transferase activity, transferring phosphorus-containing groups; Cellular component=chloroplast; Biological process=phosphorylation
  Homolog annotation: Hit_ID=P11155; Match level="QueryCoverage=96%, HitCoverage=34%, E-value=1e-164, Identity=85%"; Hit description =Pyruvate, phosphate dikinase, chloroplast precursor
  Pfam annotation: Domain name=PPDK_N; Domain location=12-347; Score =416.8; E_value=3.1e-122; Accession=PF01326.9; Description=Pyruvate phosphate dikinase, PEPpyruv
MAPAPCGRSSQRVFHFGKGKSEGNKNMKELLGGKGANLAEMASIGLSVPPGFTVSTEACQQYQEAGRALPPGLWAEVLDGLRWVEEYMGAALGDPRRPLLLSVRSGAAVSMPGMMDTVLNLGLNDQVAAGLAAKSGDRFAYDSFRRFLDMFGNVVMDIPHALFEEKLEAMKKAKGLKNDTDLTATDLKELVSQYKNVYVEAKGEPFPSVTQRPDTLKLPAADPKRQLELAVLAVFDSWESPRAKKYRSINQITGLRGTAVNVQCMVFGNMGNTSGTGVLFTRNPNTGEKKLYGEFLVNAQGEDVVAGIRTPEDLDAMNDVMPQAYEDLVENCRVLESHYKKCRHRAMG

SEQ ID NO: 50352 - protein, 153 aa, Zea mays
  Coding DNA Sequence Number=SeqID_8573
MGKSKKGGSSSHHSSDKRKREPTPPSKDFDDSEYSKEEFSSESKGSPVHTSPPASSDDTDDTQGITAEVWTYIRAIERAGLEGSDESEVSSDKENSSDSSGEGGGDGDGEGDDDDGGDGDGDGDDGEGGGKGDKGDGQDGSKGSSRGSNKASG

SEQ ID NO: 50353 - protein, 411 aa, Zea mays
  Coding DNA Sequence Number=SeqID_8574
  Gene Ontology: Mol. function=transferase activity, transferring phosphorus-containing groups; Cellular component=chloroplast; Biological process=phosphorylation
  Homolog annotation: Hit_ID=P11155; Match level="QueryCoverage=99%, HitCoverage=47%, E-value=0.0, Identity=83%"; Hit description =Pyruvate, phosphate dikinase, chloroplast precursor
  Pfam annotation: Domain name=PEP-utilizers; Domain location=1-77; Score=123.8; E_value=5e-34; Accession=PF00391.13; Description=PEP -utilising enzyme, mobile domain
  Pfam annotation: Domain name=PEP-utilizers_C; Domain location=89-411; Score=573.1; E_value=2.6e-169; Accession=PF02896.8; Description=PEP -utilising enzyme, TIM barrel domain
  Pfam module annotation: Pfam domain module=PEP-utilizers::PEP -utilizers_C; Domain location=1-77::89-411
VRAETSPEDVGGMHAAAGILTERGGMTSHAAVVARGWGKCCVSGCSGIRVNDAEKVVKIGGNVLREGEWLSLNGSTGEVILGKQPLSPPALSGDLGTFMSWVDDVRKLKVLANADTPEDALAARNNGAEGIGLCRTEHMFFASDERIKAVRQMIMAPTVELRQQALDRLLPYQRSDFEGIFRAMDGLSVTIRLLDPPLHEFLPEGNVEEIVRELCSETGANQEDALARIEKLSEVNPMLGFRGCRLGISYPELTEMQARAIFEAAIAMTNQGVQVFPEIMIVVPLQFKIMTKIHLIAEQAEFFSFGTNDLTQMTFGYSRDDVGKFIPIYLAQGILQHDPFEVLDQRGVGELVKLATERGRKARPNLKVGICGEHGGEPSSVAFFAKTGLDYVSCSPFRVPIARLAAAQVLV

SEQ ID NO: 50354 - protein, 79 aa, Zea mays
  Coding DNA Sequence Number=SeqID_8575
MPPQYTVQLFEKHQIQELEELVGARENTIEVLEDQLINTQQQLEEANQHLDMHHQEIQDMEANEDVDIKGGEEPEPASS

SEQ ID NO: 50355 - protein, 76 aa, Zea mays
  Coding DNA Sequence Number=SeqID_8576
  Gene Ontology: Mol. function=transferase activity, transferring glycosyl groups; Biological process=sucrose metabolic process
  Homolog annotation: Hit_ID=P31924; Match level="QueryCoverage=59%, HitCoverage=5%, E-value=2e-13, Identity=78%"; Hit description =Sucrose synthase 2
MLCQQGKRIEDLSRHNRFYYVTGSNCYTPWVALSICPWPGVWEYVRVNVIKLAVEEMRVPEYLQFKEQLMEEGITQ

SEQ ID NO: 50356 - protein, 172 aa, Zea mays
  Coding DNA Sequence Number=SeqID_8577
MLAHPTRCTPLVAAANASASLPCLGGKLVEADAGDGLGGPLRLVGTPLLEEALGLRGGLLEQHHLGADHEIWEGSRGEEGVDGGCGIGSRQRIKGSGRGAEGQEGVCGSGPRRRRKRDQTDRRVYIWPSPILFPCLSLPSKSPSSSPAGYFSSSEYPIESSRWKRSQSEEFS

SEQ ID NO: 50357 - protein, 252 aa, Zea mays
  Coding DNA Sequence Number=SeqID_8578
  Homolog annotation: Hit_ID=Q2QWW9; Match level="QueryCoverage=22%, HitCoverage=15%, E-value=3e-16, Identity=69%"; Hit description =Transcriptional regulator, Sir2 family protein, expressed
MAPFYRQRAEGAVGGHGRKEEEDGKERGGRAGCEERARSSGGFREEDIIAVRLEWTTVDMILDSRVLSAYLTGAGMNTESGILDYMSYWLKLSIDWKLDNQVLEVGQPGSDISFGMQQQSDGDVPIDEKFWEKDFEIPSCHQCGLLKPDELWDWSGMTRVCLGKAFSCLALEDLWCGLGVGVRVTRNFRVGYSGFGYSGFRFRVFRVRVSCRSWWDAVRSRLRLFEMLDLEPRFATSTPGTEASAWWTPSFQ

SEQ ID NO: 50358 - protein, 59 aa, Zea mays
  Coding DNA Sequence Number=SeqID_8579
MMVHVVGFANTSKKLQVQVGYKEAGGLPRFIDKKNNKRVSVKTVTEAPGIAPTLSVKKK

SEQ ID NO: 50359 - protein, 60 aa, Zea mays
  Coding DNA Sequence Number=SeqID_8580
  Subcellular localization annotation: CTP_CleavageSite=30; ConfidenceScore=5.12e-01
MTVVPPNVRASTKPHEARGSSSVHRRHEVRTATVTRKNLTVTNVLLVGLIFDFYQLCYKV

SEQ ID NO: 50360 - protein, 495 aa, Zea mays
  Coding DNA Sequence Number=SeqID_8581
MEDDWIFLGDGVGGRSESDTVSASDDDDGFTIVRRGREAGGDHRSVVDSDDDAPAGVPHPTPPGLSFRVVSSDGGRREQAGCNDDAASGKAIRGAGIDDAVTCKEGCESADDSAQVGKHDVTGRSVEVSSAPSVAVATAFAPTANCPESDGDECFGADSEDECYGVEYSDVDAESCGEEEEQEEDTVSAAGVGEEESSRVVGVAENCKTDIFAMLLPRERAYGVNIDDYEDESDNGCIDYEEEEEDGSLFDMLLPRERAINDGIEGSGGEEEAATATAACGYNAEEDDIADVAENGKTDIFALLLPRQRAYGGVNIDDYEYEDESEEEEYGSLFDMLLRRERAINEDTDSSDGEEEAATAACGYNAEPSHGTRRQELAGRARGYDDVDTDSDMEEGGDEVAAAASKASSGDLLGKVRRRGRRWRCGRSRAAGAGRLLQLVASCPCAPVAEAMFALRHRERALWIEEVGGGEAAQQELDRALARDAGLLPKSRQIM

SEQ ID NO: 50361 - protein, 136 aa, Zea mays
  Coding DNA Sequence Number=SeqID_8582
MVASPYHCLLLRLPHQQEPPPRGKNKVLDEQSAVLITVCSYVFRRSCIQALTATCMHVVVAGEEQEGASMGGRCGWRTHPAMTGRRQRHAGRGAHDGVRGVLVEVGPSGRISTSGRVIPNGAAEVSLTAADAGTSS

SEQ ID NO: 50362 - protein, 66 aa, Zea mays
  Coding DNA Sequence Number=SeqID_8583
MPKPPGEDIKFRSKLERGGCLLEEMVMLSPIARHSLMEWLFAGFTVEQVAEAELRARTKTGPRGQA

SEQ ID NO: 50363 - protein, 293 aa, Zea mays
  Coding DNA Sequence Number=SeqID_8584
  Gene Ontology: Mol. function=RNA-directed DNA polymerase activity; Biological process=RNA-dependent DNA replication
  Homolog annotation: Hit_ID=UPI00004C1731; Match level="QueryCoverage =96%, HitCoverage=35%, E-value=1e-46, Identity=49%"; Hit description =UPI00004C1731 related cluster
MEDAEANAPPALNWASQSLATAILLRAMPEPSTTEGRHIHDELWELLECADVQQVESSASRLREPISRISQQTGSQDPTKANELMDIATKFASGQEAVEALFHKDKGDRKQKEGAPEASTQCNLEKGKKRKTHQGPHETLVTELVAATEKRNPRTPQGGPGVFDKMLKESCPYHKGPVKHTLDEYRAITFDRDDHPDYIPKSGRYLLIVYPVINNTCLTKVLMDGGNNLNIIYVDALELMGVERSQIRPGDAPFHGITPSKGVHPLGQINLHVCSGTPANFRKEVLTFKVVGF

SEQ ID NO: 50364 - protein, 325 aa, Zea mays
  Coding DNA Sequence Number=SeqID_8585
  Gene Ontology: Mol. function=transcription regulator activity; Cellular component=nucleus; Biological process=regulation of transcription
  Homolog annotation: Hit_ID=Q651K2; Match level="QueryCoverage=26%, HitCoverage=29%, E-value=2e-24, Identity=62%"; Hit description=BHLH protein-like
  Pfam annotation: Domain name=HLH; Domain location=237-284; Score =27.8; E_value=3.7e-05; Accession=PF00010.16; Description=Helix-loop -helix DNA-binding domain
MAQASKRSAFLRPVMYDDDEPSSISMSLELFGYHNGGVGVVVDDGDEAADGGSASALSLQLAFDDDSFVKGGCECDDAGGGGASAADYYYYGSWAGAYGGSGATSSGSNSSVLSFEQAGSGGGQRHHLVYGEDGCALWMDDAGAGMVVEHPPAQQQQQHGSGCDFGLIGSSPDDAGLPIQLEPGTVQLPAKAPPHKRARRDGDQVQAAAAAKKQCGGVGARMKSKQAKLAAPAPTKDPQSVAAKVRREKIAEKLKVLQDLVPNGTKVDLVTMLEKAITYVKFLQLQVKVLAADEFWPAQGGKAPDLSQVKDALDAILSSSQQCPK

SEQ ID NO: 50365 - protein, 82 aa, Zea mays
  Coding DNA Sequence Number=SeqID_8586
MRRSGLVVQKGEGSIPEKDNVITEVEHAIAEAGSDDEEDDGILSPSKPSHVEFGKSTEVASLTFMFVKVLEHLEICFNAFFV

SEQ ID NO: 50366 - protein, 85 aa, Zea mays
  Coding DNA Sequence Number=SeqID_8587
MELDVAVEIAGEAAVLLWSRPFSVRIDSHITVDPVFLEVVEQCSKCKTLSIVRTMQCSIQTPVQFFGKFLMLYKNQCRTTRDVNG

SEQ ID NO: 50367 - protein, 146 aa, Zea mays
  Coding DNA Sequence Number=SeqID_8588
MRISLLGQAAVFSAVIPRGHGAGLGRRDGHGRRRSRRWREHEHAGSSPRSRSMCLAACNLGGMEATWQQQEECPCGGAEAADQSERLHDAVLLDVLNCIDDVKALGRCALVSRRFPFPQSIICIIALCVEMSMGTRYPITRGEFPY

SEQ ID NO: 50368 - protein, 197 aa, Zea mays
  Coding DNA Sequence Number=SeqID_8589
  Gene Ontology: Mol. function=transporter activity; Cellular component= membrane; Biological process=sodium ion transport
  Homolog annotation: Hit_ID=Q768R5; Match level="QueryCoverage=50%, HitCoverage=17%, E-value=6e-26, Identity=64%"; Hit description =Plastidic 2-oxoglutarate/malate transporter
MSHHARSHTRVLRPHSPSHPRLSPIRDSRVRGIDFAPTTTTDGEPTSHVDAAGGGAGGVTISKEVDLKPVVMKWEVLQADHFHNGTPRPDNWGTSRPSFGFFSLDLGYSLLFTEALLAPAIPSVLAHTDDIFLPLVRHAALAPATARSAGLTQSWLMLTCFQTSVVSSAMFLTAMVAKSLSPNLTTATIGQGIGWKL

SEQ ID NO: 50369 - protein, 190 aa, Zea mays
  Coding DNA Sequence Number=SeqID_8590
  Gene Ontology: Mol. function=protein binding; Cellular component =nucleus; Biological process=regulation of timing of transition from vegetative to reproductive phase
  Homolog annotation: Hit_ID=Q9ASJ1; Match level="QueryCoverage=99%, HitCoverage=100%, E-value=8e-72, Identity=73%"; Hit description =Putative SP2G
  Pfam annotation: Domain name=PBP; Domain location=19-182; Score =144.7; E_value=2.4e-40; Accession=PF01161.10; Description =Phosphatidylethanolamine-binding protein
MARFVDPLVVGRVIGEVVDLFVPSISMTVAYDGPKDISNGCLLKPSATAAPPLVRISGRRNDLYTLIMTDPDAPSPSNPTMREYLHWIVINIPGGTDATKAHAKRRHRSALTRAGVGAGEEVVEYMGPRPPVGIHRYVLVLFEQKTRVHAEAPGDRANFKTRAFAAAHELGLPTAVVYFNAQKEPASRRR

SEQ ID NO: 50370 - protein, 186 aa, Zea mays
  Coding DNA Sequence Number=SeqID_8591
  Subcellular localization annotation: CTP_CleavageSite=21; ConfidenceScore=5.23e-01
MKDMNKGPSAVAFAPMPSLLLSSHSRRRSLSLLLERLPASCLEFVIPWAPWCGGCSYPRERNQSPKVTSENPRLLCDEPEPEAAVLARTEAKSARKETSSARELAASQAEEDVAAAAEAWPRHLLARCWRPPLGGGPFAWVVVRGRARFRRGWKQRRENCCSPCQCLNLQEQFVCSMHMFFAAAEA

SEQ ID NO: 50371 - protein, 86 aa, Zea mays
  Coding DNA Sequence Number=SeqID_8592
MWWEHIRPAPQAPLVKMKCVLGPFLVVLTIKCPAHHFGPIHEHRCSKYKLKNHVEIAPHPETGGNMKKTTEIFCARIDTVTDKQHL

SEQ ID NO: 50372 - protein, 67 aa, Zea mays
  Coding DNA Sequence Number=SeqID_8593
MAGGNTLAGAKERWLAGEGFELGIKVNIPDLWLKVVLCTEYVPHQFHLNLNVEKLFPMGILFEFHVH

SEQ ID NO: 50373 - protein, 870 aa, Zea mays
  Coding DNA Sequence Number=SeqID_8594
  Gene Ontology: Mol. function=ubiquitin thiolesterase activity; Biological process=ubiquitin-dependent protein catabolic process
  Homolog annotation: Hit_ID=Q67WC7; Match level="QueryCoverage=95%, HitCoverage=79%, E-value=0.0, Identity=61%"; Hit description =Putative ubiquitin-specific protease 15
  Pfam annotation: Domain name=UCH; Domain location=115-422; Score =179.9; E_value=6.1e-51; Accession=PF00443.19; Description=Ubiquitin carboxyl-terminal hydrolase
MRESSPFLVSPVTIFEASSHHSKKDLALISSFTLFFSSQECQTKHWQIDHKFKCKQMKSLDLADKLSCGGEANSKKTSGFGRISLVPACKKISKGQVLFPYDEFLKLYNWKDLDVVPCGLMNCGNSCFANVVLQCLSCTRPLVAYLLGKDHSRECSVRHEDWCFLCELQCHIQRASGSLHPFAPTNILSHLPNIGGNLGVGRQEDAHEFMRFAIDKMQSACLDEYGGEKAVDLSIQETTIIQHIFGGRLQSQVQCTTCGMVSNRYDNMMDLTVEIQGDAESLERCLDQFTAVEWLDGDNKYKCDGCNDYVKARKHLSVQQAPNILTITLKRFQTGRFGKLNKRVTFPMELDLTPYMSCTDGSDLYDLYAVVVHLDMLNASFFGHYICYIKGYQGRWYKIDDCKVMVVDEEEVHAQGAYMLLYSRRTARPRSLLTVDESVKQQQQCKSLLSNGQSHMILADTTLNCESSLKIPEDMLQQDCESNNESLHEMGIKDQESDMDLRTSIEDDKFISNGNLRLPGSLVSHVLEDTRAPDSVLEGSVQLGPPLEGGPTTMSSVQFGNCTSEASSEHSFAEQCEVPASCIDSVDYMDVDTEAGAEVERCDEQRPVLNDSVGRPNNNTATPTANGVPGEPKPSFSSGFFDKPSRKRSSFTEEASAGSPRKLNGYCNGHISSLEQEVLCNSGSEKCNGDAPVTSSNGKFCAANVDMQSIDDSLHEDKRDVPSVSHGFEPRPYKLQSDSNNNCGRTCNGKPKACQGDMSFLPRGFLGRPSSRGISVKADDSLPFSTDASSSFGNGNSKSSNNSSSMGGLSPGFLTRHRRESTVIGTSSDIPMDKKSNGATVVPDHAEKKVSDCTTNGSSFQIRAASDHLD

SEQ ID NO: 50374 - protein, 728 aa, Zea mays
  Coding DNA Sequence Number=SeqID_8595
  Gene Ontology: Mol. function=RNA-directed DNA polymerase activity; Cellular component=intracellular; Biological process=RNA-dependent DNA replication
  Homolog annotation: Hit_ID=UPI00004C1733; Match level="QueryCoverage =86%, HitCoverage=46%, E-value=0.0, Identity=92%"; Hit description =UPI00004C1733 related cluster
  Pfam annotation: Domain name=RVT_1; Domain location=56-225; Score =149.2; E_value=1.1e-41; Accession=PF00078.17; Description=Reverse transcriptase (RNA-dependent
  Pfam annotation: Domain name=RnaseH; Domain location=455-582; Score =22.0; E_value=5.2e-07; Accession=PF00075.14; Description=RNase H
  Pfam module annotation: Pfam domain module=RVT_1::RnaseH; Domain location=56-225::455-582
MPGIPRDVAEHSLDIQAGARPVKQPLRRFDEEKRRAIGEEIHKLMTVEFIKEVFHPEWLANPVLVRKKGGKWRMCVDYTGLNKACPKVPYPLPRIDQIVDSTAGCETLSFLDAYSGYHQIRMKESDQLTTSFITPFGMYCYVTMPFGLRNAGATYQRCMNHVFGEHIGRTVEAYVDDIVVKTRKASDLLSDLEVTFRCLKAKGVKLNPEKCVFGVPRGMLLGFIVFERGIEANPEKIAAITSMGPIKDLKGVQRVMGCLAALSRFISRLGERGLPMYRLLRKAECFTWTPEAEEALGNLKALLTNAPILVPPAAGEALLIYVAATTQVVSAAIVVERREEGHALPIQRPVYFISEVLSETKTRYPQVQKLMYAVILTRRKLRHYFESHPVTVVSSFPLGEIIQCREASGRIAKWAVEIMGETISFAPRKAIKSQVLADFVAEWVDTQLPTALIWPELWTMFFDGSLMKTGAGAGLLFISPHGKHLRYVLRLPFPASNNMAEYEALVSGLRIAIELGVRRLDARGDSQLVIDQVMKNSHCRDPKMEAYCDEVRRLEDKFYGLELNHIARHYNETADELAKIASGRTTVSPDVFSRDLHQPSVKIDDTPEPEAPSAQPEVPSAQPEAPSARPEASSVQLEVPSAPKGEALRVEEERSGVTPNQNWKTPYLQYLHRGELPLDRAEARRLARRAKSFVLLGDGKELYHRSPLRRHPEATPTIGKGGSSSPKF

SEQ ID NO: 50375 - protein, 129 aa, Zea mays
  Coding DNA Sequence Number=SeqID_8596
MANRFQKIHELGSKGKQSNPLHRKIFSGTISGWIPILNKFKDPTEMMWIWLIKLPVLVRKFMRRRKHTRAISKEVDVEGDEGDGQDGNEASQVTRANCYSPTASANNRRPISRNSPWNSRAIADFQFIV

SEQ ID NO: 50376 - protein, 110 aa, Zea mays
  Coding DNA Sequence Number=SeqID_8597
KVVVEKTLDGGETLKITISDSNVGGRRRQATKCSDLFCASRTVRHEATNDAPMPMDEDNFEEDDLLGEDLVDYRVSPKHPDMDNVITFSTDYTIIGDDEPAVAQFELGPK

SEQ ID NO: 50377 - protein, 147 aa, Zea mays
  Coding DNA Sequence Number=SeqID_8598
MALLELPPPWLPLRRPQWLGGHPWWDLVCGSDGIGYIVVVPCAPKRHKLFSSCLSTGIRLITWFAFCSVFSCDRLLGRMRYCPPSGRQNNCAWELPVLRRRSMSTLSFVLRPSGLRARRPTYGMSVMTLRATPTISGKGVPTTRDPP

SEQ ID NO: 50378 - protein, 126 aa, Zea mays
  Coding DNA Sequence Number=SeqID_8599
MAGSKDSSDVSSSNIIEPTMETLSVEDEKEFEERKEQLTRKRRMPMNTYPKQPQPPAQIGGLAFNYMSGAIIRGTLKAPNSQMKDIAACAAPTAVPLDRVRLTGSQARPQAPLETPLRPTQGSDSG

SEQ ID NO: 50379 - protein, 121 aa, Zea mays
  Coding DNA Sequence Number=SeqID_8600
MCIYERESRFLEPLAFEILHRERANKVFEKRIHATARVLLIDPASTSLTLLLRRCLPYCFHPRCLLAKCKINQTKVREPLNSELKRTSYGFSKHYDLQRLKLHDTEAIVGTCSQSQGGQQG

SEQ ID NO: 50380 - protein, 222 aa, Zea mays
  Coding DNA Sequence Number=SeqID_8601
DLDPRKVSFSPRLTISIYLPHPFLLPYAGPYSPRGGHGSPLPAPARQRTVPDPPRRGAAPPLPYPARRRPSQHLPGAEALPPPLPRAAARPVPSITGAAARPRPSHPLSARRSPAPPLPGGAAARPCPCTTALAPAPARPAPPQLPLSWRLGPGAAPARFGPGVAPVWSSAPARRLGPLCAASRPRRDSRGDEDDGFGYDYGNGEDEAEEGDFQEFQDYDEF

SEQ ID NO: 50381 - protein, 124 aa, Zea mays
  Coding DNA Sequence Number=SeqID_8602
  Subcellular localization annotation: CTP_CleavageSite=40; ConfidenceScore=5.50e-01
MAHRDGFSPSVSPDPRRQFPTAHRNRWGRRIGTRSTRRAPASSGRPVGPTLVPQIADIGAEVELGSGCTNHAKLVTMRLGKNPTGGPSMPVEGGISARGAVRFTEDQTVGPKGSERGSAGDGWA

SEQ ID NO: 50382 - protein, 676 aa, Zea mays
  Coding DNA Sequence Number=SeqID_8603
  Gene Ontology: Mol. function=DNA-dependent ATPase activity; Cellular component=nucleus; Biological process=DNA replication initiation
  Homolog annotation: Hit_ID=Q948Y5; Match level="QueryCoverage=99%, HitCoverage=99%, E-value=0.0, Identity=79%"; Hit description =Replication licensing factor MCM7 homologue
  Pfam annotation: Domain name=AAA_3; Domain location=373-501; Score= -19.3; E_value=0.042; Accession=PF07726.2; Description=ATPase family associated with various
  Pfam annotation: Domain name=AAA_5; Domain location=373-507; Score= -18.5; E_value=0.046; Accession=PF07728.4; Description=ATPase family associated with various cel
  Pfam annotation: Domain name=DUF1610; Domain location=163-185; Score =11.0; E_value=0.1; Accession=PF07754.2; Description=Domain of unknown function (DUF1610)
  Pfam annotation: Domain name=MCM; Domain location=315-574; Score =476.3; E_value=3.6e-140; Accession=PF00493.13; Description=MCM235 family
  Pfam annotation: Domain name=Mg_chelatase; Domain location=339-524; Score=-144.8; E_value=0.0094; Accession=PF01078.11; Description =Magnesium chelatase, subunit ChlI
  Pfam module annotation: Pfam domain module=AAA_3::AAA_5::DUF1610::MCM: :Mg_chelatase; Domain location=373-501::373-507::163-185::315 -574::339-524
MKNPDFAADKALAKDFLSNFTGPHGEPKYLNILQDVANRKIRAVQIELDDLFHYKDVDEEFLQRVTENTRRYIGIFAEAMDEIMPEPTEAYTVDEDQDILMTQRVDEGADGGADGTDPLQKMPPEIKRFFEVYIKAFSKVTPLTIRQVKASNIGQLVKISGIVTRCSDVKPLMQVAVYTCEECGFEIYQEVTARVFMPLIECPSQRCKLNKAKGNLILQLRASKFLKFQEVKLQELAEHVPKGHIPRALTVHLRGELTRKVAPGDVVEMSGIFLPMPYYGFRAMRAGLVADTYLEAMSVTHFKKKYEEYDLKGDEQEQIDRLAEDGDIYSKLARSLAPEIFGHEDVKKALLLLLVGAPHRKLADGMKIRGDLHICMMGDPGVAKSQLLKHIINVAPRGVYTTGRGSSGVGLTAAVQKDPVTNEFVLEGGALVLADMGICAIDEFDKMEESDRTAIHEVMEQQTVSIAKAGITTSLNARTAILAAANPAWGRAYISAARRVIPSVPRELEEYIATAYSSIRQEEAKSNAPTSYTTIRTLLSILRISIALARLRFSETVAQSDVDEALRLMQMSKYSLYSDDRQRSGLDAISDIYSILRDEAARTSSMDVRYAHALNLISRKVHNSVYGLIADKLVGAKMSESQGYSEAQLKECLEEYASLNVWQIHPSTFDIHFIDA

SEQ ID NO: 50383 - protein, 80 aa, Zea mays
  Coding DNA Sequence Number=SeqID_8604
MAKCNPSLCAGCACVCCVVWTRTCHRLGVLLPMALLWARHHLEVIEAIVSNLKIEDDDVIDSDEGDIDGLNVDDQSYFDM

SEQ ID NO: 50384 - protein, 102 aa, Zea mays
  Coding DNA Sequence Number=SeqID_8605
MGIDWTMPLPRELIEDLKSSRSSGKDGSSKGFNHQFYSCVKWPTINFNGKNFVEERMEKALAESDKIEAESNDADAEDNKARKSFVISVSSHVVLCNLYCCR

SEQ ID NO: 50385 - protein, 155 aa, Zea mays
  Coding DNA Sequence Number=SeqID_8606
MLLAHIKAMIRNANGDSNTMELLTAAGGQWRELATEDSGFAVSGEEISSSGAPRREIPPRRPHHQPGRVVANHQRSRAHPGSPSALQLAPTTEIPGGGKLPRGRQWRDWVHWVGENEETATPDLYSGSEVRAKHEERDPRRGSRRSAATASERRI

SEQ ID NO: 50386 - protein, 131 aa, Zea mays
  Coding DNA Sequence Number=SeqID_8607
MSLFYKYLYSTRLSHGLPKVWSTDTVVNVEGDGHERWVKLLRRGVRRGTGGAAALWPEEVGGRLLSIVIWTNGNRLVDNTVAFRSRLLILDEWVKNRYCKMRSMKDATMSSERSKLSSLSQLWLWRIVVII

SEQ ID NO: 50387 - protein, 162 aa, Zea mays
  Coding DNA Sequence Number=SeqID_8608
  Subcellular localization annotation: CTP_CleavageSite=88; ConfidenceScore=5.43e-01
MNRRLMQVTAMQWMCQGTWRKAVKWLSPVNSSESAVPPAAPAATPRRGRLSLRSPPPRLPPPTPGRGRSRPGPICHRYPRFGLRLAPSADPGPARRRPLHSHRPRCGCPDPSPHPPRPPPTPALPGVPVTDASAPPATRCDRRPRHAQARRQEVSQLTALTA

SEQ ID NO: 50388 - protein, 130 aa, Zea mays
  Coding DNA Sequence Number=SeqID_8609
MRSSPRPFDDVYSDEPPLAARCSKTLPVGSYVKLTEVSSEEVDSSDSSEEWSGGDGDGKGDYSSDNDDEEDDSSKGDDGKGCGDDNSDDGEDDGSKGDDGEGDGDGGSGDGNKGDGNGRSGKAGSIMSLV

SEQ ID NO: 50389 - protein, 132 aa, Zea mays
  Coding DNA Sequence Number=SeqID_8610
  Subcellular localization annotation: CTP_CleavageSite=50; ConfidenceScore=5.17e-01
MYSVRWFSNARAQAGQRQRWAPSTRWARSRARYARLDVRLGLGRAAGLLRAALGWGTMLAGLARAAGLAAGAGAGPRRRERAGPHDARGPTRGKAGAALRAGPRRGGPSGGEGREGRGAAGPAELGQGGEVG

SEQ ID NO: 50390 - protein, 66 aa, Zea mays
  Coding DNA Sequence Number=SeqID_8611
MTFQTEAHMIEVVSVMVVPRTSTFQNLVSTMSNQRLPIGDEPKKDFDAKPYAKQTGWEVTPKRVGA

SEQ ID NO: 50391 - protein, 198 aa, Zea mays
  Coding DNA Sequence Number=SeqID_8612
  Pfam annotation: Domain name=TMEM14; Domain location=79-171; Score =70.7; E_value=4.8e-18; Accession=PF03647.4; Description =Transmembrane proteins 14C
MTRLPLLRLCATRSLGGSPQEATRTPQLVDDDFLVSLLRPRVASDPSEKTKQTERRKATRKRRLSARSGGAPILKMHDFCFTIPYGFAVLAGGVLGYLRRGSTASLAGGAGAGALLLLAGFVSLKAFEKRRNSYVALALETRVLRFLPPPVVLIGHLPPTPSTGPWNGNAATKVIVVDRCLMVIALVFDEGAGRFPVG

SEQ ID NO: 50392 - protein, 476 aa, Zea mays
  Coding DNA Sequence Number=SeqID_8613
  Gene Ontology: Mol. function=transporter activity; Cellular component= integral to membrane; Biological process=transport
  Homolog annotation: Hit_ID=Q6Z1Z0; Match level="QueryCoverage=92%, HitCoverage=90%, E-value=1e-148, Identity=64%"; Hit description =Putative sulfate transporter-like
  Pfam annotation: Domain name=Sulfate_transp; Domain location=126-468; Score=-137.8; E_value=0.011; Accession=PF00916.10; Description =Sulfate transporter family
MATTVSPDPEAALAGVKEPRAPRSLLARARANLAFQSVWAELNGAMGDLGTYIPIVLSLALARHLDLGTTLVFTGIYNAVTGLIYGVPMPVQPMKAIAATALSDSSFGVPEIMAAGILTAAFVLLLGVTRLMQLVYWIVPLPVVRGIQLAQGLNFAMAAVKYIRYEQDLGRGKSLGRRPWTGLDGLVLAIACICFILLVNGAGSESGSRRGRKRRRAMAIREQGAHPERQEEEEEEEEERQGGGGWRSTVRRAAAVVPSAVIVFVLGVALAVARHPAAVRELRAGPSRVRVVRISREAWKQGFLKGAVPQVPLSVLNSVVAVCKLTRDLFPEKEASATSVSVTMGGMNLVGCWFGAMPCCHGAGGLAGQYRFGGRSGGCVAALGALKLALGLVLGGSMLRVLVEFPVGLLGVLLLFAGVELGAAARDMASKAEALVMLLCTAVSLVGSSAALGFLCGMVAHGLLMLRAWAMGVRLT

SEQ ID NO: 50393 - protein, 148 aa, Zea mays
  Coding DNA Sequence Number=SeqID_8614
  Homolog annotation: Hit_ID=Q6K7R4; Match level="QueryCoverage=43%, HitCoverage=9%, E-value=7e-20, Identity=66%"; Hit description =Putative ABC transporter
MTSPMVLHRIWWLRQSQANIQWACEDVARQQQEIQNQAASMLKHEASLKRDDKVQYQLHVAEMEAVSVAMPPVYVNHRNDGGPAVKDIHMENFSVTIDLIQEATLTIVFGRHYVDAYLSAPKLSRMKDLRASVFIVTLQGIYVELLLA

SEQ ID NO: 50394 - protein, 443 aa, Zea mays
  Coding DNA Sequence Number=SeqID_8615
  Gene Ontology: Mol. function=sequence-specific DNA binding; Cellular component=nucleus; Biological process=regulation of transcription, DNA-dependent
  Homolog annotation: Hit_ID=Q8W4H1; Match level="QueryCoverage=56%, HitCoverage=47%, E-value=2e-39, Identity=40%"; Hit description=GATA transcription factor 28
  Pfam annotation: Domain name=GATA; Domain location=7-54; Score=43.0; E_value=1.1e-09; Accession=PF00320.17; Description=GATA zinc finger
MGKQGPCRHCGVTILMDFSWKNGGAGTPLWRNGPPDKPVLCNACGSRWRTKGSLANYTPMHRKDDIDDDEPRVSKLKPPTSKLKSQKKKPNHIIMENGPFSGQNFRKMGDVDQSYRSSSGSAVSYSESCAPYGAADASEMTGSAQSHAWESLVPSRKRSCVTRPKPSPVEKLAKDLNFIMHEEQLYYPSGSSEEDLLYHSETPVGSFEMGSGSVLLRHPNSKSLEKESEASSIPADNKSYITSESYSGSASFAIHNGNKAAINLNASNARLKKSPLHMEDNARRGVGSISGPEGFTKSTMKPLKRPRDTQFQIDAVTQRRVLICFACKHAELEGTMRSPLRGLKSGALAQFESSSLPKSGYTTKDSTCTGGALNLFMLPPEKLLVVPPQYVDPDQDLLLEIPLNARHPEAELLCQPSQLMSSISRSSTSMGGVAEGEGCLKQP

SEQ ID NO: 50395 - protein, 176 aa, Zea mays
  Coding DNA Sequence Number=SeqID_8616
  Gene Ontology: Mol. function=RNA-directed DNA polymerase activity; Cellular component=membrane; Biological process=RNA-dependent DNA replication
  Homolog annotation: Hit_ID=UPI00004C1732; Match level="QueryCoverage =98%, HitCoverage=13%, E-value=2e-65, Identity=65%"; Hit description =UPI00004C1732 related cluster
MAAGFIKEVFHPEWLANPVLVRKKVGNGGCATYQRCMNHVFGEHIGRTVEAYVDDIIVKTRKASDLISDLEVTFRCLRAKSMKLNPEKCVFGVPRGMLLGIIVSERGIEANPEKIATITNMGGNQRFKRSTKGYGMPCGSEPLLSHLGEKGLPLYRLLRKAEHFTWTPRPKKPLET

SEQ ID NO: 50396 - protein, 131 aa, Zea mays
  Coding DNA Sequence Number=SeqID_8617
  Subcellular localization annotation: CTP_CleavageSite=37; ConfidenceScore=5.52e-01
MAHGPTNPTSAHLANSSVQPNPWRSGADTLGPAASLSCVRVVAGEWTRDRDSSICNSPSLPCGPLWPGPPTSPRPRGPSPSPVMAGSLNHLAHGRCADSPDYKAWTQTPLTPVFVLHHSARNLRRHYHREG

SEQ ID NO: 50397 - protein, 254 aa, Zea mays
  Coding DNA Sequence Number=SeqID_8618
  Gene Ontology: Mol. function=protein-tyrosine kinase activity; Cellular component=spindle pole body; Biological process=regulation of progression through cell cycle
  Homolog annotation: Hit_ID=Q949F8; Match level="QueryCoverage=90%, HitCoverage=83%, E-value=5e-57, Identity=56%"; Hit description=PREG -like protein
  Pfam annotation: Domain name=Cyclin; Domain location=13-201; Score =113.8; E_value=4.9e-31; Accession=PF08613.1; Description=Cyclin
  Pfam annotation: Domain name=Cyclin_N; Domain location=35-202; Score=- 19.3; E_value=0.0073; Accession=PF00134.13; Description=Cyclin, N -terminal domain
  Pfam module annotation: Pfam domain module=Cyclin::Cyclin_N; Domain location=13-201::35-202
MAGDEEDHLADAPRVVGVLSALLERVVERNDAVADELAAGTESAAPPSAFRATARPDISVRSYMARIARFAGCSPACYVVAYVYLDRLLRRARSAPAVDSYTVHRLLITAVLAAVKFMDDVSIVFAFLLQYSMYYFRIISIKESRRMHKQSKFLKEQSSPTCCLNSNRCYNNAYFARVGGISLSEMNYLEVDFLFAVGFDLNVSPETFGHYCTVLRAEMLYLELEGPPPPAASTSLHRCCLSEDDDGSSSTSSS

SEQ ID NO: 50398 - protein, 819 aa, Zea mays
  Coding DNA Sequence Number=SeqID_8619
  Gene Ontology: Mol. function=subtilase activity; Cellular component =cell wall; Biological process=proteolysis
  Homolog annotation: Hit_ID=Q43546; Match level="QueryCoverage=96%, HitCoverage=94%, E-value=0.0, Identity=52%"; Hit description=Serine proteinase
  Pfam annotation: Domain name=DUF1034; Domain location=713-812; Score=- 16.9; E_value=0.073; Accession=PF06280.2; Description=Domain of Unknown Function (DUF1034)
  Pfam annotation: Domain name=PA; Domain location=386-500; Score=42.2; E_value=1.8e-09; Accession=PF02225.12; Description=PA domain
  Pfam annotation: Domain name=Peptidase_S8; Domain location=127-646; Score=80.3; E_value=5.9e-21; Accession=PF00082.12; Description =Subtilase family
  Pfam annotation: Domain name=Subtilisin_N; Domain location=29-124; Score=12.6; E_value=0.0089; Accession=PF05922.7; Description =Subtilisin N-terminal Region
  Pfam module annotation: Pfam domain module=DUF1034::PA::Peptidase _S8::Subtilisin_N; Domain location=713-812::386-500::127-646::29-124
MAFLKPSLVFCSILTFLSLNWGPSHVFAKVYMVVMEDDPVISYKVNRKHVMRGDEAQKYKRVATTKHDSFLDSFLPVGSYKKLYSYTHLINGFALHAESEKTVRILSGAKGVRLIQEDIKMAKMTTHTPSYIGATGVWPLLGGAENSGNGVVIGMIDTGIDPKNPSFATSNTSSQAEPPPASFKGICRTGNRFPPDSCGGKIVGARWFARAAQATGEFNATIHYESPYDPDGHGSHTASIAAGNFHTPLISRGYNFGYASGMAPGARLAIYKAAYPFGGYMSDVIAAVDQAVEDGVNVISLSMAPSSVSSGPASFLNLLEAQLLLATKAGVSVVQAVGNAGPDANTVVSFSPWILSVAASMTDRTYRKSIVIGNGKVFSCGVLSAPTPGETMYPLAWADDVVNENSTDGSVNCQDPRVFIRPLVQGKVIICMFDSSNYYEDDPNLAGVIHTIERIGAAGVVVTDRSSGDIDIDYEPTFPTTVPSAIVLRGSDMRALLRYYNNNTVRDERGNVVSFGATIRITEGRRASYSGEAPVVADYSSRGPDVENAQMQPAEVLKPNVMAPGNLVWGAWSPTSNALPEIQGEEYALLSGTSMAAPHVAGVAALIKQRHPTWSPAMVMSAIMTTADVTDRSGRPLMARSDSGSVDPATPFDMGAGAVNAARALDPGLVFDAGYSDYLRFLCAVPGVDEAALLRAVGAPCPAPAPPRAGAPRWCSDLNAASVTVANLLGSRRVDRRVTSVGSQNETYMAYVRAPGGVAVRVAPSQFAIAPGATRALRIVLNTTAPGNAFSFGEVVLKGDKKHRVRIPLAVYPAAALSP

SEQ ID NO: 50399 - protein, 1001 aa, Zea mays
  Coding DNA Sequence Number=SeqID_8620
  Gene Ontology: Mol. function=histone-lysine N-methyltransferase activity; Cellular component=nucleus; Biological process=chromatin modification
  Homolog annotation: Hit_ID=Q8L820; Match level="QueryCoverage=88%, HitCoverage=100%, E-value=0.0, Identity=96%"; Hit description=SET domain-containing protein SET104
  Pfam annotation: Domain name=Pre-SET; Domain location=723-820; Score =117.4; E_value=4e-32; Accession=PF05033.6; Description=Pre-SET motif
  Pfam annotation: Domain name=SET; Domain location=822-978; Score =159.8; E_value=7e-45; Accession=PF00856.18; Description=SET domain
  Pfam annotation: Domain name=YDG_SRA; Domain location=551-699; Score =132.0; E_value=1.6e-36; Accession=PF02182.8; Description=YDGSRA domain
  Pfam module annotation: Pfam domain module=Pre-SET::SET::YDG_SRA; Domain location=723-820::822-978::551-699
MTEVAIRQSLPERGLRRAGGRPLPEGPSVFMVCSEDACQPCLGALGRDLASARVEWGGTQPASRTSASSANSGRKSSTTPIPEPFRRTAGRFHLQGQGILEGVCWWVRAGQRRRWMETGAAAAPASRADGVRRCKILVPWRFQPGFVRQPLKQAANDAAVNGDGGNTAGAPDAKSCRADGAASDGGETNVFRDAKKFGSGRATRGKNGEVDGGEEHSERCTSSQSLKSPDVENGGRPGPGDACNLGESVRGGWVKSSPLEGTGNSRGANGGVEAGEDYNLGSSNCDASWKDARTQEFRGAGDGAACDPEVIESNVGAEKCFAKGLKKPFMDQTGSKSNGSSAPGLESEDPEGNVGLEDSSYQAAKGCSMGDGAAKENEATANGCSSATPGSIGNGTYVRKGRKAAVPWRFQARYKRSFSDAFGSNNESPDLPAYMFDSSSTQCTPATRSTVRCYASAHSGVRVSAMNNFSVKGDTECKKRKTNNDYQDESMLNNGGVVVRERIMRSLQDLRLIYRDLLDEEDNSREKVLNVRPDLKAYRIFRERFCTDFDDEKYIGSVPGIYPGDIFHLRVELCVVGLHRPHRVGIDCTKKDDGTTVAVSIVSCAQSHDIKYNLDAFVYTGLVAVAVNQRIEGTNLALKKSMDTNTPVRVIHGFTTFNGKKKFPAYIYGGLYLVEKYWREKEHGDRYVYMFRLRRMEGQKHIDIQEILQTGNSGSNDNVIIKDLSRGLERVPLPVVNKISDERPMPYCYISHLRYPRNYRPTPPAGCNCVGGCSDSNKCACAVKNGGEIPFNDKGRIVEAKPLVYECGPSCKCPPTCHNRVGQHGLKFRLQIFKTKSMGWGVRTLEFIPSGSFVCEYIGEVLEDEEAQKRTNDEYLFAIGHNYYDKSLWEGLSRSIPSLQKGPGKDDENETGFAVDASEMGNFAKFINHNCTPNIYAQNVLYDHEDISVPHIMFFACDDIRPNQELAYHYNYKIDQVHDANGNIKKKKCLCGSVECDGWLY

SEQ ID NO: 50400 - protein, 125 aa, Zea mays
  Coding DNA Sequence Number=SeqID_8621
MATAVGPPGAAICLRRGSVACSTTWEFNGASDRSSPARSWHAPDSRSWWEMDMAQSAGPGVGGEELAPPRPVAWVESREEERIHAVHLLIDGSDLALRALCPIELRPWICDPMITNASGYFKSVP

SEQ ID NO: 50401 - protein, 128 aa, Zea mays
  Coding DNA Sequence Number=SeqID_8622
  Gene Ontology: Cellular component=endoplasmic reticulum; Biological process=ER to Golgi vesicle-mediated transport
  Homolog annotation: Hit_ID=Q6ZBW9; Match level="QueryCoverage=56%, HitCoverage=60%, E-value=2e-21, Identity=69%"; Hit description =Putative Bet1/Sft1-related SNARE
  Pfam annotation: Domain name=SNARE; Domain location=25-71; Score =14.5; E_value=0.015; Accession=PF05739.9; Description=SNARE domain
MGHVMILVFFVNLVSFCLMSVWTFSKLSGDIHEEVETHNRMLDRMGNDMDTSRGFLSGTVDKFKMVFETKSSRRMGTLVASFVALFLLVYYLTSYLQFKFELSKEIQLNELNLIGIANNLTNVPELDM

SEQ ID NO: 50402 - protein, 330 aa, Zea mays
  Coding DNA Sequence Number=SeqID_8623
  Gene Ontology: Mol. function=binding; Cellular component=cellular _component; Biological process=hypusine biosynthetic process from peptidyl-lysine
  Homolog annotation: Hit_ID=Q2QXB3; Match level="QueryCoverage=99%, HitCoverage=97%, E-value=1e-121, Identity=73%"; Hit description =Deoxyhypusine hydroxylase-A
  Pfam annotation: Domain name=HEAT_PBS; Domain location=112-138; Score= 30.2; E_value=7e-06; Accession=PF03130.6; Description=PBS lyase HEAT -like repeat
  Pfam annotation: Domain name=HEAT_PBS; Domain location=203-229; Score= 12.6; E_value=1.5; Accession=PF03130.6; Description=PBS lyase HEAT -like repeat
  Pfam annotation: Domain name=HEAT_PBS; Domain location=234-260; Score= 21.5; E_value=0.003; Accession=PF03130.6; Description=PBS lyase HEAT -like repeat
  Pfam annotation: Domain name=HEAT_PBS; Domain location=267-293; Score= 30.9; E_value=4.3e-06; Accession=PF03130.6; Description=PBS lyase HEAT-like repeat
  Pfam annotation: Domain name=HEAT_PBS; Domain location=30-56; Score =5.0; E_value=21; Accession=PF03130.6; Description=PBS lyase HEAT -like repeat
  Pfam annotation: Domain name=HEAT_PBS; Domain location=79-105; Score =34.1; E_value=4.8e-07; Accession=PF03130.6; Description=PBS lyase HEAT-like repeat
  Pfam module annotation: Pfam domain module=HEAT_PBS::HEAT_PBS::HEAT _PBS::HEAT_PBS::HEAT_PBS::HEAT_PBS; Domain location=112-138::203 -229::234-260::267-293::30-56::79-105
MTATSAFESSPEMERFLCERLLNTEQPIAERFRALFSLRNLRGDAPRRALLQGLDFGVSVRYILVSTKERAARDPSNLLAHEAAFALGQMQDAEAIPALVAVLKDLSLHPIVRHEAAEALGAIGLEKSIPVLEESLTTDPAVEVQETCELALGRIEENKKVNGAESTTTSPFLSVDPALPSKHGLSVDQLRGLLLNEQESMYQRYAALFALRNDGGDAAVSAIVAALSVKSALLRHEVAYVLGQLQNKAASDALSTVLKDVCEHPMVRHEAAEALGSIADQESIALLEEFAKDPEPIVSQSCEVALSMLEYERSGKSFEFLFLQTPHVQS

SEQ ID NO: 50403 - protein, 186 aa, Zea mays
  Coding DNA Sequence Number=SeqID_8624
  Homolog annotation: Hit_ID=Q9FIY6; Match level="QueryCoverage=16%, HitCoverage=22%, E-value=2e-07, Identity=74%"; Hit description =Arabidopsis thaliana genomic DNA, chromosome 5, TAC clone:K9D7
  Pfam annotation: Domain name=zf-C2H2; Domain location=54-76; Score =21.2; E_value=0.0037; Accession=PF00096.16; Description=Zinc finger, C2H2 type
MELGLTVDRKKDDEGAPRASSSSSPSCEADDDDLPKKQQQRPSGDDDEGTRQPYKCTFCRRGFPTAQALGGHMNVHRRHRGRPAAVSTGAAAGSSAASVYDYDQPCSTTTTPVLAFARQATTTQRRPHGLPLFVARGDCCAFFSSALAPPPETTYHKIYALLTLNGMVGEEQDLESGLEVRDHERV

SEQ ID NO: 50404 - protein, 462 aa, Zea mays
  Coding DNA Sequence Number=SeqID_8625
VKIRPAEGTSKGKTVVAGVNGDVHGSGEVMSSSELRETSLRMLKVAGGRWHRNDPIPWAAGDDYFTSCLARELRIFPYGRNIGAFVSAVMVKDRQDVQRKKRKVPLRLVDPCRDAKVVRPRAKGVAPSAMMPTSAVPAAAASLPSPPHITETAVSRTGGIGQELSVDEYLVGGVTMFDTQTGLPPAGAEVGQLTVVPATMPAGLVGAAKGDTWTSLDPWSKFCAAADGGGELASATAAAGVAASVARQLRYVSYYYYYYLTEFGKFRCQVTAFADQVALGALTSQLVSERKQLEGRVECLRTHHTEAIRDKLVAENKSRNLLEKTAPFDKSGEEVGTRFLGWLQDELESLPSIVMGLMSYASLVTCEGAVNALSCEGCRHFETFDRFNEEFNAGVFQTEDDVLKRSVGALYDRMWDPHGRGVVRERANRALAHAMREEEVEDLAGLEGSAARKDDAVETNSS

SEQ ID NO: 50405 - protein, 370 aa, Zea mays
  Coding DNA Sequence Number=SeqID_8626
  Gene Ontology: Mol. function=binding
  Homolog annotation: Hit_ID=Q10PF0; Match level="QueryCoverage=77%, HitCoverage=16%, E-value=4e-23, Identity=43%"; Hit description=TPR Domain containing protein, expressed
  Subcellular localization annotation: CTP_CleavageSite=30; ConfidenceScore=5.00e-01
MPLSAASSILLLHALVSLTLLLGDMTTTTPAAAVPAAVDVNTTAFTMHDSAASASPHGAENFEMYYCFLCTERHPLLIHYCPIYWDECHLNCWDDDTPTSMVTVQGKECYVMKLYMSGRYVIVQRLSCDGVASCFLTCGGGELADKVAAGAMGTTASASAVQLQGNALPFELCGTQQVPASILLLLHACSLSLLAAARVPDPVEHGDVNTAMLTNGSASATPSSPDSSSNGNFDMYFCFLCSGRDPLLIHHCPIYWDECHLICDDDMSTATPTPPAVAVSSSSSSRPVPMVQVQGDDDCYVMKLYMSGRYVIVEHRPCKYIAWCFLTCGGGELAAADRKAVTATAIQGTSLPAELCGTQVVNAPPSAAAG

SEQ ID NO: 50406 - protein, 310 aa, Zea mays
  Coding DNA Sequence Number=SeqID_8627
MSSPGVCNEPSVRADYHKLFDAAQGVTEVKFLMYLKRIVARLCQLATFTNNLRLNVQLLNQEQKNRFNIWVLHAVVANDLFTDDSFVFSKAVGKIKDAISALPVATVDDDNDEAAALAAASKTDVATDNEAGHGVPAAASDSVVDDGAHAVALEPEEESSDPFGLDGLLEHRPKKTSGRAREKAVAALNRKTVEEEAKRVLKSQREALLKCLEIAARRYRIPWTQTAIDILAKQAYDDAARFTRRQRDAIAKLWNSIKEQQIRRKQGKSVSGKLDVNAFEYLQEKYSREKMSIRHSVGGGGDRRATQWLG

SEQ ID NO: 50407 - protein, 68 aa, Zea mays
  Coding DNA Sequence Number=SeqID_8628
MAAELPLLARPLLLPAGPSSCFPSVEHAPASYSPSSPLRSDFSLGHVIAQLADGQAVRLRLAHHDANI

SEQ ID NO: 50408 - protein, 228 aa, Zea mays
  Coding DNA Sequence Number=SeqID_8629
MPRNMVNRFLGVTAGGAGIHVEVLDDVPSASLLAGQEITRAVSHASSTFEGGLIREDISVPDVTCEGYPALEGTIEDNLAPEGVIEGGPTPKGAAEGDPAAEGPELGSSSAASMDVHVGSPSVQSEEAAVMSLDLPTSLVGLATLEVSNSGVEDPLRVVGAEVPLGVALSMRFNPSLVLKPALDISSTSVSPFDGSSTPPALGFHLFLSSLQMYLQFEGNESTSVTQK

SEQ ID NO: 50409 - protein, 177 aa, Zea mays
  Coding DNA Sequence Number=SeqID_8630
  Gene Ontology: Mol. function=transcription factor activity; Cellular component=nucleus; Biological process=regulation of transcription, DNA-dependent
  Homolog annotation: Hit_ID=Q5VRR2; Match level="QueryCoverage=69%, HitCoverage=73%, E-value=1e-35, Identity=63%"; Hit description =Putative AP2 domain containing protein RAP2.1
  Pfam annotation: Domain name=AP2; Domain location=46-110; Score =130.9; E_value=3.6e-36; Accession=PF00847.10; Description=AP2 domain
  Subcellular localization annotation: CTP_CleavageSite=38; ConfidenceScore=5.15e-01
MEVDATAFCPPPQPAPAASPASKPPAPVLGAGGAVAPVAGHGRGGGRQYRGVRMRKWGKWVAEIREPNKRSRIWLGSYSTAVAAACAYDTAVFCLRGRSARLNFPDQLDGAAVADNPEDGAGLTAAAIRKKAAEVGARVDALHCGGGTSPQPLSFHRRRPKNPDLNREPTPETSDDE

SEQ ID NO: 50410 - protein, 85 aa, Zea mays
  Coding DNA Sequence Number=SeqID_8631
MAAKQATEDPGVQQEEIAGHELVEGKGSREVPYTSHELPPLVKSRSFKRSPTMRNMSLSRWFSKGGGISGRKKKKPGGFEKSETQ

SEQ ID NO: 50411 - protein, 93 aa, Zea mays
  Coding DNA Sequence Number=SeqID_8632
MTRNSRQQSFHKHGMAASVEYYLPRSWVRLEPRTTRLRVAPMHHQGLGAGELRVLHKVPHDVGGERNKLEGWSTSYIAVEARSEGISPKWFVN

SEQ ID NO: 50412 - protein, 130 aa, Zea mays
  Coding DNA Sequence Number=SeqID_8633
  Subcellular localization annotation: CTP_CleavageSite=44; ConfidenceScore=5.04e-01
MPVTLRPICFYAMTGGWCISWINSHLGCRHRVPRPRWGAVSRRRCTTGEKFAQCWSPSPPREDAIRRGEHWRPRTQPPKSKTPMNPAHGDSGVSGIEALPLCSPLEAGSAAWARIAHDGGRISLLPNGTS

SEQ ID NO: 50413 - protein, 107 aa, Zea mays
  Coding DNA Sequence Number=SeqID_8634
MASLVRPDRFQTEEALDTGLLPFCSQSRSHRRIRLPTIGVCWEWCRRPASARHCRGGAVGSPGSVCHYRGSVAGPPGSICHCRGSTIGPPGSVCHYRGSAAGPPGSS

SEQ ID NO: 50414 - protein, 169 aa, Zea mays
  Coding DNA Sequence Number=SeqID_8635
MLTRCTDRRREARSGERDAAKGVAAATCCGISSSTPGARRRGDPRPLLQVRGHGPQDEHVRRSSASAVQAPRRGWQGQSREERRPAAQGQWSQASEGELDHIREGRTLDEAGTTGKHLFPSTMNRHGEGEGALEKMGEESSAATMAGSWSRGRRRGRRPRGALGLGGHG

SEQ ID NO: 50415 - protein, 123 aa, Zea mays
  Coding DNA Sequence Number=SeqID_8636
  Homolog annotation: Hit_ID=Q7XJ37; Match level="QueryCoverage=84%, HitCoverage=99%, E-value=2e-23, Identity=55%"; Hit description =Apoptosis-related protein
  Pfam annotation: Domain name=dsDNA_bind; Domain location=26-116; Score=60.9; E_value=4.3e-15; Accession=PF01984.10; Description =Double-stranded DNA-binding domain
MEMGIEKKIEKVWTVEREADPELEAIRKRRMEELMAKHGGGGANQQNASQQKAQEDAKQEAEERRQMMLAQILSSEARERISRIALVKPDKARGVEDVLLRAAQTGGISEKIQRRRSVLDDDD

SEQ ID NO: 50416 - protein, 224 aa, Zea mays
  Coding DNA Sequence Number=SeqID_8637
  Subcellular localization annotation: CTP_CleavageSite=91; ConfidenceScore=5.26e-01
MPPGLAIATVAVATAALVIALAIVVIAFAIAFSIVAAVVVAAAFATVPVAAASSPSSPLPLSSSSPLLSSPSPLSTSPPLHSSESEESSTSSEEASSESSDPPSLVRSMDHQYARAAMDSPPRGTLGRRAIILESDLLRVLRVLEVQLGRTQGALALLISTVGPCLALLASVHGRAEGGEMKKKEKASDKERVEKAARAGGLFIEAGRRPSTSYPDHRTVTRIQ

SEQ ID NO: 50417 - protein, 121 aa, Zea mays
  Coding DNA Sequence Number=SeqID_8638
MVGPGRGHRQQGKRRSGEQLAGEVEMARGTERRGPGRFLAAAGKRKRGRHGHGGKELLLPALRRGCCCSPIGSERQGESLPGRLWASVEGGGMDAMAVGLLLAGRRGGTREEEADACCSIV

SEQ ID NO: 50418 - protein, 174 aa, Zea mays
  Coding DNA Sequence Number=SeqID_8639
MAGRGDLATHRPNPSETTPKERGEGGEITRAAIPVFYREGDPDDVKARFLGLVRRRRAIQRSRGEDNPGRSLRWLQEITEEIEDYSLLFLVYNLEYYSEAQIYVVRNNDLQSPTPWHPNLSTIRHELKQRRYLREGGPYRSIGQRRSLVIDEGRHTMSHPTLAVDGDSLGLPME

SEQ ID NO: 50419 - protein, 106 aa, Zea mays
  Coding DNA Sequence Number=SeqID_8640
MASVGDFRRTAKTGHGDGRHLPLMASNNGKDEREIRASGEGDGRSTSLRRRRRESRSRAAVTKWRSALQLSHGVVVVIRFVHAGKGLEDKQGWEGPHMADGLDSFF

SEQ ID NO: 50420 - protein, 208 aa, Zea mays
  Coding DNA Sequence Number=SeqID_8641
MQESLAGPPSQQNPPEGLPTLTTPLLPLPLSADGGDEPKPNRYLCYNHDRAFRSNGRDFLSQLLRTRSPAPGGATRASASDQPASSQNSGSRIPTRDRVAKNGGNDTTNIMHEILPLTGVPESQPNDKTWSAVKKKLRREINRTSQPPVHNLRATESFTTKRPPPPAPISATTDRWWRRDGFLHAHTRDEIANDTQQCSRGWGGGVAY

SEQ ID NO: 50421 - protein, 85 aa, Zea mays
  Coding DNA Sequence Number=SeqID_8642
MADEAIRQNEKEYHVALEEERRAEEATERERLITKLFPPSKSYNPEADPALKGALDVIRITNEAVDKAVDRLLNKATEKILKEDD

SEQ ID NO: 50422 - protein, 111 aa, Zea mays
  Coding DNA Sequence Number=SeqID_8643
MAELHVPLLQGRATHLPAPFSPSALVVGALEVFHGVASLFMAQKISQPMLSLCCPWRLLPFLKQDPTRTRQQQELSPSHGRELPNWPPSIPRLDPSLQASSNFGQPPLILP

SEQ ID NO: 50423 - protein, 648 aa, Zea mays
  Coding DNA Sequence Number=SeqID_8644
  Gene Ontology: Mol. function=protein serine/threonine kinase activity; Cellular component=membrane; Biological process=protein amino acid phosphorylation
  Homolog annotation: Hit_ID=Q8LLI1; Match level="QueryCoverage=95%, HitCoverage=97%, E-value=1e-129, Identity=49%"; Hit description=S -locus receptor-like kinase RLK10
  Pfam annotation: Domain name=B_lectin; Domain location=76-188; Score =128.5; E_value=1.8e-35; Accession=PF01453.15; Description=D-mannose binding lectin
  Pfam annotation: Domain name=PAN_1; Domain location=341-420; Score =11.6; E_value=0.011; Accession=PF00024.16; Description=PAN domain
  Pfam annotation: Domain name=PAN_2; Domain location=341-410; Score =106.3; E_value=9.3e-29; Accession=PF08276.2; Description=PAN-like domain
  Pfam annotation: Domain name=Pkinase; Domain location=425-603; Score=- 94.7; E_value=0.0064; Accession=PF00069.15; Description=Protein kinase domain
  Pfam annotation: Domain name=Pkinase_Tyr; Domain location=388-604; Score=-131.4; E_value=0.00021; Accession=PF07714.7; Description =Protein tyrosine kinase
  Pfam annotation: Domain name=S_locus_glycop; Domain location=202-329; Score=43.9; E_value=5.5e-10; Accession=PF00954.11; Description=S -locus glycoprotein family
  Pfam module annotation: Pfam domain module=B_lectin::PAN_1::PAN _2::Pkinase::Pkinase_Tyr::S_locus_glycop; Domain location=76-188::341- 420::341-410::425-603::388-604::202-329
MAGTGLDPAEYSPEDVGSHLCIRSPWMKLDQLTQANPLSPGDVLISKDGAFALGFFSAGNYNKSLYVGIWYNKVPEHTVVWVANRDSPVIAPSRAKLAITGKPELVLSDSQGRIRWTTTNSAAAGGADAFAVLLNSGNFVLQTPTGETIWQSFDYPTDTLLLTMRLLLNHKGQVPTRIISWKSPDDPSTGNFSYGIGPNWNLQFFTWYGTLPYSRSNALNDASMSSGMYLSSGASIVYQAIVDTGNRLYYIYTVSEGSPYTRIWLDYTGKMRTQSWNSNTSSWMLVFERPHSSCDLYAQCGPFGFCDSTGDVPTCRCPEGFEPIDGVNYSRGCRRKEALRCGKEDSFVTLPAMKVPDKFLYLRNRSFDQCAAECSRNCSCVAYAYDTLSLGDSNGDTSRCLVWTGDLIDMEKASFHGNLYLRIAGSPGRRQKKKVQKRVMLEYLRSPDEMGDKNIEFPFISFEDIAAATDHFSDSNMLGKGGFGKVYKEMSPKISDFGMARIFFGKQLQANTNRVVGTYGYMAPEYAMEGSFSVKSDTYSFGVILLEIAWNLWKDGKSEQMVDSFVVESNCPLDEVSRCVQIGLLCVQDDPGSRPVMAVVVFMLENRTTPLPTPKQPSYFAQRGYKPRKAGDHREVSTDMSLTALEAR

SEQ ID NO: 50424 - protein, 346 aa, Zea mays
  Coding DNA Sequence Number=SeqID_8645
MGETKENVVELFPCAKNKSVGGRRTGFMCVVLERLSLSRMLLYMGASSASTMFLAWWVLTIDPKEKASAQIYGVVNLVGRSKKWKARPSEASTPTRPLKEVKKGSVANVAGATDGGVVPLTVEDFDLDDVEMLTKSPLTVPPLSRNGVWCRGAFRCLRIGGCVKGGAVGELLRPCARADRSARQAGNPSPTSGHGPSTAVQRALSPVIIAMISARISANTLFGNSAGIARIDPSNCPSLASSRDNSNISRNNIIEPTWETLPADEQLQFEEHKEQLIQEEKVKFLANFKVDRNNKVIRQWATDLASLRPTTDTPNGAGKGVSARGTDGEARLELRRGGSTGHGSGV

SEQ ID NO: 50425 - protein, 96 aa, Zea mays
  Coding DNA Sequence Number=SeqID_8646
MGDRAAEVWTYIRAIERSGLEGSDESEISSDEENSSNSSEEESGGDGDDEGDGSDGGDGGDDGKGDGKCDGSGGKGGGNGKGSVGISKASGKAPLV

SEQ ID NO: 50426 - protein, 146 aa, Zea mays
  Coding DNA Sequence Number=SeqID_8647
MAPKKATYKATTSLDNAAKEALTEEGNIGPSPGKDFGTSSPIQEVKGTSADIIIEVFDPKLPKTSERKAALFKRGLVVASRRRPSSARTVLNNDSPGEVEGLASHGEGCHAWVKISPPNGGAHATFHRHLGPFVSPPWGRFRSTSN

SEQ ID NO: 50427 - protein, 64 aa, Zea mays
  Coding DNA Sequence Number=SeqID_8648
MAYDELDDWGGGRGSPARSDGVGRALARAGLREMRQGRCYTRAHRASHLARQKPCQATPSSAPR

SEQ ID NO: 50428 - protein, 137 aa, Zea mays
  Coding DNA Sequence Number=SeqID_8649
MGKSKKGGSSSHHSGDKRKREPTAPSEDFGDSEYLEEEFSFESEGSLVHASPPVSSDDSDDSQGIAAKGSDESEVSSDEENSYDLFEEGSGGDNDGEGDSDDGGDGDGDGDGGKGDGKGDGKGDGGSGKASGKAPLA

SEQ ID NO: 50429 - protein, 371 aa, Zea mays
  Coding DNA Sequence Number=SeqID_8650
  Gene Ontology: Mol. function=nucleic acid binding
  Homolog annotation: Hit_ID=Q69K05; Match level="QueryCoverage=98%, HitCoverage=98%, E-value=4e-50, Identity=38%"; Hit description=CAX -interacting protein 4 (CAXIP4)-like
  Pfam annotation: Domain name=zf-CCHC; Domain location=107-124; Score =18.8; E_value=0.0008; Accession=PF00098.13; Description=Zinc knuckle
MPATAGRVRMPANNRVHSSAALQTHGIWQSAIGYDPYAPENDKQQPGRPSSSVSANAAAAAANDANAAASAAAASGSGSGDGNAYTSFQGLLALARITGSNSDETRGACKKCGRVGHLTFQCRNFLSVKDLDLDDADAQAAAQAAAQAKFDEIKKKAAAGGDADDASDDVEEDEDSDSSDSDIDPELEKIIAQRERSRNGARWPRKEKKSSSHHHRNSSSKRKSKHTRSRSDDSEEDEGRRGRDRKKMSGRSKKHERSDEASSDDTDSDRQRHRKSRKDRKRRSHRRSDDTLDEKDVSGGEERRHQRHQRSHHWRDASDCDNGDSDSAHDKKQSSRRRRHCQSENSGLDEDERHDHRGAKRSRKNRDHKRS

SEQ ID NO: 50430 - protein, 137 aa, Zea mays
  Coding DNA Sequence Number=SeqID_8651
  Subcellular localization annotation: CTP_CleavageSite=28; ConfidenceScore=5.12e-01
MEMTTASGVTSDGSCDSTFQLLLLRKIRAVARTSTVVVVSVKGAPLAEAQGRDASQTPPHAEARGKSPAAPALGIGAPTPRAGGSLSRWLDSLVTMRRSGRSARREGKKRITDLRAMHLRRTIYKRHRKHKSENRTT

SEQ ID NO: 50431 - protein, 167 aa, Zea mays
  Coding DNA Sequence Number=SeqID_8652
MQNRRKLWHTPDLQLVSAQAEPTINDEVVDADLVDEVECGGISKLAKYVMEDMEEDEEEEEELSLVHREWRSKAQSDSSSLAALAMTMKIQALAMSAVECCLEEVVPEALLCELPKIRIVDVCVRRSDEVPTVGLFPRPGVSLLISHEVNVTVDCPTIPSLAPKGVK

SEQ ID NO: 50432 - protein, 126 aa, Zea mays
  Coding DNA Sequence Number=SeqID_8653
  Subcellular localization annotation: CTP_CleavageSite=45; ConfidenceScore=5.41e-01
MASVGGSAAGGQGKGRRAAGSASGLGARCTVPALDVARSLARGCRASRLGSGRGHGRLVRPGRAGEGGAGALLHGRGAAGSWAARTGKQRGKDGQGRGGGYGKRSQGGGWLGDRAGWARLRVRRWA

SEQ ID NO: 50433 - protein, 143 aa, Zea mays
  Coding DNA Sequence Number=SeqID_8654
  Subcellular localization annotation: CTP_CleavageSite=64; ConfidenceScore=5.51e-01
MKNPPTPLMAMKHPRSSLALPPFPSIKTTAELFFLPTPSSLPPLGSLFLGPSLFVVVKFVAGLSAQHLIGAPSDVKNPCPHALQHHRSLSCLAGDVPAPIVPSLRLDARSSFAVVRSSLRMNEITRWKTTQNMNFIFVQYVLN

SEQ ID NO: 50434 - protein, 126 aa, Zea mays
  Coding DNA Sequence Number=SeqID_8655
  Subcellular localization annotation: CTP_CleavageSite=45; ConfidenceScore=5.39e-01
MASVGGSAAGGQGKGRRAAGSASGLGARCTVPVLDVARSLARGCRASRLGSGRGHERLVRPGRAGEGGAGALLHGRGAAGSWAARTGKQRGRDGQGRGGGYGKRSQGGGRLGDRAGWARLRVRRWA

SEQ ID NO: 50435 - protein, 143 aa, Zea mays
  Coding DNA Sequence Number=SeqID_8656
  Subcellular localization annotation: CTP_CleavageSite=64; ConfidenceScore=5.52e-01
MKNPPTPLMAMKHPRSSLALPPFPSIKTTAELFFLPTPSSLPPLGSLFLGPSLFVAVKFVAGLSAQHLIGAPSNVKNPCPHALQHHHSLSCLAGDVPAPIVPSLRLDARSSFTVVRSSLRMNEITRWKTTQNMNFIFVQYVLN

SEQ ID NO: 50436 - protein, 86 aa, Zea mays
  Coding DNA Sequence Number=SeqID_8657
MRNRIHDVVEAAVIEDFYCESNDSAFVGAILQKAPSTSEQLFREADVSINTSGLEILWDKPRGSFAKGVAERVWLSPGRPIKHERR

SEQ ID NO: 50437 - protein, 94 aa, Zea mays
  Coding DNA Sequence Number=SeqID_8658
MVAGEQSVPEALLAPSSDALETRLDDLTKAARATTCQTDAAVVDPSKDNGDISIEEDNTNICPTKSSHVDFGSSKTKEGHIEVLNRFGYIDNID

SEQ ID NO: 50438 - protein, 178 aa, Zea mays
  Coding DNA Sequence Number=SeqID_8659
MQNRRKLWHTPDLQLVSAQAEPTINDEVVDADLVDEVECGGISKLAKYVMEDMEEDEEEEEELSLVHREWRSKAQSDSSSLAALAMTMKIQALAMSAVECCLEEVVPEALLCELPKIRIVDVCVRRSDEVPTVGLFPRPGVSLLISHEVNVTVDCPTIPSLAPKGVKVGCSPVASMEV

SEQ ID NO: 50439 - protein, 80 aa, Zea mays
  Coding DNA Sequence Number=SeqID_8660
  Subcellular localization annotation: CTP_CleavageSite=47; ConfidenceScore=5.17e-01
MARFVELGLSQANWGRGKHQTGWSHAQAMRRRMTRRPHASITQRKIRSELMGRWGVFGPTGKEGVMADLQEFQHFDEFED

SEQ ID NO: 50440 - protein, 129 aa, Zea mays
  Coding DNA Sequence Number=SeqID_8661
  Homolog annotation: Hit_ID=Q6Z7E9; Match level="QueryCoverage=44%, HitCoverage=33%, E-value=2e-13, Identity=58%"; Hit description =Putative pRGR1
MDALTRLHRSLVGGDDEDQPEDSILADTEDLCSLSPLQVKQYPPSETSECSKDFMALVCIDLILYWPFACSEDLRLRGMFGGRTHPHDLVFYCLRKTYQIRSNVYIWKHIGSWEHSLCYGPSKTAKDDV

SEQ ID NO: 50441 - protein, 82 aa, Zea mays
  Coding DNA Sequence Number=SeqID_8662
MKIEVGVKGGEKGLGVHVFEAAGHGEDDWSTQLGRPSVITVGTGVGHHDELETDSRSKQPSDGVCTRARSDEMGKKNGAWRR

SEQ ID NO: 50442 - protein, 72 aa, Zea mays
  Coding DNA Sequence Number=SeqID_8663
MDNNSEGLRMAELGDARRESQRAPDLCPGTRERPTAVPWPIRAEFSEAVAEDGYGKGMELTTWPHMSLTLVH

SEQ ID NO: 50443 - protein, 37 aa, Zea mays
  Coding DNA Sequence Number=SeqID_8664
MVQSIVSIDKICAMLEVLGHTRGVILIPVLHMKVHGA

SEQ ID NO: 50444 - protein, 104 aa, Zea mays
  Coding DNA Sequence Number=SeqID_8665
  Subcellular localization annotation: CTP_CleavageSite=31; ConfidenceScore=5.01e-01
MAASQLANWISNPPRRSGHSQRRFEDGRARRCEAGAPGVPNLYSGTRERLTVAPWLIRAEFAEAVAEDGYGKGMELTMCPHMSLTLVKGEFVLITLGDQHHLNG

SEQ ID NO: 50445 - protein, 105 aa, Zea mays
  Coding DNA Sequence Number=SeqID_8666
  Subcellular localization annotation: CTP_CleavageSite=84; ConfidenceScore=5.22e-01
MGSGFIRSTSTDTRCQRFNTNQSKEQVRLQKKGAKRKPKCALVWRTGLSGVPPDSVRCTRVNQLKLLSFGFSRRSSAIIHRTVRCTSGATIIYAQRSTLTGNDAA

SEQ ID NO: 50446 - protein, 126 aa, Zea mays
  Coding DNA Sequence Number=SeqID_8667
  Gene Ontology: Mol. function=monooxygenase activity; Cellular component=integral to membrane; Biological process=electron transport
  Homolog annotation: Hit_ID=Q2QN17; Match level="QueryCoverage=89%, HitCoverage=23%, E-value=2e-33, Identity=57%"; Hit description =Cytochrome P450 family protein, expressed
MPLTNPEAMLKTRDEIDANIGSSLLVEELDMTNLRFIQAHEAMEDFTVGGFHVRRGTMMILVNAWLIHGDPKLWEAPEEFRPERFLDNTMVTMVTAPLLLFGLGWRRCPGEGMAMRLLGLTLAALL

SEQ ID NO: 50447 - protein, 824 aa, Zea mays
  Coding DNA Sequence Number=SeqID_8668
  Gene Ontology: Mol. function=binding; Cellular component =intracellular; Biological process=metabolic process
  Homolog annotation: Hit_ID=Q6K2P5; Match level="QueryCoverage=91%, HitCoverage=100%, E-value=0.0, Identity=85%"; Hit description =Putative pentatricopeptide (PPR) repeat-containing protein
  Pfam annotation: Domain name=PPR; Domain location=139-173; Score =13.8; E_value=0.17; Accession=PF01535.11; Description=PPR repeat
  Pfam annotation: Domain name=PPR; Domain location=201-235; Score =14.5; E_value=0.14; Accession=PF01535.11; Description=PPR repeat
  Pfam annotation: Domain name=PPR; Domain location=263-297; Score =29.7; E_value=1.1e-05; Accession=PF01535.11; Description=PPR repeat
  Pfam annotation: Domain name=PPR; Domain location=325-359; Score =30.9; E_value=4.4e-06; Accession=PF01535.11; Description=PPR repeat
  Pfam annotation: Domain name=PPR; Domain location=387-420; Score =29.0; E_value=1.7e-05; Accession=PF01535.11; Description=PPR repeat
  Pfam annotation: Domain name=PPR; Domain location=519-553; Score =47.3; E_value=5.1e-11; Accession=PF01535.11; Description=PPR repeat
  Pfam annotation: Domain name=PPR; Domain location=554-588; Score=6.2; E_value=1.4; Accession=PF01535.11; Description=PPR repeat
  Pfam annotation: Domain name=PPR; Domain location=590-624; Score =17.7; E_value=0.042; Accession=PF01535.11; Description=PPR repeat
  Pfam annotation: Domain name=PPR; Domain location=656-690; Score=6.5; E_value=1.3; Accession=PF01535.11; Description=PPR repeat
  Pfam module annotation: Pfam domain module=PPR::PPR::PPR::PPR::PPR::PP R::PPR::PPR::PPR; Domain location=139-173::201-235::263-297::325 -359::387-420::519-553::554-588::590-624::656-690
MATILGADGGRERQQRGEQGRTFPGCVDSPSMMASERSEAEIGQRGRVCWRDSVREESGRRHKPEPQFGKPPMLPSRHLRAAARQRSHRRPPAPADACITGKPDMEVIRRNRAITAHMRAGRVPDAERLFAAMPRRSTSTYNTMLAGYAANGRLPQALSFFRSIPRPDSFSYNTLLHALGVSSSLADVRALFDEMPVKDSVSYNVMISSHANHGLVSLARHYFDLAPEKDAVSWNGMLAAYVRNGRIQEARELFDSRTEWDAISWNALMAGYVQRSQIEEAQKMFNKMPQRDVVSWNTMVSGYARRGDMAEARRLFDVAPIRDVFTWTAIVSGYAQNGMLEEAKRVFDAMPDKNAVSWNAMMAAYVQRRMMEEAKELFDAMPCRNVASWNTMLTGYAQAGMLDEARAIFGMMPQKDAVSWAAMLAAYSQIGFSEETLQLFKEMGRCGEWVNRSAFACVLSTCADIAALECGMQLHSRLIKAGYGVGCFVGNALLAMYFKCGSMEEAHSAFEEMEERDVVSWNTMIAGYARHGFGKEALEVFDTMRKTSTKPDDITLVGVLAACSHSGLVEKGISYFYSMHRDFGVATKPEHYTCMIDLLGRAGRLDEAVNLMKDMPFEPDSTMWGALLGASRIHRNSELGRNAAEKIFELEPENAGMYVLLSNIYASSGKWRDVDKMRHIMHERGVKKVPGFSWIEVQNKVHTFSVGDSVHPEREDIYAFLEDLDIRMKKAGYVSATDMVLHDVEEEEKEHMLKYHSEKLAVAYGILKIPPGRPIRVIKNLRVCRDCHTAFKCISAIEGRLIILRDSNRFHHFRDGSCSCGDYW

SEQ ID NO: 50448 - protein, 62 aa, Zea mays
  Coding DNA Sequence Number=SeqID_8669
MALSTRGPSESAVQTQGASAEETQTGGSHRSIQQFCKHQSRDKENVDRADPDPTLYRLQDGP

SEQ ID NO: 50449 - protein, 763 aa, Zea mays
  Coding DNA Sequence Number=SeqID_8670
  Gene Ontology: Mol. function=glutamine-tRNA ligase activity; Cellular component=soluble fraction; Biological process=tRNA aminoacylation for protein translation
  Homolog annotation: Hit_ID=Q5VRX8; Match level="QueryCoverage=99%, HitCoverage=100%, E-value=0.0, Identity=81%"; Hit description =Putative tRNA-glutamine synthetase
  Pfam annotation: Domain name=tRNA-synt_1c; Domain location=271-544; Score=428.0; E_value=1.3e-125; Accession=PF00749.11; Description =tRNA synthetases class I (E and Q), catalytic domain
  Pfam annotation: Domain name=tRNA-synt_1c_C; Domain location=546-737; Score=253.3; E_value=5.1e-73; Accession=PF03950.8; Description=tRNA synthetases class I (E and Q), anti-codon binding domain
  Pfam annotation: Domain name=tRNA_synt_1c_R1; Domain location=14-171; Score=236.4; E_value=6e-68; Accession=PF04558.5; Description =Glutaminyl-tRNA synthetase, non-specific RNA binding region part 1
  Pfam annotation: Domain name=tRNA_synt_1c_R2; Domain location=172 -264; Score=131.9; E_value=1.8e-36; Accession=PF04557.5; Description =Glutaminyl-tRNA synthetase, non-specific RNA binding region part 2
  Pfam module annotation: Pfam domain module=tRNA-synt_1c::tRNA-synt_1c_ C::tRNA_synt_1c_R1::tRNA_synt_1c_R2; Domain location=271-544::546 -737::14-171::172-264
MGTGGDGSKAGPALPLEALLALGLDQRTAENALVNAKVTANLASVIAEAGIKECDKSVGNLLYAVATKYPTNALVHRPVLISYVLSTKIKNPAQLDAALSFLTNTGPDSLDVVKFEEACGVGVVVSIEEIKSTVTDVLEENMEAIKEQRYHINVGTLCGQVRKRHPWGDAKAIKEEIDKRLAEILGPKTEADNIKPVKKKKEKPAKVEEKKVAVATAAPPSEEELNPYTIFPQPEENFKVHTEIFFSDGNIWRAHNTKEILEKHLKATGGKVMTRFPPEPNGYLHIGHAKAMFIDFGLAKERNGHCYLRFDDTNPEAEKKEYIDHIQEIVHWMGWEPYKVTYTSDYFQALYEHAVELIQKGLAYVDHQTAEEIKEYREKKMDSPWRGRPIEESLKLFEDMRRGLIAEGAATLRMKQDMQNENKNMSDLIAYRIKLCTLEFDIRRPSYYWLLVALGLYQPYVWEYSRLNISNTVMSKRKLNRLVTEKWVDGWDDPRLLTLAGLRRRGVSSTAINSFIRGIGITRSDNSLIRVDRLEYHIREELNKTAPRTMVVLRPLKVVITNLEEGKVLDLDGKMWPDASDTDASSHYKVPFSRTVYIEKTDFRLKDSKDYYGLAPGKSVMLRYAFPIKCTDVISGDSPDDIVEIRAEYDPLKTSKLKGVLHWIAEPAPGVEPLKVEVRLFEKLFMSENPAELEDWLGDLNPHSKEVIKDAYAVPSLATAVLGDKFQFERLGYFAVDTDSTPEKLVFNRTVTLRDSFGKAGPK

SEQ ID NO: 50450 - protein, 370 aa, Zea mays
  Coding DNA Sequence Number=SeqID_8671
  Gene Ontology: Mol. function=GTPase activity; Cellular component =spliceosome; Biological process=nuclear mRNA splicing, via spliceosome
  Homolog annotation: Hit_ID=Q9T0I6; Match level="QueryCoverage=82%, HitCoverage=14%, E-value=1e-143, Identity=84%"; Hit description =Splicing factor-like protein
MERYSAIKSYGSWMIQMCIESLFTKHFRVIHTSVWAGQKRLGQLAKWKTAEEVAALVRSLPVEEQPKQIVVTRKGMLDPLEVHLPDFPNIVIKGSELQLPFQACLKIEKFGDLILKATEPQMVLYNIYDDWLKSISSYTTFSHIVLILRALHVNNEKAKMLLKPDKTIITETHHIWPSLNDEQWLKVECALRDLILSDYAKKNNVNTSALTQSKMRDIILGAEIAPPSQQRQQIAEIEKQSRETTQLTAVTTRTTNVHGDELIITTTSPYEQQAFASKTDWRVREISATNLYLRVNHIYVNSDDIKGLVAESAVDASSDVEIHGELELGALTSSLEHPGGALGELKHARRRHPRPIPWLEEEGPQIRVLE

SEQ ID NO: 50451 - protein, 118 aa, Zea mays
  Coding DNA Sequence Number=SeqID_8672
MTLEKKQRPVHKRRSEDGVHTPTDGARFCPATPPTPVSPKPPASPPETPTHPASPAAALALPRDSRHTPYLRRACASSPARPRPAKFPFLARRDPPSAPPSLASHSRPCSWPPATSLL

SEQ ID NO: 50452 - protein, 120 aa, Zea mays
  Coding DNA Sequence Number=SeqID_8673
  Gene Ontology: Mol. function=protein disulfide oxidoreductase activity; Biological process=cell redox homeostasis
  Homolog annotation: Hit_ID=Q1SX97; Match level="QueryCoverage=82%, HitCoverage=84%, E-value=3e-15, Identity=43%"; Hit description =Thioredoxin fold
  Pfam annotation: Domain name=Glutaredoxin; Domain location=35-93; Score=33.5; E_value=7.4e-07; Accession=PF00462.14; Description =Glutaredoxin
MQAVGIRRRGLTIDPAGEEEAPAARVGRLVRESPVVIFARRGCCMAHVMRRLLAAVGAHATVIELGSAEEEEEELAAAEGGGVPALFVGGDPVGGLEGLMRLHLSGRLVPRLRELGALCA

SEQ ID NO: 50453 - protein, 52 aa, Zea mays
  Coding DNA Sequence Number=SeqID_8674
MPAAGPARPSIAPRRLSLIGLCRPKPGPSMRAVPGPDGPKIEARPKHAFGPC

SEQ ID NO: 50454 - protein, 115 aa, Zea mays
  Coding DNA Sequence Number=SeqID_8675
MEGGAAVPSREGLGELLQRGVRRAGGATMGELTMGGSEGAASCHQWRAGDVMCSSHQEGMSAMLLARRRRHRVGEAREDGMVEVARAERREEMKPGFGRLGEFQKEDHVGEEVAV

SEQ ID NO: 50455 - protein, 114 aa, Zea mays
  Coding DNA Sequence Number=SeqID_8676
MEALGSSVGWSRETTVGLVDAASRAAGHSDHERPPDSDELLIADERAGIAYGTRIRRYFHGPSRCADAKTATCAPRSGRVARPRSGRASGLGQRAPQVRLLSGGGRVRATTTRA

SEQ ID NO: 50456 - protein, 88 aa, Zea mays
  Coding DNA Sequence Number=SeqID_8677
  Gene Ontology: Mol. function=transferase activity; Biological process= biosynthetic process
  Homolog annotation: Hit_ID=Q8S4F6; Match level="QueryCoverage=64%, HitCoverage=11%, E-value=1e-20, Identity=84%"; Hit description =Sulfolipid synthase
MTRNHVAMLVGLKALYFPYRVHDMCFPCPMYGKVPLSLALSPRIISEVAKFKPDIIHASSPEIMVFGALAIAKLLGVPLVMSITPMFS

SEQ ID NO: 50457 - protein, 124 aa, Zea mays
  Coding DNA Sequence Number=SeqID_8678
  Gene Ontology: Mol. function=hydrolase activity, acting on acid anhydrides, in phosphorus-containing anhydrides; Cellular component =nucleus; Biological process=nucleobase, nucleoside, nucleotide and nucleic acid metabolic process
  Homolog annotation: Hit_ID=Q9CA92; Match level="QueryCoverage=96%, HitCoverage=12%, E-value=2e-14, Identity=42%"; Hit description =Putative helicase; 55525-51977
MKVRLITEKNLRELRNSADVEAVLNKYKEAIESCSECSQDIGVNGALLLAVGGGKISKDINSNDGMDHCVIMVGLRYPSPSDVELLETIKHIESISSSFFIGDDKASIRKYDDECELQPGYDIL

SEQ ID NO: 50458 - protein, 268 aa, Zea mays
  Coding DNA Sequence Number=SeqID_8679
  Gene Ontology: Mol. function=protein binding; Cellular component =integral to membrane; Biological process=proteolysis
  Homolog annotation: Hit_ID=Q5QLZ3; Match level="QueryCoverage=76%, HitCoverage=51%, E-value=3e-19, Identity=34%"; Hit description =Gastric mucin-like protein
MNVVVTSHLPVCLYSAAAFENKSPTDVNNKLHLKLPEGTLPLKVLPLEGEQDCRLGRPAGPLSTEQDLELGAPDLPLVADVDLSGSDVLRFGGASREKPGISDGFHGLDLIVGELPLEGVGAAVFAGEEPLGIVEPGLVIDDDLTGATKLPCWAEGAEGRLVGVNALDVGLLCADMVGLDDSVVDLVLPEGAEVLLAGPTALLEGVVDLADGSVDDLGTEAPVLAGTVVREVGVQGLEPLELAVNATCLVGVEVLDELEVSPPDDDGQ

SEQ ID NO: 50459 - protein, 177 aa, Zea mays
  Coding DNA Sequence Number=SeqID_8680
  Homolog annotation: Hit_ID=Q8S4F6; Match level="QueryCoverage=42%, HitCoverage=15%, E-value=1e-25, Identity=72%"; Hit description =Sulfolipid synthase
MDLVQAPARITADSSFRWRKPIGADVVELIEKYMELLRVKVIEDGQMCWFPPIFPSDDGISPQFQPRPAFFIVFSPSPAYIRNGDLALFLARAMAIGGKEVKDDLEEAPPPVLDEAMRPRRVALFVEPSPFAYISGYKNRFQNFIKHLREMGDEVIVVTNHEGVPQEFHGAKVIGSW

SEQ ID NO: 50460 - protein, 135 aa, Zea mays
  Coding DNA Sequence Number=SeqID_8681
MADASSREHVLVMLGPISHGSMDTSHLPLTGKLAPLLPRPVLRSGVLGAQPVSPLPLLRRQHIMRESQPRSAIYLPASAAPFMALPSRSLLASSSQTHGQAELKRHSPERDSASLARLEIVPAYEIQNTSKKDFL

SEQ ID NO: 50461 - protein, 130 aa, Zea mays
  Coding DNA Sequence Number=SeqID_8682
MGRHSVWLLGHWWTRAWAWGSDGVVGWEQVGPGGVGAVAHSRMRAGRGEERAGVGAVGHGGGAPAARARVAGGAQPGCAGAGPRERKVGRDAWGAQAAGEGHGWATRRRWVVGRPREGRGKKPDRPVAAG

SEQ ID NO: 50462 - protein, 163 aa, Zea mays
  Coding DNA Sequence Number=SeqID_8683
  Gene Ontology: Mol. function=sequence-specific DNA binding; Cellular component=nucleus; Biological process=regulation of transcription, DNA-dependent
  Homolog annotation: Hit_ID=Q6Q500; Match level="QueryCoverage=44%, HitCoverage=30%, E-value=2e-21, Identity=71%"; Hit description =Homeodomain leucine zipper protein 14
  Pfam annotation: Domain name=Homeobox; Domain location=60-114; Score =29.6; E_value=4.1e-06; Accession=PF00046.19; Description=Homeobox domain
MEQYDGLFPPAYVDSSSSLLLVPNANGTAQEERPRARRRRRRAARCGGGGGELDGGGDHKKRRLTDEQVEMLELSFREERKLETGRKVHLGAEIGLDPQQVAVWVPKRRAPPKRKLLEEEVGQVQQGTNAPFSQMATWKEGHASYLSLFACAPILFSVHPHAP

SEQ ID NO: 50463 - protein, 354 aa, Zea mays
  Coding DNA Sequence Number=SeqID_8684
  Homolog annotation: Hit_ID=Q10G00; Match level="QueryCoverage=95%, HitCoverage=52%, E-value=1e-108, Identity=57%"; Hit description =Expressed protein
MDINKGPKNKPSILGTVSLNLADYALTAGETIEIILPLSIPGGAPERASSLHLTLSMVELRAFQETSDASQRSAATLPLSPSPSDSLPGGKYEVLVIKAGLRKVKILTDLVSTRRPKKTCQGGGEDKFCVNSDSVEYPCDTESLDDDLDDRVEEDEFGDSTIRKSFSYGYLQSVNYVGGLVYAHAKIDGEHEDWIYYSNRKTDVGFHVEKGSRGYGLANTMVSEFGDDNFVIENWELKEIISCDGRMKLSSQMFFASIDQRSERAAGETACTSLVAIIADWFQANQNIMPIQSQFDSLIREGSLEWRNLCENETYRKRFPDKHFDLETVLHTKIHPLTVSPSNLLFDLSYYDYG

SEQ ID NO: 50464 - protein, 111 aa, Zea mays
  Coding DNA Sequence Number=SeqID_8685
  Subcellular localization annotation: CTP_CleavageSite=25; ConfidenceScore=5.11e-01
MPSGPALGTGPPNPEGPKIFNATVCCSRNFVSPYRLRPVDSHDVFQSLNALPQAGSEWWPGKPATPLRLCALGHKESKTALIREPYDQHDAEIRSVRGWPAGLSDWRFEGV

SEQ ID NO: 50465 - protein, 142 aa, Zea mays
  Coding DNA Sequence Number=SeqID_8686
MAFGGRRAKRGKAPMARGGRGREVRAPRVHDVGAKGAVVPVRKKNSGLGERRGRALHALGEALGERLHAGPRRGGPAGRGGCGRERRRAGRARTLGFGRGAAVRARPSHGLGCRSRPEESAHARAGAWAARWGSWAARGGRC

SEQ ID NO: 50466 - protein, 59 aa, Zea mays
  Coding DNA Sequence Number=SeqID_8687
MEEMREIEVTVEVGINDIWTFQSDERIKSYRKEGSMNYECKLYGTCIHIVKHVRAVLNV

SEQ ID NO: 50467 - protein, 79 aa, Zea mays
  Coding DNA Sequence Number=SeqID_8688
  Gene Ontology: Mol. function=sequence-specific DNA binding; Cellular component=nucleus; Biological process=regulation of transcription, DNA-dependent
  Homolog annotation: Hit_ID=Q07472; Match level="QueryCoverage=81%, HitCoverage=30%, E-value=2e-11, Identity=47%"; Hit description =Floral homeotic protein PMADS 1
MNRPVIIILCRGKMPNKVRTNGFSDLYQKTTGIDLWNSHYERMKENYRRLKEINKKLRREIRLAENIQDAYGEAASIAE

SEQ ID NO: 50468 - protein, 109 aa, Zea mays
  Coding DNA Sequence Number=SeqID_8689
MGGGSSLLFRTLFGTLIVLGFILGISVGFLKSEGNEKKTTITSDDHQSSTTTAKVQHEEEQVKVLGQGKSNVAHPKQDLNYMSKRRVPNGPDPIHNRRAGNSGRPPGQV

SEQ ID NO: 50469 - protein, 132 aa, Zea mays
  Coding DNA Sequence Number=SeqID_8690
MKAYTDGSIYRYKARLVAKGGKKQTQGKDRIASREERIGKGKRDLANGEEELVEGSPYLEVSGLLFWLEGLLVLVLLFAGPEREKVDYSLAKGKVDYSLAGCASELPPTMVMDLWFLIAFPPYVAFLYSNLR

SEQ ID NO: 50470 - protein, 258 aa, Zea mays
  Coding DNA Sequence Number=SeqID_8691
  Gene Ontology: Mol. function=DNA-directed RNA polymerase activity; Cellular component=mitochondrion; Biological process=transcription
  Homolog annotation: Hit_ID=Q6QZP0; Match level="QueryCoverage=75%, HitCoverage=41%, E-value=2e-13, Identity=43%"; Hit description=DNA -directed RNA polymerase
MAEVTDDSLNQTTDIPKEEANNKSNKSDSSKELYNIGSTLFTWLNNRNLVEIYHPHGDIKSPKKGLLMPSILASIDRTEGTSACYEQYILKLADALQNYNLYFPTFLDFRGRNYRYGPFHYHERDLVRSLILFAQSGVTDTPPDKGSQGIRTFMASTAFHYSKYWKNYNEVVTLRIPTNKKNTRKNTSSTFANFIHQKDALTVIHFIDILMDEYESGNNTVPVYTVHDNFITTPLYGAAFPSLYRKAMTRFDWDTPYL

SEQ ID NO: 50471 - protein, 131 aa, Zea mays
  Coding DNA Sequence Number=SeqID_8692
MEVAISYQKKRKKSSFKPNNLLTYPSQNKGIMVKGKMKEHKPENGNSQNRNEVWEEIRALGLCLTCVELPWSSVQASSYQSSVKEGAPTSAPSHNLNAGSIPARGTRWEEGKKDQGKKRGRGIGRLIRLMT

SEQ ID NO: 50472 - protein, 64 aa, Zea mays
  Coding DNA Sequence Number=SeqID_8693
  Homolog annotation: Hit_ID=Q5W7C9; Match level="QueryCoverage=100%, HitCoverage=35%, E-value=2e-25, Identity=67%"; Hit description =Unknow protein
MGESLTEQCRVEVEGLRVVNFFSRRRNNDVRRQIPGLNPGQAVETTKLEYGRGRGNFRWSGEMH

SEQ ID NO: 50473 - protein, 89 aa, Zea mays
  Coding DNA Sequence Number=SeqID_8694
  Gene Ontology: Mol. function=structural constituent of ribosome; Cellular component=ribonucleoprotein complex; Biological process =translation
  Homolog annotation: Hit_ID=Q6YTM4; Match level="QueryCoverage=47%, HitCoverage=28%, E-value=8e-19, Identity=100%"; Hit description =Ribosomal protein L2, chloroplast
MGVVKGKPPLVEKNPQPLGVILRLEEELGKGKNIVIVLFFVAVRDRYAEYDWGFSYGYWSGSKQIKEDELSETAIYSNYLWEMVKDLRR

SEQ ID NO: 50474 - protein, 145 aa, Zea mays
  Coding DNA Sequence Number=SeqID_8695
MGSQGKVVAVGQETVDCGRPWRVDRAFPVELGAEGSAAEESSSHLVLQNLEAGPQRSNKKVPHAGPQRSNKKVSHYSSSTLSRFCSNVAEAEILAATADAGPRLKHLHLNKHHFRWPWESGTGGDSEATETAKDARPPVPAAFRQ

SEQ ID NO: 50475 - protein, 133 aa, Zea mays
  Coding DNA Sequence Number=SeqID_8696
  Homolog annotation: Hit_ID=Q67UP1; Match level="QueryCoverage=43%, HitCoverage=9%, E-value=8e-08, Identity=53%"; Hit description =Hydroxyproline-rich glycoprotein-like
MNAGVRVMCALQTLRLPDDSMHGYDLSFGPLARLIWAQRGSLLLGRGQSPILPGVIIWGLSFFRKGLKHLQALEPCVKAAAEKQHIDYHFSGLDDDSDIDDYRSYQDNHSDGSEFTFVESLFLRIQTNRSCNS

SEQ ID NO: 50476 - protein, 97 aa, Zea mays
  Coding DNA Sequence Number=SeqID_8697
MSQGGHRRASGSGSCHVAAVLPNWGAVVTSLDWGITATALLDRGATDVVTLDLGTAAAAHPEQGATVVAPTDRGTFTATAHRAVVKRTLEATDTTRS

SEQ ID NO: 50477 - protein, 80 aa, Zea mays
  Coding DNA Sequence Number=SeqID_8698
MMVAVAERGDQENEPIGNLRPIIRRLNHTQPAMNGTVFIWGGIDQASRSTNEGINLASQKNQNQVGPSPVKHASVFREMT

SEQ ID NO: 50478 - protein, 112 aa, Zea mays
  Coding DNA Sequence Number=SeqID_8699
MEGRQDAHAQQRGPRDTPIRPHAVSLLQTHKKNRESQEQLVFTDDQDARCRHPAASVTWRAQRLRGSAHVASVLGHRPQAAHCAHGLRRGAAQSLRPPRWVRIRPGPRQAQA

SEQ ID NO: 50479 - protein, 109 aa, Zea mays
  Coding DNA Sequence Number=SeqID_8700
MGESRDRACASWAHDMSTVEVRLASPSLCACPGWVLGSSMPRDFRTGARTSPAAATLGAHAATVHDQGKKDPQSSVEDPMLKFAYRFDEGPLYFTEFDARSREIEKSEK

SEQ ID NO: 50480 - protein, 49 aa, Zea mays
  Coding DNA Sequence Number=SeqID_8701
MSCAFDDYYIKDYGVILAPEGPQKMCGSAMAVRLNGSDPIKRERDIAIT

SEQ ID NO: 50481 - protein, 67 aa, Zea mays
  Coding DNA Sequence Number=SeqID_8702
MEWLGGDDLLMEFAQGGWSRPRGQKGQGCAYLSPWTRLGVGEGQLVTPGFEGFASRTNAVHLPKVGD

SEQ ID NO: 50482 - protein, 369 aa, Zea mays
  Coding DNA Sequence Number=SeqID_8703
  Gene Ontology: Mol. function=carboxypeptidase activity; Cellular component=membrane; Biological process=auxin mediated signaling pathway
  Homolog annotation: Hit_ID=Q69TY0; Match level="QueryCoverage=90%, HitCoverage=94%, E-value=1e-121, Identity=63%"; Hit description =Putative MtN21
  Pfam annotation: Domain name=DUF6; Domain location=179-309; Score =29.2; E_value=1.5e-05; Accession=PF00892.11; Description=Integral membrane protein DUF6
  Pfam annotation: Domain name=DUF6; Domain location=21-133; Score =17.5; E_value=0.0066; Accession=PF00892.11; Description=Integral membrane protein DUF6
  Pfam annotation: Domain name=TPT; Domain location=170-309; Score= -33.8; E_value=0.053; Accession=PF03151.7; Description=Triose -phosphate Transporter family
  Pfam module annotation: Pfam domain module=DUF6::DUF6::TPT; Domain location=179-309::21-133::170-309
MGVGKLMNDVKPYLAMVLLQVGFSGMYIVSVASLKRGMNHFVLVVYRNLVATVVLAPFALLFERPVLDQNMYYLGAKLTSATFASALVNILPAITFLMALVLRMERLRLRSLRSQAKVAGTVCTVVGAVLMILYHGPVVPFPWSAGHHQASAAAAAAAAESQSSASWLNGIVMIIGSCLCWSGFFVLQSNTLQSYPAELTLATLICFLGSVLTGGVALVAERHDMSAWVIGFDTRLFTAVYSGIVCSGVAFYVQGIVTQARGPVFVTAFQPLCMIITTVLGSTILKEETTLGSVIGAAIIVVGLYCLIWGKSKDHLGNGGKPAVAELPLTSAPNGGTNGYGKHALGGGGGGHHVAAGVEAPPPSSKCVH

SEQ ID NO: 50483 - protein, 166 aa, Zea mays
  Coding DNA Sequence Number=SeqID_8704
MGRVKAAAVSHRNLIAVISAHMNNRTPLSIRATINADPAIRGPAARPPSTHPRSPINAAPTMQSWWLPAYKCGRAATGTSTCRGGRRYEVVQSVERREKTSPSMLSLDCSVAAPKLTLTPTTTRMWGGERRRVGARNLYLADSDADADDHLDLQLKVMHCSSPLLP

SEQ ID NO: 50484 - protein, 100 aa, Zea mays
  Coding DNA Sequence Number=SeqID_8705
MDPIALRLRQSKAQNQRNASNGGQTINQPTAKGLQIMAEGICDRLALGTYTHVFRLGPMGWFVEQLKELEEPDAGFLVPACTARSWRIGQRVYTVVVYAS

SEQ ID NO: 50485 - protein, 67 aa, Zea mays
  Coding DNA Sequence Number=SeqID_8706
MDGGDRPALCAAKELISIQSLTSSPSNSPHPATKSRSDRDPHAALPRHPPVPKSRRDSSNPSTTLPL

SEQ ID NO: 50486 - protein, 244 aa, Zea mays
  Coding DNA Sequence Number=SeqID_8707
  Gene Ontology: Mol. function=oxidoreductase activity; Cellular component=proton-transporting two-sector ATPase complex; Biological process=ATP synthesis coupled proton transport
  Homolog annotation: Hit_ID=Q84TC2; Match level="QueryCoverage=96%, HitCoverage=70%, E-value=4e-68, Identity=51%"; Hit description=2 -oxoglutarate-dependent oxygenase
  Pfam annotation: Domain name=2OG-FeII_Oxy; Domain location=109-184; Score=63.4; E_value=7.5e-16; Accession=PF03171.10; Description=2OG -Fe(II) oxygenase superfamily
MAAALAGVRRFNEQQAEAKRRFYTRDTARKVRFTSNYDLFQSAAASWRDTLFCELAPDPPRPEELPEAVRGAMLEYGDAATELALRVLELLSESLGLPSDHLREMGCARSLNVASHYYPPCPEPHLTLGTSRHADATFLTVLLQDAMGGLQLVSNDRFRSVEHRVLANKSKDTPRVSVACFFNADVKRSTRLYGPIITDGGGSSSPPLYKSVTAREFVGYSYSKGLDGRPLEHFRLEGTTAACP

SEQ ID NO: 50487 - protein, 82 aa, Zea mays
  Coding DNA Sequence Number=SeqID_8708
  Gene Ontology: Mol. function=xanthine dehydrogenase activity; Biological process=electron transport
  Homolog annotation: Hit_ID=Q6AUV1; Match level="QueryCoverage=86%, HitCoverage=5%, E-value=2e-30, Identity=87%"; Hit description =Xanthine dehydrogenase, putative
  Pfam annotation: Domain name=Ald_Xan_dh_C; Domain location=11-82; Score=22.2; E_value=1.5e-06; Accession=PF01315.12; Description =Aldehyde oxidase and xanthine dehydrogenase, ab hammerhead domain
MTGSVVSDEVTREAEYTDDTPTPPNTLHAALVLSKKAHARILSIDDALAKSSPGFAGLFLSKDIPGVNHTGPIIHDEEFFCI

SEQ ID NO: 50488 - protein, 107 aa, Zea mays
  Coding DNA Sequence Number=SeqID_8709
MAVCGTLLNFSLARRYLTLYRWRFSAGGKRCTDGGQDSARSGREGASRGGHGGGYHACTRFTFFYAPTTVNTRAWLLVYWCPPVSDPPREKQPGLRLVSRWADQIIY

SEQ ID NO: 50489 - protein, 144 aa, Zea mays
  Coding DNA Sequence Number=SeqID_8710
MAVMGSTSEKMYLCQDHVDVGLLTEDPLTGHMPRHGLWWGPGDVRQSLLNRAKRRGCRISANCWPESVLHRRVVGDVEDPSSAGPIPGKPVNSLGLSLGLCSACLGEESCDQALGWLTPTSLCLECGAAPPSSGIGWRKMGVGR

SEQ ID NO: 50490 - protein, 40 aa, Zea mays
  Coding DNA Sequence Number=SeqID_8711
MATSQNRGCNTRLETSSGYERVQDSDPMPSGPTWERYNFV

SEQ ID NO: 50491 - protein, 71 aa, Zea mays
  Coding DNA Sequence Number=SeqID_8712
MNGWVTVTHYGMVKGSGRVAIMAGGVCLDDGCCATSLAQVGTAYGGTVASSSSAVKIFSPRDVIRAPLYKI

SEQ ID NO: 50492 - protein, 82 aa, Zea mays
  Coding DNA Sequence Number=SeqID_8713
  Subcellular localization annotation: CTP_CleavageSite=66; ConfidenceScore=5.31e-01
MELFPIKPMAGALVEVGSKSVTGAGRSVHDAAALGATSMAPSISNPTSSSVAAWSTPPTCSPCPISMAHSSSGGDTDLLPPP

SEQ ID NO: 50493 - protein, 126 aa, Zea mays
  Coding DNA Sequence Number=SeqID_8714
MTARKGGAEEDGARGGPVEEDDTRVWGALAFTARGGGAEDDGARASFFGKNLVAVRGTQLGMGNGLHARDTAGHSWEWECKHTGVGNWGHMGYMRGTQRDTVENGNANTQELGMGVTCAGHSWEWE

SEQ ID NO: 50494 - protein, 46 aa, Zea mays
  Coding DNA Sequence Number=SeqID_8715
MATRGRVEPYENKLGEEAEQRQAKNDRLTHQATAARPMVHTELGQT

SEQ ID NO: 50495 - protein, 216 aa, Zea mays
  Coding DNA Sequence Number=SeqID_8716
  Gene Ontology: Mol. function=oxidoreductase activity; Cellular component=proton-transporting two-sector ATPase complex; Biological process=ATP synthesis coupled proton transport
  Homolog annotation: Hit_ID=Q10A95; Match level="QueryCoverage=98%, HitCoverage=57%, E-value=3e-44, Identity=50%"; Hit description =Oxidoreductase, 2OG-Fe oxygenase family protein, expressed
  Pfam annotation: Domain name=2OG-FeII_Oxy; Domain location=61-162; Score=145.3; E_value=1.6e-40; Accession=PF03171.10; Description=2OG -Fe(II) oxygenase superfamily
DTVFFEDSAAPEEMPPAFRDVVPEYARQARGLAAQLLALLSEALGLHAGYLQRDAGCLDGPSLAFACHYYPPCPEPWLTLGTTRHSDPSFLTVLLQDAVGGLQVLLGGRWVDVPSLPGALVVNIGDFLQLMSNDRFKSVEHRVVAVPPGAAARVSVACFFRPSGAATSKEYGPVPDLVKPPEAPRYRSVTGVEFLDYYRQKGLDGRSALDHFRLLV

SEQ ID NO: 50496 - protein, 112 aa, Zea mays
  Coding DNA Sequence Number=SeqID_8717
MADRGKKKKDHLPRNSFSDSERDESSSIGWSDNEDSSEGVPPEEAYPTDFEGMEPKERPYLRGLERARRGGSEDDDKEDNKSNDEDDEMMAVMRPSFHRRSAAASPSRYRVA

SEQ ID NO: 50497 - protein, 336 aa, Zea mays
  Coding DNA Sequence Number=SeqID_8718
  Gene Ontology: Mol. function=protein binding; Biological process =ubiquitin cycle
  Homolog annotation: Hit_ID=Q6EP91; Match level="QueryCoverage=55%, HitCoverage=64%, E-value=1e-56, Identity=56%"; Hit description=F-box protein-like
  Pfam annotation: Domain name=F-box; Domain location=134-181; Score =24.5; E_value=0.00037; Accession=PF00646.23; Description=F-box domain
MVWQYANSLINVKADTVLNWLTQDQGGAAHRLQTWMTVSSTFLNKPIHVMLGVMGLFFNLVDYCRHHGLQADFIGTKKALFLLSKEHRHGVMGLFFNLVHYCRHHGLQATGGLGIERPSPIDFCVPRDRGGDGTVLGDLLENCVTEVLLRLDPLEICQMARLSRMFRGATSGDGVWESKLLTNYARLLAVAEAGDGEAGQATGSAPEAEPLPKKELYARLCRRNRFDGGKKEFWLDKGGGGLCMSISSRALSITGIDDRRYWNFIPSDESRFRTVAYLSQIWWFEVRGEVEFFFPKSTYNLFYRIHLGRPFKRNQRSSGRDHQVAHRCPWANTHSQ

SEQ ID NO: 50498 - protein, 297 aa, Zea mays
  Coding DNA Sequence Number=SeqID_8719
  Gene Ontology: Mol. function=alcohol dehydrogenase activity; Cellular component=cytoplasm; Biological process=retinoid metabolic process
  Homolog annotation: Hit_ID=Q42763; Match level="QueryCoverage=98%, HitCoverage=77%, E-value=1e-136, Identity=78%"; Hit description =Alcohol dehydrogenase 2d
  Pfam annotation: Domain name=ADH_N; Domain location=3-81; Score= -16.8; E_value=0.023; Accession=PF08240.2; Description=Alcohol dehydrogenase GroES-like domain
  Pfam annotation: Domain name=ADH_zinc_N; Domain location=112-254; Score=127.7; E_value=3.3e-35; Accession=PF00107.16; Description=Zinc- binding dehydrogenase
  Pfam module annotation: Pfam domain module=ADH_N::ADH_zinc_N; Domain location=3-81::112-254
MDVQPGDHVLPIFTGECKECPHCLSEASNMCDILRINTERGGMLHDGHTRFSKDGKPIYHFLGTSTFSEYTVVHVGQVAKINPEAPLDKVCVLSCGMSTGFGATVNVAKPKKGGSVAVFGLGAVGLVAAERARVCEASRIIGIDLNPNRFEEAKKFGCTEFVNPKDHNKPVQEVIAEMTGGGVDCSIECTGSTQAMVSAFECVHDGWGVAVLVGVPSRDDSFKTHPIHFLNERTLRGTFFGNYKPRSDIPGVVEKYMKKELELDKFITHSVPFLDINKAFEYMLRGEGLRCMIRMDA

SEQ ID NO: 50499 - protein, 65 aa, Zea mays
  Coding DNA Sequence Number=SeqID_8720
MKLKSNHTSLKVSQGLCNELRLQYLLKEKRFTLIEKGKIDSQFSTPKGESELLKRGAPTFISSYE

SEQ ID NO: 50500 - protein, 43 aa, Zea mays
  Coding DNA Sequence Number=SeqID_8721
MGADRQGPLAIVRGAQERFGPSGSGPAQLKGAHTRILSPDMWA

SEQ ID NO: 50501 - protein, 165 aa, Zea mays
  Coding DNA Sequence Number=SeqID_8722
MGEEVAVVLEPPRPKSPPRYPDLCGRRRSQLELQMLNREIEFLKVGAKSGRSLEHTTPSIPSSYGDESGRAADRGSAVKPEGAATGFAPVALFGRAAAVPLALGPCACGSVPWENRGDGGMAWAVAVPLPQPAPVSAARGAAGGRVRLLFLLRGHAHGMARRASS

SEQ ID NO: 50502 - protein, 166 aa, Zea mays
  Coding DNA Sequence Number=SeqID_8723
MARQSPMKGEAEREDGQVEEHRDEEEDDDYDRAQMFSGGGGKLIRMEQHAEADADYEKEHGERSSRCEAGRRFSSGNSRGDAEADADYEKEDGERTSRFPAAPLPRPPRCALAGAAAPPRRSERLPLRRAVPSAVPCRAPAADTAARPPPPLRARQVFVRLDLLHR

SEQ ID NO: 50503 - protein, 243 aa, Zea mays
  Coding DNA Sequence Number=SeqID_8724
MSLQIISRFVARQSRHKKMHWSVREGRNKKRHVPPAKTLPIAGAAAVVLSKRLQVPSAKMLANAEEHKKQHYVPPTKTIPTAAILSNHQKNMSETKKSSVADNEKMEATKRKLREGYQKADGVKRRRSIQTIKEEEGKLLEQKQCKKDASHRMERGPVGCRTRTSTNIYINPPPVALPLGGGYGYEGSFFGGYEYSYGWSPFLFAPGPSVSVGVGGGFDTLILFLALGAIVGAVRRFLNRNYY

SEQ ID NO: 50504 - protein, 558 aa, Zea mays
  Coding DNA Sequence Number=SeqID_8725
  Homolog annotation: Hit_ID=Q6YRM6; Match level="QueryCoverage=60%, HitCoverage=63%, E-value=2e-67, Identity=38%"; Hit description=Zinc finger (C3HC4-type RING finger) protein family-like
  Pfam annotation: Domain name=DUF23; Domain location=297-507; Score =52.1; E_value=1.8e-12; Accession=PF01697.17; Description=Domain of unknown function
  Subcellular localization annotation: CTP_CleavageSite=66; ConfidenceScore=5.44e-01
MQPPPPPSSRRRAITRALLCLLFLAALSLAAMIAFATSTPSSASSPARRALQIVPPRRRQPLTAVRKDGGENEARPASDSSGLDHPDAVLLPDWEVLVLLRPDDDAHGTTAANATCVFPGGATSPARQLGRMPTSGRRAYTCVMPRPERASSRPFRAPRLVVAATAPSSPAAAARSKTPEMTRWNGRLVYDSAALADDGGGGVLVFAKGVNPRQGVNRDAADIRCIYYRRCTAGEVVVASLPAATSAQHVFRCPAPPAAGAQQLRVTLAVAGEDPIPSVATYMPLPPAAQTTTTKKEKELICACTMVRDVAKFLREWVVYHAAVGVDRFHVYDNGSGDDLEGEEAGFSYAAAAHRDSCEWMAFIDVDEFIFSASWAGRGEAAKSMLRLVVDAVEPDVGQVTLGCRDFGPSGQTRHPQEGVTQGYTCRRRAEERHKSVVRLDSVAPSLVNSVHHFELRSEFRWERSKDARVNHYKYQAWDEFKAKFRRRVSTYVADWTDRVNHGSKDRTPGLGFEAIEPTGWSHMFCEVEDALLRDVTRRWFGVGFTGINHKRLGEHSF

SEQ ID NO: 50505 - protein, 126 aa, Zea mays
  Coding DNA Sequence Number=SeqID_8726
  Homolog annotation: Hit_ID=Q84Y12; Match level="QueryCoverage=66%, HitCoverage=45%, E-value=4e-20, Identity=55%"; Hit description =Putative C3HC4 zinc finger-type protein
MSNHFELRPEFRWERSRDARVNHYKYQAWDEFKAKFRRCVSTYVADWTDRVNNGSKDRTPGLGFEAVEPTEWSHMFCEVEDALLRDVTRSLRWIEAMYSHDQGFKEVYEREIQAYHLVRVKGNVLS

SEQ ID NO: 50506 - protein, 148 aa, Zea mays
  Coding DNA Sequence Number=SeqID_8727
MWPSPAIPCARAPSCPAWLALGLTPGAAAPDTVGPCHTQVKRSDQGHNLPGTRDSRYQLALQVTRDLVLVVVIQTNMRSDLKSTLEIKGSRDLISPIDPRSTATIFDHDGYLRFNCERSSLDQQTGQQGCGILPAMAAVRLWMILVFD

SEQ ID NO: 50507 - protein, 234 aa, Zea mays
  Coding DNA Sequence Number=SeqID_8728
  Gene Ontology: Mol. function=DNA binding; Cellular component=nucleus; Biological process=regulation of transcription, DNA-dependent
  Homolog annotation: Hit_ID=Q5EUJ4; Match level="QueryCoverage=96%, HitCoverage=49%, E-value=7e-89, Identity=76%"; Hit description =Terminal acidic SANT 1
MRANLRILGEDPFFGWILQQRCDQETTGEAKTREILDKLEKTTCNTNPISTPAVEKVMDALKASCADLHSIVEDPLPAAKAVADELLTARMEKLVSLNAQEVGGQPTTCGVAGPSIHNDKDNGPGIGKPHSLMERNATARTSQWEESLGLDGSEPPSPPRPHLPSPRRLPPSPLSPPGNKNNNRRKARRWSLFEEETLRKGVEEYGVGNWRDILDNNAEAFTGRTPVGNSVITV

SEQ ID NO: 50508 - protein, 115 aa, Zea mays
  Coding DNA Sequence Number=SeqID_8729
  Subcellular localization annotation: CTP_CleavageSite=51; ConfidenceScore=5.46e-01
MATSAHTRVSAPRAASPAVVVRRFPAALKRQRKRVSLCLGSPKSKDSALCVVFAGKDTIHHFAFLPPMFGTVRVWILTPVRWAEEIQRAPRVELCFVAALLIGEEERVGGNSREP

SEQ ID NO: 50509 - protein, 90 aa, Zea mays
  Coding DNA Sequence Number=SeqID_8730
MAATASFLSLRILLAILGAAGQEASPHRGGWRRILVQRENRGISSGGPVRRFGWIREEEGSAVRPHMAEVVIVADFYFKFEFKSEFQTQV

SEQ ID NO: 50510 - protein, 68 aa, Zea mays
  Coding DNA Sequence Number=SeqID_8731
MANLVAGNFLPWNSLCLGSLKSKDSALCVVFAVRWAEEIQRAPRVELCFVAALLIGEEERVGGNSREP

SEQ ID NO: 50511 - protein, 69 aa, Zea mays
  Coding DNA Sequence Number=SeqID_8732
MVTSREPNRSWPEEVNKNNHISRKVLSGQLLRAPEGGGPEKVQFTIKCFSRYMRRSGFSPDKIRRDVRV

SEQ ID NO: 50512 - protein, 40 aa, Zea mays
  Coding DNA Sequence Number=SeqID_8733
MTPCVHQKYSRHHFSPRRTSPSALCSALRGQTNLQNFEKV

SEQ ID NO: 50513 - protein, 399 aa, Zea mays
  Coding DNA Sequence Number=SeqID_8734
  Gene Ontology: Mol. function=protein serine/threonine kinase activity; Cellular component=phragmoplast; Biological process =protein amino acid phosphorylation
  Homolog annotation: Hit_ID=Q5SNF8; Match level="QueryCoverage=87%, HitCoverage=61%, E-value=1e-160, Identity=79%"; Hit description =Putative serine/threonine kinase 38
  Pfam annotation: Domain name=Pkinase; Domain location=115-394; Score =180.9; E_value=3.1e-51; Accession=PF00069.15; Description=Protein kinase domain
  Pfam annotation: Domain name=Pkinase_Tyr; Domain location=115-394; Score=-9.6; E_value=7e-12; Accession=PF07714.7; Description=Protein tyrosine kinase
  Pfam module annotation: Pfam domain module=Pkinase::Pkinase_Tyr; Domain location=115-394::115-394
MAEESPAAVSAAAARARPLEAVAEEGQEVAEQHEVAVGSTKTMERVAAAKKFIEDHYRAQMKNLQERKERRLILEQQLASSQVPREEQINLIKDLERKETEYMRLKRHRICVDDFDLLTIIGKGAYGQVQLCREKSTGNIYAMKKLKKTDMLVRGQFKSLRQVKICLIKGAEEALVEHVRAERNLLAEVGSHCIVKLYYSFQDAEYLYLIMEYLPGGDMMTLLMREDTLTENVARFYIAETILAIESIHKHNYIHRDIKPDNLLLDKNGHMKLSDFGLCKPIDCSKLSTLNENEPMTDENLRESMDIDHSLSDTANGRSNTNSHDHELSKAFSTVGTPDYIAPEVLLKKGYGLECDWWSLGAIMYEMLVGYPPFYSDDPLVTCQKLSSYLIITFTFWPY

SEQ ID NO: 50514 - protein, 152 aa, Zea mays
  Coding DNA Sequence Number=SeqID_8735
  Gene Ontology: Mol. function=protein serine/threonine kinase activity; Cellular component=phragmoplast; Biological process =protein amino acid phosphorylation
  Homolog annotation: Hit_ID=Q5SNF8; Match level="QueryCoverage=72%, HitCoverage=20%, E-value=2e-43, Identity=74%"; Hit description =Putative serine/threonine kinase 38
  Pfam annotation: Domain name=Pkinase_C; Domain location=88-137; Score= 39.0; E_value=1.6e-08; Accession=PF00433.14; Description=Protein kinase C terminal domain
MAPLRHVPPWRCHCRTTTLLSHLGPYGILLSPDNPRLSLEAKDLICRLLCDVDHRIGSGGADQIKAHPWFRGVEWDKLYEMEAAFKPLVNDELDTQNFMKFPDLNPAPARASSGASRKMMLNSKDLSFVGYTYKNFEAVKGLHQFAGDLFLY

SEQ ID NO: 50515 - protein, 57 aa, Zea mays
  Coding DNA Sequence Number=SeqID_8736
MATARSPFHGSVVAIREKKGSRRHGGDEDDGYDYAYGTGEDEVVEEDFQEFQEYDEF

SEQ ID NO: 50516 - protein, 259 aa, Zea mays
  Coding DNA Sequence Number=SeqID_8737
  Gene Ontology: Mol. function=DNA binding; Cellular component=nucleus; Biological process=regulation of transcription, DNA-dependent
  Homolog annotation: Hit_ID=Q9FUY2; Match level="QueryCoverage=91%, HitCoverage=27%, E-value=5e-39, Identity=72%"; Hit description =Transcriptional corepressor LEUNIG
  Pfam annotation: Domain name=LisH; Domain location=10-36; Score=37.3; E_value=5.4e-08; Accession=PF08513.1; Description=LisH
  Pfam annotation: Domain name=SSDP; Domain location=72-259; Score= -87.8; E_value=0.0076; Accession=PF04503.4; Description=Single -stranded DNA binding protein, SSDP
  Pfam module annotation: Pfam domain module=LisH::SSDP; Domain location=10-36::72-259
MSQTNWEADKMLDVYIYDYFMKRNLQATAKAFQAEGKVSSDPVAIDAPGGFLFEWWSVFWDIFIARTNEKHSDVAASYIEVQMSTLFQTQLMKAREQQHQQQQQIPQQRQQQPQHIQMQQMLLQRAVQQQQQQQQQQQQQQQQQQQQQQQQQPQQQQQQQLQQQQLQQQRRDGSHLLNGSANGISGNNPLMRQNQSTANVMATKMYEERLKVPSERDSLEEASLKQRYGENAGQLLDSNEASLLKAASSAQSSGYLLSL

SEQ ID NO: 50517 - protein, 141 aa, Zea mays
  Coding DNA Sequence Number=SeqID_8738
MVTCTCAYFAATADLIDCHGLPECARPFELMLLVGESSNEGHGCHNCNNEYIGLLGLLGGMLLAHVECQIATNENPLAKLVSYKAPIVTNDDDGELFYGRKDVMWDEETHHGLLQQHAEAMDNQIVGKQEVSIEILCEIVL

SEQ ID NO: 50518 - protein, 112 aa, Zea mays
  Coding DNA Sequence Number=SeqID_8739
MSVDTLRNTSVSALSEAEHAQAWKHCEGIVVEQGWAWRKEQGGGAMVEQRGDAVDELGGRQNSQTWMMFHEIQCLAFKLSAQNRMTKGWRHGDIVLPTDDLKRRCKFLGLVI

SEQ ID NO: 50519 - protein, 299 aa, Zea mays
  Coding DNA Sequence Number=SeqID_8740
MASACPDRSLRPKAFTWLRDMRWACGGYDFARSLRNIFANVEGDRGDGKGPLGVHAEEAKGPASAGGPTTRRQGVTSQREGSCSGFCDAPSGGTSGAREETGGTSQELSVDNYLVGGVTMFDAQTGLPPIGASTKGVVVTSSNLWAHFYAIADGGGEVPRSERRQLEGKIERHRMQHTEAIRDNSTAKNKSQNLFDKVTTLEKESEDLGRRLNDEKDIAAEAKTEAKSACAEAQATRKCAAELELEVKSMHAYRERMEVAMLVGVDRAHTLFVDTYHDLGVQTAPLDKSGEEVGTHFLG

SEQ ID NO: 50520 - protein, 611 aa, Zea mays
  Coding DNA Sequence Number=SeqID_8741
  Gene Ontology: Mol. function=binding; Cellular component =mitochondrial inner membrane; Biological process=metabolic process
  Homolog annotation: Hit_ID=Q9FM64; Match level="QueryCoverage=94%, HitCoverage=87%, E-value=1e-126, Identity=30%"; Hit description =Selenium-binding protein-like
  Pfam annotation: Domain name=PPR; Domain location=141-175; Score =14.9; E_value=0.13; Accession=PF01535.11; Description=PPR repeat
  Pfam annotation: Domain name=PPR; Domain location=242-276; Score =50.2; E_value=6.7e-12; Accession=PF01535.11; Description=PPR repeat
  Pfam annotation: Domain name=PPR; Domain location=343-377; Score =33.7; E_value=6.3e-07; Accession=PF01535.11; Description=PPR repeat
  Pfam annotation: Domain name=PPR; Domain location=444-478; Score =13.2; E_value=0.2; Accession=PF01535.11; Description=PPR repeat
  Pfam annotation: Domain name=PPR; Domain location=479-513; Score =30.0; E_value=8.2e-06; Accession=PF01535.11; Description=PPR repeat
  Pfam annotation: Domain name=PPR; Domain location=514-548; Score =20.5; E_value=0.0062; Accession=PF01535.11; Description=PPR repeat
  Pfam annotation: Domain name=PPR; Domain location=71-105; Score=3.5; E_value=2.9; Accession=PF01535.11; Description=PPR repeat
  Pfam annotation: Domain name=TPR_4; Domain location=107-132; Score =5.1; E_value=9.2; Accession=PF07721.5; Description=Tetratricopeptide repeat
  Pfam annotation: Domain name=TPR_4; Domain location=210-235; Score =9.1; E_value=3.1; Accession=PF07721.5; Description=Tetratricopeptide repeat
  Pfam annotation: Domain name=TPR_4; Domain location=342-367; Score =1.1; E_value=28; Accession=PF07721.5; Description=Tetratricopeptide repeat
  Pfam annotation: Domain name=TPR_4; Domain location=412-437; Score =7.3; E_value=5.1; Accession=PF07721.5; Description=Tetratricopeptide repeat
  Pfam module annotation: Pfam domain module=PPR::PPR::PPR::PPR::PPR::PP R::PPR::TPR_4::TPR_4::TPR_4::TPR_4; Domain location=141-175::242 -276::343-377::444-478::479-513::514-548::71-105::107-132::210
  Subcellular localization annotation: CTP_CleavageSite=55; ConfidenceScore=5.15e-01
MAPLPLPLPATMITPHHSKPHDAPRPEASLHATLASFSQQANEGSLRDAFALVARAERQSSPAAGVAVGPEVYTSLLQCCVTAGSLRAGRQVHAALVKRGTYYCRNAYVGTKLAVCYARCGALDDAERAFGALPERDRNAFAWAAVIGLWSRAGLHGRALAGFVAMLEAGVPADNFVVPTVIKACAGLGLAGTGRAVHGHACKAGVAECVYVMSSLVDLYGKCGEVEDARAVFDAMPERTVVSWNTMLMAYIHNGRIDEAVDLFYEMRVEGVLPTRVSIVSFLSASAGLEAIDGGRQGHAVAVSSGLEMDVILGSSMIHFYCKVGLVEAAEAVFEQMEGRDAVAWNLMIAGYFQDGQIDKALHTCRRMLEADLKFDCVTLASIIMACVKSCITLLGIAAHGYAVRNGLDSDKTVAAGLIDLYASTGRIEQARRVFNATSPRNPVVWKALVSAYVDCGMNSEARNLVNQTQLQGMSSNATCWDSVISAFIQKGQLEDAVDMFSEMLLTKTRPNLRTWSLLISALSQNGMRQEVTSICCKMQEVESAPSPTIYSSAILAVKTAASVDYGKAIHACVVKKGLLLSRSVIQSLLNMYSSFDDRDTMDGLLRLFPE

SEQ ID NO: 50521 - protein, 89 aa, Zea mays
  Coding DNA Sequence Number=SeqID_8742
MAARAARSCRSEDNCLWRAGVDAHKEESRGKAGTVHDSMYYLVRIPRTHITSYRIFSALHQVTLFTLASAWLRLLMFQIFMQSPGAVFG

SEQ ID NO: 50522 - protein, 103 aa, Zea mays
  Coding DNA Sequence Number=SeqID_8743
  Gene Ontology: Mol. function=UDP-glucose 4-epimerase activity; Biological process=galactose metabolic process
  Homolog annotation: Hit_ID=Q8H931; Match level="QueryCoverage=83%, HitCoverage=21%, E-value=4e-20, Identity=57%"; Hit description =Putative UDP-glucose 4-epimerase
  Subcellular localization annotation: CTP_CleavageSite=40; ConfidenceScore=5.04e-01
MSVAKEAGPSSRAVLVTGGAGYIGSHAVLQLLTAGFRVVVVDSLANSSELVIRRLRSLAVEHAKNLAFHKILLGKGEMRRLILARKYKFRLDMCPCVATMYTI

SEQ ID NO: 50523 - protein, 123 aa, Zea mays
  Coding DNA Sequence Number=SeqID_8744
MPWAARSCTAGTTATCLPRGTDGGVGGVACCSAARCSGPRQGNDSSSKDPICHYPWAVAALVGDRDANGYGSNQALYIQITRLSQARWIRTKSAFVGSLVVLIHRTCSQPSLAASARAGEPPY

SEQ ID NO: 50524 - protein, 212 aa, Zea mays
  Coding DNA Sequence Number=SeqID_8745
  Gene Ontology: Mol. function=UDP-glucose 4-epimerase activity; Cellular component=soluble fraction; Biological process=galactose metabolic process
  Homolog annotation: Hit_ID=Q6K2E1; Match level="QueryCoverage=92%, HitCoverage=53%, E-value=1e-105, Identity=92%"; Hit description =Putative UDP-glucose 4-epimerase
  Pfam annotation: Domain name=3Beta_HSD; Domain location=1-210; Score=- 137.8; E_value=0.0083; Accession=PF01073.9; Description=3-beta hydroxysteroid dehydrogenaseisomerase family
  Pfam annotation: Domain name=Epimerase; Domain location=2-202; Score =155.6; E_value=1.3e-43; Accession=PF01370.11; Description=NAD dependent epimerasedehydratase family
  Pfam annotation: Domain name=NAD_binding_4; Domain location=3-151; Score=-102.5; E_value=0.054; Accession=PF07993.2; Description=Male sterility protein
  Pfam module annotation: Pfam domain module=3Beta_HSD::Epimerase::NAD _binding_4; Domain location=1-210::2-202::3-151
MVDIRDKDGLEKVFASTRFDAVIHFAGLKAVGESVQKPLLYYDHNVVGTINLLEVMAAHGCKKLVFSSSAAVYGSPKNSPCTEDFPLTPHNPYGRTKLMAEEICRDIYHSDPEWNIILLRYFNPVGAHPSGYLGEDPCGTPNNLMPFVQQIAVGRRPSLTIFGNNYATKDGTGVRDYIHVVDLAEGHLFALKKLFESSSNIGLDKWLPPYIL

SEQ ID NO: 50525 - protein, 73 aa, Zea mays
  Coding DNA Sequence Number=SeqID_8746
MTRLDNGEDASAPQVKIGAGGPTPLGDCNLADGEYVLVPEQGVAQEVAPDPAPEPAPEDLPAPALEGKPRFYA
